United States Patent Application Publication US 2008/0008996 A1 - sequence listing, part 3

SEQ ID NO: 13552 - DNA, 583 bp, Zea mays
  unsure (1)..(583): unsure at all n locations
agcttcttaaggctgggcttcggtttcctctaagcagtttcttgtgtttaagttttgaagatatttgaaatctgcctacatcaaattactcccgaagcaatcataaggatgggaatcttcgtatgggccgcaaggagccaaggcttggagccaaatgcaaaaagtttttgcagtatacacgagctggtttatgagacaaagccttggggcaaagagcagtatcataacaattttggttgttatagcttcggtgcccgctctaggtcaagctgtcccgtgccaacttttcggaagagatggcccggggactggatgaaggaatggttctatgtgaaaaatgatttgaaggcacgagaagatattaaagatatcatcatgcgccctatctggcagcgtttcggactccggaaaccgaaggtggaaatggatgaagcanccgaagaatgccagagggccttcggcatagtctgctctttcatcgggactagggacttagttcaagagcacgtggcctacaggatatggccattggtagctaactaagaaatgccgaaggaaaccatcancaacccacacgaaagtg

SEQ ID NO: 13553 - DNA, 660 bp, Zea mays
  unsure (1)..(660): unsure at all n locations
agcttgcaatgccagtggatgctaactaaggatgccggtgggtacctattggctactggtgttgttttggtcagctaactaattacgatcaaatgccattctagatcatttccctcaaaaattaaattacgtgatatggcattctagttcatttgggcaagtttttggatcgacccaatgacccagagaaatttgaacttccattcatgatgctaacctaacaccagttcaaaaggaaaaaagaactattgttaaaaccctaagcccaagccaatcaaatcgcatgggaaggggtggcggctctacctgcgggtcctgatatttatcggggtggtagatttgcgcaaactggcggtacgccctgcggacttcctcactggaggcgtncggcgagaggtggagcancgcgtaaagttccctcccgttctccggctccagagccgacgccatccccctctcctggtgcggcggctgcttaccgctcgcttcgaggccccagcggaggtggtttttttttgcttgggacgggtttatgccgaattccttttgtattttttttagtctgaatactttgtagggaacttctttgtaatgatgttcttcaactttgtgcacaaacccaccaaagccttgcccatccttgccttttgtttagggaat

SEQ ID NO: 13554 - DNA, 592 bp, Zea mays
agcttgtttcttggaatgcctttcaagcgctccctctgctgcattattcaaagtaatattccacaaactatagataagaaacatgtgaggtatataataaatttagtaatgtttaagtcaaatgggggttgccacaccaaaaaaatcgaagaaaagaaaacttccactcactgttatgcatcacaacacaacttacgctagtgtttcatatccctccgacccccattatatatacaaggcactgagctcaaaactgcccataaaatgtgaaaggaaaatgccaaaaatacaagtggtttacccatcattgatttggaacaccacaattcctcccctccaatttagacactggcatgtgaactgataggcagacacgcatgatctaagagcagtttagccactccactaatcagtgcttgataccaagcatgaccccggtactaccactaagagtattaaatacgaacatatacccacttaataaacctgatagcagcgaaaataactcttacttaataattcaataatgctcggccgagatgacagaatctttcacttacaaggtctatgtcagcagcgaaatccatggtga

SEQ ID NO: 13555 - DNA, 603 bp, Zea mays
agcttgtaacccctactaccagcaccccggtgcaagataatataaacctcattttttctcttgtgtttcatcttgcatcaatccatctgggcagggacacgcaacgtcaaattcactagtcggttgagggttctcgcgggtcccaaaccctgacaatattgctcatgatgtgtcatgaattacttttaaatttggtgaaataatttcgcttctcacattagtattaattattagtttacaaggaatcaaactattctattttataaactagacgaaatgtaaatgatgagaagactatagactaactcttttattaaaccaaataatttattaaataatgaagtcatgggtgtataatacaataatattcatgtttgttggttgcaatctaatatgattgactcaaaaaaacttgattcaaccaactagagtgttgtttccgatttggagcatgtttttccaattgtgacctaactttataaaaatgacgttctcaaatcattaaacaaattttatgttctaccattctttaaaatttccctaaagtgggggtgaataagggaaaccctaaaaattataaactttgaactcaaactttacccg

SEQ ID NO: 13556 - DNA, 634 bp, Zea mays
agcttaaacaagtttaaatctctaaggttctcctttgatttataccattagatttataaaacatacatctacattaggtcatattcaatcctaaaaattagagtgtgcagtcagtaagtgaacctattttatttaaacagagaataattctatgaacatcttgcaatttgaatcactaaatttggagttcatatgcaaaagttatgaaataaacaagtttgggaattcaaaatataaaattagggccaattctgtgaatatttaaaagtctagggctaaatctacaagattacaggggtctgcgcgcaaaaaccaaggatggcgggttgatttccaataaaccgagggtctcgttaagaaaactaccgtgcaaaggggtttcgggtgaatctaaccgtcagatctaaaaccaacgggtgagattagatctgcggccgaaggcgcgcgcgggcgatcaagcgctgacaggcgggccaaaggcgtcagcgaccgaggggggcacactgaccgaggtggcccatcgctaggggacttgggcgctgacaggtatgccaaaggcgcaaggcgcgcgtgcgccaattggtacccgcggtccgggccgtgccattaagatcggacggaggggattaaaagc

SEQ ID NO: 13557 - DNA, 571 bp, Zea mays
  unsure (1)..(571): unsure at all n locations
agcttggcaaataataaggaggagcaaatgccaagatgctgacgntnacttgtctttttattctttattggtcagacatcaagcttggcaaataatcaggaagagccgactgctgcccagcggaaaatgagagaatgttgccgccaaaaacgacagaaaggctaggattaactaaataacgctattataggagttactgttgggagtacaacgaatttgtaggtcctaaataatttaaatcagctcacattttgttggttaagacccaaatttaagggtctctcttggagatgctcttatggaaggttttcacacaaggaatttattggccgaaggcagcttctgacgcaacatacttggttcaaaaatgtgaaaactgccaaatatgtgtcagagaccaaaagcagccttcgtctttaaccaaactaatatatcccacctggccactgcaaaggtggggcctaaatttgctaggtccactttcaccagcacaaggaaacttgaaatatgttgtggtagcagtggagtacttctcgaagtggatcgaaacacaacccctaactataataac

SEQ ID NO: 13558 - DNA, 558 bp, Zea mays
agcttagcaactgttactgagtttatggttaatgggtctctcaaacagttcctgaggaaaaaagacaggcactacattttctaaagcaagaaataagaatatatttggtcttctatttctcctttatcaaaataaagcacttgtgcaggacaatagatcgccggaagagagtaatattagccatggatgctgcatttggcatggaatatttgcacgggaagaatatagtccattttgacctgaagtgtgagaatctactggtgaacatgagggatccacagcgaccaatctgcaaggtttgatcccttccccagcctttccctacgccgctttatctttctggggaattcttgtcgcaatgctggatatcttctcctgacttctccccaacacaaatactctgatcagatcggtgatctcgggctatcaaaggttaaacagcatactttggtatctggtggtgttagaggaaccttaccgtggatggcaccagagcttctgagtgggaaaaacaatatggtgtcagagaaggtaagactgctttgccttgtcactaca

SEQ ID NO: 13559 - DNA, 612 bp, Zea mays
agcttcaacaaccttcggaatatgcttcaggttatcaaccttctgcattaccatcctgcagacaaacaacggtataaggtaaaaagtaattacaagaatcaaggcaagcaataggtacaagttccatatcggtttaagaaagtttagggcttcgtccccagccaactctcgtccatccttagcccaaatctgagttatgaatccgttttcgatgcttcgggcttcactgggaatatcaattaaatctgatggcgacagactgaaggttgatctgtttactgtcttcgcatgtgtgcaaccagccttcaagaatgcggcagctgtgccgcgagaagctagcaaggcacaaaagtcaccatgcccagctatcacttcatcaagtgcatcaacttcatttctaatatgtttgaaggtatttggtatgtcttcagacgaagggggaaaatcttcagaagctagcccaaccaaaccgaagacctctttcaatcgttgcacgcagcggttgccaaaattcaagcatgtatcccgaaagtctttcaaagatttctgcaactttgtatttttgtgagcttcggcttcatattttgcttgcagatttttcttctcttgttc

SEQ ID NO: 13560 - DNA, 602 bp, Zea mays
  unsure (1)..(602): unsure at all n locations
agctttgcgactcaatgcatctgctaccacaatggcttttcctgggtgtttatggatttccaagtcataatctttaattagctcaagccatcttctctgcctcatgttcaattctgattgggtaaagatatatttcagacttttgtgatccatatatacatgacatatattccccaggagataatgacgccatatcttgagggcatgaacgactgcagctagttccaaatcatgagttggatagtgctcctcatgtcggcgtaattgtcttgaagcataagctatgacttggccctcttgcattangacacatccaagtccactgcctgatgcgtcacaatacacatcaaaaggttttacaatatttggttgagccaatactggagcagtggttaacaacaccttcagctgcttgaaggcttcattgcattttgaggaccaatcaaactttgtatcattcttcaataaacccgtaataaggttaacaatcttggagaaatccggaatgaacctgcggtaatatccagccagtccagggaaactttgaacttgatgtactatagtaggccggttctagtctaaaatattcttgaccttactgg

SEQ ID NO: 13561 - DNA, 564 bp, Zea mays
cctgcccgcctgccagcttttaaagggagaacacgtgataggtttgactaacgtttaatgtgttttagaagaccttgggcgggttgtcaagcatgtaaacaagtgggaggagcgcatcacagcaagaatgtgatgaccacttcaagacccctggagctgctgcatatggacctctttagacccgtagcctatttgatcataggatggagtaagtatggtctagttatagttgatgacttttcccgcttcacttgggtgttctttttgcacgataaatctgaaacccaatggaccctcaatcgcttcctcaagagagctcaaaacgaattcgaactcaatgtgaagaagaaaatgagcgacaacagttcctagttcaataaccttcaattggacgacttcctttgagatgaatggatctagcaccagttctgcgctccctacacaccacagtgaaatggtgtggtaaagatgtaaaacaagaccctcattcagttgccgaagacgatgctacgagaattcaccacccccgagtgtttttggacagaaaccacaaacacggatttg

SEQ ID NO: 13562 - DNA, 660 bp, Zea mays
agcttatgaaggttcttcatcccaacatgtgctagacggttatgtctttttcaacccatattagtcttatcgattaagcatgcatctagatcggcattctctttcgaataatcaagtaagtagagcttgttgtctaacacacccttaaatgctaatgaaccatcacttcttctaaagacagatacatcaacatttgtaaacaaacaattgtaacccatgtgacacaattgacttacagacagaaggttgtacccgagcgactctactaaaaatacatttgatattgagtgctcgttagtgatggctatcttgcccaagcctttgaccttgccttggttcccatctccaaagatgatcgtatcctgcgaatccttgttcttgacgtaggaggtgaacatcttcttctcccccgtcatgtggttcgtgcatccgttgtcgataatccagcttgagcccccggatgcataaacctgcaaggaatttaagcttgggttttaggtacccaactcttgttgggtcttacaaggttagtcacaacagtttttggaacccatatgcaagttttgtctcccttgcatttgaatcccaacttcctagcaacctacttttcattcttacataaaagtacaaggaagtattgcaagtatggaaaacagtagt

SEQ ID NO: 13563 - DNA, 563 bp, Zea mays
agcttatcttggcgtgctgccgcattttggcttgtggaagtatttttattactgccgtcctgggatggccggggggcaacatcaattggtcggaggtgccagtttagagatgcgccgggggcggaagaccgagtatctcgagatacccctaaaagacagcattaaaggttggcgtctggagtggtttataatggataattatggaaattctctcccttcccgctcagggagacaggcagacgttcgtactccgagttggactgaatctcccacggaccaagaagtggccgacgcgggcgtgttgcttactgaagttggcctactgaaagaaagaggcctgactgccgaagctgtggtcacagattttgttttcaaaaacattcagccgttgaaagacagggcctatccggcgtatatttaccgagggctggccgactcaacccgagttactaataagagaattccttctgttgatttggtgagccgactcgaaatgatcctcaggggtaaagttttcaaacgttggagctccaatggcatactcggcttggaacctacctttt

SEQ ID NO: 13564 - DNA, 668 bp, Zea mays
agcttggtcattttattgctaactgtcccaacaatgatagtgatcaggtctcaatgaaacaagagggaaaagaagaagaattataagaaggcaaagggcgaggctcatcttggcaaggagtgggattcggactgctcctcatccgactccgacaatgaaggactcgctgccaccgccttcaacaagtcatccctcttccccaacgagcgtcacacttgcttcatggcaagagagaagaaagtaagcactcatactagtacttatgcttcttcaagtgaggatgagtctagtgatgatgatgagatagattactcatgcttattcaagggattagatagaaccaaggtagacaaaattaatgaattaattgatgccttgaatgataggaatatacttttagaaaagcaagaggatttgttgtatgaagagcatgataaatttgtagaagttcagaaatctcttgctctagaaattaagaggactgaaatgctctctagtgaattatcttcttgtcatgaaactattgctaaggtaaaaagttttaatgatgatttaaatgctaaactagaagtagctagtaaatctaattcttgtgtagaaaatgttgaaacttgtaataggtgtaaagaatttgacattgatgcttgtagtgatcatttagtttcaat

SEQ ID NO: 13565 - DNA, 641 bp, Zea mays
agcttacaaaattcccgattacttcctcgggagtcattagtgtgtatctatgattaccacgaattaattgaacttgagtggggttaaggaagatgagtgatctaagaataaccttaaccacctcgtggtcatcccatttcttgctcccgaggttgcgcacttggttcaccaaggtcttgagccggttgtacatatcttgtggctcctccccttggcgaagacggaagcgaccgagctccccctcgatcgtttcccgcttggtgatcttggtgagttcatcaccctcgtgcgcggtcttgagtagatcccaaatctccttcgcattcttcaacccttgcaccttgttgtattcctctctacttagagaggcgaggagtatggttgtggcttgggagttgaagtgctcgatttgggctacttcatcctcatcatagttttcatcccctacggatggtacctgtgcaccaaactcaacaacatcccatatacttttgtggagcgaagttaaatgaaatcgcattaaatcactccaccaagcgtaatcttcaccattaaaagttggtggtttgcctaatggaacgcgaaagtaaaggtgtattgttagaaatgccgagggtagcgtaggggaatcttactatact

SEQ ID NO: 13566 - DNA, 510 bp, Zea mays
agcttgtggtggtgtcccttccatggcttctgtcactggaataattctttgcttttttggcctaaccgccttcttcggttttgcgggcttcttgtccttctgaaaaagcttcgttagatgtggccctaatggaatcagcttgacaggcaaggattcagtcattacctttaaaatttcctccacatcggtggtacagggtgatgcagccagttcttcctcttcatcaattgctttttgctttcgaatcgaaacttttctcttgtttgaaacaacctgtttttggctcaaaatccagctttttcttcttgcgttgttcttcatcgtctttattcagagcaccacccactcttttcctcttttggccttcggcatcctttgtgtaccgctcgtagtcagggtactcaaaatccaaagcataaattactccatttaacctccgctttcgacgagtgccgaaggccgcagtcatcaaactggtcttcttttttacaataaatttcccatatttta

SEQ ID NO: 13567 - DNA, 419 bp, Zea mays
  unsure (1)..(419): unsure at all n locations
gcttgtcanaattggttttaagaactcaagaaaaggtgaacccccgtttctttttttttgaagtgcgacattctctgggggatttgttgcgaacagcgatgcatcacaccttggacttggatgtgggctaatgcaaaaaggaaaaatgatagcttatgccctcaaggcagttgagaaaacattagaagaattatcctacacctgatcctgaactagctgctgtagtgcatgctttgaagatttggatgcactatatgattggaaccaagtgccatatcttcaccgatcacaaaaaacttgaaatacatatgcacttcaaaaagaactcaacctaagacagagaagatggcttgagttgattaacgactatgattgggaaatacaatatcacccaataaaagcaaatggtacggctgatg

SEQ ID NO: 13568 - DNA, 668 bp, Zea mays
agcttctaaagggagaacacattttgggactaaccaatgttcattttgagaaagacagggtttgtagcgcatgtcaagcagggaagcaagttggtacccatcatccacacaagaacatcatgacgaccgacaggccgcttgaactactccacatggatctattcagcccgatcgcttacataagcatcggcgggagtaagtattgtcttgtaattatggatgattattctcgcttcacttggtgttctttttgcaggaaaatcacaaactcaagagaccttaaagggattcttgagacgggctcaaaatgagttcggattgagaatcaaaaagataagaagcgataacggaacggagttcaagaactctcaaatagaaggctttcttgaggacgagggcatcaagcatgagttctcttcttgaaaactctcttggggcttttggtggtttggatgacaacctaaataaaggaccaacaagtgtgctaagtgttgaacatgtgcttaatgcaaagcaaacagggttcaacacaagtgaccaagtgtgatgggccaaaaactggattatctatagataatggacatcacaaataataagggacgtgctttaaatgagactcaatgtgcgtaactcagaaacaatccaaccaaaccaaggatggaggcaaa

SEQ ID NO: 13569 - DNA, 631 bp, Zea mays
agctttaaatgttaatcttcacctaaaagaaagattaggaattttttttgtaaggtatggaacaaattgcttgaattggtagttgatcaatagtagttccttccaagtggcattctttcaattggtaataatatattctatgaaaaggaatgtcaatatgaaggttaaattccttttggcttaaatttataaattagtgcatattgtgaattcactgctccatgtgcattaacttaaaaggaatttaatttatgcctttacgcctcataaatgatgatttgtttgccattcatatatagatatcatcattcattaaatacttctttgtactactaatacctcttttcaaagtgttttatcgactagttttaaaaggaaaagagataacaaagaaggaagtctccacaaatgatgaaaagaagaatactaatgtgacaccaccacagatagtaagatctgtcaaattggtataacaaatggtacattctatatggtggtaagtattcttaggcataagttaattcattgcaaatttgtcatgccttgaccatgatatgtaatatactcctcatgagactcttaactgaaatgaaaaggcatgtggcaaatcattcaaaaacttgatgcacat

SEQ ID NO: 13570 - DNA, 605 bp, Zea mays
agcttgaagccatggtaagtagcataggcaagtaatatacgaattgactcattcctagctacgggtgcataagtttcaccgaaatccaaaccttcgacttgtgaatatcccttggccacaagtcgagctttgttccttgtcaccacaccatgctcatcttgcttgttgcggaagacccacttggttcctacaacattttgattaggacgtggaactaaatgccatacctcattcctcgtgaagttgttgagttcctcttgcatcgccagcacccaatccgaatcttgcagtgcttcctctaccctgtgtggctcaatagaggaaacaaaagagtaatgttcacaaaaatgagcaacacgagatcgagtggttacccccttatgaatgtcgccaaggatggtgttcatggggtgatctcgttggattgcttggtggactcttgggtgtggtggtcttggaccctattcatcttccttgtcttgaacattggcatctcccccttgatcaatgttctcctcttgagatggctcatcttcttgatcttcattttcatcttcttgaacttgatcctcatcttgagttgggggaaatgcttgcatggagga

SEQ ID NO: 13571 - DNA, 597 bp, Zea mays
  unsure (1)..(597): unsure at all n locations
agctttagtgattagtgagagagatttggtgtgttcttttgagttctttctcttggattgcttctttctttcattctttcttgcgaacaactcaattgtaaccgaggcaagagacaccaattgtgtggtggtccttgcggggaagtttgttcccgtttgattgaaaaaaaaaagctcactcggtccgagggaccgtttgagaaagggaaagggttgaaagagacccggtcttcgtgaccacctcaacggggagtaggtttgcgagaaccgaacctcagtaaaacaaatccgcgtgtcacactctttattcgcttgcgatttgttgtgcaccctctctctcggactcgattatatttctaacactaacctggcttgtanttgtgattaaatttgtaaatttcagattcgccctattcaccccccctctangcgactttcaataaccaatatgatgaccttttctcccactgcacttacctaaactcccgagtggaaagcctgtagcaagaggtcaagaaacttaaaagggaaaaggcgtcccttcaagagagtctccgaatagcggaaggcgaagaaaccaacactcgtgaaccctac

SEQ ID NO: 13572 - DNA, 664 bp, Zea mays
  unsure (1)..(664): unsure at all n locations
agcttaaaatgtttatgtatatatcttatggaaaggctccacttcttttattattgtaataagacatgcacttcgagtactatcaagacttgtaataaatacatctctttctaccatgtaaaacttgagttctggaatgtaaagtgtactttgtaaaagtcttccgctctatctccaatgtgtgtgtatcaaatgtgattactgtaatatacctgttatgtgggagatccttgggatgatgagttccagttggcgaactcgatagccttagttacccggtacacgtgcacagccatccgaggccagtaaggcaaggattggtgcatgtgggcctgataacttgggagggctgccacactaacggagcaatcggctaaagtcgggaatgccttaagtcggtgcgacatgctcacgcttacatgactcggggtgatcattataccctgctaacagtagcaatcagcttaagtcggaaacaccttaagtcgacgtggggtgattactataccctactagcgaaacaatcaactcaaatcaggaacancctcaagaaaagcaacactctcacatattcaaaggtggcttcagcgccctactaacagaacaatcatttcaagtgtagcacaagtacatgcacatgatatccatgatacaccgtctcgct

SEQ ID NO: 13573 - DNA, 631 bp, Zea mays
agctttggctcctcgttggtgatttcaatttaataccgccttgtcgttattttataaatataattgggggggatattaaccttatgctgaagttcaatgaagcaataagcaatttagacttgattgaaatcccccttcatgggctcacgtacacttggtcgaacaaacagcaggagccacttcttcaaaggcttgattggtttttcatctcgcaagaatggtcgactgtcttcccggactcccatgctaagacaatgccgcgggacatctccgatcatgtcccttgtttggtttcctttaagtctaaaattcctaagcctaagttatttcggtttgagaatttctggcttgaattggatggtttcatgaacctttttcaaaccacttggaatgggatacctatcattcccgacaaggctaaaaacctgactgccaagttcaaatatgttaagaaagttctgaaagaatggcagagatcgctgccaaaaattgatattacggtgaagaacattaagctgctaattgaacttattgacaacatggaagagcacccggatctctttattgaggaatggaatttcacggaaaatttgcaacaaaaagtagcagatttgcttaataatcaaaaaaa

SEQ ID NO: 13574 - DNA, 680 bp, Zea mays
  unsure (1)..(680): unsure at all n locations
gggaaaaaaaaaaggggggggaaaagggggggcccccggcctccacaatcgaaaaacaaagttttcacccccnnnaaggggatgatgaaacgctggaccgaacaaaaacgacgcagcagcaaaatgaaaggagaaaactgaaggaagggcccacctttaatattaaagaagaaaaccctgcgccaggggtacggccaggaaaacagagggaagagcacaccacagcgggaaagggacgaccacttcaagaacccaggagcaggcgcaaaaggacctccccggacccgccaccaatttgagcatagaagggagcaaggatgggctacggactggtgataaccttacgcggtccactggggcgtcccttgtgcacgataactctaaaacccaaaggacccccaagcgcttactcaggagagctaagaaagagcttgagctcaaggcgaacaaaaaaaggagcgacaacgggtgcgagttcaaaaaccttcaaacggaggaaatccctgaagaagagaggatcaaccaccgaggggggcggtccctacacaccacaggaaaatggtgtggtaaaaaggaagaacaggacgcgcatccataaggccaggacgaggctaagacagctcaagacccccgaaggcttccggactgaagcccaaaacacgggttgccacgccaccaac

SEQ ID NO: 13575 - DNA, 168 bp, Zea mays
  unsure (1)..(168): unsure at all n locations
ccttcaatgacttccgtcactgtaatgattctctggtttttcaggctanctggcttcttcgtgtttgcgggctccttntccttctgaaaaagcttcgttatatgtggccccagtggacttagcttgacatgcgaagaatcaggcattacctttgagatttccttcacg

SEQ ID NO: 13576 - DNA, 232 bp, Zea mays
taaataattgcagtttctttgtaactcaagaacactgctagaactgtgttcagtaaaaataccaatggggctcacttatcaattgtaatggagacatttgacatacctgatatgtgttatacctttgaactactttgtatcatttagaatgtgctgcctccaattgaaatgtctaaaacttgcacacgatgaccatggcggccataatgcactatactctgtgtacccataa

SEQ ID NO: 13577 - DNA, 351 bp, Zea mays
  unsure (1)..(351): unsure at all n locations
angctgcaagcttgaacctggaagagcatngccaatatatacaatgactcacctactacggtgcatagtttaccgaatccacaccttcacttggagtatccttggcacaagtcgagctttgttccttgtcaccacaccatgctcatcttgcttgttgttcctacaacattttgattangacgtggaaccaaatgccatacctcgttcctagtgaagttgttgagctcctctngcatcgccaccacccaatccgaatcttgaagtgcttcttctaccctgtgtggctcatagaggaacaaaagagaatgctcacaaaatgtgcacatgagactggtagtacccccttatgat

SEQ ID NO: 13578 - DNA, 524 bp, Zea mays
  unsure (1)..(524): unsure at all n locations
gctngaagccgaagctcatagaaacttggaactgaaagaatctttgaataatcttcanaataagtgcttggagttctgcactcgatgcattcatcagttaaggcaagtgttccatttttgttggagccagctatgaagagtttattctttcagctgaagacctgcctggtgccttcgagcacattgaaggtgaaattaatgatctcgacgaagttatagctgggcatagcgactcttgtgccctggcagcttctcgggcacagctgttgctttattgaagtctggttgtgaacacgacaagattgttaatagaaccaacttcagcctgtcaccagcagacctagataatgttcccaatctggctcagagtattgcaaatagaattataaagttagtatggaccaacggtggtcagagcaaagctggtgacgaagctcggagccacctcaagctggtaacacaatcataccttatgcttagcctttccttngaattttngaatttgacatataatactttcgtac

SEQ ID NO: 13579 - DNA, 151 bp, Zea mays
cataccgactccaattacaccaaaacatttgtctgtggtgcacaatgtgttccacatgtgccaattaaagaagtgtcttctggttccgaccgaaccattgaagtaacggatgttgccttataactagacttgacatattcagaacattcta

SEQ ID NO: 13580 - DNA, 387 bp, Zea mays
  unsure (1)..(387): unsure at all n locations
gcttgagaaatacagcttcatcatccctggtacaaaagatgggatccctttgttacgaagcttggatcattntacgaagcatggattntntcttcacaacgcatgacaagaacggaaggtgtttttttgccgaaggctcacaanggtatgtatgacagcttcatgcatccgtaagaaataaattacaataatttacatattcgatccacagttacacacatcaaatattacaccttcgttacaataaaagcacaatgtccattctagtgtctcttacattgaccatttaaaaatgtctttacaataagtgctagtcttatntcacgaatttctctgcaacttcattagcaattaattgcgacttcataacaatagattcagtatatt

SEQ ID NO: 13581 - DNA, 272 bp, Zea mays
  unsure (1)..(272): unsure at all n locations
cacaacttttgatttcaatataagattaagtaaggaacaaagatgggtttagatatctactagcttcatcatactttgagagtgtataggtgttatattccttaacacagatctcttgaaccttatagatntcagagcatgatatccaaatcatctttctgatccaacagtatttctttgagcacaatttgagacanagacttgagcgggactttatggtaactagaatagagcatcacaatgttcgcatatatgagatgacaccatacttt

SEQ ID NO: 13582 - DNA, 104 bp, Zea mays
ctgaaatatcttcccttatcggtccactgcttgtgggacaaattatttgaccaagcaaaacactccttcttctaccacgacatgaaattctttctcgagttttc

SEQ ID NO: 13583 - DNA, 220 bp, Zea mays
gttttcactcaggaatctggagaccatttctttatttgcagaacaattgtgagaggtatttcaagatgggtagcaacactgaatgcagagacctcaataaaaaagaatatatgaggttaaacaataaaaataactttgaaacaattcgtcacatggggcctgaaatgcaccgaactaataacggacttcaaataaacttacaaaaaaactgcataacaac

SEQ ID NO: 13584 - DNA, 361 bp, Zea mays
  unsure (1)..(361): unsure at all n locations
agctngcggaccgngtgggttcggcgaagggctccgattctccccgctgtctgtacatcctccacgactggggtggtagcctcgacgcaccttctcgtcgaggtgggctctatggtggcagcggtggtgctcgttgccgaagcgaccctgggccgcatgtgccgtgttccgcgtgcgcccggtgtggaccgaggcttcccgtatgaatcgggaagtcgtggcacgatgctccggggggtacccttgccttcgggaggcagagctttctgcccgtcggaccgcggcatccttcaggagattcttgagctcctcctggatacgccgcccctcggtggtggatgtgttcgacatcgctcggagt

SEQ ID NO: 13585 - DNA, 151 bp, Zea mays
aaccaaagaattgttactgttatgcaagctatcgatgaaacgccaccgccggcctcaacatcaaagatgacaccagctggcatagctgtgggcgccgaagctaccaatctggagagttcgctatctgctattgataaagtgctcttggata

SEQ ID NO: 13586 - DNA, 180 bp, Zea mays
  unsure (1)..(180): unsure at all n locations
agctntgcaacaagagcgaccacgtacgggtcactacatgtgtgcctcatcttctccttccgccataagcaatacgggtcactacaggcgtactggtcactacaagctctgcaacaaaaagcagtacaaagagttactcgaagagtntgcagaaagccaataatcattaaacacgtacct

SEQ ID NO: 13587 - DNA, 360 bp, Zea mays
  unsure (1)..(360): unsure at all n locations
gcttcttcctcgctcgggagcttactgaggtgtgctcagtcgtcttcgtggtcngacggnggtgggaaaggctgggttggccggtctacggcggcangggctctggtggccgcggacgcgccgtgcacgggcaaacgacggtgagctgaacttcggtgagggttgagcgtgcgcggaagagtgtggtcgacgcctgagcgggttntataggcgcgggtgcnggccatggcgtctgctggccgttgcacgacgcggngcgcgcgcgggcgtgctctggcgtgcacagagcgcatcgaacacgtggagcttttcttctgcccgtgttccacagctcacccaagtcgcaaacgtgcgaatctt

SEQ ID NO: 13588 - DNA, 271 bp, Zea mays
  unsure (1)..(271): unsure at all n locations
agcttacccatgacgaggcatgtgaccagttaaagggtcctcggtcattatacctacatcgacacgggccttaatcgactcagacggagacactacaccgagactcctttctcgtgcaagtcacccgcccggtctcagcttaatcatttcaaacccaaagtttggtacctggcagaggtacatcttttccgatggtgaacccatcatggccatgatggatccatccatcaagtttatttntgaaaacnnatccacccactttgccacatca

SEQ ID NO: 13589 - DNA, 412 bp, Zea mays
  unsure (1)..(412): unsure at all n locations
catgcaagctgactggatangatacgtgtatggagtgaacaggctggttaactagaatagttttaatagctaagagaatgcgtggcgactcggatcatggtatttttgctttctatgaatagggctcgttcctagctttgctcgtcaccgtacagtaggtaactgtagtaccataattctagcaaaaatgccccccctcccaaccaccacatatttattcgaaatctttgtacttggctttataattgttggctatgtggcattgacaaccactgcggaaaaacatcaagagtactactgtcgcaaaaaaactaaattgaggttactgcgatcatataccattatataggcttaagacaatgtgtacaacaaacctacttatgccatctgacggactatatacatctattag

SEQ ID NO: 13590 - DNA, 314 bp, Zea mays
  unsure (1)..(314): unsure at all n locations
agctntatcnnatggacgtgaannagtgccttctcaatggaccaatcaatgaagaagtctatgttgagcaaccttccggctttgaagatagtgagtaccctaaccatgttataaactctctaaggcgctttatgggctcaagcaaagcccaagagcatggtatgaatgcctaagagatnttcttatcactaatggattcacaagtggaaaacccgatcctactcttattcactaaactcttgaaaatgacttttttgatgccaaatntatggtgatgatattatattttggtctactaaccagtctacatgtga

SEQ ID NO: 13591 - DNA, 243 bp, Zea mays
  unsure (1)..(243): unsure at all n locations
gaaattctagaagacttatcagaagataccgatgacagcgatagttattacgcggaaagtggngacgaagactccgaagatcggccctggcgtccaagtcacgcagtcttcgggaaatcgactatcagacagagtcatcttgataacatgacaggaaggtattttcgagatatatctattgtgagagctgacaacngagataggaactgtcctgttcctgaagaaaatgaagtcgtaatctac

SEQ ID NO: 13592 - DNA, 141 bp, Zea mays
acacgagtacttaggaccttgaacaatctgaaacgtgtcctcacgaaaatgacattcccaacattcggcgcctgaccaaagttttgcacgtatactgggaaccgcaatggagattctaatggctttagaaattccaaacta

SEQ ID NO: 13593 - DNA, 363 bp, Zea mays
taaccactagctcactaatcatatatatgatgcttgattgccattctttgcctttgcactttgactcagatgcatggcctggtcaagatttatcaaatacctgtgcgattgcttcagcttagatccacacatgagcttggaggtctcctgcacatataactacttgtcatctggtgtataatccaagcctgcatgaatttgcaggctcattactctcaagcacaaggaggtgctagaattatttggcttgattgttaagctacaaatatatactgctgctatacaaaatgggcaaatctataccaaatactactttgtggatcttatgaatcttgaagaaagaagaactttctagaggctccc

SEQ ID NO: 13594 - DNA, 187 bp, Zea mays
ctcactgatacatagcagaaatttgctttaggtgacgtaggctagcaggggcctttctagaggtgctccaggggttgaactgtacttagaatggcccaggactattcagtatgttaaaaaaaactgatgtaggtgaagattccgcaacaaaagattttggatctagaacaacttctggtacaattct

SEQ ID NO: 13595 - DNA, 311 bp, Zea mays
  unsure (1)..(311): unsure at all n locations
agctngagcccgtagaacttgtcttccaggcgccgaacctcatcgcagtatgcctncatcttcnggtcacggcagtgggagttcttcatgacttggtcgatgacgagctacgagtcaccgcgggcgtcgaggcgtctgacccctagctcgatggcgatccgcaactccgtgaccagagcctcgtactcagccacattgttggacgccgggaaatggaggcgtagcatgtaacgtatgtggttcccgaggggcgagatgaagagcaggcccgcgccggcttccgtcttcatcagcgacccgtcgaanaacat

SEQ ID NO: 13596 - DNA, 381 bp, Zea mays
  unsure (1)..(381): unsure at all n locations
accgcgatccttaagtcacctgangctgcagcttacatgtctcgtatgatcnaatctaacgaagtaaaagccctcagaatgaacttcttatgcgatctcacttattgacccaaacgacagtgcccatgtggtaggacttaaatcattagggcgaagccttctagcactaatattacagataggtgcatcatcaagaattaaaatgaataacccattcataatggattgcaaagccacaaacatgccattctttgagatcacacaaccattggtttcactcgcaaatgaataaccattcttcatcaaacatgaaggagacataattgttcgactcatactatgaactagataaacaattattaacttcanaataaaatctga

SEQ ID NO: 13597 - DNA, 191 bp, Zea mays
ttccagcgcacgctgcgatcagatgcgtcctgatcggcccgtgcatgaaaaccctacccgcccgttcatgccaacgggaaagctgcgaggctggtatgccgaatgcataccgccgacacaccaccacaaacgcagggcaccgaccctgaagtggcccatggtctgggtatgccacgcataggagccttcta

SEQ ID NO: 13598 - DNA, 274 bp, Zea mays
  unsure (1)..(274): unsure at all n locations
cttgatattacatttcaatgtaccaaatattacatagatcacacttcaactgttttcctattaacacctagtcttctcttaatactacttcggcagcctcatntagaagctgttcaacaactttatccacgatagttcggccatttgtntaatttcgcatccctttgggtgaaggcaacaaccatccacaggtctgaggaaagatattttgatactatacaaaccgcaacaagttgaatataatacacacgatcaactataattatacctattg

SEQ ID NO: 13599 - DNA, 377 bp, Zea mays
gaccgcgatcttaagcaccgagctgcactgagctcatggtgcactgggaactctctttttctcgcgctgatgcacgacagtgacttaatgaatgactcactgtgtttctcacctcgacgcctcaactaaaagccgatactctcgggtatttagatattagataccacaataatgacttggtgggtacgaaatgaaatctaaataccttacatttgtgtcgccactgacctccgagtgccactgttacaaacttaccggtgacatgttgtgctctccttgcagccgaccgacgactcctcatcgtccgtgtactgggactattcttggccgttgacatcaactctgcgcttacctgactgttctctttataaagcaga

SEQ ID NO: 13600 - DNA, 154 bp, Zea mays
agcttctaaagggagaacacgtgatacggttgactaacgtgcaattctattaatatagaccttgtgcagcttgtcaagcacgtaaacaagtgggaggagcacatcacagcaagaatgtgatgaccacttcaagacctctggagctgatgcatat

SEQ ID NO: 13601 - DNA, 254 bp, Zea mays
  unsure (1)..(254): unsure at all n locations
agtcttagcaaccaagcatgtgtcgagttcagctctatcaaaatctaccaagtatagctgaccctctaancactccttanatgctatngaatcatcacttcttctaaagacagtaacacctacatcagtaaatagacagttgtagcccatttgacatanatgggatacggaaagcanattggtatctaaggaatctacaagaaaaacattagaaatagtatgggtaggtgatatagcaattntacccaatccct

SEQ ID NO: 13602 - DNA, 443 bp, Zea mays
  unsure (1)..(443): unsure at all n locations
tcctttttttctctatagcaggaaccttacttgaacactaccncacttaaagagaatgatggtagaactctcgaatctctgggatttgaattccttggagtaccacataacacagggtgttacgcggtccttcctgctgcttgtgctgcctgagcaagctgcggatggatgactggcacatggttgactctgggagaaccttcctatcttctcttcactatctgtctttctcttctcacttttcacttgtcactgactctttctatctctttgctcttcccactggaggattctatcgatgagtataccatcatacagaggaagaaaccaaagactatgaacccatgtgcagcagtcttcaacccatgaatcaccaagcatgtgatcttaggtgcaaggagtggaaatggaattcttgcgacttgcagacgggattatcttga

SEQ ID NO: 13603 - DNA, 353 bp, Zea mays
  unsure (1)..(353): unsure at all n locations
catgcaagcttcaatcgagtccaagtgcctncatcttaagtctggttgaccacaatatgacatgcagtcttctggatgctatagnggctagttacattagctctagatttgaagttataggatcatcttcaattatgattaatatttaataccttgagttgaagntattggatttggtttggattttaagttaaaggatttggagatataagttttgaaggtatattattctctactggattaaatatttgtgttgaatatattcatatgatattcntggtgtgatgtgtaatattctatgacgatatgaatgcatatgatgtgttctttccatggacattgatcagtcacaa

SEQ ID NO: 13604 - DNA, 106 bp, Zea mays
taatggctgagatatttataacaatgctttcattaaatgcactacactgtgttaagcatcacacctatactatgacacaatgcacttcacactctttatgatatat

SEQ ID NO: 13605 - DNA, 376 bp, Zea mays
agcttcatccttcttcttacaaacagagctggacatctctcaagcgaagtgctcgggcgaatgaatcccttatccagcaactcttgcaactgccttatcaactcggctaactcaacatgtggcattccgtatggactctttgaaattggggccgttcccggttgcaactcgatggcgaattcaatattcccggcccgtggcaatcccgacaattcaatatgaaagacatctgcattctcacagaccactgagatctttttcacgggtaactcctcatacagagaacacatgactgataagaaccctgactatgcagaatcaaagtgaaattcccgcagaaaggagatataacttccacggtacgattggctacatc

SEQ ID NO: 13606 - DNA, 181 bp, Zea mays
  unsure (1)..(181): unsure at all n locations
agctngcattgggaggtgcttaataataattgaagtgttcataagagtgcatgtgagtgacaagtctctattcagaaccaggttcacccaaaggttaaaaccaaaagcgatgctcgcatagatggtgtccgctagaataaattattatatatctgggcttaatatgtcacttatatatttc

SEQ ID NO: 13607 - DNA, 483 bp, Zea mays
  unsure (1)..(483): unsure at all n locations
acatcttcgcacctttgaactagctcggctgcatcgatctttgctgntgtccagnanacacccgacctgaagaccttcccatctagtgttctggatgctgcatgtatttcacattgcccaccatggacctccttcagaagttgcttcccagtgaacgggagaatacacttcatgaggactcctgatgcaccccttctgtataatgttntcccaatgagtgtatagtgcgccgactgtctagcaatgcgctctgccgagtttttgtcgctgttcttcttcatctttatatacttaatgatcggccttctccagtcatcagagtttgactcgagttgacctataacgttgcactcttcttggtgatccatagagatactctgctctaggatttcttgcaccaagattcacggtgtgacctgagttctatcgaatactacatggacagtcatcagctgctgtgtccgatcttttctacatgatgga

SEQ ID NO: 13608 - DNA, 340 bp, Zea mays
  unsure (1)..(340): unsure at all n locations
agcttatgacaaattacacagacatttatgccagtttgcactacaacttacgcagtcattnttgtacagtcattggttcacatgcttacactcttatgcattacacaacgcatagttacgcaggttttcacatacatttatgctatgtacatatacagtcagactgctgcattactgttaaagcttatgacaaactacacatccatttatanccagttgcaagtatatttatgaatctttctggaagtagacaaacgaacacatgaatcacatttacacaaggaaatatttgtatcttatgctcttttactctctaccagatgaatcatcatctccgaca

SEQ ID NO: 13609 - DNA, 110 bp, Zea mays
  unsure (1)..(110): unsure at all n locations
tagcttatgaacagaatataggacagaanatatatctgataatttgacagnaaatacgtcagttaataaacgagcttattcaatgtgcatcaacgttatttgtattcaaa

SEQ ID NO: 13610 - DNA, 439 bp, Zea mays
  unsure (1)..(439): unsure at all n locations
agctnggcatataactgacaatctcgtagcctctgtagtactttcctcaagtgctcttcatgctcttgctcattctgggagtatgcaaggatatcatcaatgaacactactacgaacttgttgatgtagtccatgaacatgctgttcatcaagtacatgaaataaggtggcacatttgttagaccaaatgacatgaccgtgaactcatacagtccatacttggtgatgaacgctgtctttggtacattcgaaggttggattctgagctgatggtaaccttacctcaggtctatcttcgaaaacgcactggatcctctcaattgatcgtatagatcttcaattntgggcaaagggtacttgttcttaacagtgacttcattcaaggatctgtaatcaatggcacatccttttgtaccatccttctccacaaataacactg

SEQ ID NO: 13611 - DNA, 141 bp, Zea mays
tgacattagcagttaccggcgacagcatatcgtcggcagcttattctattccaactttaaggtaaagctcttttcctcatctttttaatttctatgatgaagccaaaaaattctgatgaagactattttgtaccgagtatg

SEQ ID NO: 13612 - DNA, 441 bp, Zea mays
  unsure (1)..(441): unsure at all n locations
ttaagtcacctgaggcatgcaagcttagcaggatgactgctaaagttatgtgctctcagattggcttgaatgctctaacatatgtcgatgatatcatagtcaaaagtaccaagcaagaaattcacatcgctgatctacaaaatacatttgccaattntagaaaggcaggcctcaaactcaacccagaaaaatgtgttttcggagtgaagaaggggaaatttcttgggtgtcttgtgtcaacaaaaggaatcgaggctaacacaaacaagatagaagccatacttcggatggagccaccaaagtcaagaaaaggtgcccaaaggctaacaggaaggttggcctcattgaacagatttatttcaagatcggcagaaaggaacttgtcattctttgaagtattaaagttagccaaagtcttccagtggaggccaactcaacaaa

SEQ ID NO: 13613 - DNA, 468 bp, Zea mays
  unsure (1)..(468): unsure at all n locations
agcttgtgaagattcttcatcccaacatgggctagtctgtggtgccagagccaacccaagttagtcttagcaattaagcatgtgtcgagttcagctctatcaaaatctactaagtatagctgaccctctaacacacctttaaatgctattgaatcatcacttcttctaaagacagtgacacctacatcagtaaagagacagttgtagcccattntgcataattgagatacagaaagcaaattgtaatataaagaatctacaagaaaaacattggaaatagaatggtcaggagatatagcaattttacccaatcctttgaccaaaccttggtttccatccncaaatgtaatagctcgttggggatcctgggttttctcgtaggaggagaacatccttttctcccctgtcatatnggttgtgcacccgctgtcgagtatccaactggagcccccggatgcatanacctac

SEQ ID NO: 13614 - DNA, 405 bp, Zea mays
  unsure (1)..(405): unsure at all n locations
agcttgaanacatggtaagtagcataggctattaatatgcgaattgactcaagcctagctacgtgtgcataggtttcaccgaaatccaaaccttcnacttgtgaataccccttggccaccagtcaagctttgnttcttgggaccacaacatgctncgtcttgttaggagcgggacacccaccttcgtactacgacatttgtncccaattgtgctaattgagaaactgagagcacgttatagtctaaagaaactacacgaaaaatattggaaatagaatggtcaggtgatataggcaatttaccaagtcctttgaccaaaccttgatttccatcctcgaatgtgatagacccgtggggatcatggtgtttctcatatgaagagaacattcttttcaactgagtcat

SEQ ID NO: 13615 - DNA, 157 bp, Zea mays
agcttatatatccactcgatacaaaaactggagtattatttctactaacttcactttttgcaaaaaaattattgaggtgtgtacaccaatttaatggctcttcctaacttaagcatatgggcagatttcacttggagagatgtgtccaacttataaa

SEQ ID NO: 13616 - DNA, 468 bp, Zea mays
  unsure (1)..(468): unsure at all n locations
gcttattcanaccgggtgagatggtttgggcatgtccaccggagacccccagaggcaccagtgcatataagcatcataagacgggacaatgatgtgaagagaggtaaaggtcgaccaaacttgacatgggaggaggcaatcacaaggaacttgaacgaatggaatataacaatggaagtgtgtttggatagaagtgcttggaaagaagctatccacgtgcccgaaccgtgattaagcctttttccttttaatgctctcaaaagcttttccctcccctctctctctttctctttgtggtgacaccttgttcgttttcaactctagcctactccaacttgattagtactanaaggctatactgttgntgatgatgttggtgaagcatatagagaataccctgcgtacccaaatattagtcgtttagaaaattaatgggtcataccatnctaatgcatgcgtttatatatg

SEQ ID NO: 13617 - DNA, 388 bp, Zea mays
  unsure (1)..(388): unsure at all n locations
agcttgaagccatggtaagtagcataggccattaatatactaattgactcaagcctagctacgggtgcataggtttcaccgaaatccaaacctttgacttgngagtatcctttggccacaagtcgggctttgttccttgtcaccacaccatgctcgtcttgcttgttgcggaacacccatttggtccctacaacattttggttaggacgtggaaccaaatgccatacctcattcctagtgaagttgttgagctcctcttgcatcgccaccacccaatccgaatcttgtagtgcttcctctaccctgtgtggctcaatagaggaaacaaacgaataatgctcacaaaaatgtgcaacccgagatctagtggttacccccttatgaatgt

SEQ ID NO: 13618 - DNA, 391 bp, Zea mays
  unsure (1)..(391): unsure at all n locations
nagcttgaagccatggtgagtagcataggctaatattatgcgaattgactcaagcctagctacgggtgcataggtttcaccgaaatccaaaccttcgacttgtgaataccccttggccacgagtcgagctttgttccttgtcaccacaccatgctcgtcttgcttgttgcggaagacccacttggttcctacaacattttggttaggacgtggaactaaatgccatacctcgttccttgtgaaattgttgagctcctcttgcatcgccatcacccaatccgaatcttgaagtgcttnctctaccctgtgtggctcaatagagaaaacaaaagagtaatgctcacagacatgtgcaacacgagatcgagtggttacccccttatggatgtcg

SEQ ID NO: 13619 - DNA, 100 bp, Zea mays
tgcagctcagcagctcttagctgggtggtgctttttcggagcttgagtcatgtccgcgacgcagctacacatggactctccctccacagaaacaatgacg

SEQ ID NO: 13620 - DNA, 375 bp, Zea mays
  unsure (1)..(375): unsure at all n locations
agctntgtcaccaagtgatggccaacatattgtcccagcgactgcatgatctagtgtctctaaggcagagtgcctttattaaaggccgtttcatccaagacaacttcatgttggtccagcagactgctagattgcttcaccagcaaggccaaccaagggtacttttaaagcttgacatcactaaagcctttgattctgtatcttggccttttctgcttgaagtcctccaacaattgggttntgggcagatttggagagataccttgtgtggccttttagcaactgcctccacacaggttctactcaatggagtttcggggcacaccatccaccacttgagaggactgcggcaaggggatccccctctccctatgc

SEQ ID NO: 13621 - DNA, 365 bp, Zea mays
  unsure (1)..(365): unsure at all n locations
agcttgaatcactnttatacccctgagataccagaatctttaattggtaccctcggaaaccctaaaccaaaccctaggggcttatatgcaaaattagtccacttttgggctaaagtgcaaaaaccaagccaaataggtttcttatgtcctttggttcacaaaaatgtggactttgaagcaaaacccatagttntggacttaaatgcacaatggacctcatttgagttttgctctaagtctgaaaatcaatgaatgggctcaactgtggggctttgtaacttacaaggcatatgggttttccctaggtcaccacatcaaagttgaagaccaattataggagaacaactttgcttaaggttgtaagc

SEQ ID NO: 13622 - DNA, 430 bp, Zea mays
  unsure (1)..(430): unsure at all n locations
agctggctatcaatgtggatgtgaaggtcattacttccgttactgtcctgagaagagttcactacagatcaccttcgagatgaagctatctcagtcttcagacatggaatatgaacaaaaatgcacagaaacttctaccaacaacgtaaagacaactccaccatgtaacttatcaagtcgtgcttgcattggctgtggtgataccgaccatcttgttaatggttgtactaagaaggatgtggagatcaataanggccaaaagaaaagacaacaccctcaaacccatgcataacaaagaataaacaacggaaagagacacaggaaagaaagttatgcagtgacaggaaccatccttatgataatgcagngtttttggacactagcattcaccaaccataccatcgtgttgatgatctcgacaaacattctt

SEQ ID NO: 13623 - DNA, 239 bp, Zea mays
agcttgaagaagagaagaaagagggtgaactcgttcggctgtcttatctagttaagtgcaagaaacacttcaaggaaccctgccaagaagggctggacacgatcgaagttgtgtgtaacgaagatttatggaactatatgaaaaaagaagattagtgattactgcagccttcggtttccgaccgaagcgaaaattgaatcgagcaatggatgctctacattttgagtatcttgattatg

SEQ ID NO: 13624 - DNA, 436 bp, Zea mays
  unsure (1)..(436): unsure at all n locations
agcttatccttcaacaagatgatagaacagatgacttattctttgagtatctatcgaaggatccatatggaganttggtgtaatctcttgtacttggaggaatgatctatgttcaattaggcttgtgtatatatcatatattgncatttcattgctgttataataaagtagagatgtacaaactcctgtcatgagatatatgatactctccaaacctttgttgagtcatgtgagttgtgcggactcatagatttgagtcgccatactattgttgtaaagttgtttctatattgtgatgttgaataaaatgtttgtatagtatcaagttgcatcacaaattcttatttagaatgtctntatttatacatgcatcatgatgtcaactcaacgaagaaggaattatgtcttgtggacagttgtaccacaaactctatac

SEQ ID NO: 13625 - DNA, 408 bp, Zea mays
  unsure (1)..(408): unsure at all n locations
agcttggagaagcttcacagctgtacggtgaatcttttcttggctcgggcgaggctgtgggtcaacagatagggctggccacaatggccatgctcgggcagggatggcgggcggtggtgcatgttttccacagcgaattccggtgatctctggctcgagcggagctttggttgcgcgagtgcaaacggctaaggcctctgggggcatttatntgcgatggcgatgtgcaaacgcgcggtgcggtgcgaccacgcgcgatgcgcgcgctgccgcggccagtccgcgctctgccagactgacacggcgtcgagcacgtggctctttgcttctgcgcgagtttaaaagctcataggttggagatcttcngcgtattgggcatgatcactgtacaagatatgctctctcgac

SEQ ID NO: 13626 - DNA, 173 bp, Zea mays
agcttcaggctaggcttcgtcaaacttcatctttgtcattcttcagcttcgtcatcctgcgcatatcaaacagcagaataagaaaagtgccaatttcaaggagaagggtaaagtaaccaacataagtttcttaccggcttaagatgaattcgagcttcatcacctggcatttt

SEQ ID NO: 13627 - DNA, 398 bp, Zea mays
  unsure (1)..(398): unsure at all n locations
agctngcaacaatcgagctagcattggaagcacttgacacgttctatttgaaacattacctgcagataattactaagaagctntattacatacatgtgaattaacttgcaattttctttggatttatataactgaaaatagtcctaactattcaatggcacctacaaaactcttcttccactgacacaaacaaaagcaagcaacacaatagcgagacatgaacaacaactgctgtggataactcctttaacccaatggcatatcacctccaccgcccaccttgctggagaatcccggcagcaacaagttttcctttntacctgcacagagtaaaatgtatgtttttagctgaagtggaattacccatattcattatgactcaccctgctatacacact

SEQ ID NO: 13628 - DNA, 173 bp, Zea mays
  unsure (1)..(173): unsure at all n locations
agctngagagcacctagaggnggggggtgaataggtgatcctgntaaaacttaanacttaatgccacacacttgattaagtgttagagcaataaagccaagtggctagagaggagttcttgcaagacacaatatccacacagatatccacacagagaggcacagtgtgttatc

SEQ ID NO: 13629 - DNA, 502 bp, Zea mays
  unsure (1)..(502): unsure at all n locations
agctntaaatgtgttgtcatcaatcaccaaaaaggttgcattattgaaagtgcattcatcccttttgtgagtnttggtgatttggataacaacacatttaaaggtgtaacgagtntgctaagtgttgaacaggaaattcagtatgatgaacatacttgaatggtgtataatgattagtgaacgaaggttcaacacgaggttaaataaccaatgagacaatgcaaatggatattatatgatctctatattnggttgaatatatggacaagacccgagaaatcactacatacatatgatcaaaatagaggatgaagtgattaagaggattggtcaagccaaagtgaataagatatgaggaatcgtgaattggcttcaccatattactattagtccatatatgaatatatgagaatcaaactagagcttgattgatcttagcagttatatctagatgacattcaagcgagggtcacaatattgagaaatgattctctaatggatg

SEQ ID NO: 13630 - DNA, 471 bp, Zea mays
  unsure (1)..(471): unsure at all n locations
agcttggcgccggtcactgccccaatcggccggtacaatagctcgccggagcttctccgtgcgctgccgtcgtcagggtcctagccgtgcgaagaaatagaaactggaggaccttcttgcaaagtgtcagtgtccttgttaaacagtaagggaacccgttcgcagataatcagaaacacgagggcccctatgcaaagtcgccagggcgcggagcgggcgggcgcgctttccctctggacctgggccgctgggctgaatccggcccagntctattaattcttttcctttntctttttcagcagagattcaaaaatatgtagaanaatgtagaanaatgctaaaattgtgaaactaattntcataggtttgttatattccatagtatttaataaaaataagtntgtgatttttagtggaagtaagaaattntatggtatttaaagtagttaaaagtcttaattatagaatttt

SEQ ID NO: 13631 - DNA, 380 bp, Zea mays
  unsure (1)..(380): unsure at all n locations
agcttgtgaagattcttcatcccaacatgggctagtctgtggtgccagagccaacccatgttagtcttagcaattaagcatgtgtcgagttcagctctatcaaaatctactaagtatagctgaccctctaacacacccttanatgctattgaatcatcacttcttctaaagacagcgacacctatatcagtaaaaagacagttgtagcccatttgacatatatgtgaaacggaaagcanattgtaatctatagaatctacaagaaacacattggaaatagagtggtcaggagatatagcaattntaccaagacctttgaccaaaccttgatttccatccccgaatgtgattggctcgtggggatctttgttttctcatat

SEQ ID NO: 13632 - DNA, 229 bp, Zea mays
atcttaagtcacctgcggctgcagctaacctgaacaggatagctgctttgtttcaatgtggatgggccttaagtctctctgaaatccttaaaggaaaatgcttataatatctgcagcatgctttcataagtgcataaactgtcttgagcatcactcatatactatgacacaatgcacttcactttctctatgatataaacttgctctcattaacctaattatgtgcact

SEQ ID NO: 13633 - DNA, 215 bp, Zea mays
  unsure (1)..(215): unsure at all n locations
agcttnccaggcaaagaaggaaggtccatttattgtatatggngtctgaccctggtagcacgaaatcatctcctcgtncttctncaggtcctcctcccagtcccaatctgaggtgtnctggttgaatacccgtgcgttgcaacggaaaaaatagtgccacaataccatatgtatggccatgtgttgtattgtaaatcaaatggtagtgcccacat

SEQ ID NO: 13634 - DNA, 392 bp, Zea mays
  unsure (1)..(392): unsure at all n locations
agcttgtgcaggccgagctcgacgcgatcggtgtttatacatgtggcccgtcgcccagaccggcgtcgtggccaccatcgcgggcgccgccattatgcccgttgtcgcgctacgcgccgacatggacgcgctccccatgcaggtatgtgcatatctcttgttccccacagaccttntagcggtgccgacaaaatcttgcgcgccatgtttcgtgtcccctgctctcacaatcccacatgggattggatgctcatgcatttaatttaatttaacaatagatccatccgattggtattttctttttgatctggctatttctgtttctataaactatgaaggtacatttaattaattggactcaagtgatttttgctaagattatgtgtctcaat

SEQ ID NO: 13635 - DNA, 473 bp, Zea mays
  unsure (1)..(473): unsure at all n locations
agcttgtaacccctactacaagcaccccggtgcatgataatataagcctcatcctccctctgctggaagtagggccttcttagcctgaaccaggataaatcttgtgtttcatcttgcaccaatccatccgggcagggacacacagcataagatttactagtcggttgagggcccccgggtccaaaacaccgacaacttattacaatgcagaagtcttacaaaataaaagataaatataaaacaaactaaggatcatccttggcgccataaagtcaactgggagacgccacctagatcagatcaaactcctcgttgtgtggctcctcttgaaccacatgttcttctcctgtggngggtgtgagacaacaagggtgagctcacacatgtttatcgctcaataagttgtggngaataatgtggcatgaactcaccaaagatgggagttcatgttatgtgtaaagctgatcaacaat

SEQ ID NO: 13636 - DNA, 323 bp, Zea mays
  unsure (1)..(323): unsure at all n locations
agctgtggagagtcatcattccaacatgggctagtctgcgatgccagagccaacccatattagtcttagcaattaaacaagtgttgagttcagctgtgttctcattaaaatctactaaatatagatgaccctctaacactcccttaaatgctattgaatcgccacttcttgtanagacagtaacacctatatctgtaaaaaggcagntgtagcccattttgcataatcgagaaacagaaagaaaattgttatctatagaatctacaagaaanacattggnaatagaatggtcacgtgatatagtaattttacccaaacctttg

SEQ ID NO: 13637 - DNA, 406 bp, Zea mays
  unsure (1)..(406): unsure at all n locations
agctngaggctgagtatagaataccgccctcttaattgcggaactatcaagaacaagtatcctttgcctcgtatagacgttctctttgaccagttggtcggggccaaggtgttttccaagatagaccttcgctctggctaccatcagatcaaaatacgagcaagtgatattccgaagacggcattctcaaccagatatgggctgtacgaatttttggtgatgtcattcgggctgacaaatgcaccagcatacttcatgtatctgatgaattctgttttcatgccagaattggacaacgtcgtagtgggtttcatcgatgatattctggtgtactcgaagaacgaagaagaacatgtcgggcattngcatgtagtgcttcaacgtctgcgagagcaccacctttatg

SEQ ID NO: 13638 - DNA, 175 bp, Zea mays
  unsure (1)..(175): unsure at all n locations
agcttattgaaagttgcctagaggaggggngaatattcatgttaaaacttctncaacaaaatctagaagctaactgggtaaaactgaatcgatctcgaaattcacccagttaactttggaaatgagatagtttaaatgatccacagggttcatagtagtagatctgagaagggca

SEQ ID NO: 13639 - DNA, 205 bp, Zea mays
  unsure (1)..(205): unsure at all n locations
tatatnnaactcatttctcaacatgcaaaatcgggtcttatcaagtggcttaatgaaaatatccgctaattgatcttccgacctcacttcttcccaaaagatgtcttctttatcaacatgatctcttaggaagagatgacagatattaatgtgcttggtgcaacagcggtgtataagattaatatacatttttacaacactctta

SEQ ID NO: 13640 - DNA, 431 bp, Zea mays
agcttcaggcaccaagaattagcatgtgtggttgagagatctagggttagtaaagatgagtataggcaagggcaatgaagaaggagcgccaatcgagcatcgagcatgagtttgaaacacacaaaccgtgaggaggaagagaaccctatcgaatgacatatgtgtctcacttaatagaatcctttgttcgaattttcttttgggaagagaatgaagcaaaatatgtttttaaacccgctacaacaataatactcccctatattctagaaacatattttctcagtctattggttccaattttaagcaaagaaaaataggatctagtggaggtgctctaaagttgaaattgttagcccaaatacgttacttttgtgacaaaaacaaataaatgttcaaaaatcaactttatacacaaacaagtagtaagttat

SEQ ID NO: 13641 - DNA, 438 bp, Zea mays
  unsure (1)..(438): unsure at all n locations
agctntgtataacccncggaagccttgcatctgtggcattccaagaaatatgctgaataacgaacttcttgacatttctgttgatgaacaaaaactttcaatgctgttagtgatatcccctaaccattagttctgtgagcaaaattgcagcaaagcagcgccttacatcttcccttaaacgaactcccccgcatcagtagtatgatttccttggattgttctgcaaaaatagcagatgcatcaggcaaacagaaataacagaacacctggaagcaggcaatggcagccaatattaccagagggtttggcctatagcggtatccaagcatcatccgtttcttgtattgctcatagatgtcatcttcagatgtgacctcaccaggctggacagccccaacaccaagatgatccttcttcacatctccagccataacggga

SEQ ID NO: 13642 - DNA, 356 bp, Zea mays
agcttatgaagattcttcatcccaacgtgggtctttctgcgatgccagagccaacccaagttagtcttagcaattaagcaggtgtcgaagtcaactctatcaaaatctaccaagtacagctgacccttcaacactcccttaaatgctattgaatcatcacttcttctaaagacagtgacacctacatcagtgaatagacagttgtagcccatttgacataattgagattcggaaagcacattgtaatctaaagaatctacaacaaaacattggaaatggagtggtcatgagatatagctattttacccaatcctttgaccaaaccttgatttcatccccgaatgtgatagctcgtt

SEQ ID NO: 13643 - DNA, 419 bp, Zea mays
  unsure (1)..(419): unsure at all n locations
ttaagtcacctgcngcatgcaagcttgcgaggagtattgagagccttgctgttggtttcctctatcatcactctgagaggagttattaattgacctgacgtgcctcggatgaaatcttccttcgaagcccctggtcatttcagagaacctgaatgcatcctcccttctttggcggaagtcattgtcagctcggatatactccgccatcttctggagcaagctttccaaagtttgtggtggcttcctggcaaagtatggcgctgaaagtcctggccgaagtcccttaatcatggcctcaatgacaattccattgggcactggtggcgcctgtgcccttanacgcagaaaccttcggacatacgcctaaaggtattctttgtggtcctgngtacactggaataaagcttgagcagtaactg

SEQ ID NO: 13644 - DNA, 377 bp, Zea mays
  unsure (1)..(377): unsure at all n locations
agcttgtgaagattcttcattccaacatgggctatttctgcgatgccagagccaacccatattagtcttagcaattaaacaagtgttgagttcagctgtgttgtcattaaaatcaactacatagagctaaccctctaacactaccttatatgctattgaatcctcacttcttctaaagacagtaacacatacatctgttaaaagacagttgtagcccattntgcataattgagatacggaaagcaaattgtaatctatagaatctacaagaaaaacattggaaatagaatggtcaggtgatatagcaattttaccaagtcctttgaccaaaccttgagttccatccccgagtgtgatagttcgctgaggatcttcgt

SEQ ID NO: 13645 - DNA, 402 bp, Zea mays
  unsure (1)..(402): unsure at all n locations
atccttaagtcacctgcggcatgcaagctgaggcgtaatgggagccacttgatgttgttcctcttctttcctccgcgccttaacgcgagggtgcacctcggtgggaggtgccgcttgctccaagtgatgattgttggacctttgtcatcaattcaaagctcacaaactttctatcgcttctcggagacattatttatatctagatcaccacaataattgacttggtgaattgcaaacaaggacttaaaaaccttgcncatctaagcattccttgggctctgaggtgcccttggtgacaagcttgaccggtgacattttgggctcttctggtgagacaatgacgacttcctcacgctccgtgggactggcactattcttggccgctgacacgcaattttggct

SEQ ID NO: 13646 - DNA, 347 bp, Zea mays
  unsure (1)..(347): unsure at all n locations
agcttatcaagttagctttccaatgcaaccagtcccacgtcattngaagattcctagaagaagttattgccaaaatactgaagactgcgcagaagtcaaacagccacacggaaatcaactctgcagatctcccgaagaggctccttcacattatctcgngaaaatacntttgttttgtgtttatacctcgctaaggctgggtgttactagtataaataccccctatgtctatgatgtaaggcagcttatgataatctaaaacagaacccctttgttcagctgtgtgctaacaaatattgagagtgatctctacccctttgctcttgtgaattccttcgcgggattgc

SEQ ID NO: 13647 - DNA, 380 bp, Zea mays
  unsure (1)..(380): unsure at all n locations
agctntacatactcttagccgaaggaccactggtgttttgtccatcttccacttgataaaacataattgagcaattgcctttttgataatgcgctcaagaaggtgtttttcgtacctttactacaaggccctcttcatctttttcgtggtttgagcctgtaataaaaaacgaacttatctcacgagggatactattgggagcgtgcctttgccaaaggtcctaaatataatgaatcccaaccatcttcaagtttgttgtatgaaaagtaaagattgtagtggtctctgtggataaaggaaacatgtgatatcttcggcaccaatacttatatgaaacaccttgaagtgtctgaagcatgtgatatggagatgaacggaga

SEQ ID NO: 13648 - DNA, 270 bp, Zea mays
  unsure (1)..(270): unsure at all n locations
agcttactcctccctgggaagggtacgtcatcatcgccaattatttgaagctcgggacatacaagctggccaacgatcaaggcgaggtctaccggaacgctnggaacatccgacagctacggtcgctttacccttaagatgctttcaaggccgtcatataccctcgtctctttacatacacaaataaagtctaaccgtccagggaaggtcagccttgccctcggtaaagcccgacccttcctcgggggctagaaggggggaaccccctct

SEQ ID NO: 13649 - DNA, 431 bp, Zea mays
  unsure (1)..(431): unsure at all n locations
agctntactggggatgtcaaccaaattagacggagatatgctgaagtttggcctatttacacattttgcgtgcgtacagccaacctttagaaatgttatagctgtgccacgagaagctagcagtgcacagaagtcaccgtgcccggctattacctcgtcaagcgcctccacttcgccttcaatatgttcgaaggtgcttgatatgttttcggatgagggggtaaacttttcagcgctggtcccaactgggttaataacacttttcagtcgttgtacgcagcggctgccaaaatccagacatatgtttcgaagttctttcacagattgctgcagcttcgtgttcttggcagcttcggcttcgtactttgactgcancatttttctctcttggttgaaactctctgattcttgaggagttccctgttaatcta

SEQ ID NO: 13650 - DNA, 396 bp, Zea mays
  unsure (1)..(396): unsure at all n locations
ttaattcacctgangcatgcaagcttatcaattgctgtatcagcacaagacaggatgtccttcgccagagcagcataaatcattcttgatgtcatcacaaattgaacataaatggctctaccagcctttgtcatcaaatcagctttccacccaggtaactgtgctgcagttttatcgacaattgcttgaaattgacttctcctaagctctccaagagaaagcgggaggccaatgtactgacagggaaactccgaaatggaacatggaaggagctcctgaacacaagcaagatccgcctcagaatatcgaataagaaaaacattactcttctgaacgttggtctttagaccggacgcatccccaaagatccgaaggatttccagaatcagagttatg

SEQ ID NO: 13651 - DNA, 321 bp, Zea mays
agcttctaaagggagaacatgtgatagggtttactttcgtgcaattcgaaaaagatagaccttgtgcagcttgtcaagcacgtaaacaagtgggaggagcgcatcacggccagaatgtgatgaccactctcagacccctggagctgctgcatatggacctcttcggacctgtcgcctatctgagcataggagggagtaagtatggtttattattgttgatgacttttcccgcttcacttgagtgttctcttttgcggataagtctgaaacccaacgaaccctcaagcgcttcctcaagagagcttcaaatgagtttgagct

SEQ ID NO: 13652 - DNA, 272 bp, Zea mays
  unsure (1)..(272): unsure at all n locations
agcttctaaagggagaacacgtgataggtttgacttacgtgcatttcgaaaaagatagaccttgtgcagcttgtcaagcacggtaacaagtgggaggagcgcatcacggcaagaatgtgatgaccactttcaagacctctggagctgctgcatatggacctcttcngacccgtcgcctatctgagcatatganggagtaagtatgggttagttattggtgatgacttttcccgcttcacttgggtgttctttctgcaggataagtctgaaac

SEQ ID NO: 13653 - DNA, 397 bp, Zea mays
agcttctggtagaatatatgaagccattgtatctgttatcatgaacattccggtagtatgtgagtttccagatgtattttcggaagatatgcctggactgccccctgaaagagatgtataatttgtaattgagctaaagcccggtacggctcccatctctcgaagatcgtaccgtatgccccctaatgagttggcggaattgaagattcaattacaagatctactgaataagggattcatccggccaagctcgtctccatggggttgcccccccatatttgttaagaagaaggatcaaaccttgcgaatgtgcgtggattatcgacccctgaatgaggtcaccatcaagaataagtaacctctttcaaggatcgacatcttatttgatcaactgact

SEQ ID NO: 13654 - DNA, 382 bp, Zea mays
gatccttaagtcacctgtggcatgctagcttaatgaattcttggcgctgactcaagggaactgcacagtactccactatgcacatgcattcgatgatatgtgacaatatgagggttaccatgctgacaccaaggaatagaagagggacaggttctgaataggcctcaacgctaagctctatgaactcctcaacactgtccgagccaatagctacaatgagctggtcaacttggtaatctcccaagaagattgcatcgtggctcacagggcatataaaaataggaaggcacctatggcaagatccttaactcagcttcaaagattcaagattgttccaacaatcagagcaagggaccacaacagcagtcgggacgatgggtga

SEQ ID NO: 13655 - DNA, 385 bp, Zea mays
  unsure (1)..(385): unsure at all n locations
agcttgcaaggtactatatcttgattctaatgaagtcagccgctttgaaatattaacatgatgttatgcatcattgngtttgcaggagagctgatgcagaggatccaatagaanaggctcttcttggtcttccaacggatggccttcgcgtgcttctttgatacgtccgtgaatggaatacgaagcccaagttctgtcatgttgcacagtttgtgctctttcggctattgaggaggttctctcccactgatatcctggaagtaataactttttcctgtcctaaggcattttaacttcctttcttagagcgtctcaacttttattaagagtagtgtgcatggtctgacaaacttgtgcttctcatgagacgatatctgcttttatc

SEQ ID NO: 13656 - DNA, 350 bp, Zea mays
cctagatctccatcatgtgttgaataatgccaagtcacatgtatatgccccatattgtgctggattccttcatttaattcagtagaacttaattaaaagaattcttttagcagtcagtatgactgcagcgttcagcctggctccatagcccgcgacgcctggcgtggtcatgatccttgtgggtagcacgcataggtaatcatcttggaagatgtacacctcatagggataggcatttcaaatgcggcctatagcacggtctctgggctactaaattctataaagaattatcacaagcagtgcttaggactccatcgccctatgcttttccctaaaaaatgcagtcttat

SEQ ID NO: 13657 - DNA, 464 bp, Zea mays
  unsure (1)..(464): unsure at all n locations
gatcctctcagtcacctgangcatgcaagcttgtgattntaccaattgaaagagcacaatctctacttatgaatttccatganatatcttaaaagagattgtgttantaacacaagccatagtttcctatttagcaacctctagtatatgaatgacaagaaggttactaaaacaaggaaaccttatgatatgaactaaattacccttacaagcatcatgcataacaataaatggtaaaaaagatgacagtagcatgattaattaattaagtttacatggcaacgttaattcattacatggtgagtgattaatgtagacaactcacaaccaatttatacatgaatgaatacttcacatagtattggttcaatcttctgtgaatgttgaatggacactccatttgagacacacattcttatgttgtgaaactacataaatcacttacataacaacattactctcac

SEQ ID NO: 13658 - DNA, 314 bp, Zea mays
ttaatcactgagctgcgctcattatcttagagacgtaaaaatgtttacctatagaatacttctcgaaagtctaaaatcttataccaaagtaattggaaatacttactagcgtcatactacacggatataccatctgtatttcttcaaccactcaatactacatgaaccctcacgtatatactatcttgggcctaaatcgtgtactaccagtttcaatacatttcaaatcaacaatattcagaatataactatctaacatgacttataattttaataaaatttggttctttcacctgtctcgactatgctagaca

SEQ ID NO: 13659 - DNA, 418 bp, Zea mays
agcttggacaggattctgtgatggctcctgaggaactcttctgtgcattggcagctgcaggcctaatagcaccatctaaagatagaacatgttttgcaacaaagttagacttcagctgtacaaataacattgccgaggacgaagctcttcttttgtggcttcagacactaaacgcaatgggaataacaaaggcaatcctttaaactgattcacaagttatttcgggccatgtagataagaacagcaagtcaagagatccgaagcttgaaaattaattggatgcagcccgaagtttggaagcttcctttgaacgctttcttgtgaaaaatatcctacagggagagaatgagcatgcagatttattatctaaatcagaggcacaggggctctctttgccttcagacatattttttgaaac

SEQ ID NO: 13660 - DNA, 437 bp, Zea mays
  unsure (1)..(437): unsure at all n locations
ggcaggtgttgtaagacctgctatgtctatgccaggctgtgaaactattcctggtcagcgagaggtacgacagggatctcaactccttgaagctctccggtatcccccacgagctngttccttgtaagatttagtgtcctcaacttggtgcacacactgatgccaggagctatagcaccactcagatagtttggtccaacatcaaaagtattaagcttcggcagctagctggagtcgatagcaatctcactagagagcgangttgtcctcaagctgattaccctcagcagnggagaactntacagggaagcgggcaactcaccatccagcctattggtggccaggtttacggactctagcctcctcatctctccaaagacatcagggatggagcctgttgaacttgtataggacaagtcaagntgcatgatctgaga

SEQ ID NO: 13661 - DNA, 238 bp, Zea mays
agcttctaaagggagaacacgtgatatgtctaacctatgtttctttcgtataagatagaccttgtgcagcttgtcaagcaggtcaacaattgggaggagtgcatccagcccgaatgtgatgaccacatgtagacctctggagctgcttcatatggacctgttcagacccgtcgtctatctaagcatacgaagaagtaagtatggtcctattatttgttgatgactttttccgcttcac

SEQ ID NO: 13662 - DNA, 374 bp, Zea mays
  unsure (1)..(374): unsure at all n locations
agctnntaacccccctcccgcgagaccttttcccgtttctttctaaccataatggatgcgacatcgaatgtcatacttgatgcatattcactctatttgttcccttgtatgatgtactgtctgtttcccaaattgaatggatgaatgtatgtatgcttgcaatcgcatagagaacgatcccgtcgaagagcccgaggaactcgcangagaagcccctgagcagcagtcggttggtggaggcaagtgtcccttgacctatctctgtcctattcattctttaattcacctnccgcattacacatttatgcctaaggattgactagctttngttatccatatccttgtttacctatatgggttggattattattatt

SEQ ID NO: 13663 - DNA, 436 bp, Zea mays
  unsure (1)..(436): unsure at all n locations
agcttataaagggagaacacgtgataggtctaactattgttactttcgaaaaagatagaccttgtgcagcttgtcaagcagggaaacaggtgggaagctctcatcatgccaaaaatgtgatgacaacatcaagacccctggagttacttcacatggacctcttcggacccgtcgcctatctaagcataggaggaagtaagtatggtcttgttatagttgatgattattcccgcttcacttgngtattctntttgcaggataaatctganacccaatggaccctcaagcgctttctaaggagagctcaaaacgagattgagctcatagtgaagaagataatgagcgacaatgggtccgaattcaagaaccttcaagtggaggagtatcttgaggaggaaagaatcaagcacgagttcttcgctccctacacaccaca

SEQ ID NO: 13664 - DNA, 451 bp, Zea mays
  unsure (1)..(451): unsure at all n locations
atagctctattgcacgaacaccagtggtgtatccttagcgactcgctcttaaatgctatgaatcaagaacaagacaacatagaatgttatatattaacacccttcatccttcgaaacattatttcccttatgatataatgatcttcagacgaaggttataaagtacataccttcgtacatcgaaagtatgatgataataaaaggaagcgcgtaaaatacaaaagataacatggacaatcatatagcaatatcaattcatctccattatattatcatgagagaataaaaacaatatcgaattacatttggtacctttcacttgatagacagcanaagtacgggcgtgatgccaaagcaaatgccgagttagcgtgaacagtacaggagcactcttcatctatttatatgcacgggaacgcacccatgtnaaatacatccatgtctttacatt

SEQ ID NO: 13665 - DNA, 352 bp, Zea mays
  unsure (1)..(352): unsure at all n locations
agcttaaccttgtaacgaggatatgctgtctttgtttcanagggggagggtccttaagcctctttgaaattcttaacggagaatgctatagttgtctataacatgctttcataagtgcataaactgtcatgagcattacacttattctattacacaatgcacttcacattctctatgatatagatatgacctcataaccctactatgtgcacttggccattaaacgccaagatgcgtattcctctcacgacaccatattacggggagcaatctatttatatacacctgttacacttaatcgacatatcctttaaccattgttttttctttgggccactgcatatttctctta

SEQ ID NO: 13666 - DNA, 403 bp, Zea mays
  unsure (1)..(403): unsure at all n locations
ttaagtcgcctgcagctgcagcttgccctcggacattggtccttttctattcttaaagaatggaccaggncataacgactccattactcgaacatgtctgcaggcacaatgtgtccacgtattcaattgaagagtgtcttcggttcagatcaactgttgagtgcagatgtgccttaaaccagactagcatattcaaactcctattcagtcttggtcaaaggcaggattcctgaggaaactctcagtttttaaatacatggaccccatacagaaacgaactcttgggaactcagacttttaaaagaattcctgccttactcatataatggagaatgacctcgtgaatagagaaaacccatcccccctgctgtccaaataagaataaaattgatctttcttttct

SEQ ID NO: 13667 - DNA, 432 bp, Zea mays
  unsure (1)..(432): unsure at all n locations
agcttgtgcanagtccactcgagctaactttcggagaaacccgaccccactgcaacatgacaccagagggtcaaactcaacgggcaatggatgaattcagaatcattgcagagcatattggtaccagggatctggttcaagaattcttagcattcaaagttttccctactctgaaaaaatgggaaatgccaaagttaaagggggagaagaaggaaggggatcttgtccggcttccttaccacttcaaattcaagaaatattttaagaagccctgccaagagtggctggacacagttgaggtgatgtgtaatgaaattcttggaaattattcgaanaaagaagatcaactgatgacagcagccttcggtacccgtccgaagcgaaagctgaaccgagtgcttgatgcactgggcttcgaatatcctgactatg

SEQ ID NO: 13668 - DNA, 470 bp, Zea mays
agcttcttcaccacgcgtctgtggatatcttgaggatgttgagcaatgcgtcttctccttaggtgctttgctttcttggtcctttctttattgatgagcaacttttcttttgatcctgcagcttgatgctcattcaaaaattggctttcttttgagcaacaggggttagcacatggtgatatattatctaaatgcgcacgtgtgcaagaatgaggttcacatgaatttaagttcgcaattacaacctcatgagcaacatcaagcatgatatggtcatcaactaattcattatgagaataagatagcatatcatatctttcacttggagcaagttgttctaaattaatcatttctacttgactcttaagcatagaattctcaagtttaaggtgagcaacatcagataatacatcatgattatttcttttctcaaataaaacagattcataccattggaccaaattatcatg

SEQ ID NO: 13669 - DNA, 390 bp, Zea mays
  unsure (1)..(390): unsure at all n locations
acctttctgacttgtagagtatcccnttggccacaagttcgagctctgttccttgtcaccacaccatgctcatcttgcttgttgcggaaaacccatttggttcctacaaacatttggttggacgtggaactaaatgccatacctcacttctagtgaaagtgttgagctcctctagcattgccaccacccaatccgaatcttggagtgcttnctctaccctgtgtggctcaatagaggaaacaaacgagtaattgttcacaataatgggcaacacgagatcgagtagttacctccttatgaatgtcgccgaggatggtgtcgacggggcgatctccgtgaattgcttggggactcttggtgaggcggcattgtactctactccttgctcct

SEQ ID NO: 13670 - DNA, 521 bp, Zea mays
  unsure (1)..(521): unsure at all n locations
cttaagtcacctgangcatgcaagcttatacccaatcgcctgcagatagtgatgacctctttatttcacacgaatcaatatggcttcataagaggaagaaccattcaagactgcttggcctgagcatatgaatatattcatttatgccatacttcaaaaaaagaaattattgcgctaaagcttgactgtgaaaaagtctttgatactgtagagcatgaacttatccttcatgtgctgtttcatagaggatttggacctaaatggcttagatggattcgaaatatcctacaaactggcacgtcatcgagtttatttaatggagtgccacggaaaacatttcattgcaagcgaggggtcaggcagggagatcctctctcacctttgttgtttgtcttggcggtagaattacttcagagtattatcagtaaagcaagacaccagaatttgcttcacgtacccttgactganaattgtgcgcaagattttccgattgttcaatatgctgatgacacactactgat

SEQ ID NO: 13671 - DNA, 315 bp, Zea mays
  unsure (1)..(315): unsure at all n locations
agcttggatattattcatcagaacactacggatattgttgtgacaaataaaaattcttcttcacgaagcatgaaaagaagggaagggtgtttttcgtcaaagactcaaatacggtacgtatgtaaaaattcatgcatcgtaaagaattgaacaataaaaacaggtatattatattcagggntacaagatgttacacatcgtacatttcagaagttttacaatagtacttaatcttctctcagaacaacttccgcagcctcgttcaagagccgattaacaacttcgtccatgatagcttcagccatctttttaatt

SEQ ID NO: 13672 - DNA, 297 bp, Zea mays
ctgcagcttgatggaggatgatggatgatcttgtgcttgtggacgctcctcgggctcttgggggcacacatcttcaatggaaatgttcctaagcgcgatgcatgggtcctcctcatcatctagctcatcaagatcaaattgctctacttgagagccattagtctcatcaaacacaatgtcgcgagaaactttaactaattctgtggacttgttgaagactctatacgaccttgtgtttgagtcataaccaagtaaaaagcctcctacagctttaagagcaaatttagaacttctacc

SEQ ID NO: 13673 - DNA, 386 bp, Zea mays
  unsure (1)..(386): unsure at all n locations
agctttttggaataacaggccaagcgcggaccatctgggtccttgcggcggaccgtccgcgacacaaggatgacactcggacagaaccaatgcaaaaatccacgtctgcactatggaccgtccggaggaaaagagcggaccgtctgagaccttacgcggaccgtccggcctctagcgcggaccgtccggtaggcaagaaaccgaaaaacccgaaggtgacgggttcagagaaatgaattatagcggcctcgcggaccgtccgggccaggcgggcggaccgtccgcgactggctntatctgacatctgacgacgcattaaatgcaatatagccgttgatatagccgttactgctgaccgttgccttttcggccgttgatctacaggg

SEQ ID NO: 13674 - DNA, 428 bp, Zea mays
  unsure (1)..(428): unsure at all n locations
agcttctccaccatgtcgctgctagccaagttgttgcagctacctccatcaatgatcaaacgacatgaacgctccttaatgacacactntgtttgaaacaacgtatgtcgctgattctgctctgccttctccatttgtgcactaagcacacgctgtacaatgaggctctcataatgctctgcatcatctgcaccaatctgttcttcgggtggttccttagtgcctacatcatcagccgcaagcaaagcaagtgtagcttcatccaaatcactagcagaggaatacccaccatcgtcttttaccaccaaaacacgctgattaggacaatcacgctgcacgtgtccatagcccttgcatcgataacacagaacatctcttgttctacctgtggaagctactgaagaggcactacctgccggtttctgggc

SEQ ID NO: 13675 - DNA, 345 bp, Zea mays
  unsure (1)..(345): unsure at all n locations
agcttcgacagntttccctagagtagagcttgaagtctttattgtctccagcacatctaatacgttgaccatccttttcctcttgtgggtaactgtaagatctttttgtgccttcgactttgtcacttctgccgaaggacttataacttctaatatctttgttcgttcgacctctgtctcttcaatactatcagccttcggctcacctaatttggtcaatgatgccttctgcattgcaactggctcttcagtcttctgcataagcgcacgttctttggcttcagtagccgaagaggtctcaccgncaaattcgggcactgtggccggttcaatgaagcgtggtcg

SEQ ID NO: 13676 - DNA, 372 bp, Zea mays
  unsure (1)..(372): unsure at all n locations
agcttgctacaggccttcttctttttctccatagcatgaaccttgctggaacactaccccacttaaaaagaaagagggtagaactctcgaatcttgcggatttgaactccttgaagtacctcataacaaaggtgttacggngccttcttctgctgttgctgcttgagcaggttgcggagaaatgactgacacagggttgattctgggacaaccttcttctcatcttctcttcactatcttcttttctcttctcactnttcacttttcactgcctctttctttctctttgctcttcccactggaggattctatcgatgagtattaccatcatacagaggaggaaaccaaagactatgaaccatgtgccacagt

SEQ ID NO: 13677 - DNA, 364 bp, Zea mays
  unsure (1)..(364): unsure at all n locations
agcttctaaagggagaacacgtgatangtttaacttacgtgcaattcgaaaaagatagaccttgtgcagcatgtcaagcacgtaaacaggtgggaggagcacatcacagcaagaatgtgatgaccacatcaagggcccctggagctgctacatatggaccttttttgacccgtcgcctatctaagcatangaggaagtaagtatggtttagttattgttgatgacttttcccgctttacttgggtgttctttttgcaggataagtctaaaacccaagggacccttcagcgcttcctcangagagctcanaatgagttcgagctcaacgtgaagaagataatgagcgacaacggggttcgagtca

SEQ ID NO: 13678 - DNA, 222 bp, Zea mays
cagcagagcaaaaccgttcctttgttttcatgacccccgacggctgacctgctcatacattcccaagacagaacaagtgaagcgctgatcagcagacccgggccctcctccgcctaacgccctatcctacggagtgcgggcatggcagcgcccgaccatgccacccttcagctctagcggtgccagaagcaccggagcctgatgccgcgcgcgaggacattg

SEQ ID NO: 13679 - DNA, 525 bp, Zea mays
gaaaccaatactcttcgacagagtactgataaccctcacttttgttcggtctcggaggcaacctaagctttcatcgtcaatgtcgccgaagagcagtgctgctggcttgtaccacaggatatagcataatcttttaactcttctttctcagcttcagttaactcctgaccaattatgttttggaaattgaagaccttttcctctgaagaatcttcgattttttccttttcttttccaggcactgtggccagggtctcttcagcgggccggagcagcttcatccgtggccatattcaggagcattttatcaatatcagaaagtgggggctctaaaatcccagccttgggaggttaagcttcggcgggggcaaccttccgaaaaagaagcactcttaacagcggatggtttttacgcccaagcaggcggggggggttctttcaagggcttcatcacatgaataaatccccaatttttggccccaacaggcttcttccctcccgaggggctccttttccttctaaaaa

SEQ ID NO: 13680 - DNA, 274 bp, Zea mays
tttgtattgcatctagggctcgtttttttcttttaaaaaaccgccaacacagcgagtgataaagcttaacacgagctcaaacttgtcaagtattgggttaagcttttagacttaaatcctacttactatgcaattggtggttcttgaaattgcatgaggcactaccacttaggggggagtaatcaaaactcaaatcttttatgaaaaccccttagcgcaggcgcccgaatatgcaacatctcaaacatattggctaattttcttataaaaaaat

SEQ ID NO: 13681 - DNA, 433 bp, Zea mays
ggcaagggtcttcactctcaaaaaggcagttttgtttttttatatgacgaggatatcatagtggaaaagcacaaagcacgaaaaccatgttgctgatttgcaagaaacattcgccaatttgatacaagccggtctcaagcctaatccagaaaaacgtgacttcggagtgaagaagggcaagcttcttgggtgcctagtatcatacagaaggcattgaaggtaacccaagcatgatcaaagctattctttgggtggagccacctgatttaagaaagggggctagtcgcttaccaagaagggtggcactattaaataacattcactttcaagatcgaccgaagaggaatttacctttttttaaatactgggattgggcggaagtctccaatggggttccaccccaacaaataagcctccaaagagcctgaagcag

SEQ ID NO: 13682 - DNA, 632 bp, Zea mays
tgcaagcttgtgaaaattcttcatcccaacatgggctagtcggcagtgtcatatccaacccatgttagtcttagcaattaagcatgtgtcgagttcagctctttcaaaatctactaagtatagctgaccctctaacacacccttaaatgctattgaatcatcacttcttctaaagacagtgacacctatatcagtgaaaagacagttgtagcccattttgcataattgagatacagaaagcaaattgtaatctaaagagtctacaagaaaaacattggaaatagaatggtcaggagatatagcaattttaccaagacctttgaccaaaccttgatttccatccccgaaagtgattgctcggtggggatcttggtttttctcatatgaggagaacattttcttctcctctgtcatgtgggttgtgcacccgctgtcgatgatccaacttgagcccccggatgcataaacctacaaaacaagtttagttcttgactttaggtacccaaaaggttttggggcctttggcattaaacacaagaactttgggtacgccaacacaagtctttgaacccttgggcttggccccaacatatttgggcactactttggcggatttgttagtcaacacataa

SEQ ID NO: 13683 - DNA, 459 bp, Zea mays
ttgggtttcctttcctacctcgaaaactactgctttcgagttaatagaacaggctgtgattactaattactggggaaaagcaccggttacgttgctgtgatttgtgtgaggatccggttactgggacgcccaggatctggtctgcgttggtgggaagcataggatccccttgctgcccggctatatcgaactagatgaggcctgacggttaccacccataattcaagggcctgtttgtatcccataaatcaaaaccaatatctgaaaatagaaacacacacggatttcgcgggttcatcttataaaaataccaatttttgaggggcatgacacatcccagtcttaacaaaacacaaaggctcatacacccagcttttacaaacctcataaggtccgacaggaaacacaacactgcagcgttttacacagttaattttttgtttcaatataacaacgact

SEQ ID NO: 13684 - DNA, 596 bp, Zea mays
gcttataacatagagtttcatcatttaactctaaaaatatatttgtttttttgctcgattgaattttgaagattgttctctttatttgggctatcaagtctcaataattgactctataaatataggcgttttttttttgctcgctgaatgaatgcattgctagttcaaaatcaaatggttaatagggttaaacttaccggttactttggatgttacaacttccatccttgccgcaaatgcaaatgaaatttcttctagttcaaataacaagttgcataatgattggttcagatattggttctatcatgaggtttcttcagttgacgagaaagatcacaatgattaaaatgttaagaggtgttctttacgtgtgaagatgggaaagaaatgttaaaaatttaagcattttcatatttcatccaatgcaagaattatatagcaaatttgcgattttatgtatgcgtatgaatgtaatactctcgcatcaataggggggggcatggatcacgatccaaatgtcttttccaaaatgataggacccttaaaaattttaatggacaaatgaataggaaataggggctgatttttaaacttta

SEQ ID NO: 13685 - DNA, 669 bp, Zea mays
ccgcaaccttgttgtggcggaaccgcctagattattccagcttaagtgcccatttctcttcttaaaggcaacgacacacttaaatcggaataaactgacaattcctcggatctagtccgataaagccacttaccaaggatcgaataccagtagctcactcgaaggtgaggcacagagaaatacaataaagcataataccataatttaagaaagtatcattagtgattacattatcggagtttcagaaatagtaaccataatttttaatgcagcgaaaataactaacggaaaaaaccgagtaacatggcgaagcctggccacgctactcctcctggtcctctcctgcggaagcagcaacccactcgaccgtctatcccggtggcagggatggaggccaagtcccaccagcaaccaaatcaagggtgtaccagcaaaaattatgccacaagccaagatgagtatactaatactcaactagacttacccggtgtgaggagtctactcctctacctctagaccatgaaactgttttggttgaggaggtttggttttgccaaaaacactaacttgagtctaaaaataaaattttatctttttagggttctagactaaataatttagactaggataagcaccctgactatccatacactggattcaagcaaattt

SEQ ID NO: 13686 - DNA, 523 bp, Zea mays
acacatgtcttctccaagtagtgcttctcttttttgtctcctaagaggacgcgcactctgctcgaccagctcaagtaatttttgctgccctctagcttcacatcgttcagcacaagttctaactttaactcagatgggtttgtattggccttggcaccaatcaaccccaaccccataagctcctggatcataatcctcatctcactcatcatctcactctttgtaatcccacctaaacaaccaccaattgttcccttcgttgcagcctcttcttcccttctcttgagatccatctcttctgtactcatcttcacaaaagcaccgaatcaagcagctatacaacaagcaccgacaaacacaacttccaataacagcagcactgtagccacaccaaccagcagcactacaggcacaccaactccttctggcttgcttctcttaaccgaccaactccttctcttactgcaccacgatagcaatttttagctgtccgccttcttctctgaactgaccgggggcacca

SEQ ID NO: 13687 - DNA, 580 bp, Zea mays
  unsure (1)..(580): unsure at all n locations
ccagcaagccccccagcttgncaactgatccagacgagttgtaatacaatatgttttgtgttcacaataaatggcggcgctgttagtttgaaaaggttcaagcaagagaccatgactgattctacaacagaagtcaagtacattgtaccttctgaaactacaaaagaaagtgtttggataaagaagttcctcatcgatcttggtgtgtctcttaatgcgtgctagtccattgaacctctattgtgacaacaatggggctattgtgcaagctaaggagccaaagaaccactataaaagaaaacacgtagtgaggaagtttcacctcatacgggagtttgttaggcggggtgagatcaagataagccaaatacttacatatttaaatgttgcagatactttgacaaaacctcttccacaacttaaggatgaaacacacatgaaagctatgagccattaaatatcttctatattaactctagcggcagtgggagacagttataaatatttcctagaggtaatcatagagaacagaatatttctttgtaccacgatatattgcttaattaaatattcatgaaaa

SEQ ID NO: 13688 - DNA, 388 bp, Zea mays
  unsure (1)..(388): unsure at all n locations
agcttnncatctctgaactaactcggctgcatcggtcttcttcgtttgtcaataaaatcctgacctgaaaaccttcccgactagtgttctggatgctgcatgtactccacactgccctgcatggactttctccaaaaattgcttcccggtggacgggagaacgcacttcatgaggacgcctgacgcccccttctgtataatacctccccaatgagtggataatgagctgattgtctggcaatgcgctctgccgaattcttgtcatctggctctttttcattctttatatacttaataatcgggtgtctccagtcatcagagtctgactcgggttgatctatgatgttgcactcttctatttgatccgtcgagatgctcggctggagaa

SEQ ID NO: 13689 - DNA, 572 bp, Zea mays
ctttgcacgagaaggagatggtatgaagccttggggtgcttaagaatattttttcaatttttgttgacttcaagctaccgatatccaagattgacccaaggttattttaaattgttataccttaaactcatatcatctcgagggaagttgttgatgttgtaggaaataaagaattatcctatgccgaaaagtcaaagcctacaacatggaggaatgccaaaggatggtaacacctatgcttttaagtgcaagtgtcttaacttattatttctcatgtgtcttgtgtagtcacatagaaaaaggaagcacttaagatgtttttaaacttatgtcaccattctttgaagaaattcctcttatatgggagattgcatattcatcattttcatattatggcaatctacatgctttaaattgttgcaaagctcccatggcatgtttttactttaattattctattattgccatgatctagatatagatagagatttcatgttcttaaaagaataacgtgtcatgtaacgaatttcaaattttaggacacttataaaagggaatttttttttatgtct

SEQ ID NO: 13690 - DNA, 649 bp, Zea mays
cttgactcaagaagagtaagactgatttggagatgaagcacaaaattcatatctctcaatctctttcaaagatttctctccaaagatttgaaatgggagaggcaagagatgcgtgagagagagtgggaggtgtttctcaagttaaaatcggagtttggtgcgtgctcttgtgtggggagagaggttggagtgattttatattggtggggctccaaaactagccacttggctgaacttttttgcgcagggccagtttaaccgcctgggggcaagctgacactacaggtcaaactggtcaacaagtcctgacaccggttgaaccgcccctatggccaattcaaccgcctgggggtaggctgatagacagtctgctagtcggactaacagactattggtcagactggtcaacagtccctgactacccgtgaaccgcccttaaaaccgattcaattgattttgaccagagaggtccttacaaaaaaccctcggttgaacttgccctggaccctgggtgaaccttcctaaaacccccatgaactttccctacaccccggtgaacttgccctcaccccgggtgaaccttcctggactttggttaacctgcctgaatccggtgaaactacctaaccctggttgaagttaattcaac

SEQ ID NO: 13691 - DNA, 249 bp, Zea mays
gggaaacatgctgagagcgttatggcacgattcttttttcgtttgcgcgaaaacaaaacggagggggggcactaacacgggaaaagaatcacccggcccaagacattacaaaggccctggatttcgggaaggaaactaatgaatgtgacaaaccaatggaagggcatggggacctctgcgctgggggtcgccaggggaacggccaacattttcaaaaaagctagatgcaaacacttgggagatgccaac

SEQ ID NO: 13692 - DNA, 647 bp, Zea mays
  unsure (1)..(647): unsure at all n locations
aattcatgagatggaggatggaaaatgattttttgttttagttaaantngnttctactctgtaacttacatgacactcttcgtctcactcccctatagtaaaaatgtagcacaaatatctctgttatcttgctaataatagtatacaaatatattttgcataaaactaaattagcttaattgacatatgtcataattactattattaaaatggaattcaattccaatgatccaaacagggtgtgagggtaatgttgtgcaatatgtttcttgccttatggtgtgtacgtatgaagcttataaatggttcgatagcaaaaatgaagattaagcagggttatctgatggactatataaggtacctaaaagggagtaaattatgaactttgaatgaagatacctaaaagggagtaaattatgtaacttaaaactctagttcaccaactaaaggctctaattcttgtctagtcaaaactaatacaataaataaactatccatgtgcaactgtaattttaactaagtgtgttgttacacccgtaatagttatacattctatgttccaatcctaacggctgcctaataagctaaaataagaaaacacacatttaacctagaatagaaataaataactcacaaaagcttaactg

SEQ ID NO: 13693 - DNA, 631 bp, Zea mays
agctttatcaaatggacgtgaagagtgccttcctcaatggacctttctttgaagaggtctatgttgagcaacctcccgactttgaagataatgagtaccctaaccatgtttataaactctctaaggcgctttatgggctcaagcaagccccaagagcatggtatgaatgcctaagagattttcttatcgctaatgtcttcaaagtcgaaaaagccgatcctactctctttacaaaaactcttgcaaatgatttgtttgtatgccaaatttatgttgatgatatcatatttgggtctactaacgaatctacatgtgaagagtttagtaggatcatgactcaaaaattcgagatgtctatgatgggggagttgaagtattttctaagctttcaagtcaagcaactccaagagggcaccttcattagccaaacgaagtacattcaagacattctggcaaagtttgggatgaaggatgctaagcccatcaagacacccatgggaactaatgggcatctcgacctcgacacgggaggtaaatccgtagatcaaaaggtatactggtcgatgataggatctttactctatttatgtgcatctcgaccggatattatgctttctgtatgcatgtgtgc

SEQ ID NO: 13694 - DNA, 585 bp, Zea mays
  unsure (1)..(585): unsure at all n locations
gaagattnttaatcccaacatgggctagtcggcgattccttatcctttttatattacncctagcaattaagcaagtatcgagttcagctctattaaagtcaactaagtatagctgaccctctaatactcccttaaatgctactgaatcatcacttcttctaaagacaggaacacctatatctgtaaaaagacagttgtaacccattttgcataattgagataccgagagcaaattgtaatctaaagaatctacaagaaaaacattggaaatggaatggttaggtgatatagcaattttaccaagtcctttgaacaaaccttgatttccatccccgaatgtgatagctctttggggatctttcgttttctcatagaaagaaaacattcttttatcccctgtcatgtggtttgggccatcgctatcaataatccaacttgagcctccgaatgcataaacctgcaaaacaaattaagccttggtcttacgtacccaaacagtcgtgggtcctttcacgttagaaacaagcaccttggttacccaaacacaagtcttggaccccttgtgtttgcccccacatatttggc

SEQ ID NO: 13695 - DNA, 503 bp, Zea mays
accgcgatcctttgatggacctgcagcctgcacttatcgcggttctatttattggctcagataaatttcctttgagttcgggcttccgaattcgtattcgtgcgagcgatgaaatttaaataatcaccggacgcaccgattttcggaacaacgatattccgagcatcacgaaaattttggaagagcccagacctataaaaaaagaaacgacgtcgcacacgcgacagacgaaacagatgcgatatcaaaatcgcgatagacgaaaatgattaaaatttaacctctgtttcatccactgatatttcgtgcttaagtccatactcgttgtcgagcggaatataaacacctgcggtgttacagatcgttccacggttggcgcacctactttttctgattgactaacgggccctaacgttcaatggctcttctcatagcgcgctcactgaccaaggggttttggagaccgtggatcattttctcgataataggcgataatgatcgac

SEQ ID NO: 13696 - DNA, 425 bp, Zea mays
  unsure (1)..(425): unsure at all n locations
gcattaagngggacatggacccccataggttagacatctgttttcgattacgcgaccacttgagccgttgaccctttacgaacaacaggcaagacctgtctgaaatctccaccgaaaacaatggtcttaccaccaaatggcagtgcggggcgacccattatatagcgcatgctattgtccagtgcctccacagtttagatcttatacataaaagccttgtcccagataatgagagatgctttccgtaacaactctgttgttccactctgcttcgtgaagctacatacagcaccatcgtcaatagtgagtggtatcttgaagcgtgaatgggcgggtcttcctacacgcattattgaaaccgcaacgccagatgtagctattgccactgcaatcttgccctgagtgcgtatcgtcgcaagcaccac

SEQ ID NO: 13697 - DNA, 675 bp, Zea mays
cgcttcctctaactcgacctgcggtttgcaagctttctcatttgcattgattacttaagttacaatctttattattcttagtttagaatataggattggaacttaggttgcataactccttttacactagagatagcaacacttagacgaaacctagtttataccttattgtttagttatttgcatagattttatttagtagagttatttgtggcctagatcaacgagaattttagaaggcctaattcactcctattaggtgttcatagtcttttcaaaaagcacagaaatccatattacaaacccacacaaactctcacattagcttttccatgtaccttttcacactagtctacggtgtatttgtattgagttgcaaaactcacaatcctgtgacctcaccaaaattgctaagcctaacacttcatatctagagagaagtttcaattaattgacatgacttaactttagaaaagactattagcccgcactctagttatctccttggtcttaataggttcgaactaaggacctatttgggactactccgatccaactccagaaatttggtggaatggtggagcaagtcattagatgctccacaaaatcatgaagctagagttttgaaccgaagacatttaaaacagtcattaatttttaaactacttaaaatta

SEQ ID NO: 13698 - DNA, 421 bp, Zea mays
  unsure (1)..(421): unsure at all n locations
gccttacacatntgatctaactaaaacatgagcanngcttggttttttttctcttgatactgcacagcaagagagggtcttggcataccaattcaagaaaggtctcttcccaaaggggtattataataaacgaatggtaccgctaattctacaccccaacagaagcttgaaacctatcaaaatcttcgctaccatttgaactaagggtaccacaaaatgtaacggacatgttaataataatcgtaaataaatcacactcgaatatcagcaggaataagattgaatagactataatacctgcttacatgaaacttattacagctgagttaaacaaacaaggggaaacgttatcgattacccattacgtaacacatatgtgaatcaaacaacaccttaagtgcgtttcaaaaacttaccctac

SEQ ID NO: 13699 - DNA, 569 bp, Zea mays
tccgcaagcttgccttggttcccatcactgaatatgattgaatcttgggaatttttattcttgacgtaggaggtgaacatcttcttttctcccgtcatatggttcgtgcatccgctgtcgataatccagcttgaacccccggatgcataaacctgcaaggcaaatttaggcttgggtcttaggtacccaactcttgttgggtcctacaaggttagtcacgattgtcttaaggacccaaatgcaagttttatcacccttgcattttgcccctaatttcctagcaactatcttcctatcctttctacaaatagcaaaggaagcatttaaagcatgataaattgtaaagggtccattcataacttttcttggaacatgaacaatattctttctaggcacatgatgaatatttttcctaggcatatctttaccatgcatataagaagaactgggagcaaacatagcataagaatcatacgcatgtgaatcaaaagaattacaactcttatgagaatgtcttctatattggacataaaagcatgggtctttttaatactacttgccataggggc

SEQ ID NO: 13700 - DNA, 539 bp, Zea mays
tgataatgcctggccgaagagaaaaatttcttttttgggctacattccaaactaccgtgacgaaagactttttcatgactggagtattgccccataccaagatatagttgcttcatagctgatcagaaactgctttggatcttagtgcccatcatacatggggagctgaagtggtttgtatgatgggggccatggggtagcctacagttctgctgccaaaggagaaccatcatccaaagtaaaggcatcatgaataaaatcatcataccatccatcctcgttgaataaccccttttaacgaaaatccctgtattggggccttcgatcttgttcatcttgagcaagatgacgcacttatttagtagctttcgcaatctttctttgaacatcagttagacgcgccatcttctacttatttctttgtactagctgatggatgaactccatgttcctgatcttttggaccaactcctactcctggagtgttggactggtggcctttcttttctaactacaagcttctcagagagaaagaaatt

SEQ ID NO: 13701 - DNA, 628 bp, Zea mays
  unsure (1)..(628): unsure at all n locations
gcagctttggcatttttacctaactagtagaggaagctacttccctttttttcaatagccggacaccatgtagtgaaaaacatatctagagagatgtgcatcgatcacactggaatacattatttgtttgaaagcttttatagtagcattttattaggctatctccattatcttacacaatcacatacccatatatactagagtgaattcactaccatgttctaactttaaaattttcacagcatcaattgtttttttggaaacgagtaataatgataatatttcaatttatgcgtagcaggatagctagattcatctgtgtctcatcttacaagtcgaaccttaaattaaaaacgctgtgtttatactttaaaattttcacaaaagtaatcgatctttttttggaaacgagtcataacgataatatgctaatttgggtggaacgggatggttatattcatgtgcggggcccaacttatatggncgaccttaaaattaaaacatcgcgtttacatcttaaaaaatttacgaaattgagtattttttaaatgagtaagaatgatattttgctaaattgcgtaacagatgaaccccactttaaaaagcatgaccttaaaatttaagcctt

SEQ ID NO: 13702 - DNA, 166 bp, Zea mays
aacgatgccttaaaaggtaaagaatcatcacggttgggagagacagagacacctatataagtgaacaaacagggggagcccatatgacaaaagggcgaaacggaaagcaaagtgaaaagtgaagaatgtacaagaaaaacagaggacaaagaaaggagagaagata

SEQ ID NO: 13703 - DNA, 611 bp, Zea mays
gatcctttagattggacctacacgcccgcaagcttctcctggacaagtgttgcacttaccgctgtgtgcgaagctgctttatattacaacaaaggagcccctggcgttggtggagttagtgttgttagatctatcaagtattgcttcagctcttcgaaggctctctgctggactggtccccattgaaaaacttcggctgacttcagtacttcgaaaaatggtaaatttcactctgctgatctagatatgaatctgttgagagatgccagtcttcctgtcaatctttgagctctcttctttgtacttggtggttccattcggaggatagcttcgattttgtttggattagcctcaattccttttgttgaaactaggcaaccaagaaatttccccttcttcactctgaagacacatttttctggattcagctttaaaccagcctgtctaaaattaacgaaggtctcttgcagatcagcaatgtgattatcttgcttcatgctttttacaatgatgtcatcaacataagttagcacattcctgcctatctgagaatggagaaccttcggtggcattctgctgaagcttccttcaacattcttaaacccctcatg

SEQ ID NO: 13704 - DNA, 535 bp, Zea mays
tgaattaaaagtaaacgaagtttttagcccatcttagagaagctgtttcatgcgactcttacttatatgacccaaacgacagtgccacatgtaggtatgacttaaatcattaggccgaggccttttagcactaatattacagataggtgcatcatccacatttacaatgaataacccattcataatggatgcaaaagccacaaacatgccattcttagagatcacacaaccattggtttcactcgcaaatgaataaccatccttcatcaaacatgaaggagacataatgtttcgactcatactaggaactagataacaattatttaactcccaaataaatcctgatgggaggtggagttgcatcgtcccgacggtcaacgcaacaactcttgcattattgcctacccggaaatcaacttctcctcttttcacgcttctacttcttatcattccctgcatcgaatttgaaatatgggcaaccgatccggtatcaaatacccaagacttaatataagaatcagccagaaaaatttct

SEQ ID NO: 13705 - DNA, 453 bp, Zea mays
  unsure (1)..(453): unsure at all n locations
agcttntaaagggagaacacgtgataggtttgactatcttgcattttttaaaagatagaccttgtgcagcttgtcaagcaggtaaacaagtgggaggagcacatcacagcaagaacgtgatgaccacttcaagacccctggagctgctgcatatggacctttttggacccgtcgcctatctgagcataggagggagtaagtacggtttagttattgttgatgatttttcccgcttcacttgggtgttctttttgcaggataagtctgaaacccaagggaccctcaagcgcttcctcaggagagctcaaaatgagtttgagctcaaagtgaagaagataaggagcgacaacggatccgaatttaagaaccttcaagtggaggagttccttgaagaggaagggatcaagcacgagttctccgctccctacacaaccacaagaaaattggtgtggt

SEQ ID NO: 13706 - DNA, 325 bp, Zea mays
  unsure (1)..(325): unsure at all n locations
agggagaanangtgataggtttgactaaagtacaatttttttatgatagaccttgggcaggttggtaaggaggtaaacaagtgggaagagcacatcacaacaagaatgtgatgaccactttaagatccctggaactggtgcatatggacctcttttgacccgtggcctatcctcccataggacggaccaaatttcggttaggaagtgggactaaataccataccttcatttcttgagaaaatggcgacttctcgcttgtatcgctcccacgaccatcccgcttttgaagtgctttcatttaccacttgggggttcccttaatgaa

SEQ ID NO: 13707 - DNA, 482 bp, Zea mays
cccaaccacacaggaaaccagtgggcgcccactcccgcgctggtggctttacacaaaagcccttgcctttttgaacaaccaaaagcagaaccgaagcactattcaatgagtcaatgacgcctcccagaaaaccccttggacttttaattcttcgcaagggaaaggcctctactgcgccgcgcggaggatgaactcctgcgagcatagcaaccggcggaccaggccaaaccagtgcttaccgtggcctaaacaaattattacctatagaacgttcccctaagtaatttgaagaatggccattactttgccctgtcccggggaccgataacctcccgaggggataaagggtgtccgcgagggggggggagctaattaaatggaaagttaaggggttaacggggggctaccgatgcttaaccaaccaccaaaaggcgctggctaaccccgaattatattggccgggaaaaactgttctttacggg

SEQ ID NO: 13708 - DNA, 457 bp, Zea mays
  unsure (1)..(457): unsure at all n locations
ctttttcaaatggacgtaaatagcaccttcctcaatggaccaatatttgatgaggtttacgtanaacaacccctggctttgaggatgacaggtatctcgaccacgtctacaagctctctaaggcgctctatggacttaagcaagccccaagagcatggtatgaatgccttagagatttccttattactaatgttttcaaggatgggaaagttgatcctactctctttactaagacttgcaatggtgatctttttgcatgcccaaaatatggcgatgacattatatttgggtctactaatcaaaagtcttgtgaggagtttaacagggtgatgatgcaaaagctcgagatgtcaatgatgggcgacttggactacttccttggaatttaagtgaagcaacttcgggaaagaacctttttatcccaaacgaaatacacctcatgacttgctcaataaat

SEQ ID NO: 13709 - DNA, 184 bp, Zea mays
ggaccatatgaagacaagccaaaaaggaacatattattgtttttatgaaaaaaaagaagaccacctggtctgcgcaacaatagaaggtccaatgccacacaccagaaaatatggtgaacggtacggacaaacgggccactcgtaggttaaaccaggctccctcgggataaattcccaaacaatt

SEQ ID NO: 13710 - DNA, 628 bp, Zea mays
  unsure (1)..(628): unsure at all n locations
gcttgaagccatggtaagtagcataggcaagtaaaatgtgaattgattctagcctagctacgggtgtataggtttcatcgaaatccaaaccttcgacttgtgaatatcccttggccacaagtcgggctntgttccttgtcaccacaccatgctcatcttgcttgttgcggaagacacacttggttcctacaacattttggttaggacgtggaactaaatgccatacctcattccttgtgaaattgttgagctcctcttgcatcgccaccacccaatccgaatcttgaagtgcttcctctaccctgtgtggctcaatagaggaaacaaaagagtaatgttcacaaaaatgagcaacacgagatcgagtagttacccccttttgaatatcaccgaggatggtgttcacggggtaatctcgttgtattgcttggtggactcttgggtgtggcgggcttggaacttgttcatcttcctcatcttgatcatgggtatctccccattgatcattgctctcctcttgagggggctcaactttttgatcttctcctttatcattttgagctttatcctcatcttgagttggtggagatgcttgcatggaggaagatgggttgaccctaaacatttt

SEQ ID NO: 13711 - DNA, 648 bp, Zea mays
aatgaaccaaatgtcttagattctcggaactttgattgaaatcttgcacacattgctcattttatatctttgatcatggcatgtctcttttatttgatacaaatgtatatttcgtattcttcttgtgccaaggctaagactaatgtgcttccaagtgtatttctatccttagtcttagattgaaagggaaatcaagttgtaggcaaaggcaaggcttccactacattttcattagtaccgtataccctttgctctactcatgtatttacattcatatctttcttgataaagacccctagattttttcatttttggcgctcaatgccaaagagggagaaattaataggccaaagcaaaaggaccgcaccaccaccctgttttctgaaaaccttttcttccaaattagaactattgcgtttgcaaaaaccatcttaacagctaaggggagaactcttttagggggagcctttatttatccaaaggaaaagcatttgaaaaggggggagaatctttcaaaacttgaaaacgcctttagaaattatattcttataccattggatgattgcaaaataatttgaaaagttgtcttcaaaagatttaaaaacaagctaaattgtgcaaatgtggtccaaatttttaactatatca

SEQ ID NO: 13712 - DNA, 615 bp, Zea mays
  unsure (1)..(615): unsure at all n locations
ggccaaaattatatagaagattattacagttcatgacattttttatgtatgctatacagctataactaataaaaaagtatttaaaatcatgaatatgttgaaggagaggatgatccgttggctttatataaaaagccgtacgcgtaatcataataagctagctcaggaggaaagaagcgtactaaaatagatgaaaaggaggatgatcggatcatccattctaatataagaatatcctctttattttattttattcggcgcgctttactttaaaaataaagtagggagcgacaaatattcgagaacataactcaagaacgaaggggttataatataataaaatacaatcattggttccattccggcgtgctgagttggaatcggaacagaacacgccctcctaggtatgtatcgcctccatcggattgaccgaagctagcttgttactttgcattgaaaaaattggttaagtacttgcttaagatgcgtgccatacgtgtaaaaaaatggccatatgccattttttttgttgggatggtttggttngtaacacgaaatcctttcgttcagtttgcccgataagggggatgaattattattagtaataaatatttg

SEQ ID NO: 13713 - DNA, 569 bp, Zea mays
  unsure (1)..(569): unsure at all n locations
acaatncggtcccacacggcggtgggacgcgaggaatatttctctttttgctggggaccaaatgccagggtggctgctgcgcggggcccacccgtcggtgtcagctggagcgtggcgcgcgcgagacgtctgtagttgggccacgcagtggttttcttcagtgggccaaattgggtgccgcaggcccaattaggttagggctttttcccattttctttctattatcttctttccttttcatgtttgaattcttaaatttgaatccaaattcgactgtgaactttgaatttgaactagatgtactagtccaagatgttgatatgaaatgacacatttatttatatattttccttacattggatatagggcttttcctattttcctcttcaccttctatatcttatttctcaaattattgggccccaacattaggtttaatgttccttccactatttgcatatttctttatgagtgaatgcacaaacaaataaatcacaggatgatgcatgaattatttacgtgtaattggttgtttaatccccttttgatgggttttaatcacatgggat

SEQ ID NO: 13714 - DNA, 507 bp, Zea mays
ctccaagcttggtcattttattgctaactgtcccgacaatgatagtgatcatgttcaatggaacaagaaggagaagaagaagaactattagaaggcaaagggcgaggcgcatctaggcaaggagtgggattcggattgctcctcttccgactccgacaatgaaggactcgccgccaccgccttcaacaagtcatccctcttccccaacgagcgtcacacatgccttatggcaagggagaagaaggtatgtactcgaaactctacttatgcttcttcaagtgaggacgaatctagtgatgaggatgaaataaattattcatgtttatttaagggcctagatagaaccaaggtagataaaattaatgaattgattgatgccttgaatgataaaaataagcttttagaaaaacaagaagatttgtttgtttgaaaacattaccaatttgtagaagcacaaaaattttatgcttttaaaagtaaaaaaaatgaaatgctttcttgggaatt

SEQ ID NO: 13715 - DNA, 602 bp, Zea mays
agcttgaagccatggtaagtagcataggctaataatatgcgaattgattcaagcctagctacgggtgcataggtttcaccaaaatccaaaccttcgacttgtgaataccctttggccacgagtcgagctttgttccttgtcaccacaccatgctcatcttgcttgttgcggaagacccatttggttcctacaacattttggttaggacgcggaactaaatgccatacctcattccttgtgaaattgttgagctcctcttgcatcgccaccacccaatccgaatcttggagagcttcctctaccctgtgtggctcaatagaggaaacaaacgagtaatgttcacaaaaatgagcaacccgagatcgagtagttacccccttatgaatgtcgccgaggatggtgtcgacggggcgatctcgttggattgcttggtggactcttgggtgtggcggacttggctcttactcatcctccttttcttgatcatttgcatctcccccttgatcattgctatcatcttgaggaggctcggcttcttgatttgcttttcatcattttgagcctcatcctcattttgagtttgaggagaatgcttgcatgga

SEQ ID NO: 13716 - DNA, 567 bp, Zea mays
agcttattatatccacaggcaaaacagattcctgcccatacacaagtttttaggagaaaccttagtagcataatgcttattctatgatcccacaaggcctcagacaaaacttcaatccaatgcctaggatgatcagatattttcttcttaataaggctaatcaatatcctattacttaactcggtctgaccattggcttaagcatgatatggagatgaaatgagcaacttaatcctatatgatccagcaaactcacgaacctctttggaaataaaagaagtcccctaatctgtagtcaaagttttggaatgccaaatctatggataatatgcctagtaacaaactcaatcacctccttatgtgtcatattcttcaaggcaacaacttcggtgcatttggtgaaatagtatgtagttgctgatacaaacctatgctccttggacgatgatggatgaatttcgcccacaaagtcaaaaccccagcctctaaagggcccaaacttgataatgtgatgtaattcgacaataagaaccatctataaatcactgatttttgacacactttata

SEQ ID NO: 13717 - DNA, 583 bp, Zea mays
tcttcatcccaacatgggctagtcgacgatgccagatcctacccatgttagtcttagcaattaagcaagtgtcgagttcagctctatcaaaatctaccaagtatagctgaccctctaacactcccttaaatgctattgcatcatcacttcttctaaagacagtgacaccaacatcagtgaatagacagttgtagcccatttgacataattgagaaacggaaagcaagttgtaatctaaggaatctacaagaaaaacattggaaatggaatggtcaggagatatagcaattttaccaagacctttgaccaaaccttgatttccatccccgaatgtgatagctcgttggggatcttggtttttctcatatgaagagaacatccttttctcccctgtcatgtggtttgtgcacccgctatcgagtatccaacttgagcccccggatgcataaacctacaaaacaattttagttcttgactttaggtacccaaacggttttgggtcctttgcattagaaacaagaactttgggtacccaaacacaagtcttggagcccttgtgtttgcccccacaaatttggcacta

SEQ ID NO: 13718 - DNA, 123 bp, Zea mays
  unsure (1)..(123): unsure at all n locations
gaggggcntttaatacctcagaaaaaaaggctttctttttttgtgccaagggattcacaacgaagggcaggcccctgcctctccaaaaatagtaacaacccccctaacacccggaaaagggcg

SEQ ID NO: 13719 - DNA, 426 bp, Zea mays
  unsure (1)..(426): unsure at all n locations
ctgntagatgccaacaaatataacttttaggacagttctctttcttatttaagagtaagagagcaaaggggcccatttacacgacttttgttatttttgcctaaagaatatcctttttattataaacctcaaattcctagaacaggctatagtgacccatggcaacccactgtaatttttacagaatttgtggaaaaagttaaaccactgttgtagttcaaacctccactataattcataaatagaaaatacagaaaggaaaatgaataatagaaaatggtgtcatcctaaaaccctatgtaaattgtccactgaaatatataaaggaaataccaattcactatgcctatctctaacaaaacctaaacctagagtgataagccataaccacttagagccacgtatgacccaaaaaaccctaaggta

SEQ ID NO: 13720 - DNA, 594 bp, Zea mays
atttatccaatttaaaacaagcaccatctcttaacttttttttctatggataaactcaacacaagagatggcattagtagcacaagcactagtttcttatttagcaaccctttatatgtgaaaggcaaacgagttgctaaaatagagaaacctcataatatggactaaatttcccttgatccctcatgcacaatatattttgaatgacatggataatatgcatggttattcaatgaagtctaaagggatgacttaatccatattatggtgagtgtctaatatagaagaatcaaatccaaattaactagatagagaatacgtcacataattttggattgttcaccatatgataatattcattcaacttccaattagacctttatttcataatcaacaactggtgtatatcctcaagtgcttcttttcccttagtggctacacaagtcacaaaaagataagatttgaaaataatatgcacttgagattcagttgttaccaccctaactactatcttcaaagatgatttatacattcattattcaacacccaactttgatccattgaaggagtgatcctgcaaaaaaaatttaagct

SEQ ID NO: 13721 - DNA, 595 bp, Zea mays
tctacatggaacagtgctagaaagaaacgtctctttttttttgtgtgcttgtgcatatatccgtctcctttcgttcatgcatccatcagtcggtccactgctgctgccgccgccccttttcgtactaaaaaaaaggagatctatctgtcacgacgatgtgggcgtcaggtttgctttggcgtctcggcgacggcgatcgcaaataatcaaactgcccatgattcgcacacatgcatgcacgtacgctacttgcttttacatacagtaaaaaggattaggttggtaacattaaattctgtccaccgaatttaccatctatggctaggggaatcccaccatcattgacgcattattctgcacaaacgtatggctttctttagaaaatattctaatagaggagttattagcactctaattcttttttacattacatatatgtatgatatatgcgtacgtgtgtgatgggagaaaaaagggacatgcagctcggctggctttattgaaggcataattgcctccggctgaactgaagaaactagcatgcatgtacaccgactgcgtgcacgctgccatgcttcccaacgtatatgctggg

SEQ ID NO: 13722 - DNA, 613 bp, Zea mays
gcatgcaaccttatgaaaattcttcatcccaacatgggctagtcggcggttttttttccaacccatgttagacttagcaattaagcaagtgtcgagttcagctctatcaaaatctaccaagtatagctgaccctctaacactcccttaaatgctactgaatcatcacttcttctaaagacagtgacacctacattagtaaatagacagttgtagcccatttgacataattgagaaacggaaagcaaattgtaatctaaagaatctaccagaaaaacattggaaatggaatggtcaggtgatatagcaattttacccaatcctttgaccaaaccttggtttccatcaccgaatgtgatagctcgttggggatcttggtttttctcgtaggaggagaacatctttttctcccctgtcatgtggtttgtgcacccgctgtcgatgatccaacttgagcccccggatgcataaacctacaaaacaagtttaattcttgactttaggtacccaaatggttttgggtcctttggcattatacacaagaactttggtacccaaacacaagtttttgaacccttgtgcttgcccccaacatatttgggaactaacttggcg

SEQ ID NO: 13723 - DNA, 500 bp, Zea mays
  unsure (1)..(500): unsure at all n locations
taaccgcttagcgcgngtttatttttttttttagggatcaagcaaaactgggattcttacgcgaattctatgtggtgctaacatcacctaactgacctggggcatgaccgatgacgttatgacaaaatgattactaatgcacaatgatatatcataacctttaggcgtgattcagatctacagaaatatgtccaggcaataatatccctgtaaaagggatccactaacgggtgttatataacaatcataccagcgatatactttgagtggtacaggacttaaagtgatccacaaccttaagagatcatgacctaaagagagcaacttttttactcaaaatagtccatgcaagtgatgtcaaggatcctatcatgcatatggtgtccatcggaaaactattgaggaacaacaagctcgtataggactcccaaggacattttccgggagccttaaaacaacctttctatggacaaaaagacaaagtgggagaacctttaaca

SEQ ID NO: 13724 - DNA, 339 bp, Zea mays
  unsure (1)..(339): unsure at all n locations
aagcttgtgggatctgtccactgaagttattccatgccaagntcatatttttcagatctgncaagntccccaaccaatctggaatcctccctgtcatgtagttttcggcggcactaagcattgtgagtcctgtaaggttcagcactgaagaagggatgcttcctacgatgtcattgtcgcggaaattcaaaatttcgagttcggaaagacggtcgatggactgaggaacgttcccggacaggtggttaacacttaagttgagaaaatggagagcaaacaagttaccgatactggaaggtatcttgccctctangttgttgttcgacagatccagggttt

SEQ ID NO: 13725 - DNA, 662 bp, Zea mays
  unsure (1)..(662): unsure at all n locations
agcttgaagcggatattatccgctaccgtcgacagcatattgtctgctttttattctattctaatttcaaggtaaacattttgtgtctaactctttacttgtggtacgaaaatattttctaacgaaggctatttgtgcacagagcacttttaagcaaggcattaaaaatgcaacaagatttagaggataaaaggcaagaagttataattgaaaatttagaaaacaaaataaaggagcaatctgctgccattgagaagaaagacctcgagctacaaacagccgaaggcttattagtggatgctgaagcaaaaataacagaattaaattcaaagcttctttctcagtcagaaaattttgaacaagagaaactgaagcttgatgcaaggcttgaagccgaaactcaaagaaacttggaattgaaagaatctttgaaaaatcttcaaaataaatgtttggagttctgcactcgatgcatttatcagctaaagcaagtgttccattttgtcggagccagcagtgaagagtttactccttcggccgaagacctgcctggtgcctttcgacacattaaaggtgaaattaatgatcttgacgaagntatagctgggcatagcgacttttgtgcccttncaactttgtggggcacaacttgtgcttttttt

SEQ ID NO: 13726 - DNA, 456 bp, Zea mays
caagctttagtgattaaagatagtgatttgttgcgatttttttatctctttcgctaggattgcttcttgtctttctcattcatcttgcgagcaactcaattgtaaccgatgcaagagacaccaattgtgtggtggtccttgcgggaacttaacgttccgtttgattgagaagagaatctcactcggtctaagtgaccgtttgacagagggaaagggttgaaagagaccctgtctttgtgaccacctcaacggggagtaggtttgcaagaaccgaacctcgataaaacaaagtcttgtgtcacactctttatttgctcgcgatttgaattacaccctctatcttggactcgttcttatttctaacgctaacccggcttgtagttgggcttaagattgtaaatttcagaattgccctattcacccccccccccctttaagcgagtttttagtatgatg

SEQ ID NO: 13727 - DNA, 654 bp, Zea mays
cttccgcatggcccactctttcatagttgaaaacatttgaagccttttttcctttctaagtccctagtgccaatgtgctctgcgataatcctgaattcagccagtgcaatttgggttggaccctctggtgtcatattacacgggggtctggtctctccgaagatcagctctaatgggctctggaccaacttctccttatcatcgtcaactttgacgtagaaccattccgatttccagccagccggccatttgcttcggtagctgatcacgggaaattttgtagtcttccggtaagcaaaattgtagcagccgaagttttcatgtaacccatctcttctggccttggtttggtaatgcagctcatgcactcgacagaaaccttcggcaaacggttccaccccttggcttcggagagcccaaatgtaaacgctaaacctaacgatagctttaggagttaactcatgaaagtagatcccaaactttttcagcacatcagcaatcatcttattcaaagggaatctcaaaccagctttggggaaactcttaaaaactactatttcatcttttcctggcttcgaagaatttcttttcaccaagcgaacaactttttcttttcttatttgaatagcccattttcaacatttaagtaggtca

SEQ ID NO: 13728 - DNA, 564 bp, Zea mays
tatcataaatgtgagaagctatgaataaattttttttttttttgttaaacattcctagaaccttctacaacaattatcactaaccctggggtatgcatgaaattatgcaatggtttttgaatttctttagatattctgggcacaaccatcaattttagatttttgttgcaacgatcaaataaaaaattctctagaacttgatatttgctatgatctttttagaataatatacaaacgaacttcatccatacgttatgtggtgcctatataaaacaaatatcatcgcttgccatgaaatcataatacactataccccttctaccacaaacatccaaagtcatgggagaagtcaaccatatatttagtggggtgttcggacaacactatgtcaatacaccgtttgttgcaccgaccatcaaatattccataaaatcgttttagcaaattccattccctaaaatgaacaacccatatctgtttcataaatccccaaaactttaaaattcttttgcccagaaccacatattttttaaacttagtcgggctctaaaatgtcatttggat

SEQ ID NO: 13729 - DNA, 445 bp, Zea mays
  unsure (1)..(445): unsure at all n locations
cataaaaaatanaaacatacaataaattttatgagtgaggaacttctttttgagaacaatagaggaaaaacaattgagtggacatgaaagtagtagttcagcagttggaatggcaaatggaacaagtgggcaggagctacatcggtgcttcaaagacccacacaaattatctgcctacaaccacacaaacaggagacacaaaacagcaaatgtccaacatcaccctagtgtagatactagatacttgataataaaagctaattacatgtggatcatcctcactatgtgaagtatatgtaatatgtaaacatataagtatagcttttgatgtgccattaaaaaggggcttatcagcacagaaagcttgcataaactctgatgcctggggaagagaattgctacatagtgttacccctgcttttttttgcaagttggactattcaat

SEQ ID NO: 13730 - DNA, 570 bp, Zea mays
taatgcacaaattcttcccctttgacatcaaacaccttttttttattttttctagaacatatgatgatgttgagggacaacagggtattaagcagggacaatgcaacacactaattttactcccccttacacattaaacatatgcaacacatgccttggagaaaaattaaagtgcaaatatgccaaaaggtcaatacctccttttgcacctttaccaaggtatggcgtactttccatctaagtagacagagtttcttttgtcatcaatgcaagattttcatcttgaaaggtttatctctatggagctcctttacacttatgtctgaccctttatcctgacctttttttgttgctaagatacaaaacttataacaagttatagtattgcggcacaagacgaagcttttattctagtcattaccaaaagataccaattgaaacacactaccaaggctaccaattgaaaaaacatcactgtcataccttcatgatatttaaagattaccttctaggatcaccaactattattgagcacgagccactcttaaataactaattactctcaacttt

SEQ ID NO: 13731 - DNA, 578 bp, Zea mays
tgcaagcttattgcattctgaaacccatgaaatcttcttacggaagggctgttttttctgctgtataaaaatagcaagagtaataactgagagaatgcaattggtgctccttgccattactgaatatgaacatgcaagttgcagtgcataaattctgcgatcatattccatacatagagaagttattatgatcataatggctcgatcaactttcctgtcatgaaccaagtagctaactcaaagatgcatatgtgtgtgtgtgtggatgcacgtgaaaatggacatgtgatgcccttaattcctatcaaaatgtaatgagctctttttaccactgtcatgcaaacagggacaatagaatgtgcccatgaaactgcatgcatagctccttttatgtgtataaaattctgtagactcttaactatgttttacacaccataaaaatgatgcataacttaaaaaaacagggaaatggtcaattataattacaaagaagccttttttctaaaatgcgggtaattttacaaaaggacaaaatcacaccaccccttcaattgaggggcctgtttaccaatctgaag

SEQ ID NO: 13732 - DNA, 652 bp, Zea mays
  unsure (1)..(652): unsure at all n locations
caancttgcatntttctatgccctttgattttgactactccatattttttttgattatcattggatcaacattttccagacgtctactccatggaattctttagctattccaagatttcgtccacttgttttaaaggttttaggcgaattcattgaatttataggctctgattttgatgtccagtccgctgattggatttcaaatcggttgtaaatctcagcctagctgatgaggagatgcagctgtaggcgttggatttcgagagttgatttatcagacttttgttattttttaaaaaaatgcgatctcggttcgccttcctttgcacttttgttagttgttaaactgatctacaaaggtgtccgttcgaaaactggaattttgatttttgtcctaagagggatttttacgtgataaatggttttagtaaggctcatgtcacttgtctgcctaaattttcatcatactgggctggtttttggggcattctcatgctaactttgcttcaagggtgcagagattctgtccaaggaatgaatccatgctgagggaattccttttgtaacgttatagttttactgatcagtgcccccaaccagttaccaagtggatttcacgtggcccaccccgttcgcgcaagtttgcatcaaa

SEQ ID NO: 13733 - DNA, 500 bp, Zea mays
aattaggagatgtgctctcagtctatcaagagatttcctctcaattttcttttttcaaagagggggaaagactacaagttcctctccaacaatgattggtacaagggtggaaagcccggtacactttattgttaaatgtccattatcaagtgataacgacaggggccaccacaagaatgggagaagaaaagacaagaatagatactgcaaaaagaaaggcggcgatgcccatgtttgtcgggagtgggactccgacaaaagctctagcgactgctccgacaacgaggacaccgccaacatcgtccatcccaagggactactctttcccaacgtcaggcccaagtgccttatggcaaaggacggcaaacggaagaaggttaaatgtcactcctccactaaatatgaatcgtttagtgatgataaagttagtggagaagaggataacttgcggggccttcttgccaaccttaacatggagcaaaaagaaaaaattaatgaat

SEQ ID NO: 13734 - DNA, 375 bp, Zea mays
  unsure (1)..(375): unsure at all n locations
agcttatgaagattcttcatcccaacatgggctagtcggcggtgccattattcaatccatgntagacntagcaattaagcatgtgtcgagctcagctctatcaaaatctactaaggatagctgaccctctaacacacccttaaatgctattgaatcatcacttcttctaaagacagtgacacctacatcagtaaaaagacagttgtagcctatttgacataattgggaaacagaaagcaagttgtgatctaaagaatcaacaagaaaaacattggaaatagaatggtcaggagatataacaattttaccaagtcctttgaccaaaccttgattttcatccccgaatgtgatagcttggtggggatctttgttttc

SEQ ID NO: 13735 - DNA, 634 bp, Zea mays
agcttccatctataccgtttcagactgttgaaaacatctgtttttttttatgaagatttccgaattctccgttttgattaccacatcatctacgtatgcctccacatgcttgccccaatgatcggctaagcacgtttgaatggctctatgataagtcgctccagcgtttttgaggccgaacgacatggaggtgtaatagaaaacaccaaacggagtgatgaacgctgttttttcctcctcttccttcgccaaactaatctgatggtatccagaatagctatccaagaaagacagcacagaacatccatcggtggagtccaccacttgatctatccttgggagcccgaagggatccttcagacagtgtttgttgagatcggtatatacaacgcacatgcgccaatccactttattctttttgagtacaagaacagggttggctaaccactcggtgtgtaacacttatttaataaattcagccgcgaccaatcgagctaacttcgcgtgaatggcctctctcttgatcggcgtgaaatgactaggcttttgccgaataggacttggctggggatagaattttatttgggcttgaccaatttttttgggactcccggcatatgcgcaggttgccatg

SEQ ID NO: 13736 - DNA, 487 bp, Zea mays
  unsure (1)..(487): unsure at all n locations
ctttaactcttgcgagaccttttaccagnctttctactttggttttttcacgaccggcagagacaactctatgcatgtccactatatttatccccttgtgtggagaactggttgtttcctaagtagaatggattaatgtatggatgcttgcaagcgcaactacaacgatccggttgaagagcccaaggaacattcatgaaaaaccattgatcaggattcccatgttggaagcaagtgtgccttgacctatctctgtgctattcattctttaattacgtcgcgctttacacatttattcctaaggattgactagctttggctatacatatacttgcttaactattagggacggaatatgaaagattagcttattgatcttgctcaaactcttataaatgaacatgatgagattatctatgatgcgctggattaccttctggtattattaggcagtacttgcgggcttcaaaggggactaaacgggaat

SEQ ID NO: 13737 - DNA, 567 bp, Zea mays
agcttgacccgtggacccgcgtcaccggaatagctcaatcgtgctcaccggagttcaagaacccgccggcgcacgtggaccgggtaagcccctgcaccgttttccaattcgttgcgcgcatggcctctacatcaccccgtgaagctcctcgtgcaccttaattgaactataccgccgtggtttggccggagcaggagccgccgacgacccccgccacctgtgctcgtggccagggtagccccgacgacctccgacgccgacccgcacaccgacgtgaccgtcgcgacctcccggatgtcactgaccaccccgccggagctctactgccgccggtaagccccaccgccgtaatctgtgccgcgggtactgtttaagtcagtcagggagcacgggttagatttcggttaggtccaaggggttttgcgcaatgtcagtgacccatgccaatagtggaccgaggactgttttgtgagaaaagaaagagataaccccaggggcctcagcgtaaaccttgtttcttttccatttttcaaattatttttttttggtatgacagattactaaaat

SEQ ID NO: 13738 - DNA, 404 bp, Zea mays
cccttatcaagattcaaagactctttttgcagaaaagcttactatgagttgattcttaagaattcattttacttatcaggtcaagtagttacctgtatctagatttcttttatcctagatcaagcacttggcctatactagccatcttttatcatcccttcagtttgctggattgctacgtgtaagttagtgaccaagtcttcatgttcgagaagtaacggtgatccgaatcgattaatacctagctggggatctccaaccacacgacatatgtagcacttaacccttgcatatgtcaactcgccaccggttttctcaagactagaatgggttcacgccaaccgagtgcacaaatactccaccgtccaaccttttgccacggagggtgcacgatactttcggca

SEQ ID NO: 13739 - DNA, 302 bp, Zea mays
aaaaagggaagcacaatatctgaggctgcaataacctatccttttttgcacaccaaaagaccccccaaaccaccgggcatcagggctcccaaactataagataatgggcaacagttcacaaagacccccgcaaggatgggggcatggaaaacaagcaaggcgcctctccagacatcgagatgagataaatatcgcgtgccaagaaaaggacatcaaaaggctttggaggacccatttcatcagaaaaaacgggcccacgaaacctgccggaccggagacataatggaggaatggaaaatgat

SEQ ID NO: 13740 - DNA, 589 bp, Zea mays
catgcaaacttttgcgggctctgagggcccatcttccgctgaaatctcttgctctggagctgcacaaccagagatttcagctggtgtttcacgagtaacagcagctttattcggagctgcgctcgaagatttgatcgtttccaatacttctagcacattatccattctttttctcttcggagttgcagctggcactttttcattttttgctgtcccaatgattgctgtaggactcaaaacttctgatgttttggagccatcagttgcttctcttacctcctcaattatttttgtgagcggcgcttcggatctctcttttgtttctggcaacaaaatgtttgagtggtctgattcaatctttggtggcatttcggccgtttctgcgatctctggcaacaaggctggctcgattagtttttcagcttcggtggctgaagaagttttcccggtaaactccggcaccgaaactggttcaatataacgcggacggtgcgtaagaacctttatctttttcctttttagttctggctcgataggagcaactgcagctttttctttttgcagagattgtggtttttcttctttggct

SEQ ID NO: 13741 - DNA, 631 bp, Zea mays
  unsure (1)..(631): unsure at all n locations
agcttgctggcaagcacttttttcctgccttatagagctgnttatttttgatatagatntagagggcaacatataataaacagttagtaaatagtgtttggacctcttctcgaccaatatagatgtctacaaagaagatatgtagagtcattaagttgtgagaacaacactatctggatatcatattcaacaaatcaataaagttctccatatattgtatatgcatatctaaattaataataaattgatattcttatgatttgaaagctgacatgtattgtatacgttctttggattattcataaattcttgtggaataataaactaacagaagcatcaactaattggctgcataagaaaaaaaatataaaccttcagtggctttcttcggcgttctgaattcaagctcaatttgcttacagaaacttgtttcctctagaaatttgttatgcctaggccgctatttggaacttgaatccataacaacacataagtttagtattcaccaaaaaaagcggaatggagcaatggaattaaagaaataaacgatggaatattataacgaaaacaaattaagttgattgaacaaaaccgcttttacctggagagagagagagagagacagagagag

SEQ ID NO: 13742 - DNA, 569 bp, Zea mays
  unsure (1)..(569): unsure at all n locations
ggcatgcaaccttctnctgaacaagngctgcacttaccgctgagtgtgaattttttttattttataacaaaggaacccctggcgtacgtggagatagtgtttttagatctatcaaataccgtttcagctctttagaggccttctgctggattggtccccattgaaagacttccgctgacttcagcacttcgaagaatgaaaagtttctctctgctgatctggatatgaatatattgagagatgccagcccatcctgtcgatctttgagcccccttttttgtacttggtggctccattagaaatataacttcgactttactcggggtggcctcaatttcctttgttgaaactaggccacctaaaaaatttcccttctttactcccaaaacacatttttctggattcagctttagaccaatctgtctaaaattaacgaaagtctcctgttaaataacaatggggatatactgcttcgtgctcttttacatgatatcatcaacataagttagtacatttctgcctcattgagattggtaaaacctttgatgtatttctggtgaaactttctc

SEQ ID NO: 13743 - DNA, 497 bp, Zea mays
agcttcttcaccatgtggtcacggttatcttgagaaggttgttcaatgctcttcccttttagttgagtcaagctcatctttagcctctcattttcttccttgagcttttgatgtgaaacatcgattgttcctgcaatttctagctcaaaggaagatttgcttgtcgacggacaacaagcattagcacatggtaatatggcatcaatttgaatacatgtgcatgaatgaggatgttgggattctaagttttctatcacaacctcatgagcaatgtttaatatgatatgatcatcatttagattttcattagagcatacgagcatatcatatttttcttgaagagctagattttcaatttttagcttttctacttggtccttaagcaaggtattatcatttactaattgagttatacaatgaaaagcgttatcttgctcaattgaaataatttcatacttttggaccaaaatataatgagagcactttagctccctatg

SEQ ID NO: 13744 - DNA, 648 bp, Zea mays
agcttgcattgcatgtttaaaatacttgtattgcatctagggcttgtctaacctagttgagataaccgccaatgaagcgagtgaaaaagcttaactcgggtcaaacttgacaagtcttagttttaagcttttagcacttaaattcttactttttatgcaattgttggatcttgaaatatgcatgaggtactgcacttagggggagtattcaaaactcaaattactcatgaaaacccctagtgcaagccaaaatgcaaatttcaccatatgcctattttctctaaaaattatctagcctatggcaaaatattttgaaaagtatatgagggtgccaaaacctgtcccaacaagtgatattttgtgtgatcataaaatgggatttggtttggttgggaactagatagaaaatttcaaaaaatcaaattttttctctgtctgggctcaccggacaggccggtgtgcaccggacacttgactgtgcaatgtccggtgcaccggaagccgggcgctaaaattcctttttctgtgcgcttgcccgtgtgcaccggacaggcactggaagattgtcggtgccgccattcctcgttttaaaaagttttttccctttttcgcccgaggctgggtttcttttttttgttttttgccccg

SEQ ID NO: 13745 - DNA, 527 bp, Zea mays
cccgcaagcttgacaagaataaagacaatctcctgtaaaagatgccctgccttgttctgactgcgaaactgtctgcaactttgatcatctctctttggatcgtgagcacttagtaattccttcctggaggggcatcaatcagtgccgcaagggttggtcccatgcactaatggctgggctgcggagcacgaatcccgaggtagcaccattagccaaatagccaacaccttattatctgttacaatgttggtcacctgcaaacataaaattgaccgctagtttggcacctaacagtagaacatgtcctgccttcaatgggtccatgagttgagatatggcaactagaaagaaataaagaactggagcaccagctacgtgtaagaataataagtgaagatgctaatgcatgattgatgttcgggtggagtatggtcgaaggagaaataaacgtcacaaaagatatttgataagacgtgaatctgccaagaagcactataattgtggttatacgacacacaacagggtta

SEQ ID NO: 13746 - DNA, 627 bp, Zea mays
tctgcaagcttataaaaatctggtataaatcggcggtaataaccagctagtccaaggaaacttttgacttggtgaacagtggttgggggtttccactccaaaatgtccttgactttgctgggatccaccgcaatcccctttgcagataacacatgtcccaaaaattgaatttcttccagccaaaacgcgcatttactgaacttggcatataatttgtgttctcttaagcgcgtcaatacgacccataaatgttgagcatgctcctcttcattctttgaatatatcaaaatatcatctatgaagaccaccacaaatttgtccaactcgggcatgaataccgagttcatcagataagtgaagtgtgcacgagcatttgtgagagcacctagaggggggggtgaataggtgatcctgtaaaaacttatacttatagccccaaaacctagattaagcgttagcacagtaattgccaagtggctagagagaacttaaaacaccattaccacaagaaagcaatccccgagttgacacagtggttatccccgtgggtcggccaaatacaaaacttgcctacctcacgtttgtgcgttcccactgaccgaaagttggacttcacttcctctcaag

SEQ ID NO: 13747 - DNA, 600 bp, Zea mays
ccgcagtggtgttatcctgtggaggacccaccgtttgtttttaccttacctgggatacaaagcccttgcccaggtctaacccactttattgctttaattcgttcattttcctgttggaccttatccatacatgtctctacaacaatattttttacaacgacttggttgcatggggtagaatcatcacttgaatcggacgctgagagccaatcccctttgataattatttcacgcattttaactaaaaatgctgctggggtgctacccaagatttctagcttaagagttagatcattatcgtgtatgctaagaaataacctttttctcttacaaaatttccatagctttttggcagctagctaacttagccttaaggtcttcactttttttaataacgcttttattaggtggcagaaaatggagcccttatattctcataactcaatttttagatgactggtcaaccatttaagttcgccaaagagctcacatttttttagccaacctttggaaaaaattttcggagccaaccaacttattttttaaaagttttaagttaagccttttgggttatggccaacattctggaaaaaatttacc

SEQ ID NO: 13748 - DNA, 514 bp, Zea mays
  unsure (1)..(514): unsure at all n locations
cttgccccatcanaggattagagcactagacttcatccgaagactatatttttctttataaacttgcctcttcttcaaagcattaatccattctttgattaacgatttatcttttctattttggaccctacaaagtttcctaattagctagctgtcaaacagccccaaacttttaataagcattaatattctgatcacaagaccttccaaaagtttacataatttttggtgcttaactttcacttctaaaattccaataagccttttaagagcacccttaaatcacttaaaatttggtaactctactaacaatactaaaaccaattttttagaaccagccatcctttatagaattaatcccaacaacaacaaattaggagcgaaacgactctgtcccaccatacttcagaaccaaacgctgccttaattttttaccgttatctattgtcttgaattatatatataggagatagttggcgtcgatctgggcatcaattactgcgataagtactgg

SEQ ID NO: 13749 - DNA, 540 bp, Zea mays
agcttgtgcttgatttgctccgtactaatcactagcaaatcaagttatctaattgctcttttgctcaacagcaaattgcatacctcggccacatcattttagcacagggtgtagccaaagatccggcaaaatgacagctgtttcgtcatggccaacacccaccaactgccgagaactccgcgggttctcggattagcaggctcctatcgtaaattcgtgaaacactttgcttgtgattctatgcttgtgtcctaacagaaaagataggagagaaatcagtagcagtgttgattgtgttttttttctggcaagcgaatcaagtcacttttttcaactgcttagtccgcttctgcttatctaagcatgtttcaggctactcctcattgacaagagtctgatgttgcagtgatgcccacgtgtcaccgggagacgaccgatctgttgtggatatgggatcccatcttttcaaatagaataacagatcccatctatagcggaaaaatattaattgagcatgaacatttttgcaatgcttgcccc

SEQ ID NO: 13750 - DNA, 489 bp, Zea mays
gacccgcaggcctgcaagcttgcacacatagctcatttgaatacctttgatcatatctcttttatatgctatgactaatgtgttttcaagtttatttcaaaccaagtcataggtatattgaaagggaattggagtcttcggcgaaaacaaaggcttccactccgtaactcatacttcgccaccactccgagcaactctctcttccttggggagaaatgagcatcaaagaaaaggacttcatccttcgaggagagagcaaaagctcaaaagcaaaaggaccggatttcgtctttggtataatcttaactcatttacttatgaccaaaggggaagaacttacttcgagggcttctatgattccgtttttggcgattcatgccaaaaagggggagaaatgagcccaaagcaaaaggaccgcaccaccaccaccaaaattcaaaacttagtgctttccaaaagtctttatcaattgggattctaatggggtca

SEQ ID NO: 13751 - DNA, 664 bp, Zea mays
tagcttctaacgttttcaataaagattcgtttggatcccttcattccggatgaattgaaattgtacttaataaagtaggcaattcgatctggatttaatattccaccactttctaaaatttagatataagtatatctcagatttataggatgatgagtgatgatttattttatgtatcactagtatgtgtttctactccgcaacttagaacgttcttcggttcgctttctacagtagaaatatagcacataaatatctctccctatatagtcaacaacaaaatataaatatatttaaaattatattagcttaattggtctaagtttaaattaagattattataatggaattgaattccaacgatccaaacatggtgtacaagttattaagatagatcaaggcacgacggatctggataaaatatctacaggccataaaaatatctcaaaattttctaaattagatttagcatatgaaaaatgaaaacatatctagaaacgactaggtgacccctaaaatattctaattgatctttaagtgtgttctaaaaaactattcacgataaaaagacgcaaccaatcattatggatgaaaacaataacccaaaatctagtaaccctatacataaagacaatatcattttccaaaattattgtatttaaaa

SEQ ID NO: 13752 - DNA, 656 bp, Zea mays
  unsure (1)..(656): unsure at all n locations
agcttgatcatgatcatcangacttctattagaaccattggcctcatttagaatctgattctgattcttcgaccacctgcttctgagaaatgaaatagcccatgcagcataatcttgtatgtgcttatccttagcatccttagcaagaagaaatatttcctgaatcattgatgttgacagagtctcaccaacaggacttgtcagttatgaaccactcacaaaagatgactcctgtgcacacaactaaatagattattctaacaattttacagaacattaagtgttaagatgtatgaaggaaacctcatgtttgatttgagaagtcataggctttgaaaacaccccagtaagatctcctgcacctgcaccaaaagcgttgaccacaccaaacatgcctcccaaatgaacaaggggaggaaaagggtgggtatatatatgtctgagagtgtccagaaagcctttaacaccattaaattccatagcatgcccgccctcttttaatatagaagagagaaaagatccagccccaatacagaatgccattaacaaattctgaaagataatcccagatttattgaggttcaggagctcagaagctaaagaagtgtaccgattggacaatgcatccaagtcttcattcaacagctccactcttt

SEQ ID NO: 13753 - DNA, 429 bp, Zea mays
gccttataaaatttcaaagactcattttagcagaaaaggttattatttttggattcttacgccaaaatattacagaacacgctatggccttatcctgcacctcgatgttcctaatcaagaggattcactagtgctatactacctttcggtgaaaatcaaaattttggtgaactcgccaactactatgaatggctagcaaccattctttatatctgagaagtaacggcgagccgaatcgattaattcccagctggggatatccaaccacacgacatatgtgggactaaagccttgcatatgtgaaccattaccacggatccttctctacatgaaccagatcgcgcgtcccgggagcatattaccctaccatccaacctcttaccaagagggtaactgttactgccaccatcatccacgcccagggcgcgg

SEQ ID NO: 13754 - DNA, 567 bp, Zea mays
agcttcaaagggtgccatcttgatactttcttgataactattattgtatgaaaattccgctaaaggtaaacattcgtcccattttagtgagaaatccaggacacatgcccgcagcatatcttcaagtatttggttcactctctcagtttgtccactggtttgaggatgataggccgaactgtggagcagtttagtacccaggaatttatgaagttcttcccaaaacttggatacgaactgaggtccacgatccgacactatggtctttggaataccatgcaaactgagaatacgggcgatgtacaactccgcatagacattgacgtgatattttaccttgaccggcagaaagtgggcgatctttgtaagtcgatcgatgataacccagatggagtcaaagccttttgcagttctgggcaatcccacaataaaatccatgctgatgtcttcccatttccatgttgggattggcaaagattgcaatggacccgcagttttcatgtgtatggccttgacacgtctacaggtgtcaccattaaccacatagcgtgcaatctcaatctttat

SEQ ID NO: 13755 - DNA, 496 bp, Zea mays
ccgcaagcttcttggcaacaacctccgcctccacctctgttacagcatggactttagccagaagggagccagtatgctccacaccaaagggactttcgagagcagtccgaagctcgtacagtcaacagcaccgtgccagagtcaaagcacatctattgacaaatatcctaccctaatagcaatcttttctatccagatttattttctgtaataaaggatattgtttaggtttcatataaatactttcgttgattcccacaaggaaaatatatttttctcaggcttaaattgttaaagtttaaagacttgtgataatcaagaggaccttctgactaccgaaaattattcgaaacagcaaaaagtcgttctaaagaacgcagagtaagttgccgaagtcacaaaaaaaaagtcgttccaaaaggaacgcaatgtaaattttttgctccaaagtcgttcctaagggaatgcagagcttacagcgaaaagtcaacgctga

SEQ ID NO: 13756 - DNA, 638 bp, Zea mays
agcttgcttcagaatctgtagatgaccatggtgatgagctgttagaactttcagacagaaaactaaaagatttctctattgctttagcatactctcctttggaataatccattccgttctcgaattttaaatctatcaaatggtggcgttcatcagatatggcaagagcacgagctattatgctggatatctcatcttccattatgcacaaaatattactacctggacctaccgcgaactgcggagagtatgaatcatcatgttgttcaaacaagggagaaagataatgtggcaaataattgttaatgagttcaaatttgcccaaatatccaatttcaatgtcatccctgtaagccatttgagactcaaaaaatgaattccaaatccacctctccctgtcatcccaataaggatatttgaattgttggggagtgctacaacgctcctgttccatgggtattggatctgctactgtaagattggcctggacctccatatcattggatatttcaaaacaaggatcatttgtggtttctgttgtgccatctacctttatttgaccatgagcaatagaaaaatcttcagctttactaccttcattgcaaggaaattccgagtgcccagcttcctggctttta

SEQ ID NO: 13757 - DNA, 354 bp, Zea mays
  unsure (1)..(354): unsure at all n locations
gcgagcttgactattattgcatgtgagcatgatccacaacgcaatttattcttcttccctgacanggactgtttccttggtatctgtagaacttcgtagcaattgcagcatatggtgaatggagcaccacctgcgactggctcacaagtctgtgcagccttcttgcttacggtgaccctcatgtgattctgctgcaaggtagtattggtaactcttgcactgtatctttgctgaccaagtaagggactgtccacaggataagccccataattgttcagaagatatggtgcccttngatcatggaagcctatgtgaattccctgtataggcaagaattcttggtggcaacagtgc

SEQ ID NO: 13758 - DNA, 394 bp, Zea mays
  unsure (1)..(394): unsure at all n locations
aactgtaggatgattgcccacatattctggaatgtanggcgaatgatacgaagctgtatgcatgacctgcttcagctgagcttggtgtgctgctgcttcagctatttccttttgcttctgaatagtaacatggcacatcctggtagtatggcctttgttctcaccgcagaataagcaaaagattcttctcggttgatcgccaaatcttcctccaaagcccctggcgcctctgcctcttggagctggtggtctgaaggagctntggtgttgccccgaagcctgtgaggaacattgtggcctttgttgttggctgcctctatcatcattttgtgtagagttatgaattgatctcacgtgcctcgggtagaacctccctccgaagcncctggtcatt

SEQ ID NO: 13759 - DNA, 350 bp, Zea mays
  unsure (1)..(350): unsure at all n locations
acaccgagactactacatgaaatagactngaaaacatggtttagtctcgaagtcttagattatagagtaaccttcccctgaatttgtgcatacaagtnttgaatactcgtaggagacatgcactttgatttgatatcaagaggggcaaattatctataattcgagctttggcacatataagttaaatgataccaaatgtaggatgtaagatttttaaagcattaatgtcatntacttaggcattgttcaataagctatgtgccatgcttaactaaacagnttaaactatgtaggttngctcataaatatgaattgaaacaagcaatcctaccatgtgatttacctagtat

SEQ ID NO: 13760 - DNA, 209 bp, Zea mays
atacgagggttacatctaatatcctgctgggtatcctgagccaaaaattacgagaattcattctagaagactcattctggttctcatcatgctgtttatgaataagaatgagacatctagttctatgcattctacacatgttaaaatgcctaacaggaaatctcctcgtgcatcaaatgatcataacatttcatttaagacttttgatg

SEQ ID NO: 13761 - DNA, 295 bp, Zea mays
  unsure (1)..(295): unsure at all n locations
tgaacctggtgtgctgcagcttcngctatttccttttgcttttggatggtaacatggcacattctggtggtatggcccttgttctcaccacagaataagcaaaanattcttcttggatgatctccaaatcttccgctgaagccctctgcgcctctgcctcttggagctggtggtacgaaagagccttgttgtgccactaagcttgtgaagagcactgtggcctttgctgctggcttcccctatcatcatgttgagtagagttatggattgacctaacgtgcctcggatagaatct

SEQ ID NO: 13762 - DNA, 210 bp, Zea mays
  unsure (1)..(210): unsure at all n locations
gtaattaggggtacccccaacactcctaaacacggctggtaaccaccatcagcacaagctgcagagactgatgggcacgattcangtcaaggcttcgtctgctcaagggacgcgatctcgccccgcccaagcccagcctcgggcgggaacagtagtcccagacgaattctcgcctcgcctgagggcctcttcaagcaatggaagcaccct

SEQ ID NO: 13763 - DNA, 227 bp, Zea mays
  unsure (1)..(227): unsure at all n locations
acgtgaagacttgttcggtccacggagtcgctttatccgagcgcgagttacttatcgcagaaggtgatgagtgaggtatccgtatcccggaggcgtangagtccctcggctcggtcagccttggctgcttacgtgtactccgtcgtttccaggatccgctttccgaagtagtcaagaagcacgaaagtaatcctgctaaaaagagatcctttntcgaggaaaaattc

SEQ ID NO: 13764 - DNA, 226 bp, Zea mays
  unsure (1)..(226): unsure at all n locations
ccatgctgctgtgtgaggatatatcagagcagaaggtgctattgggctcgcaattatctgaagatcaagagaaaaccttgataaggtttttattcaacaataaagatgtntttgcatggtcagccaatgatctttgtggagtgaatcgggatgttattgaacattcgctcaatggtgacccattcttcagaacccgcaagcagaggcttcggaaaatgtctgatga

SEQ ID NO: 13765 - DNA, 381 bp, Zea mays
  unsure (1)..(381): unsure at all n locations
actaccagcatcaatgtctaaatctttacacctagnacaaattgcggcatgttctacacaagaattagatttatttgccacttctaatttagcatttaaatcatcattaaaactctttaacttagcaatagtttcatgacaagtagatagttcaaaagaaagcatttcatttctcttaatctctaatgccagtgatttttgtgcttctacaaatttgtcatgttcttcatacaacaaatcctcttgcttttcttaaaagcctattcttatcattcaaggcatcaatcaattcattaattntatctatcttagatctatctaagcccttgaacaagtatgaataatctatgtcatcatcatcactagactcattatcactag

SEQ ID NO: 13766 - DNA, 362 bp, Zea mays
acctccacttaatgcggtgtctattaagaacaagtaaccttagcctgcgattgatgttcttttcgatcaattggtcagagccaaagttttttccaagatagaccttcgctccagctaccatcagatcaagatacgagcaagtgatattccgaagactaccttctcaaccagatatgggttgtatgaatatttggtgatgtcatatgggctgactaatgcaccaacatacttcatgtatttgatgaactctgtcttcatgcctgaattggacaagttcgtagtggttttcatcgatcatatcttggtgtactcaaagagcgaagaaaacatgctggtcatttgcatgtagtgcttcaacgtct

SEQ ID NO: 13767 - DNA, 334 bp, Zea mays
cgcggatatgctcgagctgtgtgccttactcttcttaaggactgggaccacaactagctgccgcgggatgtcaacgcgaggcgcacgcctatggggatcgtcgtcctccggcataccaaggtggttgccttcgtctagaccccctagatcgacgtggaagcattcgcgacttgggccacaaccctctgtgtcaagggtgtggccatcatcagagcaatccgagaggcagtagtcacatgccgtcatgaagtcccacatggcactatgagcacggagcccggagatatcccaaccagagtcgggctcgtcttcttctcggaacccgggggcccgt

SEQ ID NO: 13768 - DNA, 360 bp, Zea mays
  unsure (1)..(360): unsure at all n locations
ctcgaagtctttcttttcgatgtcaactgattgctcttttatctttgtttctaaggcctcaaatataacttcgtgccttttatcctctaagtcctgctgcattttaaggccttgctcaaaagcatactctgtggacagataaccttcgttagaaaatatttatgttattgaaaatagtaaagggtaagcacaagatatntaccttataattggaatagaacaaaccgccgacaatgtgttgtcgtcggtagccgctgatgtctgcttcgagcttctggaagccgatgctctttgatagagtaccgatgaccttcacgccagtatgatctcgtatgcagcctatattttcgtcgtcaatac

SEQ ID NO: 13769 - DNA, 224 bp, Zea mays
  unsure (1)..(224): unsure at all n locations
aacatctacaactttattataacgaccatgaacttgattgcacattaaattgagcaaacaatgcagtttctgacatctgtaccagaatttgacagattcagttactgaatttgtaaaaatcataacttccaaacgatcagactntagcctatcnaattttagtacaagcaagataataatgttatctacaactcttctacatgacttttctacagaagacatga

SEQ ID NO: 13770 - DNA, 404 bp, Zea mays
gcatataatagtctgaaggtatgagaattgtatatttggaaattgaatttttgaatcattcttttattcttatactaattcttttttcatataggggttaatactgagcaacgctttgagagcgcaaaagaatgccgaagacgagagctataatattgctttcaacaacctacgaacagaggttattaagctgaggaacgaagctttgaaaaagataaaatcttgctacattggtggataaaataaaggaagacgaagctacctctaaggctcaagctgaagcccaaaaacgcgaaattcaggatcttcggaaacagctggccagagctaaagaagaacgcatacttgaagaaacaaaacgagaacttagtgatcaatgggcaaatcattgggaaataaatgtt

SEQ ID NO: 13771 - DNA, 494 bp, Zea mays
  unsure (1)..(494): unsure at all n locations
aaatctttccacctgccttctttgatgttatggtgcacttgagtgtccatcttcccgatgaggcaatgcttagaggacctcgtcagtatggatggatgtacccaatagaaaggcgactatgcactttgaaaaattntgtaaggaacagggctatgccggaaggatcaattgctgaggcatatatggcaagtgataccttatacatttgttctatgtacatgaaggatgttgacactagatttaaccaggatgatgatagtggtacagagatgccattgcctaatgacatgtctgtttttaagcatggtgctactctttgtggagctactaagactgagtacattgatgatgctatcatgaataagttagtttggtattgctacataatgctgatgaagtacaggaatatntgacgtaagttagttggtatgtgctacactaattatgttatgnttataaatctgaaaatatgcttatgaataaaggatgtcatg

SEQ ID NO: 13772 - DNA, 379 bp, Zea mays
gtgagcgtactgcacgtggtaacacgtcttatggcgatgaagtcaaagtacaccttctcaaacaactggtacaacgatattgtgaaactgattattgatatcagcccaccgaatcataacatgccgaaagacttgtaccattgcaagaagctcgtagctggtctcggtatgaactaccaaaagaatgatgcttgcgaggacaattgcatgttggtctggaaggagcatgaaaataccacacattgcatccactgcagtaagtcaagatatgcagtggtgctagatgaggatggaaacgaggttacgacaaaggtgccgatcaagcaacttcggtacatgcctatcactccacggcttaagcgtctctttctatatcaag

SEQ ID NO: 13773 - DNA, 376 bp, Zea mays
  unsure (1)..(376): unsure at all n locations
gagaaagaagaactataagaaggccaagggcgaggctcatcttggcaaggagtgggattcggactgctcttcgtcccactccgacaatgaaagactcgccgccactgccttcaacaagtcattcctcttccccaacgagcgacacacttgcctcatggcaagggaaaagaaagtaagcactcataatactagtacttatgcttcttcaagtgaggatgagtctagtgatgatgatgagatagattactcatgcttattcacnggaatagatagaaccaacgtagacaaaattaatgaattgatngatgccttgaatgatangaatatacttttagaaaagcaagagaaattgtgtatgaagaacatcgataattat

SEQ ID NO: 13774 - DNA, 271 bp, Zea mays
  unsure (1)..(271): unsure at all n locations
aagcaagtgcgaggcagctctataaaatctccaagtatagctgaccctctacactcccttaaatgctttgagcatacttcttctaagacagtgcacctacatcataaaaagacacgtgagcccattttgataattgagatacgggaagcaatagtatctaaagaattacaagaaaacattggaatagaatggcagggaaaagcattntacccaacctttgccaaaccttggtttcatccccgaatgtgatagctcgtggggacatggattt

SEQ ID NO: 13775 - DNA, 358 bp, Zea mays
  unsure (1)..(358): unsure at all n locations
cacatttaggactaacaaatgtttattttgagaaagacaggatctgtagcgcatgccaagccgggaagcacagtggcactcatcatccacacaagaacatcatgactagtgacaggccactagagctcctacacatggacctattcggcccaatcgcttacataagcatcggcgggagtaagtgctgtctagtcattgtggatgattattctcgcttcacttgcgtgttctttttgcaggaaaaatctcatacccaagagaccntaaagggattcttgagacggggctcaaatgagttcggcttaaggatcaagaaaattagaagcgacaatgggacggagttcaagaactcacaaat

SEQ ID NO: 13776 - DNA, 234 bp, Zea mays
  unsure (1)..(234): unsure at all n locations
agtacatgccgaacggcgtgatgaaagaagtcgcgagctggtcngactctttcatncngatctggtgataccccgagtaggcatcgaggaaggacagggtttcgcacccagcagtggaatccacgaatttggtcgatgcgaggcaganggtanggaaccttcngacatgctttgttgagaccagtgtagtctacacacatncgccatttcccccctttcttcctcacaagcaca

SEQ ID NO: 13777 - DNA, 430 bp, Zea mays
  unsure (1)..(430): unsure at all n locations
gactatgtatatttgatgatgtaactttgtatcggatatggnaaatattgaagttatttctttacgatgcatgaaacttatgtacatatcgtttttgagccttcagcgaaaaaacacccttccttcttttcatgcttcgtaaagaaagagattccttcttgtgacaaggctgataaaactggtatttccgaagcttacttcatgccttaacacattttcattttgacgaagcatatgccgaagaatggcttcatattcgattcttgtgtcattgatgcaatatgatgtatgatgtaatgttatgcgaaatgatgtgatgatatgatgcaaaatgatgaggatgccgaagacacaaccacacgcccacactggaacacacaagctctgcattcncttaagaacgacttttgagcttcttcaccttctattt

SEQ ID NO: 13778 - DNA, 451 bp, Zea mays
  unsure (1)..(451): unsure at all n locations
gcaagcttaagngatttgcaattccgggttgtaccattcctaggttaacttctctatttcgtggcgtaaccgaatagatagaagtctttcagcgtcaataatggcaagaagccttgcgacttaatgcatttgccactacaatagccttgcctgggtgataatgaatctcccattcataatctttaatcagttcgagccatctcctctgcctcatattcaattctgacttgggaaaagatgtattttaaactattatgatctgtatcatgtgacagatgtttcccacagataatgtcgcttacttttatgtcatgaaccacgcacctactctatgtcatgaagtgggtaatgntcttcatgccggcgcaactgccttgaagcgtangctatcacttcacacttcttgcatataacatagccgagaccactgcctgatgcgtcacaatacaca

SEQ ID NO: 13779 - DNA, 362 bp, Zea mays
  unsure (1)..(362): unsure at all n locations
cgagttcagctctatcaaaatctactaagtatagctgaccctctaacactcccttaaatgctactgaatcatcacttcttctaaagacagtgacacctacatcagtaaatagatagttgcagcccatttgacataattgagaaacggaaagcacattgtaatctaaagaatctacaagataaacatggaaatggaatgtcaggtgaatancaatttacccaatccttggccaaaccttggtttcatccccaatgtatagctcgtggggatctggttttctcatagaggagaacattccttctccctgcatgtggttggccccgtgtgatgatcacttgagctcgatgctaactacaaacagt

SEQ ID NO: 13780 - DNA, 318 bp, Zea mays
  unsure (1)..(318): unsure at all n locations
tgatagatccatcatcaagnntttattttgaaaaacatcccacccacttttgccacatcatattttgtaaaaacaaaaccttttgttttctaaagcaaagctaagcatcaaaaagcttttgtaaaacaggtgatttaagaaggtaagccaattcaatgaaggtaatgcaggaatgggtttatcaagcaactcctatcacctaatgcagcaatcaagtgagaaagaattttaaatagcaaggaaggtggcaatgcaccagggcttgccttctttacaggtgattcgggttcggatccacagatatcgaagtagaaacta

SEQ ID NO: 13781 - DNA, 441 bp, Zea mays
  unsure (1)..(441): unsure at all n locations
gcttgactctcggaatcgaacgaagctccagcttgaagcctgcttcttcaaaagaaanaagtttggaagagaaagtatttaattcccacaaattcagaactaaatggccagagtgcgttctaccgctatggttgagcgtgagggaggcgaaactgaaggttcngagactattcccatctncgaagcgatgcaacgatccgggctggtaacttccgaaaaaatccctagtgctgatgcagaacaagcagaacaaacaactgccgaagcagaagaagaaaacattgaggaaactgatcccgaagatgattatcgtattgccatgccaagtaaacccagctacttggacttcggaatgtctactgtttaaaggctgatctctcaagatggtaagtcgggtatttagtgaaagcaaagaactactacctcggggggagaactacc

SEQ ID NO: 13782 - DNA, 265 bp, Zea mays
aagaaactctgcctctcttctttaggctcggactcgggctcaggggcggaagaagacaaactccgcctcgcccgaaccaaggctcggactctggctcgggcccaaaagacaacgaactccgcctcgcccgaccctatggcttggactcgggctcgggcccggaagacgacaactccgcctcgcccgaccctatggctcggactcgggcttaatcccggaagacgatgaactctgcctctgccgatctatggctcggacttcggct

SEQ ID NO: 13783 - DNA, 295 bp, Zea mays
acttggaagtctcggggccgaacccctctggcgtggtagtgtcgtagagactgctggtaccacgccgagtgtagtaaggccatgtcccgagcctcttccagctggtccagtgagtcttctcggctggtctggttgcttcggtcgtcgtacgcccttgtcctcggggaaccgtattctaagtctgtgggcaagatagcctcggccccatagactagaaagaacagcgagaaccccatggctcggcttggcgtcgtcctcagtctccagaccaccgagggtagttccttcattcacc

SEQ ID NO: 13784 - DNA, 224 bp, Zea mays
  unsure (1)..(224): unsure at all n locations
cgcgcacgcgcaacggncacctcgcgaaccactcgccccgtcacattaacttcgcggcgggagaggcggcgcctctggcaagagaagcaagtgacgcttcgccttcgccataatgaccgcgtcaaaaaaggtacgccacgtcattcgaatatcgatcctttttcttttcctctttctctctcttacaacagggacccgggaagggggataccccgaaaaggatc

SEQ ID NO: 13785 - DNA, 377 bp, Zea mays
  unsure (1)..(377): unsure at all n locations
atgcactggaaatataggttctagttctatatcttaaacccatatgccaataaacatgtgccccatatgattgccattgactggtgatagtcatcctaaaatccatagtagatcccgtaactaataaactgatttttgagcaaggcatgatacttaactattaggagacttgcagcgagtatgcaaatcaataggtgcaatataactttatctggccgagcttaacagactggatgtcttggcagaaaaaaaaatcataactggatttgtcctgctttcaggttntccatccatgttggtgtcattctattgtacttgcagcaatgattactatgttgatgatgaaaggaacttcatttactcacatcttttcagtg

SEQ ID NO: 13786 - DNA, 220 bp, Zea mays
  unsure (1)..(220): unsure at all n locations
gaatgcgacgggttgagcctcggatgtagatggatcatcaagctcgttgatcttcctcgagccttcgatcatgcactcaaaacttacaaaatgcccgattacttcctcgggggtcattntagtatatctaggattaccacgaattaattgaacttgagtagggttaaggaaaataagagatcttagaataaccttaaccacttcatggtcattccattta

SEQ ID NO: 13787 - DNA, 403 bp, Zea mays
  unsure (1)..(403): unsure at all n locations
gcttaggtaaagtcatanatgaccacaaaataaagtttatctcatttatacccctgggataccagaaaccctaattggaaccctggaaaaaccctaaaactaaaccctaggggcttatgtgcaaaagtggtgaacctttggactaaagtgaaaaactactatgttaaacatataaagtcatttggttcacaaatatgtgactttgcaagttaaaccctaatgtttgggcttatttgcaaaaatcaccttttaagcactatagagcctaagtcttgaaatcaggtgagttggttcaactttggagccctgtatctttttaaatataaggattttgcccaaagtgaccacaacaagtttgtagaccaattaatggagaacaactttgctcaagggtgaagctcac

SEQ ID NO: 13788 - DNA, 394 bp, Zea mays
  unsure (1)..(394): unsure at all n locations
catacaangtggccaacgatcatggcgaggtctacaacaacgcttggaacatccgacagctacgtcgcttttacccttaagatggtttcaagtcgttcatatacctcgttttctatacatacaaaaataaagtctaaccgtcaaggaagggtcagccatgcctcgacaaagcccgaccctcccttcggggctagaagggagggaacccctctgcgtcaaattttcctcgaaaaagtcttttgcagaacatctttcgcgcttttcgactgcttcgatagcggggtcctgaaaacgacggagtacacgtaagcgggcaggccgaccgagccgagggactcctacgcctncaggatatggatacctcactcatcaccttccgcgataagtaactcat

SEQ ID NO: 13789 - DNA, 366 bp, Zea mays
  unsure (1)..(366): unsure at all n locations
ggacttgttctcaaatgctataaaattgagaacaatgcaacacaacaacaggttatttggtaatgcccttcgtccttcggaacattattttcctaaggatataatgatcttcggacgaaggttatgaaggacataccttcatcattttaacatatatatatatatacacatatatcaaggggcggatgaggcattgtataacataacggataatgtgaaacaacttataacatcatcatacacatttcttattatataatcatatatgaatgatgacaatactgaattacattcatacctttggcttgacagaaaatgaaagtacaagcgngaagcataaatgagtacaagtcatcgtgaacagta

SEQ ID NO: 13790 - DNA, 385 bp, Zea mays
  unsure (1)..(385): unsure at all n locations
tgcagctttccttgctgacctggtgcttggatccacatttatggcatgttctattatgcttctggcgactccacacatgtcatttgcagaccaggaaaagacatccttgttgtgaaatagaaaccttcagagattagactctttctctgaagttagctgatcgccaaagaagactctctgctcagcaacatcatcatagagaagcaccggcttcggctgatccatcgaagattccttttcttttatggatttctcagaatcccagatttatgcttcagcttcatctatgttataagcaatcttcagctcttgcangggtccttctgccttcttgctgcttcttgactgccatagactgatataactccttgattattgggtttct

SEQ ID NO: 13791 - DNA, 401 bp, Zea mays
  unsure (1)..(401): unsure at all n locations
atgataatgatcctatgtatgtctaaaagaatgtttatgaatgcaaatgttatgatgtaatgtatcgtgcaaatgaatatccgaatatatattcgaagccataatcatagccttcattcccttaggaatgactcaaatctttttgccgcttatttttcggcttcaccgtttatttttcgatatatcagcgctgactnttcgctgtaagcctcccttaggagcttcttcgccttttactntggcggaatcagcgnttaatttttgtggtagcctcccttaggagcttcttcgccttttacttcggcgggaatcagcgttatttttcgctgtaagctctgcattcccttaggaacgaactttgagcttctccantgtttcttttctttttcctttgcactcga

SEQ ID NO: 13792 - DNA, 408 bp, Zea mays
  unsure (1)..(408): unsure at all n locations
gcttctagagctatgcaatgactaccttgnttacatattatttattataagaaaaagagtataatcagntttatacaaagntcgtaagctcagttcattatctaatgttcataacaaaagaaaaattacatcacatactctaattcaaagctaaaaaaatctaactagcattatctctagtgttgtgttctttataaagtacatgaaatatatgagccttttcatgcctttatattggtcatttcggatctaccttaaacgggttgtgcctgtgttcgtccatggaccacgacctcgactcanacccggtccaatatatcgggtcgtgtcgtgtctggaccatgttttnntttcgtatttgggaccgattcatcangcctggctcaaatatacacctatactagtaca

SEQ ID NO: 13793 - DNA, 383 bp, Zea mays
gcaagcttgccttctccttattgtaccacccgcaatccaacggagtcgtgttacgcgccacatggtaaaatttcacagccatcaagaaaatgctcctcgacgacaagaaaggcaagtgggccgaactgttacctgaagcggtctgggcgctgaacacgactgagtgcagggcgactgggttcacccctttccgccttctatatggatcggaagccatgaccccgccagaaataaaacatgggtcaccacggacagtcacttcagccgtccccgacgtagacgagcctactttgaaggacctcatcgacggagaccgcgtcttcgccctacaggccttaaacaaataccaagctcaaacaaaagcatggcgcgaccacgaagtc

SEQ ID NO: 13794 - DNA, 237 bp, Zea mays
agcttgtggcaccctcaagcgtcttgtcgtaacccaagcaccaaatctcccacttggaagtctctgggccggacccttctggcgtggtaacgtcgcagagactgctgataccgcgccgagtgtagtaaagctatgtcctgagcctcttctagctggtccaatgaatcttcttggttggcctggttgctttggtcgtcgtaagcctttgtcctcagggaaccgtattccaagtccatg

SEQ ID NO: 13795 - DNA, 362 bp, Zea mays
atcaatgagcaaacgacatgaacgctgcttaatgacacactttgtttgaaacaacggatgtcgctgaatctgctctggcttctccatttgtgcactaagcactcgctgtacaatgaggctctcataatgctctgcatcatctgcaccaatctggtcttcgggtgggtccttagtgcctgcatcatcagccgcaagccaagcaagtgtagcttcatccaaatcactagcagaagaataccccacatcgtctttaccaccaaaacacgctgttaagacaatacgctgacgtgtcatagcccttgatcgatacacaaacattcttgtttacccgggaggtactgagaggcctacctgtggttctg

SEQ ID NO: 13796 - DNA, 245 bp, Zea mays
ttaagttccttgaaaagggaatccaactgagggaaaaaaaaggactgtcgttgctatctcaattaaaaacttaagctcttgccaagtgctggatcattgagtgattgcacaaatactggtattattcaaaaagaaatcattgtgccgcaccttggccccgtcaaacaagctgatcagtgtgacccttggtttcatatcaactcaaaattgaacaaggccgagccaaaagaaaggtactaacctaa

SEQ ID NO: 13797 - DNA, 383 bp, Zea mays
  unsure (1)..(383): unsure at all n locations
ctccactatanagcatactatgagaaaatntaaatntttcattctctaattcatgctcggcaattttagcatctaatattgctatatgatcattttgttggttaatcatagcaaggtgatcatgaatagcatttatattaatatccctacatctaatgcaaatagaaacatgctcaacggtagatgtagaggggttgcaatcatttaattaaacaatcttagcatgtaaaatggcattctcatcttctagaatggaaatggaaacattgcaaacatctattttcctagccttagcaattaatttatcattctcacacttaaggctagaaagagagggcattcaattttcaatcttagcaattaaactagcattatcatttcta

SEQ ID NO: 13798 - DNA, 424 bp, Zea mays
  unsure (1)..(424): unsure at all n locations
aaagtcgttcctaaagagcgcagtgtaagtttgtcgaagctataaaaattcgttcctaagggggcgcaatgtaagttttctgctcaaaagtcgttccaaagggaatgcagagccaaataccgccgaaatataaggcgaaacacgaaaagtcaacgtgaataccgccgaaatagaaggcgaagaagttcaaaagacgttcctaaggggatgcagaacttacaccaaanaataagcggtgaagccgaaaaataaacgacaaagagattntggtcgttcctaaggggacgcagagcttgtgtgtttcagcctgggtgtgtgtcttcggcattagcatcattctttgcatcatatcatcacatcattccgcatagcatcacatcatacatcatattgcaccaatgacatgaattggaaacaaacgatc

SEQ ID NO: 13799 - DNA, 375 bp, Zea mays
  unsure (1)..(375): unsure at all n locations
agctttctctaaactatgccaaanataaatccctagagcaaattctatggaaataatgaaactagaatgtgtaactaggttttgtctaagtgttgctatctctaccggaaaggctaagtttcaatctaaacaatctaaacaaaagacaagattgaaacttagatacttaatgtagatgcggaagttaaagagcaagttagagatgcaaattcttcgggatgacgctggtattntttatcgagggatccggaaccacgcaaggtcccgactaatcctcgttggtgcccctanggcaagggaagtccacgcgagggccaagcacctcggtcgagtaactccatagagagcagcgagccttctccacacgcaagtgat

SEQ ID NO: 13800 - DNA, 485 bp, Zea mays
  unsure (1)..(485): unsure at all n locations
accttaagtcacctgcggcatgcaagcttggtcattttattgctaactgtcctgataatgtatgttatcattaataaggaaacaagagggaaaagaagaagctttattagaaggcgcagggcgaggcgcatctatgcaaggagagggactcggattgctcctcgtccgactccgacaatgaaagactcgccgccaccgccttcaacaaatcaaccctcttcctcaacgagcgtcacacatgccttatggcaagggagaagaaggtatgtactctcaactctacctatgcttcttcaagtgaggacgaatctagtgatgaggatgaagtacattattcatgtttgttcaccggcttatatagatctaagatagacaaaattaatgaattaattgatgccctgaatgaaaagaatatactcttataaaagcaagacgatctgttgatgaagacatgataaattgtgagggcanaaatcctatgctta

SEQ ID NO: 13801 - DNA, 341 bp, Zea mays
gctagcacttacgaccaaaccgcacccgcattcatatctcattcaatggctcaacaatagtggtaagggggacgtaaccaaactggtacgaattatatttgctattggttcatatcgtgatgttgctgactgtgatcgtgtgcctatggatgcttgtaatattctgctagggagaccatgggaatttgattcagattgtatgcatcatggtagatcaaatcaatattctctcatacaccatgataagaaaattatttgcttccatgtcccctgaggctattgtgcgtgaagatgttgctaaagctaccaaagcttaaactgagaacaacacgaatattaag

SEQ ID NO: 13802 - DNA, 326 bp, Zea mays
  unsure (1)..(326): unsure at all n locations
cacaacttctnctgtatcttacatgactgatgaacagtggagggcattagttgcaaagtggtctgatccaaagaacatgggatgggtatcttggcatatattgntctttcactatacctttgcaaaggatcttcgcatattgaacctatgatctaatctgacatgttcattctcttgtangaaataagttgaaagacaagcagaacgcagtcagtaaagttcatcggctacggttctcctgtatgggcacattacatctatgaagaactataccttgtctctacctgccttttcactaacttctattgcattatctgacaaacttc

SEQ ID NO: 13803 - DNA, 326 bp, Zea mays
  unsure (1)..(326): unsure at all n locations
aaaatgaatgagggtagatctcttgaatcttggggatttgaactccttgaagtacctcataacaagggtgtacggggccctctcttgctgttgctgcttgagtangctgccgagagatgactgacacatgtgtgattcttgtagaaccttcttcttatcttctcttcactatcctcttttctcttctcacttttaactttcactgcctctttctttctctttgctctctccactgganggatctatcgatgagtattaccatcatacagaggaggaaacccaagactatgaaccatgtgcaacagtcttcaacccaagaatcacca

SEQ ID NO: 13804 - DNA, 432 bp, Zea mays
  unsure (1)..(432): unsure at all n locations
atctatattatggattgcttttgagtctgtccaattttcttcggtccttctggcagcttcatgacttccatgaatagcaatgggcccttggtccgaaggtatcttcatgcaaagataagctggatgaagaaatgcttcgaagacattgagagtaccacgaccaatgattgcattgtaagggtattccatgtcaacaatatcaaacacaacttgttcagtccttggtgttgtgataaatccgaaggtcactggcattgtgattntgccgagtgctacaatctgccttcctccgaagccgcaaaggggatgtgtggcatcattgaatttatcttcnggctcttgcatctgtctgaatgccttancaaatatgatatcagctgtgctgcctgtatcaaccaaaacattatggaccagaaatcctttgacacacaa

SEQ ID NO: 13805 - DNA, 197 bp, Zea mays
gcatgacaagcaggaaagcaaagtggccctcatcatccacaccaaaacataatgacgacggacaggccgctcgagctactccacatggatttatttcgcccgatcgcttacataagcatcatcgagaataaatattggctagtaattggggatgattattctcgcttcacttgggtattctttctgcaggaaaaatc

SEQ ID NO: 13806 - DNA, 343 bp, Zea mays
  unsure (1)..(343): unsure at all n locations
cacttaaataggaataaaacattagtccctcggatctaagccgacgaggccactaacaggatcaagtaccacgtactaactcgatggtgaggcacagagcaaatacaataaagcatataaccaaacatttaggagtaattaatttattacaacatcatctggagttaacagaagtagtgctcattgttctgattgcaacggaatagaactaacgataaataaacggagggatggngaagcctgtcccatcaatcctcatgctcctcctctgtcgaggtagggtcccactcgactgtccaaacccgtggcatgatggacggncaagtcactccagcaaccatgt

SEQ ID NO: 13807 - DNA, 385 bp, Zea mays
  unsure (1)..(385): unsure at all n locations
tctttattatagaatatnntagatacttcaatgttcataattggcctaggccatgattttatatttttcatggtctnttacccctttcctttatttctacttaattagctcaattaaggttggtattagggtttcaacactctttcctttntgaaaaatcttatttgtttggaacatgactctttagatatatacttagatcatttcttcttaagttaaattgatgcttcatgcttaatttggttcacatgaaaatttaattctttgggtagcactgagagaaaccctangtgacanctgggtgtcacacctggcagcggtggcacttgatgttggaggagcggcctgtggaagaagtggtcatatcaggttttgctgcacactc

SEQ ID NO: 13808 - DNA, 368 bp, Zea mays
  unsure (1)..(368): unsure at all n locations
ctttatgaagaacatgattnattcattaatgttcaaaaagcccttgctctagaaactaagaagaatgaactattgacttctgaattatctgcttgtaatgaatctatctctagcctaaagaatttaaatgatgatctaaatgctcagttattagaagcaaatttttctagttcatccatagagcatgtcgttatttgcaatagatgcaaagattntaacaatgatgcttgtaatgaacatgcttctacaattattaagttaaacaatgatngtgcaagtcttaatgctcaacttaagacttgcaaagataattatgagaaactcaaatttgctagggatgcctacaccaattggagacactcctcaat

SEQ ID NO: 13809 - DNA, 373 bp, Zea mays
gcttgatcaattgaagaagagattgatgtcaccactagtgttggttatgccacgtctgcacaagagatatgacatttattgcgatgcatgtggccaaagattgtgatgtgtgctcatgcaagaaggacatgtgatcgcctatgcgtctcgtcagttacggaaacatgaattgaactaccccacgcatgacttagaactggcagccgctgtgcatgccgtttaaaatttggagacattatatcatgggaactaagtgccaagtatacacggatcataagaggttgaagtatatattcactcagaatgatctcaaccttatgcagacgccgtgggtggagcttattaaggattatgatttggagattcactatta

SEQ ID NO: 13810 - DNA, 305 bp, Zea mays
  unsure (1)..(305): unsure at all n locations
ctatgttgagcaaccctccggctttgaagacagtgagtatcctaaccatgtttatagactctctaaggcgctttatgggctcaagcaagccccaagaacatggtatgaatgcctaagagattttcttattgctaatggcttcaaagtcggaatagccgatcctactctctntactaaaacacttgcaaatgatttggttctatgccaaatttatgttgatgatatcatatttgggtctactaacgaatctacttgtgaagaagttagtaggatcatgacacaaaaattcgagatgtctatgatgg

SEQ ID NO: 13811 - DNA, 200 bp, Zea mays
tacttggtgtagactcctctttcttcttctccgttggcttgaaggccacgggtttcgcctcggatgtggaaagctcatcaagctcggtgatcttcttggagcccttaatcatgccttcaaaactaacaaaattcccgatgacttcctcgggggtcatttgtgtatatctaagattgccacgaattaattgtacttgagta

SEQ ID NO: 13812 - DNA, 241 bp, Zea mays
aacattattccgaagatcgatattgtgtccccttcttgtgccatatgcagcatgatttatgatgcttatgctatgcgaaatgatgtgatgatgttatgctatgtaaaatggtatttattccgaagatacacgcacattcctgcaatgaaacacataatctttttaaatcaacgttgacttttcgctgtaagcctccttaggagcttcttcgcctttacttcagcggaatcagcgttatttt

SEQ ID NO: 13813 - DNA, 344 bp, Zea mays
  unsure (1)..(344): unsure at all n locations
gcgtatgagggcacatgcaccaacagtgcccaatgaaattgtcattgaggccatgattaaggggcttcggccgagaccttcagctcagtactttgccaggaagcctcctcaaactntggagaagctgctccagaagatggacgagtatattcgagctgataatgacttccgccaaagaagggaggaagcatacaggttctctgaaatgaccaggggcttcngatgaagttccatccaaggcacgtcaggtcaattcacaactctgctcagagtgatgatagagggagtcaatagcaaaggccacagtactcctcgcaagcttcggggcagcaacaaagctcttt

SEQ ID NO: 13814 - DNA, 387 bp, Zea mays
  unsure (1)..(387): unsure at all n locations
gacaagtgggtacgacgactgagcaataacagtccccaagctcattcctcacgcgagatcttttaccgtcggccgttatccgcgcaccacagcgctcgaatcgcgacggccagcttgaatcaccgcacgaattcaccagtggcgaagttcactgaacctagaatcttattcagntactgtactatgggagctccattcaatgtgcctgaccgancaagttaaggaacccctttctcataattttatgtaacaacccactaatccgtctatagcaaaagtggtcttctataatccagctttaattttgntatatcaacctcgatcaaacatccactggatcctatgcgaaatcaatctcanagctcatnccagttcattgacaatcga

SEQ ID NO: 13815 - DNA, 148 bp, Zea mays
gtataaacatgggagttgttcaccactcctcaaatgtttatcaagaatcgaagatatggaattaatgaaagagatagatgcaggtctgtgtggatctcacattggatctaggcccttattgggaaaagttttccaacaaagattctat

SEQ ID NO: 13816 - DNA, 417 bp, Zea mays
  unsure (1)..(417): unsure at all n locations
gtaggcttagctattaagccaggatcgaggttagctctattaaaatcaactaagtatagctgaccctctaatacttctttaaaagctattgaatcatcacttcttctaaagacagtaacacctgtatccgaaaaagacaagtgagcccattttacataattgtgaaacggaaagcaaggtgtaatctaaataatctacaagaaaaacattgganatganatggtcanggtgatatagcaatntacccaatccttggaccaaaccttgatttccatccccgaatgtgatagctcgttggggatcttggttnttctcgtaggaggagaacattcttttctccccagtcatatgatttgtgacccactatcgatgatccaacttgagcccccggatgataaacctacaaacaaaattagt

SEQ ID NO: 13817 - DNA, 344 bp, Zea mays
  unsure (1)..(344): unsure at all n locations
tgcaagacttacccgacatagtaaaagactctcaaggatatgctggctttaagggagtctaggtaaggcttatcaataatcaatgactctggttgcaaaaatgcttactanagtggatccttaaaaatccagttttatttgtcaagttaggtaagataacctgtatctagagttctttctaccctagttcaatcacttgacctgcactagccaaattcttaacaacccttattctttactggatttctacgtataggtcagcgactaagtcttcatattcgcgaagttacggcgatccgaatcgattatactcagctgaggatctctaatcacacgacatatgt

SEQ ID NO: 13818 - DNA, 465 bp, Zea mays
  unsure (1)..(465): unsure at all n locations
agcttatcttatcttctttccaacggatctgaccttatctctattattcgttctgagtgctccgcacacatcgtagagatttctggactttctatattaacaagatttgctaagtctgatttaaaggggctgttagcaatatctttgttgtttgggttgtcatagtgaaaaaaaagggtttaagcccctgctcaaaaaaacagacgaagaagaataaaatgaatagaaaagataaaaaaaggaaaagaagaagaagggggctgaatctctaaatctgttgtttctctctgtgctgtgctagntgttctttttcagtgactacctttgtgcctaggctcacgtctctagcctggtttagcctaagaccagcacagtaccacccgtgaacgattattcagcttgcttttgtaactaacgtggtactagtgtattccttgcttcagcccacctacaactctacatatt

SEQ ID NO: 13819 - DNA, 469 bp, Zea mays
  unsure (1)..(469): unsure at all n locations
gcttatgaagattcttcatcccaacatgtgctagtcggcgatgtcatagccagcccatgttagtcttagcaagtaagcaagtgttgagttcagctctatcaaaatttactaagtatagctgaccctctaacactcccttaaatgctattgaatcatcacttcttataaagacagtgacacctacatcagtgaataaacaattgtagcccattttgcataattgagaaacggaaagcaaattgtaatctaatgaatctacaagaaaaacattggaaacagaatggcaggtgantatagcaatttacccaatcctttgaccaaaccttgatttccatccccgaatgtgatagctcattggggagtctggtttttctcgtaagaggagaacatcttcttctcccctgcatgtggtttgtgacccgctgcgattacccaactgagcccagatgataaacaacaaacaagttag

SEQ ID NO: 13820 - DNA, 362 bp, Zea mays
agcttatcagcagtataagcacaaaagagagaaggctgtttctttttatcagctgaagcctatgctcttgtgtgaagacatagcagaccaaaaggtattgctgggatcttagctatctggtgaacaggaaaagtctctgctaagattcttgttcaacaacaaagatgtcttcgcttggacagctaatgatctctgtggtgtcaatagagacgtcaatgagcactcactcaatgtggacccatctttcagaccaagaaagcagaggtttcagaaaatgtctgatgatatagccgaaggtgcacgaaatgaagtgaagagacttctcagtgtcggtggtatcagagaagtaacatatctagagt

SEQ ID NO: 13821 - DNA, 308 bp, Zea mays
  unsure (1)..(308): unsure at all n locations
gaacacgtgataagtctaactaatgtttctttctaaaaagatagaccttgtgcagcttgtcaagcanggaaacaggtgggaagctctcattatgccaaaaatgtgttgacaacatcaagacccctagagttacttcatatggacctcttccgacccgtcgcctatctgagcataggaggaagtaagtatgggtttggtatagtggatgaattttcccgcttcacttgggtattctttttgcaggataaatctgaaacccaagggaaccctcagcgctttctaaagagagctcanaacgagtttgagct

SEQ ID NO: 13822 - DNA, 414 bp, Zea mays
agttttagcaattaagcaagtgtcgagttcagctctatcaaaatctaccaggtatagctgaccctctaacactcccttaaatgctattgaatcatcacttcttctaaagacagtgacacctacatcagtaaaaagacagttgtagcccatttgacataattgagaaacagaaagcaagttgtaatctaaagaatctacaagaaaaacatttggaatagaatggtcaggagatatagcaattttacccaatcctttgaccaaaccttggattccatccccgaatgtgatagctcgttggggatcttggtttttctcatatgaggagaacatacttttctcccctgtcatgtggtttgtgcacccgctgtcgagtatccaactggatcccccggatgcataaacctacaaaacaat

SEQ ID NO: 13823 - DNA, 421 bp, Zea mays
  unsure (1)..(421): unsure at all n locations
ccccctcgcgagacctttntcccgttctttctaaccattatgaatgcgatatcgaatgtcatacttgatgcatggtcactttatttgttcccttgtatgatgtactggttgtttcccaatttgaatggatgaatgtatgtatgtttgcgctcgcatagagaacgatccggtcgaagagcccgaggaactcacaggagaagcccctgagcagcagtcggttggtggaggcaagtgtcctttgacctatctctgtcctattcattacttaattcacctcccgcattacacctttatacctaaggattgactaggctttgttatccatgtccttggttacctcattgggttggaatattattgggtagcttatgctattgcttaactcctatcaatgaacatgatgagagtatctatgatacac

SEQ ID NO: 13824 - DNA, 323 bp, Zea mays
  unsure (1)..(323): unsure at all n locations
aatctctggacacccttgggtggtgataccttaagataaacatgatctcccacctcaaactgtagaggcttccggctcttatcatgatagctcatttacctggcctgagcagcttctaagtcttcttgataattctgacctttgcttctgcttcaagtaccaaatctggcccaaaaatttccctctctcctgcttgagaccaatntagtggggtcctacaccttctcccatataatgcctcaaaaggggccatcttcagactggactgatagctgttaatgtaagaanactctggcaaggatagacacttgtcccaatccttt

SEQ ID NO: 13825 - DNA, 368 bp, Zea mays
  unsure (1)..(368): unsure at all n locations
agcttcaagctggaggaagcgacgctggagctctttgtcatatttggatggaaatntaataatagactctgtcctcttgattattggttgccctttcaagcaagccggttacccgattttggaatatgtggacgctatgtgcggaaacgcagaggcgggaaccttgtcccattgtctaaaaaatgatcagtaggaggcaactcatgctggtcactagaaaaatcagtaacagaaccaaaattacatatttattttgctctaaagtatggtaattggtaaattggtaatataacaagctaatcagttagtttcctcattcaaagatgtacaaagagctcaattgaagtgtgatctaagaagttctactg

SEQ ID NO: 13826 - DNA, 442 bp, Zea mays
ctgatctgaaatggtcatgggccagaagattttcatgtgaaaaaatacagtcaatataagagttaaatagctatttgtgcctcacttattgaatggaatcagccctcttaaaaaatatcactgtacccagattatccacaacacacttcactctattctgatcgaatgcatcttctagtttcagtgaagtaacagctgtgctgaaaactgcagtactgaatataataccagagttcatttcttggatgcgaataactatgaaaatcgaataactatgagaatattaattatttacatctaaaacatctggtttgtatgtgtaagcagtcattaacattcatgatagatcaagagaaaacatacagactcagcctaccagccagctccaatggaaatatcaacaggttcataagctctgcagtcaaacaccatcaaacaagtc

SEQ ID NO: 13827 - DNA, 482 bp, Zea mays
  unsure (1)..(482): unsure at all n locations
gcttcggcactattttcaagcttacaacataattgttccttcttcacaacctctgaaggatattatgaggaaccgagaagctactggaaggattggaaaatgggctgcagagctcaatgaattntgtattgaatatgttcatagatcttcgatttagtcccaggcgttagcagacttcattgctgactggacgccacgggctcatgaggaagaaacaaataaagacgccgaagcatggatagtgttttgcgatgggtcttggggaaccttctgagcgggagcggctgctgtctttggttcacctttcaaagttaaaacttgctatgcggcaaaacttgattttagttgcacaaataacatcgccgagtatgaagctctgtttttgggtcttcggaaattaaaggcaatgggaatcagaagggccatcccttaaactgattcccaagttatttctcgtcatatttgacaaaagtacaagcaag

SEQ ID NO: 13828 - DNA, 378 bp, Zea mays
  unsure (1)..(378): unsure at all n locations
ctcactaactttctagcacaagatgcaattttgggtggcctagttacatgaaaatcaattgacaagttatgagtggaattggtaccaatgggacaatccttgcattgatgtcccttcttccggcaagtgtagcaaaggcgcttttcaagttttgaaactttcttctttccgtgtttgtggctgctacatggttagtaaaaactntcttttctaaccctatgcctctttgtttaaatggngacaagatctaagtaagtgtcccttcttggagcatttaaaacaaagtctatcatcccttcgtaataatcaagcctttttaatgtanggacatgacctaatcaagtgccccttttcaaagcattcactacacctcttaat

SEQ ID NO: 13829 - DNA, 375 bp, Zea mays
  unsure (1)..(375): unsure at all n locations
agcttagtgggttcttttattcttaaatcaacttgataatcattctcaatattgctcacataaaaagatgggtcttggggtaacacttgagagaaaccctatgtgacactggggtgtcacacggggtgacatcaatctaaactttagttgattaaagctatcttggcacttctagtcccacttaaactctcttcccttctccacaagagaggtcataggcttagcaatattagagaacccttcaataaatcaccgataatagccttgccagtccaagaaactctagacttcagtaactatactgngtatgctccacgccactatctccttgactttatcaggatccactgatatgccaccattataaatgatatg

SEQ ID NO: 13830 - DNA, 303 bp, Zea mays
  unsure (1)..(303): unsure at all n locations
tacacagagttggaaaaagtgttgtatgctgtcttaatggcttccaggaagcttcgacattatttccaggcttaccatataattgttccctcatcacagtctctgaaggatattatgaggagcagagaagctactataagggttggaaagtgggccacagagctcaatgaattcaccattgactacgtgcatagatcttcaactcaatcttaggcactagcagacttcatagtcgactggatgccagnggctcacanagaagggacaagcaaagataccgaagcttggacagtattttgcgat

SEQ ID NO: 13831 - DNA, 258 bp, Zea mays
gctagaatatggcgaaggagaccaccgtcgattctagtgagggtggtctggtccgactgaagtataccttcagattcagggagaagtttgatgagccaaatgacgactgactgaagtgcatcgaagctaccagtgatgagctacttggagcatactccaaggccgaagataatgctctgtccgcagcctttggaggtcggggcaagaaaagaatgaacagggtatttgatgctattggcttcgtataccctgattacc

SEQ ID NO: 13832 - DNA, 417 bp, Zea mays
gtgcaagctgtgaagattcttcatcccaacatgtgctattcagcgatgccagagccagcccatgtgagtcttagcaattaagcaagtgtcgagttcagctctatcaaaatctaccaagtatagctgaccctctaacactcccttaaatgctattgaatcatcacttcttctaaagacagtgacacctacatcagtgaaaagacagttgtaacccattttgcataattgagatacagaaagcaaattgtaatctaatgaatctacaagaaaaaacattggaaatagagtggtcaggagatatagcaattttacccaaacccttgaccaaaccttggtttccatccccgaatgtgatagcttcgtggggatcctggtgtttctcatatgaggagaacatcttcttctcccctgtcatgt

SEQ ID NO: 13833 - DNA, 441 bp, Zea mays
  unsure (1)..(441): unsure at all n locations
agctntaggattttctcttttttggatttgttttacccttctaaacaccatttatggttaagtaccctactccagggttttatttgcaaaatgccatatcaatacaacttgtttgaaacttcagcctagtgaatgcattctaggtgtatcaaacacatgaaatgctaatgttgatgatgttatgctcaagttttagtaacagtaacaccaggggtgttacaccacatattcacatacattcacaaacatcaattcacataagtattcacattcacaaacatcacctcacattcacaaacatatagttccaaatagttgcaacaagtcttttacatcaacatatagttccaaattaaacattgacatagttcgacacatagtccttgacatgaacattgacatagttccaaatcaaacacatttgatgaactatcactcata

SEQ ID NO: 13834 - DNA, 460 bp, Zea mays
agcttatgaagattcttcatcccaacgtgggctagtcggcgatgccagagccaacccatgttagtcttagcaattaagcatgtgtcgagttcagctctatcaaaatctaccaagtatagctgactctctaacacacccttaaatgctattgaatcatcacttcttctaaagacagtgacacctacatcagtaaagagacagttgtagcccatttgacataattgagatacagaaagcaaattgtaatctaaagaatctacaagaaaaacattggaaatagtatggtcaggtgatatagcaattttacccaatcctttgaccaaaccttgatttccatccccgaatgtgatagctcgttggggatcttggtttttctcatatgaggagaacatcttcttctcccctgtcatgtgggttgtgcacccgctgtcgagtatccaacttgagcccccggatgcat

SEQ ID NO: 13835 - DNA, 466 bp, Zea mays
  unsure (1)..(466): unsure at all n locations
agcnttgcccttaacaaagttagacaatntcttatgggcattaagtttaacattgcctccctgttggaagccaatgccatccttaatgctagggcgtctcccactatagagcatgcttctagcaaatttaaaattttcattttctaagtcatgctcattaatttcagcagtaagttgagctatgtgatcattttgttgtttaattaaagctaggtgatcatagatagcatcaacattaatgtctctacatctagtacaaatagtaacatgatcaacactagatgtagagggtttgcaagcatttaattcatcaatcttagcatataacatggcattctcatttctaagattggagatagaaacattgcaaacatttaaatctttagccttagcaattaaattatcattctcaatcttaaggctagcaagtgattcattcaacttggtcaatttagaaatcaaacta

SEQ ID NO: 13836 - DNA, 459 bp, Zea mays
  unsure (1)..(459): unsure at all n locations
ttcgggacttacaaaccgacataaaagtagaatgaccttntagtccataaatgtttgagtcaccgttgtaatcccttatgagggatataattgtaattcctcacaggctacgccctgtgtctataaataggtgaacagtacctctgtactgttcacgcaatcttgtaatcactggcacattacgctggaattattgctttctgctaagacgaaggtataaatgtacctaaatattatgtttcaatatttaggttcacataataaaatatatgtgaatattgttatccattttcggcatgtctttctataatgccttatattctacattntacttcatattgnttttcaagtctgatcacgaaggtatgaccttcgtgatattntgtttatggccttcgtccgaagctcattaaatcctcgnggagataatgcttncgcggacgaggnngcattaatatt

SEQ ID NO: 13837 - DNA, 413 bp, Zea mays
  unsure (1)..(413): unsure at all n locations
gaactcaacatttttgacaaactgccgcagccagcaacttctccgaggacaaaccgtaacaaatctgaattgggtggctgatataaggggtgcgctttcaatcaaggcgcttgcacaggatntggatctctgtgacttgctggaaggcttagttcttcaacctgggatttctgataagcatttttggaagttcaccgcgccggcggattactcctctaattctgcctacaaagttcttctccttggagctgatgagtttgggccggctgaacagatttggaagacctgtgcgccacggaaatgcatattttttatgtggcttggtgggcatgatacatgttggacagctgacaagttggttaaaatgcgaatggatcatcccgtctggtgtccgctttgtgaccaagcctatg

SEQ ID NO: 13838 - DNA, 444 bp, Zea mays
agcttatgaagattcttcatcccaacatgagctagtcggcggtgccagagccaacccatgttagtcttagcaattaagcaagtgtcgagttcagctctatcaaaatctaccaagtatagctgaccctctaacactcccttaaatgctattgaatcatcacttcttctaaagacagtgacacctatatcagtaaatagacagttgtagcccatttgacataattgagaaacagaaagcaaattataatctagagaatctacaagaaaaacatttgaaatagaatggtcaggagatatagcaattttaccaagacctttgaccaaaccttgatttccatccccaaatgtgatagctcgttggggatcttggtcgtcatgatgttcttatgtggatgatgggcaccaacttgctttcctgcttgacatgcgctacagaccctgtctt

SEQ ID NO: 13839 - DNA, 422 bp, Zea mays
  unsure (1)..(422): unsure at all n locations
agcttggaggcgtctattggttgtctacttggtgtagactcctgcttcttctcctccgntgccttgaatgcaacgggttgggcttcggatgggtcgccaagctcgntgattttcctcgagccttctatcatgcactcaaaacttacaaaatgcccgataacttcctcgggggtcattttagtatatctaggattaccacgaatcaattgaacttgagtgggattaagaaaaatgagagatcttaaaataacatttaccacttcgtggtcatcccacttcttgctcccgaggttgcgcacttggttcaccaaagtcttgagcccggtgtacatgtgttgtggctcctcccctttttgagccggaaccgaccgagctccccctcaatcgtttcccgcttggtgatcttggtgagctcatctccc

SEQ ID NO: 13840 - DNA, 435 bp, Zea mays
  unsure (1)..(435): unsure at all n locations
agctngtccaagctatgacgtagaagacagcgtatgacaagttcaagcgaatgatgtattttgtaaatctgatgattaatgaaatacatggttcatgattgcaacacttgtcctcattagcctgattctttntatttcttttgttctcacgaacagtcatcaaaactgagatgaaaaggataaataaaaaataccaatctattgcattgctcatgagcacaccaaattttaagtgctcatatgagtacgagtacggaggccatgtgagcacaaggtacatttccataagagttctagaatcttcatatatcataaaggtggcctttggttcctatggattctcaaaattcaaatactacacaaaatccaagacaaatctgttcgtcaacctaagaagagctactgagattttagacacagtccaatgcanaatac

SEQ ID NO: 13841 - DNA, 443 bp, Zea mays
  unsure (1)..(443): unsure at all n locations
catgcaagctngtacacgtggttaggtctnttggggttcttaaaaccgggaggttgttcaacatacactagctcactaatcttaccatttagaaaggcactctttatatccatttggtagagcttgatattatgagcacaagcataagcaagaaggatccggattgcttccaatcttgccacgggagcaaatgtctcaccaaaatccaatccctctatttgagtatacccttgtgcaactaatcttgccttgtttcttactactaatccatcttcattgtgcttgttgcgaaacacccatttggtaccaataacattgtggttctttggtctctcaacaagctcccaaacttcatttcgagtgaagntatttaattcttcatgcattgcattcacccaatcaacatcaagtagagcttcatctacacgggtaggttccataca

SEQ ID NO: 13842 - DNA, 412 bp, Zea mays
  unsure (1)..(412): unsure at all n locations
agacattaacatattctcggtcctcggagccagaagagccatatgtcttgaccactagactactagtgatgataatttatgatagaaatatgaagatcttgtagagacctgttgtatcctttctactactgatgattttttcatatgagagcagtactatctgttgttgaagacggatcctangcggataccagtcttgtttcgttcttgccaagcagttatcatcatttgtttcatgaaaagctagttatatggtgattnttcccagataaatatgaattcttggccttgtctgttctattccaaagcttctctttntgctgaacaatgaagagatcgaaataatgctttatagaacaagttggtatataatatgaggagaaatatttgccctactggcaacaccataaat

SEQ ID NO: 13843 - DNA, 96 bp, Zea mays
tactttcaatacattgtactcacccctagctgatacttttaactaccttttgaagcagggcatacaatggacgaagcgttttatattcaaaactga

SEQ ID NO: 13844 - DNA, 449 bp, Zea mays
  unsure (1)..(449): unsure at all n locations
agctcgagcaagtctcacggcctcaccaggaagctatctgagggctnggatctaacggaggaggacgggagaggggctggccacggtagttgctctcgggcggcactggcgggtcgcggggaggtcgccgaagttaatggctggctcgggcaagtccggcgaggtacggagggggtaacggggaaggcagccaagcactggggcgggctttatagacgtggcgcgggcgtggtcacaggcggccgcgggcgcgcangggttcgcgcacgggcgtgctctgagcgcgcgcccggatgccagctcgcgtcgaacacgtggaagcttgcttctgccatggttcaacggccgattagagcgccatagcgtgcgtatcttggcaaagtcactgtgtacggtcgcttctctgctcaaatcctatcttttcgctgtgagttccaagtcgagatatg

SEQ ID NO: 13845 - DNA, 410 bp, Zea mays
  unsure (1)..(410): unsure at all n locations
agcttatgaagattcttcatcccaacatgggctagtcggcgatgccagagccaacccatgttagtcttagcaattaagcaagtgtcgagttcagctctatcaaaatctaccaagtatagctgaccctctaatattcccttaaatgctattgaatcatcacttcttctaaagacagtgacacctacatcagtgaatagacagttgtagcccatttgacataattgggaaacagaaagcaagttgtaatctaaggaatcaacatgaaaaacattngaaatagaatggtcaggagatatagcaattttaccaagtccttggaccaaaccttgatttccatccccgaatgtgatagctcgtcggggatcttggttnttctcatatgaggagaacatccttttctccccggtcat

SEQ ID NO: 13846 - DNA, 417 bp, Zea mays
agtcataaaatgaccccaaaaataaagttgaatcacatttatacccctgggataccagaaaccctaattggaaccctggaaaaccctaaaaccaaaccctaggggcttatgtgcaaaattagtccacttttgggctaaagtgcaaaaaccaagctaaataagtgttttaagtcaattggttcacaaatatgtggacttgaaagccaaaccctaagttttggactaatttgcaaaaaggaccttgattttgattcctaggctaagtctgaaatcagggttataggcccaactttggggctgtgtagctttcaaaataatgagaattcgtgttaagtgaccacatcaatgttgaggacctaacataggagaacaactttgtttaaggattcaagccatgatcttatgagaaagtgggag

SEQ ID NO: 13847 - DNA, 459 bp, Zea mays
catgcaagcttgcagaattggtaaaaaaagggccggagaaacagtccttcacggaacttattatgctaccccacctcggcgatttgtagtcttagatgatgtactaccatccaatgcatcatctccacgggctagtgtagcctcggatgcacgtgtgaatgtatatcgaccgcaaaaagactaagcggataaataaaaaaggcggacagttcaccttaatacttcagcgttcgcgaccagattgaaactttaaacgtttgattcagatactacattgagttgattcaactatcaattcaactcaaaagtcgtttaaacccccttcggttaaccggtttcccccttctagaacttctctcacgaagttattttctagttagattttttttatatagtttcatccaaaagatttgaagcgtcacagctgaataccctcaagaaaggaagccatgtcaaata

SEQ ID NO: 13848 - DNA, 456 bp, Zea mays
  unsure (1)..(456): unsure at all n locations
gcttgtgcgctattgtcattggtntatgcacctatgtaacaatcaacaacattaatttgatttatttgtattatgtagcaaagtactatgtacttgatgccatatatattctataaaatgttaaatgacctcagttataaatgttaaatgatatattgattgcaactctttgtttcactaagatacattggctttcacctaatatcacatgaagacatcatgattaaatcatatcttggtcgagttagctagagttagagtaggatggcatgaaattttgcatactagtccgcatccatcgaccatccaactcctcaaccaccattcaaataattttatggtacacaaagcatgtggatgcaatccaagagggtcaaaactntgccacaccctattnttaggataaaactgaatgcanactatatgtatgctcatgaattgaaatcatacatatag

SEQ ID NO: 13849 - DNA, 439 bp, Zea mays
  unsure (1)..(439): unsure at all n locations
agcttgtgattttataattgaaagagcacaatctctacttatgaatttccacgaaatatcttaaaatagattgtattaataacacaagcaatagtttcctatttaacaacctctagtatatgaatgacaagaaggttactaaagtaaggaaacctcatgatatgaactaaattacccttacaagcatcatgcataacatcaattgtaaaaaagatgaaagtagtatgattatttaattaagttttacatggcaagtttaattcataacatggtgagtgattaatgtagaagactcaaaaccaatttacacacgaatgaatacatcacatagtnatggttcgatcttctttgaatgttgaatggcacactccatttgggaaacacattctcatgttgtgagactacataaacacttggatagaaacattagtctcacaac

SEQ ID NO: 13850 - DNA, 440 bp, Zea mays
agctttaccaaatggacgtgaaaagcgccttcctcaatggaccaatcatagaagaggtctatgttgagcaacctaccggctttgaagacagtgagtatcctaatcatgtctataagctctctaaggcgctttatgggctcaagcaagccccaagagcatgatatgaatgccttagagattttgttattgcaaatggattcaaagtcggtaaagccgatcctacactctttactaaaactcttgaaaatgacttggttgtatgccaaatttatgttgatgatattatatttgggtctactaacgaatctacttgtgaagagcttagtatgatcatgacacataagctcgagatgtctatgatgggagagatgaagtattttctatgattccaagtcaagcaactccaagagggcaccttcttaagccaaacgaagtacact

SEQ ID NO: 13851 - DNA, 358 bp, Zea mays
cccagtgccacatgttaccagagggtccgactcaaaaagcaatgtatgaattcaaaataattgcagagaatatcagtacaagggacctggtccaggaattcttggctttcaaggttttccctagtgtaaaagagtgggaaatgccgaagctggagggggaaaagaaaaaaggtgaacttgtacgtttgccttactacttcaaatttaagaaatactttaaagctccttgccaagagtggctggacacgattgaagtgatgtgcaacgaaatacttggtaattattccaaaaaagaagatcaattgatgaccgcagccttcggcacccgtccaaaacgaaggctgaatcgagtggtgga

SEQ ID NO: 13852 - DNA, 326 bp, Zea mays
tgcaactgccttatcctgcacttccttctttgccaacatcactaaagaggaacttgtatagaaagatgatatcctttttggatttgctaatgatgagaaaatgcaaagtatatagctcacagcagctgccagaaaccataacgaagttgcaccccatgagtacttatatgaattgctggggctgcatcagccaatgtatgctagcaggtacttaaagaactggatgtacctgtacacaagaatagtctaatgaacctgaaaccaaattttagacgcagattggacagaaaatggacacacatgtactcttgtcgactactattggt

SEQ ID NO: 13853 - DNA, 431 bp, Zea mays
  unsure (1)..(431): unsure at all n locations
ctttaacgaatcaagatgccaattcggctattctacgctatccttggcgcatgaatggtatcttttgcctggaccgtggtggtgttgccaaatgcgatggtaaaggccaatcttcccaccacatgcatggctggtacatcggtttcttgatgtggatccaagagaagcggcaccacgttgggccatggtcaacagccgaccaatccgcgcagcacgacgtaagcgagcgaaaggaaggagcagtgttcccatgcaccgcagctgtatcagacagcgacactggactaattaaactgtgaccaggtgcctctcctctcttncgcgcgctaagctcctgncgtcgaggtcaattataatcctgaacaagttgtgcagcggctgagatncaaccgatgattcagcttactttgtgcaagtagtgtatcatatat

SEQ ID NO: 13854 - DNA, 282 bp, Zea mays
  unsure (1)..(282): unsure at all n locations
atgtgattatagaaggggaattgttcaagcaagtagtatgttccctattgctaaagtgcttattcagaggcaaaggccaacaattaatgaaggaaattcacttaggaatatgcagagctcacattggatccaaaccacttccttggcaagnttttagacaaggattttactggtcgaaggctgcttcagatgcagcggatctaatgcaaaaatgtgaaaattgtcagaaatgtgctagggacataaacaaccgtcattcctaacgcaactgattcaacccac

SEQ ID NO: 13855 - DNA, 463 bp, Zea mays
  unsure (1)..(463): unsure at all n locations
agctcgtggctatntagtgggtgaatttacatgatcacctattcacccccctcctctaggtgctctcaaaaacaacccctcactttatggaaaaatatggaaattgatttataatacaaaagtaattatgggaaaacttagataattcatattttatccattttaactcttttttagaccgttcaagttgcattagtttcgtataaatatttattacgcagtaataacattgattataccatgtcaaatacttttatagttagatatttatttaacctatgtttactagcttaactcgtctaatcatagctaacctgcccataattgtagttcaattaaaatatgatctctagtcaagttataatttagattaaagttgaattaattatttctttagattatctttataaaaatcaatataagacttagttctaattgcttaatcacatagatctttcgaaaa

SEQ ID NO: 13856 - DNA, 481 bp, Zea mays
  unsure (1)..(481): unsure at all n locations
tctcgtacccgttatnctcgagtcacctgcggcatgcaagcttgaagccatggtaagtagcataggctaataatatgcgaattgactcatgcttagctacgggtgcataggtttcaccgaaatccaaaccttcgacttgggagtatcccttggccacaagtcgggctttgttccttgtcaccacaccatgctcgtcttgcttgttgcggaacacccacttgattcctacaacattntgattaggacgtggaactaaatgccatacctcattcctagtgaagttgttgagctcctcttgcatcgccaccacccaatccaaatcttgaagtgcttcctctaccctgtgtggctcaatagaggaaacaaaagagtaatgctcacaaaaatgtgcaacacgagatctagtggttacccccttatgaatgtcgtcgaggatggtgtcgacggngtgatctcgttggattgcttggtggactcttgg

SEQ ID NO: 13857 - DNA, 448 bp, Zea mays
  unsure (1)..(448): unsure at all n locations
agctcgaaccgaggacccgcgtcaccggaatatctaaaccgtgctcgccggagttctttcccccgccggcgcacgtggaccgggtaatccgctcaaccattttccgattcctcgtgcacacggtctctacgttaccccgtgaagctcaaagtgcccttggattgaaccagatcgctgtgggttggccggtacacttgccaccgacgagaatacccgcctgcgcgcgtggaccgaactattccggccacccccgccgtcgagccgcacctcgctgtgaccgctagagcctccccgagccaaccctgcccttcgccggacctatctcgccgccggtaagccgcgccacccttttcttttccgcggatactgtttacattgngggaaggactgcgggtgagaggaagagaangtcanggggctttttgaactgtcagcgactcatgggaat

SEQ ID NO: 13858 - DNA, 446 bp, Zea mays
agcttcttttcgagccaactctgcctctgtccatgttgacaccgctgcctccggctccggctcatcgcagagcggccgagggtttctttaactaagcaagagaagcctcgggcggcaaggccgaccgagccgagggactcctacgcctccgggatacggatacctcactcgtcaccttccgcacgaggcaactcacacttggttaagcggtccagttagccgacaggcgagtcctagtgctcgaaatgaggaaaaaacctggtattacacccaaaatacctagatgttcaggccccgacaggcgacagccacaatgaatagacaccagcactcaaggtgccattacaaacggaactccggttccaccctcgcaggtatgaacaaccccccacattggagggcttgtgggacagcgaaaccccaggtggcccgccgacccgtgcggg

SEQ ID NO: 13859 - DNA, 299 bp, Zea mays
tcggcttcgtgaccctgtatgaatcaaagtatggtaagcaaagtctaagcttgaaggaagaggtaagtacaacgtatgattttgttaccggcttaagatgacttcgagcttcatcaccagctttgcttcgtccaccctttgtccataccaattttataaatctatttgctatacttcgggcaaggatgggaatgttatccaaatctgctggtgataagctgaaattgggtctattgataaccttatcgtgtttgcagccagacttcaggaaggcaacagctgggccccgagaagctacc

SEQ ID NO: 13860 - DNA, 357 bp, Zea mays
aagcgcctttctcaatggaccaatcaaagaagaggtctatggtgagcaaccttccggctttgaagacagcgagtatcctaatcatggctataagctctctaaggcgctttatgggctcaagcaagccccaagagcatgatatgaatgccttagagattttcttattgcaaatggagtcaaagacggtaaagccgatcctacactctttactaaaactcttgaaaatgacttgtttgtatgccaaatttatgttgatgatattatatttgggtctactaacgaatctacttgtgaagaggttagtaggatcatgacacacaagttcgagatgtctatgatgggagagttgaagtattt

SEQ ID NO: 13861 - DNA, 426 bp, Zea mays
  unsure (1)..(426): unsure at all n locations
aaatgagatgtgaactgcgttcctcgatctgacactatcttcttcggcacaccatgaaggcagactatccgtgacatgtataactcagctaacgttgctccggtgtatgttgtcttcacgggtatgaaatgggccacctttgttaagcggtccacaaccacccagaaggaatcataaccggcccgggtacgaggtaggccaactataaaatccatcctgatctcatcccacttccactgaggaatccgcaaaggctgcaacaatctggcgggcctctgatgctctgctttcgttctctgacagctatcacagatggcaacatattctgcgatctctcttttcatgccataccaccaaaacctcctttntaaatcctgatacatcttctcactttcccggtgtatggagtaggctgtctcatgagct

SEQ ID NO: 13862 - DNA, 448 bp, Zea mays
agcttaaccttgtaacgaggataagctgcctttgttccaaaggtggatggtccttaagcctctttgaaatccttaaggaaaaaagtttgaaatatttacaacatgctttcataagtgcataaactgtcatgagcatcacacttatactatgacacaatgcacttcactttctatatgatataggtatgttctcatttacctaattatgtgcaattggcatttaagaccaaaatatgtgttcctctccatgcacatacttagggggagcaatctatgttatatagaactatgatcatgcttaatttaatatatcctcttgatcatatctcttttatatgctatgactaatgtgttttcaagtaaattccaaaccaagtcatatgtacattgaaaggggaatggagtcttcggcgaagacaaagcttccactctactctatcagtattat

SEQ ID NO: 13863 - DNA, 316 bp, Zea mays
  unsure (1)..(316): unsure at all n locations
agcaaatctttatctaattcctaaatttaacttggtcaaaaggtctaagtgacatgtgtgtgttgaatcaaaacaaccccgcaagcctcacaaggctgctgaggcgaggaatttgacacctctagaacttgttcattctaatctgtgcgagatgaatggaattttgaccaaaggtggtaaaagatactttctcacttttatagatgactccaccagattntgctatgtgtatctcttataaacaaaagatgaggcgtttaattattttaagacctataaagctgaagttgagaaccaacttgagaggaaaataaaa

SEQ ID NO: 13864 - DNA, 276 bp, Zea mays
  unsure (1)..(276): unsure at all n locations
aatctaagtgacatgtgtgtgttgaatcaaaacaaccccgcgagccacataaggctgctgaggcgaggagtttggcacctctagaactttgtcattctaatctgtgcgagatgaatggaattttgaccaaaggtggtaaaagatactttctcactcttatagatgactccactagattctgntatgtgtatctcttanaaacaaaagatgaagcgttcaattattttaaggcctataaagctgaaggtgagaaccaacttgagaggaaaataaaac

SEQ ID NO: 13865 - DNA, 446 bp, Zea mays
  unsure (1)..(446): unsure at all n locations
agcttgcacccaggtacattggaccattcctggtgctngagcaatgtggaccagtggcgtaccgactccaactacccgaaacattgtctgctgtgcacaatgtgttccacgtgtcacaattaaagaagtgtcttcgggttcctgatcgaaccgttgaaataactgatgttgtcctggaaccagatttaacatactcggaacatcctattcgagttctggatcaaaaggacagggttacccggagaaagactctcaagttctacaagatatagtggaaccagcattctgaagatgaggctacatgggaaacccaagactttttagataagaatttcccaggctttctagcctcctgtaatttgaaagtgtatatagttgttgtaataaagaagtgacccccacatcacccctgccttgtaccaaaaataatgaaataaaaatgtgat

SEQ ID NO: 13866 - DNA, 378 bp, Zea mays
  unsure (1)..(378): unsure at all n locations
agcttcggaacactacgacttattntcctcatgtgtgagcaagttttctctccttcgtcgaccctcacaatggataaatcccggaagtatcttcccctcatgttggcaagatgattttctttgatgcctgacttgccaaaaaccgcatggcttggtcgccaagggcgatcttcggagtcttcaccaccactatccacatcataactgtcgttgtcatcagtatcttcagacaaaccttctaaaatctctttggtgattttttctgtgttggtcttcgacatttctataagaaaccccaggttcttctcctcagagagactcagctacatcttgggagcaggcttcatatcttgagagattcccaaaaacactacaaaa

SEQ ID NO: 13867 - DNA, 441 bp, Zea mays
  unsure (1)..(441): unsure at all n locations
agctnctacttagttgatttgaaaagaagaggccggtctagatgcatgcttaattgctaagactagcatgggctggctgtggcatcgccgcttagcacatgtggggatgaagaaccttcacaagcttctaaagggagaacacgtgataggtttgactaatgtacaattcgaaaaagatagaccttgtgcagcttgtcaggcagggaaacaggtgggaggagcgcatcacagcaagaatgtgatgaccacatcaagacccctggagctgctacatatggacctcttcggacccgtcgcctatctaagcataggaggaagtaaatatggtttagttattgttgatgactnttcccgcttcacttgggtgttctttttgcggataagtctgaaacccacaggaccctcaagcgcttcctcaggagagctcanaatgagtttgag

SEQ ID NO: 13868 - DNA, 457 bp, Zea mays
  unsure (1)..(457): unsure at all n locations
agctntctcaacctttcttggtgcttattaaatatactttaatttttataattggctcaagtcatcattttgaaatttttcatacccttctccttattttcttaaatttgttcatggggcttatttagggtttttattagggttacacattcttacctctttaaaagacccatttgttttgatcatgatacttttaagcatatgctngaagaattctttattcctaagataatttgatgctcatgcttgctttggttcacataaaatgatggttcttggttttacacttttgagagaaaccctaggtgacactggggtgtcacaattacaataccatagtacaagctcgagagagccagaaatacaaagcgcagtagaagataaactagcccaagccacaggcagaactgggtgcacacatagccccccttaatcaagcatagcagaaaagaagtct

SEQ ID NO: 13869 - DNA, 468 bp, Zea mays
  unsure (1)..(468): unsure at all n locations
agcttagaaaatctaagaaacaaagcaactgttgtgttgaaagagataagaaattaagcaaagcaaagcaggcgtatcaaatgtgctcggggtgagttcttatttatacgctcagcgcgctccaagttggagggccccgtttgtcaatgactgttactattctagcaaagggaaggtgttttttcggaccttcggcttagggctttcgtccatatcgtaatctgaattcgttattctaacaaattaaccttgcgaggggctactgttgggggccttcatcttccgaaggtcctcaaaaacatgatttaacaatgtttctggagtgtaatacatgaacatgtatctttgaactcggatcagaaccacagtgtgaagaagcacaaagaatacgaaggttggcgcagagccgaagctatgcgcaagggagcttcggcatgatagcagaatagggacccgactaanaagggg

SEQ ID NO: 13870 - DNA, 205 bp, Zea mays
cctatattgcatctagggcttgtctaacctacctgagataaccgccgacaaagcgagtgaaaaagcttaaccccggcttcaacttgacaagttctagcttttaagcttttggtacctgaacttcatttactattccaatgttggtttctgagatatgcatgtggtactacacttatggggaggattcacaactcaattcatacat

SEQ ID NO: 13871 - DNA, 244 bp, Zea mays
cattacactgtgcttaccttctttatcattacgttctttggattccaaccaccgaaaaattatagccttccgtatcgagagcattttcttattagaatattcgagcacattgaccacatacctaatggattcagtggttctacttaataatggttttctcaagaaccattgatgaagaaggaccactcgaagagtcaggaagccgcgtgacatcagcaattattgtgtcaggaacaatcacacc

SEQ ID NO: 13872 - DNA, 312 bp, Zea mays
ctgcagttactaaatgattggtcgaaagattttttttagatgcatgcttatatgtcaagaccatcttgggctggctgtggcatcttctcttaacacatgcggggatgaaaaaccttcacagcctctaagggaaacaccggatgggcctgaccaatgtacacatcgtaccagatagacccttgtgcggtctggcggcatggactcaggcgtgaggagcgcatcccaccgagaatgcgataaccacatcatgaccccacggagctgcttcatatggacctcttccgacccgtccgctatcttagcatacgatga

SEQ ID NO: 13873 - DNA, 413 bp, Zea mays
  unsure (1)..(413): unsure at all n locations
agcttggtgccaattgagaagcagaagtctttgaagtcctggctgtcaaattgtttgtcgttgtcaactgtgagctcggatgggactccgaatcggcaaacaatgttttgctagaagaatttttgggtagtcttcgatgttatcgtggataatgccctcgcctcgatccacttggtaaaatactcgacagcgacgaaggtgaacttgaggttcccttgggccgtgggtagcggtccgacaatgtccaggccccagcgctgaaggggccacgtgtgggcaatcagctntgtgaattgcgaagggtttcccgaccgtggagaaaacttctggcaggtttcgcacgaccttgtgacccgattcgggcgcagatcatagcangccagtagaagccttggcggatcaccttggcagct

SEQ ID NO: 13874 - DNA, 164 bp, Zea mays
gatcctacactctttactaaaacacttgagaatgatttgtttgtatgccaaatttatgttgatgatattatatttgggtctactaacaaatctacttgtgaagagttcagtaggatcatgacacagaaattcgagatgtctatgatgggggagttgaagtattt

SEQ ID NO: 13875 - DNA, 430 bp, Zea mays
gctgtcagcatgtacgagtagtatttgtgttataaaatacaagaaaaaaagatctcttaagttctcaacttttgcttgatctttgtgtgtggactgttagtgttcatatggcgcagcccaaatattcttgtcctgtaattgaacacaagaatctgttgagttgatgtgcagcctcctgtaattgaacacaagaatctgtttagttggtggtctggtcatggagctcaaatttgatccaatatgaattatgatacgtattgcgtactctaaatatttatgtttaatttttgcaaaaaaaaactatataagccttagctgcagctatagctgctacagaacccattcgctaaaatacctagactgagattttaacattgatggcagtgaaaggaatcatgcttccaaaacagggagcgagaatatgtgtgtt

SEQ ID NO: 13876 - DNA, 405 bp, Zea mays
  unsure (1)..(405): unsure at all n locations
agctttggaaatccaaaattttttgcaatcttctcggtaacaaatatttccttggtgtctgggaggcagtataaaaaggcatctttgtaacaccccacgtgttacccaaggccctggctccatacatacacttatgacttggtatcacatgtgtttaagtggaggaggagcaccaaaaccttggaaaccatgggtttaactaaggaaggttcatgatagaagtattacccaagaattttatgcaattatcaccttgaacaaaagaggttaaaaccctagacccccttcttgagccattagccccccaaacactggattaatggaaaagataagcaaatgaacctttcatgacttaaacccttaaccaaagnttaagtacattaacatatctacaaaatttagtaa

SEQ ID NO: 13877 - DNA, 429 bp, Zea mays
  unsure (1)..(429): unsure at all n locations
ttgagcgcgcttgcaagctcccccacccacctncagtggcaactgtgtctctaggaaccggaaataacctcccctcttcttttttgatgggtaagtggccaacatcattcttataaacagatttcctttatattattgtgtcgctgaggtttcacacaaaaggaaagttgaagtcatttctatgttttctcatccatgatttaagatagaataatcaaattctcctgtatctcatcaatggtgaaaaattgaacatactgattagtatactgacgctccaatcactatcattcatctacttgttacatgtatacatattgtcaaatactttgtactccttatgttccaaaaaaacttggtcctaagtcaaactatctaatgtttgaccaaatctatatactggtaggatgggcattctgatgatgaaga

SEQ ID NO: 13878 - DNA, 442 bp, Zea mays
  unsure (1)..(442): unsure at all n locations
catgcaagcttcngacctcgtcaccagccaaatcccgactccccttcgcccaaatctgtgttataaatttgctctctatgctccgggcttcaatggggatgtcaatcaaatctattggagataggttgaaggtcggtcttttcacaatctttgcgtgcgtacagccagccttcagaaatgttgcagctgtgccgcgagaagctagcacggcacagaagtcgttgtgcccggctatcacttcatcaagcgcctcgacttcgccttcaatgtgttcgaaggtgcttgatatgtgttcagctgaaggggtaaatttttcagcgctggccccaactgagttaaaaacttttttcaatcgctgtacgcaacggctgccaaaacccaaacacatgttccgaagctctttcacagattgctgcagttttgtattctttcagcttcagct

SEQ ID NO: 13879 - DNA, 460 bp, Zea mays
agcttcagcgacaggggctatcgctctgcagccactggacccaaaccaggagaccctttctcttcaagaggcccgaagccagaagaggaaggccactagtccaacactccaggaggaggagttggaccaagaaatcagaaacatggagatgcttcatcaacaagtacaaaggaagaaggagaagatgacctgactagccgatcttcaaaggcagattgacgaagccactaaagaagtacgccatcttgcccaagacgaacaagagcaaaggccccaatatagggagcttcaccaagaaggcttcttcaaagaggatggatggtatgatgattttaatcatgatacctttacttttgacgatgcttctcccttggcagcagaactgcagtctatcccatggcctccatcatacaagccacctcagctccccatgtatgatggacatttagatccaaagcaa

SEQ ID NO: 13880 - DNA, 421 bp, Zea mays
  unsure (1)..(421): unsure at all n locations
agctntagtgggatgtgtattagcaacctgctttccagcttgacatgcactgcatggcttgtctttttcaaataccacatcctttaatcctctaaccatatctttctttaataccttcttgagtgtgctcattccaacatgtgcaagcctcctatgccaaagccatccaagagaagctttggtgaagaggcaagttcttaagtctgcatcttctgaagtgaaatccactaagtagaggttgttgtatctaaatcccttgaataccattgattcatcatccatttttgttacaataacctctgatggagtaaataagcattgaagtccaagatcacagagttgtcccactgataataaattgaagctcaagggtgcaactaagagaacatttgatattgacaggtcatttgagattgccacc

SEQ ID NO: 13881 - DNA, 207 bp, Zea mays
tatcttatgtgagcattcttttgcatctataggtatttttaatatacgcttgggagaaagatgtggtcctggatatttcgctggtgtatactgagtaatctatgttatggttgactcagttatcgagattaataggtgctgaatgattctccagaaaattgtgggtatctatattaagacttaacctaatcttccctctgcagatct

SEQ ID NO: 13882 - DNA, 443 bp, Zea mays
  unsure (1)..(443): unsure at all n locations
agctttcctcttcttcggaantttcttctttaatgggtctttntcaccttcaattaaggcttcagctatccttttccttatttggcctccggcacctttgttcagatgttcgtaatcagggtattcgaaacccagggcgtccagcactcggtttagtcttcgcttcggacgggtgccgaaggccgcggtcattaattgatcttcttttttggaatagttcccaagtatttcgttgcacattgcttcaattgtttccagccactcttggcaaggtgttttaaagtatttcttaaattngtaatagtaaggcaaacgcacacagtcaccttctttctttttccccttcaacttcggcattttccattcttttaaactaggaaaaacttggagagccaagaactcctgaaccaggtctcttgtactaatatgatctgcaacaattc

SEQ ID NO: 13883 - DNA, 431 bp, Zea mays
  unsure (1)..(431): unsure at all n locations
catgcaagctngagaaggggacaaccgtagcatgcacaaaaccccttcaaaagaataccaagctttccaagaaggacatgagcaagactcaaggtgagaaaattaatgctcatattatttgctctaacaatgtacctatgtgcttcaacaaagaaagatcaaagagaagcgataggaggtgctatggatgcaaggagaagggtcatgaaattggttcatgcccccgcatgaagaaccaagaccttgcacgatcaagaaagatgaccatcaataaggatgaaatcaaaaggcaaatgcattgcaaggacaagcaccacatttgctacaattgccgtgaaagaggtcatctattcaaggtttgtccaaagggtaaaacacctaagcctaacctgtcaatacattcaaatatacttatgagacccacatttgac

SEQ ID NO: 13884 - DNA, 446 bp, Zea mays
  unsure (1)..(446): unsure at all n locations
tagcttcagcttcatctatattgtggatggctttngagtctgtccaatttccctcagccttcctgccagcttcctgacttccatgaattgcaataggcccttgttccgaaggtatcttcatgcataggtatgctggatgaagaattgcttcnaaagcattaagtgtcccacgaccaatgattgcattgtaggggtattccatgtcaacaatatcaaaaacaacttgttcagtccttgtgttgtggacaaatccgaaggtcactagcattgtgatcttgccaagtgctacaatctgccttcctccgaagccacaaagagggtgtgtagcatcatgaatcttgtcctctggctcttgcatctgtctgaaggtntagcaaatatgatatccgctacactgnctgtatcaaccagaacattgtggactagaaatcccttgatgacacaag

SEQ ID NO: 13885 - DNA, 380 bp, Zea mays
  unsure (1)..(380): unsure at all n locations
agctngcatgggcggagggcagtctcgcctgccaacgcgccgaggagctagaggcgaggttcaatagcctgcgcaaccgtgtggacaaagccgatgcctcgacgcgcgtggaggtcgagcggacgcatgcgcagttcgtggatgcatactgggaactgggtgcgcggaccgccgccttcgaagcgcctggccaagaggcgggcctccgcttccttgaatggttacaggaggagttgggggtgctcccgacgatcgtgacgggcctcatgtcctttgcctccctcgtcacctgcgagggggccgtaaatgctntgtcccacgaggggtgcgggcattttgaggtcttcgaccaatcggacgaaaactttgaatgcaaaatc

SEQ ID NO: 13886 - DNA, 401 bp, Zea mays
  unsure (1)..(401): unsure at all n locations
gcttgtggcatggtttaatgatagacacactcatgcagntggattgcagaatgagggagagagatgggctccaaagcctaagacctttctagagaaggcaaaggaaagggcaaacacacacacttgtgattgttttgacttacagtcagggacatatgaggtattccttcaagctggtactacttctgacggcgagtcacaagagtcgaggaagcatgtggttgtccttaatgacttgtcatgtacttgtggcgcacccaggcaataccattttccatgttctcatataatcgcagctgctcgagctcgtaactntgacttagagaggaggatacctcaagagtttactattgataaactagtgttgacttggagtccaagatttattccttatcgtgaca

SEQ ID NO: 13887 - DNA, 204 bp, Zea mays
acagtgataagctttttttagcatctacagcagtgtggggcatttacttacaagcgtgagtctgacacgaatacatatctacacaataaagacaccttgatgtggacttactatatgaagcattactaaagaacgtcatatatatgtgttgttacatttcttgacacttttaaaggaatggattgataactgtgaccgggatgg

SEQ ID NO: 13888 - DNA, 405 bp, Zea mays
  unsure (1)..(405): unsure at all n locations
agcttganataacatatgtgtcatgtttttatacgtttctttctctagttaattgggatgtagtattgtgttgcgtaaatatccaaaatgtttgtcgtctttttagtggtgttaatgttgtgcgctcgacgatatgtagttagttaatgctagtgtgtgtggttgcttgtgatgtcttgctatttagtgtttacttcgctagcatgtacttaaagtatctcgtgctttcattatattcatacatatgcatcttgcacctcatataggaccgagagatgatgatcgagccagtgatgtggtgccaaccacaagatgcagtggtggacgacctgaagaatggtggacttacccagtggatgctcgccaagcgagtaccttctccagcaaacactatctaagtgttaa

SEQ ID NO: 13889 - DNA, 453 bp, Zea mays
  unsure (1)..(453): unsure at all n locations
agctnggtgccgatggagaaacaaaaatccttgatatcttggctgtcgaactgcttgccgttgtcaactgttagctcggacggtactccgaagcggcaaacgatgttctgccagaagaatttttgggcagtctttgatgtgattgtggaaacagccctcgcttcaatccatttggtgaagtattcgacggctacgaaggcgaacttaaggttcccctgagcggtgggcaggggcccgacgatgaccaggccccagcgctggagaggccatgtatgggcaatcagctttgtatattgcgaggggttgcctgaccgaggagagaacttctggcaggcttcgcaggacctcgtgacccgatttgcggcgcagatcattgcgggccagtaaaactcttgtcggatcaccttggcagccagggcccttggccctgcgtgtgacaccccagtgtcacct

SEQ ID NO: 13890 - DNA, 408 bp, Zea mays
  unsure (1)..(408): unsure at all n locations
agcttctaaagggagaacacgtgatagggttgactaacgtgcatttcgaanaagatagaccttgtgtagcttgcaagcaggtaaacaagtgggaggagcgcatcacggcaagaatgtgatgaccacttcaagacccctggagctgctgcatatggacctcttcggacctgtcgcctatctaagcataggagggagtaagtatggtctagttattgttgatgacttttcccgcttcacttgggtgttctttttgcaggataagtctgaaacccaagggaccctcaagcgcttcctcaggagagctcaaaatgagtttgagctcaaagtgaagaagataaggagcgacaacggatccgagttcaagaaccttcaagtggaggagtgtcttgagggccttgtttctttctc

SEQ ID NO: 13891 - DNA, 459 bp, Zea mays
agcttcagctccatctatgttatggattgcttttgagtcagtccaattgcctttctgcccttccttgcagcttcctgacttccatggatagcaatgggtccctgatccgaaggtatcttcatgcaaagataggcaggatgaaggattgcttcgaaggcattgagggtaccacgaccaataattgcattgtaagggtattccatgtcaacaatgtcaaacacaacttgctcagttctagtgttgttgatgaacccgaaggtcactgacatggtgatcttgcccagtgctacaatctgtcttcctccgaagccacagagaggatgtgtagcatcatgaatcttatcttctggctcttgcatttgtctgaaggccttagcaaatatgatgtcagctgcactgcctgtatcaaccaaaacattgtggaccagaaatcctttgataacacaagagataaccatg

SEQ ID NO: 13892 - DNA, 400 bp, Zea mays
  unsure (1)..(400): unsure at all n locations
gcttctaaagggagaacacgtgatagggttgactaacgtacaattcgaaatgttttaccttgtgcagcttggcaagcaggtaaacaggtgggaggagcgcatcacagcaagaatgtgatgactacttcaagacccctggagctgctgcatatggacctcttcggacccgtcgcctatctgagcatatggggaagtaagtatggtctaattattgttgatgacttctcccgcttcacttgggtgttctttttgcaggataagtctgaaacccaagggaccctcaagcgcttcctaaggagagctcanaatgaggttgagctcaaggtgaagaagataaggagcgacaactggtccgagttcaagaatcttcagtggaggagttcttgaggangaagggatc

SEQ ID NO: 13893 - DNA, 348 bp, Zea mays
agcttcacggtcttttgttgagctagccgtattactggctgggcttgagggtggctggagtgggatggccacggtgacccaagctctggcggcaatggcgggtggaattaagctcgccggagctaatgaaaggtggctggcccgtaaaggcgggtgcggtgcgaatagaggtgcgcccagggaggctttatatgcgcgagcgggcacgaccgagggcgtgggcgcgcggcggacttgaccggacgccggggtgagcgcgcgcgcgggttgggcgagctctggcgtgccgaccacggtcgaacacgtgtgcccgtgcgttctgcccaagttctggcgcgtgtggtcgct

SEQ ID NO: 13894 - DNA, 361 bp, Zea mays
agcttgtctgtcggaatcgaacgaagctccagtttgaaacctgcttcggaggaagaaaatattaaagtttcacaagttcataattaaatggccagagtccgctctaccgccagggttgagcgcgagggggaggaaactgaagcttcggagactctccctatctccgaagccatgcaacgatcggggctagtgacttcggaaaagatccctcatgatgatgcagaacaagcagaacaagtaatcgctgaagcagaggaagaagatattgaggaaactgattccgaagatgattatcgcattgccatgccaagcaagccgagccacttggacttcgggaaatctactgtttcgaaggctgatc

SEQ ID NO: 13895 - DNA, 418 bp, Zea mays
  unsure (1)..(418): unsure at all n locations
agctntaccttgcgaaagtatggtcgacgatggatgtgaggacgatgtaattggaagtatgttgccaccatcaatttccgcgtttatagcattcacttggaaggaaacagtgctataaataattgtgctctcggtgaagctaacattccactcgaaagacttttccagtagatttgtaatttctcttggaatgaaaccgggtggattagtcgagatgagggcgtccacattttttttaatgaggcgctgcgccattcgtccaaagaagataaactcggcggtgtcagtatcgtcttcagcggtgaggaatatcttgtacatgcacagagtggtttgattgttggacatcacnaaaacatgaaattgtagacggcgaaacccttagttcaatttacttctaaattctgcagtagacact

SEQ ID NO: 13896 - DNA, 431 bp, Zea mays
  unsure (1)..(431): unsure at all n locations
agcttgaaggccatatcaagaagcaggcccctatatattntgtatctgaagttcttagtttgtcaaagaaanaatatacagaattggagaaagtactgtatgttgttttgatggcctccaggaagcttcggcattattttcaaactttcaacataattgttccttcttcacaacctttgaaggatattgtcggtgtttcgagaccggtggtccctgtgccgacgaatgaaatgtcgctgcgtgccccaacccagatgggtcggcgcgaggccgagcgcgaaggggggagaaaggtggccgaagacgggcgtgagagaggtggaaatcccgcggccttcgtgttcgtcccgcgcncaggtcgggtgcgcttgcagtanggggttacaagcatccacgcgggagagggagcgagcggtcttacgcgagcgcct

SEQ ID NO: 13897 - DNA, 448 bp, Zea mays
  unsure (1)..(448): unsure at all n locations
agcttatctgttgtaaactgtgcacgaatcgcatcaagagatcgaccaccggcgacagctcactggcgacgagcaggggggtgaatcgtgatcttcttcagtttagggtctactgtaccatggcagaactgattcagtcgcctaacagagccctttggagcatggttttctctcaattttgaatgacaactcaactcaaactctgcatcaaagttgtaaagcaacataccatctacaatattgccatatgatgctgccacaaaaacccattggatcatggttgaagttgatgtcagttcattgttagtctgaaaattcagaccaaatcaacctgacagccaaagtttgagcatgattatttctaaatttctcacaagaacatggcttgccctcttcagcanaaatgttctcctatgaaatgggctacaatttgatgtggtgacctaat

SEQ ID NO: 13898 - DNA, 404 bp, Zea mays
agcttgcaccctggtacattggtacttttcctattcttgaaagatatggaccagtggcatatcgactccaattacccaaagcattgtccgcggtgcacaatgtgttccacgtatctcaattgaagaagtgtctccgggttccagaccgaaccgttgaagtgactgatgttgccttataaccagacttgacgtattcagaacatcctattcgagtcttggatcaaaaggacaaaattacccaaaggagaactctcaagttttacaagatacattggaaccaacatacgaaatatgaagctacttgggaaactcaagactttttagaaaagaatttcccaggctttctagcttcatctaaatggtgagacacttgttgtaatagaggaatagaccccataccaccc

SEQ ID NO: 13899 - DNA, 374 bp, Zea mays
  unsure (1)..(374): unsure at all n locations
atgcctggtgttcactgntaaaacattcaattccaatgtcctgtgaaattgntaatgcaacacatggaactgggttcctggtgaactttttttttaaaaaaaaatttaaacctgattcatggttcacaaatcgtaagttcttcatggggtaggtagctagttgttgacactgctaatcatgggtggactcaatctgcatgatccgtatatgtttttttaccttcaaatctatactctccctaagcatatcatgtaacagaagcatccaactttcactntaatggcaaagttgaaagtcatttctagagtcctgatgtgtaccaggttccaagttcataaaagggcagcattataacttgtttattgatgcaaat

SEQ ID NO: 13900 - DNA, 455 bp, Zea mays
  unsure (1)..(455): unsure at all n locations
agcttctaaagggagaacacattntaggattaacaaatgttcttnttgagaaagacaggatttgtagcgcatgccaagcaggaaagcaagttggctcacatcattcacacaagaacatcatgacgaccgacaggccacttgagctactccacatggatctattcggcccgattgcttacataagcatcggcgggagtaagtactgtctagttattgtggatgattattctcgcttcacttgggtattctttttacaggaaaaatctcaaacccaagagaccttaaagggattcttgagacgggctcaaaatgagttcgacttaaggatcaagaaaattagaagcgacaacgggacggagttcaagaactctcaaatcgaaggcttccttgaggaggagggaatcaagcatgagttctcttctccctacacacctcaacaaaatggtgtagtggag

SEQ ID NO: 13901 - DNA, 425 bp, Zea mays
  unsure (1)..(425): unsure at all n locations
agcttatcaagtctactntcatatggatccggaattatagtcatatctgttctgaggccgccgtaatcattgttttcttaccgagacatttcctgccttttctgcccatggtgctgcgtcaccctattttggcccaatgggtcgtgtatcaagttaggtccattagggacgcatcctagggttgcagcacgaccccaatacccttgtggtcgtcctcccatgtttataaaccccctagccgccaccaagaacagcgggttttgtttagatcaagtttagctctcgctacttgcttgtaagcgcgcgtgctggttcagccgcccgtcttcttgtcttcggaaccccaccatattggagtttgatttggaaacctacatttagatctggtaattcagtacttgttctacttgttcttgctagttctt

SEQ ID NO: 13902 - DNA, 378 bp, Zea mays
  unsure (1)..(378): unsure at all n locations
gcatgcaagctcggagagatggaggctntgaatgtgtcttggaatggattgctagctctcgtattgaatgttgaaggtcggaatgcttatgtgtagtgaatggaggtggttggggttgtatttatagccaccaaccacttcctagccgttactccattctgctgagcgcggacggtccgcccctgtagatcaacggctgataatgcaacggtcagcagtaacggctatatcaacggctatattgcatttaatgcgtcgtcagatgtcagacagacctagtcgcggacggtccgatcgtgcaccccggacggtccgcgaggccgctataattcatttttccgaacccgtcaccttcgggtttntcggatccttgcctac

SEQ ID NO: 13903 - DNA, 467 bp, Zea mays
  unsure (1)..(467): unsure at all n locations
agcttgccttcgcgtcagtctatcatccgcaatccaacggngtcgtggagcgcgccaatgggaaaatcttcacagctgtcaagaagatgctcctcgatgaaaaaaggcagatggaccgaattgttaccggaggcagtctgggcgctaaacacaactgagtgcagggcgactgggttcactcctttccgcctcctatacggatcggaggccatgaccccgcaagaaataaagcatgggtccccgcgtacagttccgtcagccgtccccgacgtggacgagccaacttcaaaagatctcattgacggagaccgggtcttcgccctacaggccctaaacaaataccaagcccagaccaaagcatggcgcgaccacgcggtcattccgagggagttcagcgagggggacctcgtactcgtccgaacagctcggacggagtccaggggcaagctggagcccaagtgggaggg

SEQ ID NO: 13904 - DNA, 460 bp, Zea mays
  unsure (1)..(460): unsure at all n locations
catgcaagctttccatgttgtgcttgaacattccaatcttatcccgcatctgaccgtgtttaccgtcacaagttggtgttcttctgcaggccgaatccagcatgttcaaatccttttccctttcggtcttctgcctgattcctaagcaaaacaagagtgcacgggtctccatggtctaaatatgatggacatgaactcaagagtgtaatcacctgatggttgagttgacgagcacgagcgcgagtaatgggaccagaaattggtacttgtattggtatagatgcatcagnagagaggatgtcttcatcacatgagttatgacctaaagaagnggattggcatgttcgttggcaaaacacaaaatggttctggggcaaaaactcatgcttgatgcacctagacacccggtttggaattggtacgtgcggaatgaaattgacgaaacccccttacatgagtt

SEQ ID NO: 13905 - DNA, 428 bp, Zea mays
  unsure (1)..(428): unsure at all n locations
agcttgacaaatgtattgtttagttcatccgattggccaactgtaaaatgcatcgctgcctgctagactatctatggacttgagcctttcaaattaggactctggttggtttgcgcatgcagagtcaagggaacaccgatggttatgttatgctagttactccacctgcctaaacaggattgagtggtcaaatactcaaattaataaaagccctgttcccatggctcggatggctgatcacagtggatcatctctgtagcttctgaatgacatgacgctaggatggcggttccttgaagataataagccagtgtagttgactgatattcgataaccaagattacccgtaaaatgtaatccctaccatagatatagaacttttttntttctactactattgtacgtgttaaaaaatgaccgatgcaaac

SEQ ID NO: 13906 - DNA, 432 bp, Zea mays
  unsure (1)..(432): unsure at all n locations
agctttangggaaatagtcataaaatgtccccaaaaataaagttgaatcacctttatacccctaaggtaccaaaaaccctaattggaaccctagaaaaccctaaaaccaaaccctagggacctatgtgcaaaattagtccacttttggactaaagtgcaaaaaccaagttaaataagtgtcttaagtcatttgggtcactcatatgtgaatttgcaatctaaaccctgagatttggacttaagtgcaaaagagccacactttttctcaaatgcttaagtctgattttcagtgatattgcctcaactttggagctctacatcttccaaattattgagaaattgccctaggtcaccacatcaactatgtagatctatcttaggtgaacaactttgcttaagagtgcaagccatgttattgagaaaaatctggag

SEQ ID NO: 13907 - DNA, 411 bp, Zea mays
  unsure (1)..(411): unsure at all n locations
agcttgtgaagattcttcattccaacatgggctagtcggcggtgccagagccaacccaagttagtcttagcaaccaagcaagtgtcgagttcagctctatcaaaatctaccaagtatagctgaccctctaacactcccttaaatgctattgaatcatcacttcttctaaagacagtaacacctatatcagtaaatagacagttgtagcccatttgacataattgggatacagaaagcaaattgtaatctaaagaatctacaagaaaaacattggaaatagtatggtcaggtgatatagcaattttacccaatcctttgaccaaaccttgatttccatccccgaatgtgatagctcgttggggatcttggttnttctcatatgaggagaacatccttttctcccctgtcatg

SEQ ID NO: 13908 - DNA, 433 bp, Zea mays
  unsure (1)..(433): unsure at all n locations
agcttcgggccagcagcaaagttcttttcggtcgccagcgccaaggggcagaggcgccaggggcttcggnggaaggtttggagatcagccaagaaaaatttattgcctattctatggtgaagacaagggccataccaccaggatgtgtcacgttaccatccagaagcagaaggagatagcagaagcagctgcgcaacaaagtcagccgaagcaggtcatgcatactgcttcgtatcattcgccttatattccagaatatgtaggcaaccaccccgcagcttctgttgcttcggcaagccaaccccaagcatcttggcagcaccctccaccaccaccgccgacgcagcgaggacagcagccagaagggagtcagaacaatcatcttcagagagacttcagagaggagtccgaagctcgcacagtcaatagcact

SEQ ID NO: 13909 - DNA, 422 bp, Zea mays
  unsure (1)..(422): unsure at all n locations
cttgtcaatacttatctatgcagcagcatttaccagcacaacaactggcaaccatacctgtaacatgtccgttcgcgtgctgtggactggatatgtgtggacccttcaagatggctcaaggaggatacactcatgtactggttgctatcgacaaatacactcatgtactggatatgaatggacccttcaagaaggcagtggaattcatacagaacgtaatattcaggttcggaataccgaacaacatcataactgacctaggatctaatttcactagttcgaagctctttgatttctgcgaacaaaanagcattcagatcaaatatgcatcagtggcacacccaagaaccaacgggcaggtagaaagaccaacataatgatattggaagcactcagaaagaaagtcttcgaccagaatgaaa

SEQ ID NO: 13910 - DNA, 403 bp, Zea mays
  unsure (1)..(403): unsure at all n locations
agcttgtacttttatctccacggctaagatggtaccttcgttntctcctctgcgatggattcgtccaaaggtgctcttcggtattcctcttgttacacttagaacaaactaaaaagtagttgtaaagttagtgttttgaggaccttcggaagaataaggaccaagggtgaagcttcatccggaccataccgaccgagccaaaccacatcgcttcagcaacccggctgacatagcatcgcacggaccacaggcgcacgtattcaatcgtatcacaccgatcgggccccaccaaatctctttttccacttgctacgtacctcctcgcatccatcagtcacggtcgtcgggtatttcgctgattcaaattttcattccacctcgctcgatcgcccttggtgtttta

SEQ ID NO: 13911 - DNA, 409 bp, Zea mays
  unsure (1)..(409): unsure at all n locations
gcttgtgaagattcttcattccaacatgggctattcggcggggccagagccaacccatgttagtcttagcaattaagcaagtgtcgagttcagctctatcaaaatctactaagtatagctgaccctctaacactcccttaaatgctactgaatcatcacttcttctaaagacagtaacacctatatccgtaaaaagacagttgcagcccatcttgcataattgtgaaacagaaagcaaattgtaatctaaggaatctacaagaaaaacattggaaattgaatggtcaggagatatagcaattttacccaatcctttgaccaaaccttgatttccatccccgaatgtgatagctctttggggatctttggttttctcgtaggaggagaacatcttcttcntccctgtcat

SEQ ID NO: 13912 - DNA, 455 bp, Zea mays
agcttctaaagggagagcacattttggaactaacaaatgttcattttgtgaaagacaggatttgtagcgcatgtcaagcagggaagcaagttggtgttcatcatccacacaagaacatcatgacgactgacaggccactggagctactccacatggatctatttggcccgatagcttacataagcatcggcgggagtaagtactgtctagttattgtcgatgattattctcgcttcacttgggtattctttttgcaggaaaaaacacaaacccaacagactttgaaaggattcttgagacgagctcaaaatgagttcggcttgaggatcaagaaaataagaagcgacaacagaacgaagttcaagaattcacaaattgaaggctttcttgaggaggagggcatcaagcatgagttctcttctccctacacaccacaacaaaatggtgtagtggag

SEQ ID NO: 13913 - DNA, 467 bp, Zea mays
  unsure (1)..(467): unsure at all n locations
agcttctccttgtcgtcatcaactttgacgtataaccattctgatttccagcctgccggccacttgcttcgatagctgatcacaggaaattntgtagttttccgatatgcaaagttgtaacaaccaaaattttcatgtagcccatcctttctggccttagtttggtagtgtagctcgtgtactcggtagaaacctttggcaaatggctccactgcttggcttcggagagcccaaatataaacactaagtctaacaatagcattaggagttagttggtggaaatagatcccaaattttttcagcacatcggcaatcatcctattcaaaggaaatttcaaaccagctttgaggaaactcttaaaaatcactatttcatctttttgtggcttcggggtaatttcttctccaccaaagcgaatcatctttttctcatcttcgctgaagtagcccgacttcaccatctttgg

SEQ ID NO: 13914 - DNA, 482 bp, Zea mays
  unsure (1)..(482): unsure at all n locations
ctctaagctttgccgctgcaagcttgagctccaacaaccacccccctacctgaccatgcaagttgcttcctctctgaagatattgagtgttgatgaaaaggaaggagatgccccatcaaaaattccttctgttcctaaagttccacaatgtccatgcccccagctacaattaagttgctgatccatatttggactttttatttgatttggtcaatcctagtggatcaatccaacttgtaggcaatttgctgtgtagtcagaattgtgtttttgaacttgtgctaaatagttntacattttggtactctatagtcacaaaagtggtattttggatttttggtcatccgtactgcccctaaaatcaaatattgaaaactattgcctcttctatatattatgttatgtaaaattccggtagggcaaatgtctcctttgggtgtccactgtccaatctaaaatgccagaatagatagcaaatgtat

SEQ ID NO: 13915 - DNA, 224 bp, Zea mays
  unsure (1)..(224): unsure at all n locations
ttgcagcactatgcaccaaactgattggcctaaagtctttgacatgcacagncccatcatgctttgggattaaagtaatgtaggccgagttaccaagcaaaaattgcaaacttcctgttcaaaccgcagcaactacaccataagatccatttgatatgtccaacagattatagaagccccagtgaaccatcgggacctgggccttgcattatgaaactcttaat

SEQ ID NO: 13916 - DNA, 444 bp, Zea mays
  unsure (1)..(444): unsure at all n locations
gctgaagaggatctacatcacctgcactaccagttatgtgatgcgaggaatgaaaggctacttgcagaaaataagccagaatgcttgctacctacagcgtcagattgccaaccttctacagcttgcgattgtacaagggaagaggtaagttatcttcaaattcaaagttcaaatctattnttaaaatcacaccttttttactatgaaaattgtgactgtttctttgtcaattttctatttaagcctgaacaaacattaagatattcgagattcaaagattatcaccaagtggaggacggtttgtcaactgaacctgaagatcaacaagatgacgaanaagacgccgaagatggagaacatgtatctctaaatatgctggtagaaaagcaccaagacgtttctttaactggactgttggaacacattntacacacacttcatgga

SEQ ID NO: 13917 - DNA, 449 bp, Zea mays
  unsure (1)..(449): unsure at all n locations
agcttnggggctacacccaatgggtgcacccatcggcagaacagaaatcaggccacataacaaacccataagccagaccaagaatctttgggctgattatttcaaaatcaactcaaagattggtggcttgtgggggacagatatcccctaggtccactagaaggcgagaaggcctcacgtggggccatgggctagttaccccacaaggccatcccttcgtgggccgtgctagagccattggtggaatgggccgacctgagaaggcaacgggctcaaccccaagcaatctgtcgacttgtgtgctatccacaacaaccacccgagtttcccatgcacgtcgtcctcgaatatcagagcggattatggataagtcggcaagaatgtanggagatcagttcagtcggttcgctattatntaagagacatatgatcctcatgtgcgtatggag

SEQ ID NO: 13918 - DNA, 445 bp, Zea mays
  unsure (1)..(445): unsure at all n locations
agcttanccagaagtatcggacatagattcatgacccatatctgggtaagtggcgggtggaaaatggcaggcgacgaagctcgaagccatcttaaaccggtaagaaacttatgtntattacttttaccttctcctttgaaatttgtacctttcttactctgctatttggtatatacaggatgacgaagctgaagattgacaatgctgaagcttgaaaaactgaagacgaagccttagctggagcttaaagttgcttataatgtgctttcctgcaaaaattcttggagaaactcttgtaatatagaataacttatgtaaatntggacataccttggaatatatcatgtctcccttggccgtattcaatctgctntgctgtggacgaaacttctcttttgagccgaaagcgaaaaacacctttccttcttttcgacacaacgaagca

SEQ ID NO: 13919 - DNA, 443 bp, Zea mays
  unsure (1)..(443): unsure at all n locations
agcttatgaagataaatcagcgntcgctatgtgcatcttctctcttgctctnggacctggagaggaaccaatcacatttgttggcaaaactgcggtaagatgcctttttctgtttgaggagttctgaagtccgatgcagctgtggatgaactgatttactaaaatacctgctacagtgctgctgttagcaaactgtatcttgagagtatcttttactaacttaatttcgttttagtagcagaccagtggaacaattcagtaacatgtgtacaactttatctattggagcataaagagagaaacaatgaaccattagctctgttagattgtttagccttgttccaaattctatgcgcatgattgccttggtacagtaggaggaagtattttgattgtaccataccactttgatgaatgctgcaacatatttatttttggaatat

SEQ ID NO: 13920 - DNA, 387 bp, Zea mays
ggcagaggcgccaggggcttctggggaaggtttggagatcagccaagaaaaatttattgcctattatgtggtgaagacaagggccataccaccaggatgtgtcacgttaccatctagaagcaaaaggagatagcagaagcagctgcgcaacaaagtcagccaaagcaggtcatgcatactgcatcgcatcattcgccttatattccagaatatgtaggcaaccaccccacagcttcttgtgcttcggcaagccaaccccaagcatcttggcagcaccctccaccaccaccgccgatgcagcgaggacagcagccagaagggagtcagaacaatcaccttcagagagacttcagagaggagtccgaagctcgcacagtcaatagcact

SEQ ID NO: 13921 - DNA, 435 bp, Zea mays
  unsure (1)..(435): unsure at all n locations
agcttcggatccttagccttgcaactcttgtttatatgacccgaaacaacctgggaatcaggtttgagtatagcccttctgattcccattgcctttagcttccgaagacctagaagcaaggcttcgtactcggcaatgttatttgtgcaactaaaatcaagctttgccgcataacaagttttgaccttggaaggtgaaaccaacacagcagccgctcctgctccgaaggttccccaagatccatcacaaaacactatccatgcttcggcgtctttatttgcttcttcctcctgagcccctggcgtccagtcagcaatgaagtctgctaacgcctgggactgaatcgaagatctatgaacatattcaatacaaaattcattgagctctgcagcccatnttccaatccttccagtagcttctcgggtcctcataata

SEQ ID NO: 13922 - DNA, 93 bp, Zea mays
atacctcactcgtcccttccgtgaaaagcaactctcgctcacacaaacattcctggtaccgacagagtccagatgctcgaaacaagaggaaaa

SEQ ID NO: 13923 - DNA, 217 bp, Zea mays
  unsure (1)..(217): unsure at all n locations
atattattcttagcaattaagcaagtatcgagttcagctctattaaaatcaactaagtatagatgaccatctaatactcccttaaatgctactgaatcatcacttcttctatagacagtaacacctatattcgtaaaaagacaattgtagcccattntgcataattgagaaactgaaagcaagttgttatctatagaatctacaagaaaaacatttg

SEQ ID NO: 13924 - DNA, 383 bp, Zea mays
  unsure (1)..(383): unsure at all n locations
tgcagcttgtcgcaatataagcacaaaagagagaaggctgcttcatcatatcagccgaagcctatgctcctgtgtgaagacatagcagaccaaagggtactgctgggatcttagttatctggtgaacaagaaaaaactctgctaagattnttattcaacaacaaagatgtcttcgcttggacaactaacgatctctgtggtttaacagagatgtcattgagcattcactcaatgtggatccatctttcangacaagaaagcaaagacttttggtaaatgtctgatgataaagccgaaggtgctcggaatgaagtaaagagacttctcagtgctggtgtcatcagagaagtaacatatccagagtggctagctaacactatcat

SEQ ID NO: 13925 - DNA, 157 bp, Zea mays
atccttaagcaccgccgctgcagcttatcgggcactggcggagctaggcaaacactggctctacttgagggtggctggagtgggctggccaccgtggccgaaactctggcggcgatggacggcggaaaagagctcgccggagctcatgaggggtggc

SEQ ID NO: 13926 - DNA, 218 bp, Zea mays
gcacattcatgagttgttatatgagacttgcctctggggaaagaacaatatcacaacaacgttgggtgttacagcttctgtgcccgctccgggtcaagccgccctgtgccaacttttctgaagagatggcccggagcctggatgacagagtggttctatgttaagaatgacttaacagcgcaagaagatgtcaagaatatcattatgcgccccatctg

SEQ ID NO: 13927 - DNA, 222 bp, Zea mays
  unsure (1)..(222): unsure at all n locations
agcttatgataagattatatggtcatttgtgagacaatctttatatatgaaaggagtttcacaaaaagggtgtgagtggattagtagttttactcacaaaggccatgttaacattaaactgaatggacagctaggcaataactttcaaactaagaaggggctaccgcaaggtgaccctctctcgccggttctatttaatatagtagnggatatgctcgctat

SEQ ID NO: 13928 - DNA, 170 bp, Zea mays
  unsure (1)..(170): unsure at all n locations
gattgctcttttatacatgtntctaagttctcaattataacttcctgcctcttattctctaagtcctgctgcatttttaaggccttgctcaaaagcatactctgtggacaaataaccttctttagagaatatttgtgttattacacaagatgttagacacaagatgttta

SEQ ID NO: 13929 - DNA, 166 bp, Zea mays
  unsure (1)..(166): unsure at all n locations
tgggcgaatctggagagagatcatctctggggtgctcctcacctcctacctcgggtgttatttaatggtcacccgggaagcctcatttcacataaaagagggttgcgatagggggatcctctntctttgatgtntgttatgcttgtcatggatgtgcttggtcagc

SEQ ID NO: 13930 - DNA, 312 bp, Zea mays
  unsure (1)..(312): unsure at all n locations
accactgcgctcactggcggaatttgctgaaatgatgaaccaaccctgtcgggaacagggtcaagcggataaataaatggcttctaagcacaacttatattattatatgatgaccaatgtgaatgtggcagaacgccaaaaggcaagggtttaagtcagtacaagatccaggcacctgataccctctctntagcacagaatccaagtggaggcttgttgcctgatatattaagaacgagcggtaccatatgtgcatcacacattgttacatgagccagccctttaaatacttaccgagcatatatcagatgg

SEQ ID NO: 13931 - DNA, 212 bp, Zea mays
catgcaagcttcccctcatggtagcgagctcgagtttctcccatggcgccttaccatgttcttccctgctcggccagcaactagggcgtacaaagcccctgtgctcggcgtccttattacacctccggctgacctccctgtgcatagcgcccccttcacctttggccgcgctccctgcacagcgacccgctccccctggctctaccgcgcgc

SEQ ID NO: 13932 - DNA, 474 bp, Zea mays
cttcatccccacatgtgctaattctgttatttacagccagcccatgctagtggtgagtattaagcatgcatctagaccggcctcctcttttgcaaaatcaactaaataaagtttgccgtctaatacacccttaaaagctagtgaaccatcacttcttctaaagacagacacatctacatttgtgaatagacagttatacaccatgttgcataagtgactaacagagtagtaaatattatccaatgacttcactaataacacatcagaaattgtttgtcttagaaattggatcttactaacctttacgttgcttgatcccacaccgatataattgaatttggaatcttttctgatgtggagggacatctctttccccgcaatggttgtgctcgtataataatcactgaccccgatgctaactgaggcaattagctggactagaccaatatgtggtctaacgtagacaaatctagg

SEQ ID NO: 13933 - DNA, 245 bp, Zea mays
agcgtgtggaatgtgaagacaactattcttatgtgtatgtatggcttgaatgaaaggcaaggtggagcggagggataacaggatgaggcgcgcggcgactggcggcatggctgttctgccttgcgtctgggctgaaaacgaggtgttcgccatggcgcacgggccgaaaacggaggctcgggcacgaactcgaaaataagctaagttcaagcatgtggaaagacaccgaacatacagtgtatgtc

SEQ ID NO: 13934 - DNA, 458 bp, Zea mays
  unsure (1)..(458): unsure at all n locations
tgacgcatgcaagcttaatcatgagtcgttactatccacgagcatgaatgttctgtgttgaaagtaccaggtaaacataatgcagaagaccacatctacggtagctattaaggataagctttagaggctttgtttcaagtgaaaagaagggaagatgtttttcgcctttgactcacaataccagtaagaattggtttcacacgcaacanagcatttagaataaaaataanaacgtgataaaaagtaaagcgttgtattacaataagaagtagttcaacttcataaattgtcattttaaaatacanaagtcccttcggcctaatggttcggctaagctttgactctgtcttacttattcactctcttcgtcttcttattgacttncttgctctatagaaagagagacaaagtaaatattaaggaagagtaatgaataaagcttcgacagtacaaactta

SEQ ID NO: 13935 - DNA, 134 bp, Zea mays
gctctttttagtttattacccgggcagggggtttaaccctccgccacaaggcaaatttgtgtcttaaaacataacttctttttcaaaaactttgaaaccattgtaaggcactgcttaaccccgaaacgtcttgg

SEQ ID NO: 13936 - DNA, 78 bp, Zea mays
gcgctctagacgcaccgctcttataatgacacatccatgtgccctgattgttggcgcaaaccacactacggtggaaac

SEQ ID NO: 13937 - DNA, 162 bp, Zea mays
gtgcagcatgtcaagcatgtaaacaggtgggaggagcacatcacagcaagaatgtgatgaccacatcaaggcccctggagctgctacatatggacctcttctgacccgtctgctatctaagcataggaggaagtaagtatgtgttagttattggtgatgact

SEQ ID NO: 13938 - DNA, 246 bp, Zea mays
  unsure (1)..(246): unsure at all n locations
gcttagtatgcttactgagttcattaatgggaatatgtatgcttgttatgaatacttcattttgggtgacataaacttgtatgtcatgcttctatgtatccataaacaaggcacttgggaatacttcattttatgtgatatgaacttgtatgtcatgctaattgtatgcatgaacatgacactttggattatatgaatgttgtgatgacttgtgggttatantgtatcatgtcaaatatatgcatg

SEQ ID NO: 13939 - DNA, 301 bp, Zea mays
tctattaaaaacaactcaagatagctgaccctctagtactcacttaaatgctactgagatattacttcttctaaagacagtaacacctatattcgtaaaaagacagttgtaacccattctgcataattgagataccgaaagcgaagtgtaatctaatgaggttacaagaaaaacattggaaatagaatggcacgtgatataacaattttaccaagtcctctgaccaaaccttgatttccattccagatgtgtagctctttggtgacatcggtttctcgaggaggaaacatcatttctccct

SEQ ID NO: 13940 - DNA, 165 bp, Zea mays
  unsure (1)..(165): unsure at all n locations
ttagtggagttatcatcatcaatataaacataanaattaagaattaaaacaaatactattttgaaacagatagagtattcgataagtaattgagacacgttaagaatataaacgagactagtcgatacctcgataacgcatcgctctttacgtatttatgtctat

SEQ ID NO: 13941 - DNA, 331 bp, Zea mays
  unsure (1)..(331): unsure at all n locations
ggttttaccaaaaatcataccttcgacttgtgaataccccatggccacgaatcgagctatgttccttgtcaccacaccatgctcgtcttgtatgttgcggaagacccacttggttcctacaacatttnggttggacgtggaactcagtgccatacctcgctcctcatgaagtagttgagcttctctttggatcgccatcacccaaatccgagatcttgagggcttcctctacccctgtgtggctcaataaaggaaacaaaagagtatcgctcacataaatgtgcaccacgagatcgagtagttacccccttatgaatatcgccgaggatgg

SEQ ID NO: 13942 - DNA, 491 bp, Zea mays
  unsure (1)..(491): unsure at all n locations
tgacgatgcagcttggtggatcgtgccggagagtaaaataatctcttttgtgttatagctcaacctgacgggtctgagtttagtggtgagaattgccttgtgttgggttaaccaattcatacccaagattacatctatatcttggccgttcagaatgatcatattaacaggaaagtttcgtccggccattgttactggcacttcatangccacttctctagtataaatgtgtcccccaggtgaatgaaatttaaatccctccttcgatccatggatacgcaatgatgttgttcacaaactcttgctattaatgtatgtgagcaccacaataaaaagataattgctggtgactggccacggaacgtaccatatcaccggtctcttcggtgataccactgagtgaaataaccccatttttctatcttccatacattccttatgtgactgattccaaccttggaacatagatgatttgctagaatggcagtctt

SEQ ID NO: 13943 - DNA, 389 bp, Zea mays
  unsure (1)..(389): unsure at all n locations
gcaccatangtgcaccgtatgggtgtaaaccccgagcgttgaatggattactgaaaataatncactcaaaggtattcatctatgcttttaaaatcatctttaatttcgcaatgcttaagtcacattattcgcagcttatgctttgaaatcncatacagtttgtctgataacaacgcggctacccttgtctgttggtttgaaattattgatctgtacagattgacaattggagatagctctggctggcttatttcgcttggctcaagctctgtgataacttgtctcatactattttgcttcctcatctcataatatttctttgttgaacattatgcgatctgggaaggacactggaatattgaaatctgagcccccatgggtgcaagacg

SEQ ID NO: 13944 - DNA, 152 bp, Zea mays
ctaataatattcttattgctccgcctactacgggtgataggtttaccgaaatacaaccttctacttggaatacccttggcacgagacgagcttgttcttgtaccacaccatgctatttgcttgtgggaagaccatttggttctacaacattt

SEQ ID NO: 13945 - DNA, 189 bp, Zea mays
catgctagccctagcaattaagcatgcatctataccggcctcctcttttgtcaaatcaactaaatataggttggcggctagtacacctcttaaagctaatgaaccattacttcttctaaagacagacacatctacatttgtgaataaacaattatattccatattggaaagttgactaacagacaacaa

SEQ ID NO: 13946 - DNA, 142 bp, Zea mays
tcacatttttttttttcttaaaacatgtgccttccgccaccaaaatcttttatactcctgttcacaagtcttacctctcacaatccaatttatcctatcctcacaccatggcgcagaacaattataaaagattgacccctca

SEQ ID NO: 13947 - DNA, 214 bp, Zea mays
tctctaaggggctccttttgtttattttattatataaataaaacatacatctacataagtgtatattaaatcctaaaacttagagtgtgcagacaataagtgaacctattttatttaaacagagaatagttctatgaacactttgcaatttgaatcactaaatatggagttcatatgcgaaagttatgaaataaacaagtttgggaattcaaaa

SEQ ID NO: 13948 - DNA, 361 bp, Zea mays
  unsure (1)..(361): unsure at all n locations
cttttgtgcacttactaccttgngcaagaggatgtatatttctatacctctcttgaaccctatctttcaagccatcgttgaaagggggagagaataaacaaacgtgcaaaccatgagttaatctttaaccaaactntaattaactttataaccaccaattgtgggaaggaaatgttgcaaaaagacccctggagaaaccccaaatccattccttaagtggagagagagctagagctctctaattctttctaagtcaaaaactacacctacactaaagatcaaccgtgttcaccttgaagatggcaccaaaaccacctatgttctataccaaaaatgtggcataccacctacggcacccact

SEQ ID NO: 13949 - DNA, 401 bp, Zea mays
  unsure (1)..(401): unsure at all n locations
attctcatggcgagcatattgatgaacctcttgcatcaattctggtgtcatctcatctccttgggcgggcttcttcacacctatattgatacttttccaaagacttggatgtacaacgattagacacaacttcatctggtgggcccacacgtcataattcaactcgttaagagttggaagttttctaaggggcgtcgaagtgaagttgagaacaaaattacgggattaatcaaattgaacttgatggaattcgttacctcttgcttttggtggatgaatcttcngtgttgagacttaccttgtcatcaccttagacaccaaaagctcaaccaagtcatcattgtactccaacttgcctttntctttatctactttgggttttcttcttgattcttcttctt

SEQ ID NO: 13950 - DNA, 225 bp, Zea mays
accaagcacgagctcactgtttgctggtaacacgataagccctttcttcgtttggcaagcactgtgacggcgcttcttgcttattctactttttttgtgagtccagtcaagatatggtcggcttgggagatagggggggagaaattggctgtgtcagctatgtccaagccgagacaaaaatggtgtcagtcgtgtctagcgccctacggtaggtgtcatctcttt

SEQ ID NO: 13951 - DNA, 167 bp, Zea mays
  unsure (1)..(167): unsure at all n locations
taaatcaaaaaaaaaccccgaggtgtgctgaagcgacccaannaagagcgcactctaaggaaccatatagaaacaagtatttagcccagagggggaaaggcaacgaactaaaaaccacacaccgggacggaaaaaaatgacccagaagggcaaacaaccaagcaaaa

SEQ ID NO: 13952 - DNA, 280 bp, Zea mays
catatgcctcaaactacaaatgccgatactcccggggcattttattatctggataccacaataatgacctggttggtcaggaataaatatttatatacctaccactctggtcaccacttacctcccagttgccactggtaccaagtctgaccgtgtcatgttttgctctccttgcaaaccaaccacgactccctcacgttcccgtgggactgaagctcttcctggcgtgtgaccatccaaccctgcctctaactgacttgttatccttataaaagcagat

SEQ ID NO: 13953 - DNA, 433 bp, Zea mays
  unsure (1)..(433): unsure at all n locations
acttcgtgcctcagcacatcatattgacagatcgattgtctataggtttcttcatattcaagctgttgtgtcattaatgcaatatgatgtatgatgtaatgttatgcgaagtgatatgatgatatgatgcanaatgatgacaatgccaaagacacacacccacacgcncacactggaatacacaagactctgcatcctcttatgaagcgtctttgagtctntaagctctgcatccccttaggaacgactnttgagcttcttcacactctattttggggcatttaagctttgcttcccttggaacgactttgagcaaaaacttacctcgctccttggaacgacttttgtactcagactaattttggtctgcttcactagacaatttgacagaaactatctgcctcctangaacattttgtacttaatataattt

SEQ ID NO: 13954 - DNA, 203 bp, Zea mays
agaaagacaggatttgtagcgcatgccacgccgggaagcaagtttgctctcatcattcacacaagaatatcatgactagtgacaggccactggagctcctacacatggagttattctgcccgattgcttacataagcatcggcgggagtaagtactgtctagttattgtggatgattattctcgcttcacttgggtgttcttt

SEQ ID NO: 13955 - DNA, 116 bp, Zea mays
  unsure (1)..(116): unsure at all n locations
cacatcatcacacaaaacattatgacnagtgacatgccactggaagctcttcacatggatctataccggtccaatcgcttacataagcatctgcgggagtaagtactggctaatta

SEQ ID NO: 13956 - DNA, 173 bp, Zea mays
  unsure (1)..(173): unsure at all n locations
tgagaactgcgcgtttggaaatatataatttgcaactcattcctttattcttataccaactcttttacatacacgggttaatactaagcaacgcgttaagggcgcaaaagaatgcccaagaccagagctatgaaantgctttcaacaacctacgatcagagggtattaaactg

SEQ ID NO: 13957 - DNA, 147 bp, Zea mays
aagggcctgtccaagatttatccagatgtggggaaatgctcaagcttaatgcctgaccagtgatgagggatatgcaaatgaaacactgtcgtttggtgtgaataccaagtactgcattgtgatttccaagtgcacaatttgcgtcct

SEQ ID NO: 13958 - DNA, 477 bp, Zea mays
  unsure (1)..(477): unsure at all n locations
atcctcttagtcacctgcggcatgccagcttttccatttccaacaatctgctggtttatggaaaattcgactagttattgtcaagtagaaaatttggacaaccaccctctcttatgttggattccagaaatgatgatattgctattgtaaataagagtaatcacctgttcatggtaagcggcatataggctggacagagcagtaacatcttgagacaaaaagagatagggaatggtctcaggcagaataaatgggaacaaccaacccttaatattggtgacatgggaagaccttttactactggtctcaaagtgcattagagtcacctcagtgtactcgaagagatgacaatanggatccaactacagatagcacaacaagtgaatcatttccagaggcatgtctgagcatgaacctangtattgcaaacaatggaaacaggatggaggctacttcaatagtggaaagacctatgat

SEQ ID NO: 13959 - DNA, 320 bp, Zea mays
acgagctcgctatctctggaggcttctatcgcatttttttcggctcacggcacataaggagttaacacctggaattacaacactgtttcccttaaggtagcgtcagttctcctttttacatctaataagctaccatcagaagacagcttgcttgcaagccgaccttcttgggtaaaggggacccttgctaaatttctcgaaagttttacaaacatttcctttgatggtgtacgatctaaacagcaaagacttacggagcgccaccaggatcaccctcggtcgtcctatatacttcgaaagaatacctcgtagcattgtcg

SEQ ID NO: 13960 - DNA, 246 bp, Zea mays
  unsure (1)..(246): unsure at all n locations
gctgcactttcaagttaatgactaatgataattatgatattgagcctggaggagaatgatgtttagaacacagtcttttatgaaagctgataatttgtagtgcgcacaattctcttgctttatatgttaaaagaaacgaaacgctttcatgtgaattatctacatgccatgaatctatttctagcttaaagagtatttatggtgtttaaatactangttggaatagctaataaatcaagctcttgt

SEQ ID NO: 13961 - DNA, 331 bp, Zea mays
  unsure (1)..(331): unsure at all n locations
ttgtcgtcatcaaccctgacatagaaccactcctacttccagcctgctgcccatatgcttcggtagcggattacaggaaactttgtggttctccgataagcaaaattatagcaaccaanattgtcatgcaatccatcttttctagccttcgtctgatagtgcagctcgtgaactcgacaaaatctgtccgcaaacggctccaccgcttggcttcggagggcccagatataaacactaagcctaacgatagcgttaggagtcaactgatgaaagtagataccaaacctcttcagtacctctgcaataatcccatgtagggggaatcttaatc

SEQ ID NO: 13962 - DNA, 122 bp, Zea mays
caacgcaaaccttgcggcgccggccgtacaattatgttgacattatatcaaattctgcatcatccctatttacttatcacgcgtccacacgcgttaaggaccaatactgcttaaaaaatacc

SEQ ID NO: 13963 - DNA, 446 bp, Zea mays
  unsure (1)..(446): unsure at all n locations
agcccctgtcgacaatcagcaatgaagtctactagtgcttgagattggatcacagatcggcggacaaaaacaatagttgattatttagccctgcggcccatttgccaaccccttctatggcttctctatttcttatgatgtctntcaagggttgggacgaaggtaatattatatgataagattccatgtaatttcttttttatggactcaagacttctgagacgaagtaaactgggacttgtctttcgtctgcccattctacatttcttggacanctgcactgactgaagaatagaggcagctcatacagaacagtggactttaatgaagggaataatgtgttactgttaaaactgttcagtttcaagcttttgtgaatgtccatgaagatttgtgcttacatttaaaacgtgatctcttccactgaatattatgatatgtgctta

SEQ ID NO: 13964 - DNA, 361 bp, Zea mays
  unsure (1)..(361): unsure at all n locations
agctttatantatggacgtaaaaagtgctttcctcttctgactaatcaaggaagaagtctatgntgagcaaccctccggctttgaagacagtgagtaccctaaccatgtctataggctctctaaggcgctntatgggctcaagcaagccccaagagcatggtatgaatgccttatagaatttcttattactaatggcttcaaagacgggcaggccgatcctacactctttacttaaactcttgaaatgacttgtgtgatgccaaattatgttgatggattatatttgggtcactaacgagtctactgtgaagagttaatacgatcatgacacagaaattctagatgtctatgatgggggag

SEQ ID NO: 13965 - DNA, 296 bp, Zea mays
gcttaaacaagctagagacctttcgctgatgaagggacttgatctaatgttgaacaagcatatagttaacatggatagacattcccctcacaaaagcactctgatttgcagccactaacctttgcaggagaggagccaaccggttagccataatcttggtcaccaatttggcaaaactatgaatgagacttataggcctaaaatcaaccaaccggttagccataatctcgtcaaaagcagcgagcccgcatgcccacagcacggtgcccctcaatcaccgtcggcgtcgagcctac

SEQ ID NO: 13966 - DNA, 109 bp, Zea mays
atcaaacgacatgaacgcttcttaatgacacactcatgttgaaacaacgtatgtcgctgattctgctctgtcttctacatttgtgcactaagcacacgctgtacaatga

SEQ ID NO: 13967 - DNA, 133 bp, Zea mays
tcatatacacatcctcagtgagaacaccatgaatacaagcttcgctaatatccagttgactgatataccactgacgagatatggcattatagagcactatccggacagataacattttactactggacttaac

SEQ ID NO: 13968 - DNA, 464 bp, Zea mays
  unsure (1)..(464): unsure at all n locations
agctngcatgaagtattgtacataatgaatatataaaatcaatgtattatgttaattttaatttgtaggatgagcataacaccattactggatgtgaacatgcattaacaataataacaactgctaaccacgtacatattaaaataatattgttcattagtctaaaatgaaaatatatatttatgctgcatgtaaatgttgatgtatttgggttgggatctacaggaggacaacatgagaatatcacatganggtggtggtacaagttctccgtgtcacgtaacaacatgaacaaatggaacattattgctgcttcctcagaagcttanaanggtgagcattgataaaatgatttactgattggtataaatatatgctaatatgcgtatactaaatattaacttatattattatgcagaggctataatttaatgtggatgttataaatctgagtatgccggatc

SEQ ID NO: 13969 - DNA, 366 bp, Zea mays
catgctagtcttagcgattgagcatgcatctagaccggcctcttctttagttaaaacaactccagctaagtgtggtctctagtacaaccttaaaagctaatgaaccatcactttttctaaagacagacacatctacatttgtgaatagacaattatatcccatattacataattgattaacagatagtaaaatatatcccacagactcaactaaagcccatatagaatcggtgtcatttgaattgcaatttgctaacctttaccttgcctggttccataccaatatgatgatctgggattctgtttgacgagagggaacatttcttcccgcatatggtggatcgtgcatatcactgaccccgagct

SEQ ID NO: 13970 - DNA, 420 bp, Zea mays
atgatgcttgaaaagtatcagaggtcgttgagaaaagcgcagagcccgtacggcagataggtattaattagtggtatttgactcttcgttgtaattatttgatttccaacttgtgcacggtatgtaatagtaatatatctgtatcttctctttccttagaaactgctgagctattcttcgtgcccacacacgaatggtggatgacgatattagacaaatggccgatgccatcatggataaaagttgtgatcagctactatacgaagctgcagatgtagtcctataggaagaatagatgctgtcgtaaaacatatacaatgatatgtttcgttgagaatcatgtgtaatattgtgcaacttggatgcatatattagctgttatagtctattcttacgatgatgaacatatatcataccgtt

SEQ ID NO: 13971 - DNA, 396 bp, Zea mays
  unsure (1)..(396): unsure at all n locations
ctatacccttagaaccatggtccccttgccttcttcctatggatgcagggaggagtaaccatagctcggggatttcactcagagcgtcttctgggatagcctcttcaagaagaaaataaataggagaaacaacaattccttgttggttaatcacatcttccgatggagctagatcaatcaaggcttcttgaatcttatagcgccttcgacgacgcacaagatcaatctctacttttccctcatcgttttctctgtccaccacatcatccatgcagatcaaatgaatagctagttcctccacaggagaatctccactatcagtcggctcagcagacagtacatacattccgtgaaatttccggtgccttngcttcttcggggacatcctcataaccc

SEQ ID NO: 13972 - DNA, 220 bp, Zea mays
  unsure (1)..(220): unsure at all n locations
agctttgtctaactcagtctttgaagtatctgcgagctatctctcgtgtaaatccgaaggtacagctgtaataatgtactatattgcangagatggaatgataggcgttaacgcacaaaagatgagtaatgtgtnttgtctcttgcttttcttttccaatgttcatcatcgtatgctcattcctatcttgtaccttctcgctcgagttacccttctaaag

SEQ ID NO: 13973 - DNA, 175 bp, Zea mays
acattcattatatatggatacaagcatgcattacaatatgcaaatcacaatgaagaggaaatattatcttaactagtcttgcatgagaatgaacatatagtaggaaaatcacaatggatataatatgaaaaatgccagcctcgcaagcttgtaccattgaagaaaattgcagttg

SEQ ID NO: 13974 - DNA, 181 bp, Zea mays
  unsure (1)..(181): unsure at all n locations
ctgaaagacgtacccatggcgnggccgcaaagatggtcgacaaagaacttggtctgcttgatgactaataataggaaccgcaagccgaacgtgaagaggaggaagatgatgatgatatccacgagtcccattagagatatgtaattttattttaattatcatgtggtgtgtttctgagcgt

SEQ ID NO: 13975 - DNA, 176 bp, Zea mays
atgcaagtcttaaccattaagcatgcatctagaccggcctcttcctttgcaaaaacaactaagtaaagcttggcgtctaatacacccttaaaagctagtgaaccatcacatcttctaaagacagacacatctacattagtaaaaagacaattattatccatattgcatagttgact

SEQ ID NO: 13976 - DNA, 243 bp, Zea mays
  unsure (1)..(243): unsure at all n locations
tacaatatactntcctggcaaaattctggagaaactcttgtaatatagttatggaacaactcatgtaaatntgtacataccttgtaatatattttgtttctgctatctgtgtacaatctgctttgctgtggacgaaacttctcttttgagtcgaaggcgaaaaacaccttcccttcttttttacacaacgaagcataaaaattttcccttcgaagttttcctcattgctgagcacctgtcttt

SEQ ID NO: 13977 - DNA, 113 bp, Zea mays
gctaaacgtacggacataacatgatcttgtttaaacgttgatgtccaaacgcttttataggcgttgtatctcccaatagcccatgacaccagtattgtaccaaacaatacgca

SEQ ID NO: 13978 - DNA, 452 bp, Zea mays
  unsure (1)..(452): unsure at all n locations
catacactagttcactaatcttaccatttaggaaggtactctntacatccatatggtagagcttgatattgtgtgcacaagcataagcaagtagaatccggattgcttctaatcttgctacgggagcaaatgtctccncacaatcaatccttcaatttgagtatatccttgngcaaccaatctttgccttgtttttactaccacgccatcttcattgtgttatngcgaaacacccattttgtaccaataacattgtggttatatggtctctcaacangctcccaaacttcatttcagcgaagtatttaattcttcatgcattgattcacccatcaacatctagttagcttcactacacggtaggttcatacaaatactaagagaatgtcacaaatgagcttgcgaagcagtggacaccttatatataccacattgatcacggtatcttacat

SEQ ID NO: 13979 - DNA, 145 bp, Zea mays
tactaaattctctcttcacttgagagctcagttctacactcattcgaataaaagcacacagacacgtgtcgttgtaaatatggtgtgttggcacactaagcaacagtgactacgagacatgattgacgcctaagatgtttcatac

SEQ ID NO: 13980 - DNA, 259 bp, Zea mays
gtggcatctatacttgcttcttctttctgagcacctgtcgtccaatcaacaatgaagtttgctaacgcctgtgactgaattaaagatctatgcacataatcaatgcagaactcatatagttccgcaacccacttccaactcctctagaacttttttattttaagtaataccttcaaggctgtgaacaggaacaatatattgatgcttgaaataatgcgagtttctggaaccatgaaacaactacaaaccttctcaattt

SEQ ID NO: 13981 - DNA, 480 bp, Zea mays
  unsure (1)..(480): unsure at all n locations
tgcaagctttaagctctttgacaataaactcactttacctagttgtaacataattgcataaatgcgggaatgaaatgtatgaagcatggatattgcctanacatgctntctctttcttttatacaagataagcaaggaatgtatanaanaggaagatgtaggtacatgtaaaaatgagaggaagtagttttacccttttgtaccttcacatagagacgctctcttcattgtgctttgtccttagtcttagttactttaagacctatattcaagacagcgtatgggaatattttgcacaaagagggttctacaactagtgatcctttttaaatcattgtattttatataagtgggcacaaattgcataattgatcatgaattctcttttaacttagtgcatatcaagagatattgatngatagaatatgcggcactaagaaacataagtgttattcaatgagtcaacaataacagatgtga

SEQ ID NO: 13982 - DNA, 369 bp, Zea mays
  unsure (1)..(369): unsure at all n locations
cgcttacattgtctctctgctggaagccaatgccattccttatgtcacggcgtgccccattatagagcatgcttctatcacatttaatatgtttcattctctatctcatgctcattaaatttagcagatagctgagctatgtgatcattatgtgtattaattaaagctacgcgatcatggatagcatcaacattaatatctctacatctcatgcctatagaaacatgatcgacaatggatgtagagggttcgcaagatttaattcatctatcctaaatttaggatgggattttcatctctaaacagcgaatagacgcatngcaaacatttaaatccttagccttagaaattaatttatcactctcaatc

SEQ ID NO: 13983 - DNA, 61 bp, Zea mays
ccataaatctacgtatgcctccatgctcgtcaactcagtctctcacgtatgatcttgatga

SEQ ID NO: 13984 - DNA, 334 bp, Zea mays
catctgagatacctctcatcgtcggtaagcttaggcgccctttccttgaccatttgaatctttggacctatcattgttagcacaaaacagagactaataggaaacaaacaatgtgaatcctacaactatctctcaaggtggtggtggaggtggaatacaaattatgaagcggcttaccccggtcttacaccattcttaccagcactgcatgtggcaaaccgtgaccggtgtgactgcccaacgatcgtgggtgtgattgcaaaggagtacatgttctgctcaagagaaagctggagttcttgaaacgctgactaactatatatatgtggcacac

SEQ ID NO: 13985 - DNA, 431 bp, Zea mays
gactagattggtacaaaaatactctttgcatcagtgtgacatccgatatcaaatggactggcagaacgagctaatggaatcataataacaaggataatgaagtcaatcttcaatcatcctagaggaaagtggccagatgagttgataaaaggggtatggaaccaatactgttgtctcaaggtcaacaggatttaccccgtctaagcctctatttggtgacaaagcaataacaccataagaagcaagaacgggttcaataaggactttagcttcagcagaagatgaagaggattgcaaaataataacagacaccatagaacggaccagacttcaagcaatagagtacatcaacaaatatcaagccgaaacagtcaaatggcgggatcgtaacgtaagaattaagaatatcacgccagacatttgtgcttcta

SEQ ID NO: 13986 - DNA, 439 bp, Zea mays
  unsure (1)..(439): unsure at all n locations
agcttaccgcattngaagcatgagcgcttcctcttggctntggtcttgcttggctgtcccttgcgacctttaagcaccgtcttgaatcttttgatgatgagagccatctcttcatcattaagtccggccgcctcaatctgtgccaccttgctaggtagcgcctccttgcttcgtgttgccttgagagcaagaggttgcggctcgttgatcggaccattcaaggcgtcgtccacgtatctcgcctccttgatcatcattcgcccgctaacgaatttcccaagaacttcttcgggcgacatcttggtgtacctgggattttcacgaatattgttcactaaatgaggatcaagaacggtaaatgaccttagcattaggcggacgacgtcgtggtccgtccatcgcgtgctcccgtagctccttattttgtgataaggtcttg

SEQ ID NO: 13987 - DNA, 437 bp, Zea mays
  unsure (1)..(437): unsure at all n locations
gtacaggacactatagcagtttctgtcatactatgtatcnccctcttcattccgtagaagggctcagccatgttactacactggaacttatacctccatccatctaagacatgagctctcgctcatttctccaacactggcatcaaattcggtcaaccaatctctgtcttcaggatatgttgcaactctgagcttatctagcttttccctaaaaaacaagcttctatctggcgatatgtctcctggaaaagctcaaagttattcttcacaccatctttgcggagaagattctcaccgaggtgtctcgtacaccatttgtggtgcaaaggggggtacccatcgatctgctcacggacgcatggagtatatccttgggccgatatgatattacaccaacctcccgtcagggacaaccatatgtacacgaccagtacaaa

SEQ ID NO: 13988 - DNA, 443 bp, Zea mays
ggaccttaagcactgagcatgcagtttgagaaaggaatgatgaactttgggtgcttgaggaagcaattcaattcttattgactcacgctatcaatcttcaatgatctatatccaagattgacccaaaggtattttgaattgttatgtctaacactcatatcatctcgggggaagatattgatgttgtaggaaataaagaattatcctgtgccgaatagtcaagacctacaacaaggaggaaagccaaaggatggtaacaattatgcctttaagtgcaagtatcttaaattatcattacttatgtgtcttgtgtacgcacatagaaaaagagagcacttcaaatgtgtttaaaatatttcaccattctttgaagaaattcctctcatatgtgagattgtatattcatcttttctataccatggcaatctacatgctctaaattg

SEQ ID NO: 13989 - DNA, 292 bp, Zea mays
  unsure (1)..(292): unsure at all n locations
cgcacagttcttactcctccctcggccttggagcttgcatggctcgctgcttcaaccgtcgngccccaagctcctctagtcgagctacgagtggtcgccaggccacgcttctcctctgcccctgcttgatcagccgtgtattcctaccttatatcgctctccaaccgtcttatcgcttacgctggtctggcatacacctcaattgcacactgctccatctctctgtaccgagcgccactctctttcagcagcaggccgacgctcagcttccagctcacacacgtgttcctct

SEQ ID NO: 13990 - DNA, 424 bp, Zea mays
ggatcttaagcgactgagctgcagctgaagccatgaagtacatatgcatgtttatgcgaattgattctagcctagctacaggtgcataggtttcaccgaaatccaaaccttctacttgtgaatatcccttggccacaagtcacgctttgttccttgtcaccacaccatgctcatattgcttgttgcggaagacccacttggttcctacaacattttggttaggacgtggaactaaatgtcatacctcattccttgtgaacttgttgagctcctcttgcattgccaccacccaatctgaatcttgaagtgcttcctctaccctgtgtggctcgatagaggaaacaaaagagtaatgttcacaaaaatgagcaacacgagatctagtagttacccccttttgaatattgccgatgatggtgttcac

SEQ ID NO: 13991 - DNA, 416 bp, Zea mays
  unsure (1)..(416): unsure at all n locations
agctcgacaacatcatttgacatttcacattttatttctgagatcaagaatatttagttcattcctcaacatgcaaaagcgggtcttatcaagtggcttaatgaaaatatccgctaattgatcttccgacctcactccttctaaaatgatatctcctttagcaacatgatctctaaggaagtgatgacggatatcaatgtgcttggtgcgagagtgttgtataggattattagcaattttaacagcactctcattatcacacaacaaaggtactttttttagaactacgccatagtctagaagagtttgtttcatatataaaatctgtgtgcaacaagcacctgcggcaatgtattccgcttcngcacgtgacaaggcaacactattttgctttttggatgtccatgaaactagtg

SEQ ID NO: 13992 - DNA, 454 bp, Zea mays
agcttaatgccggaattgccatcaaggaagctccctcactcttctcatccccccattgcctcatggcaaagagagatgctaaggtaaaaatcatcaccgatttaaatgatataaatgatgatgatgatatcgatgatgttgatgatgatggctattcatatgatgatcttgttagaatgttaggtgaggccgatgactacatgcacaaagaaaaagaaaaatttaaggccttgaaggaattatataaaaacctccaagtgtcttttgaggagctcaagacctctcacaatgacctcaaagaaaattgtgagaagcttgcggatgctcaaaatcatctagtgtgcatgaagttgaggtggtcacaaaggatgttggagtcacttgtgacttacttgatagtcttacaagtgaaccactacctactaactctatttgtgataatgcaaatttctct

SEQ ID NO: 13993 - DNA, 413 bp, Zea mays
agcttcttaattcatgttctgtatggctcatatctctatatatgggtgctaagatggcacttccttcttcttgtagctgccgcctgcctgctgcgtttgctacagattgtggatggtgtgctgatgatgggttgtgcggccttcctagttactgttgcgtattgctaagactccaatttatgggtaatgtgaaggcacttccttcttcatgcagctactggtactattgttgcgtttgctataatctggggaatgtttgatgttgttgctttgctaaaatcctatcgtgtgtcgctaagaacacggattaagggtaatgtgaagcattctcttcttatgcaactattgtttggtgtcaggcggattctttctttctaatggaggggtcaatataaaatctcttgtggaatgtc

SEQ ID NO: 13994 - DNA, 360 bp, Zea mays
  unsure (1)..(360): unsure at all n locations
agctttcactgcanatctacaagaattcttatctctcacaagcctaccattgtcttcaattggtccgcaattgactttcaattggtatcctngagactacatttagtatcatttacatgtcttctccaatatttgtgtcggggaccataattaggggtaccctcaaggcgcctaattctcagctggtaacccccatcagcataaagctgcaaaggcctgatgggtgcgattaagtcagggatcagtccatacgagtgactcgatcacgcttcgcccgagcctagcctcggacaagggcagcagacctcgagggacttccgtctcgcccgaggcccctcttttaacggctgacacatcccc

SEQ ID NO: 13995 - DNA, 454 bp, Zea mays
  unsure (1)..(454): unsure at all n locations
tactttgtaaagcaacaacacatgccagcacaacagctacagaccataccagtaacttggcctttcgcatgctggggactggatattgatgggcctttcaagaaagctcaaggaggatatacccacgtgtggtggcgatgacaattcactaagggatagagttcagcccatgcttcatttcttctgctaagccgtggaattcatacagagcataatattcagatttgggacaccaaacagtatcatcactgacttgngatccaacttcaccagttcagaattcttcgacttctgcgagcaaaagggcattcagatcaagtacgcgtctgtagcacatncaagagccaacgggcangtcgagcgagccaacgggatgatattagaggcactcangaaaanggtcttcgacangaacgannaaatcgcanggaaatggataagagaattaccttat

SEQ ID NO: 13996 - DNA, 465 bp, Zea mays
  unsure (1)..(465): unsure at all n locations
agcttagaaaaatctggtatgaatctgcgataatatccagctagtccaagaaaactccggacttggtgaacagtagttgggggtttccactccagaatatctttgactttgctaggatctaccgcaattcctttggccgataacacgtgccccaaaaattgaatttcctccagccaaaacgcgcacttgctgaatttggcatacagctgatgttccctcaggcgtgtcaatacaatccgtagatgttgagcatgctcctcttcattntaagaatatatcaagatatcatcgatgaagaccaccacgaacttgtccaactcgggcatgaacaccgagttcatcanataggtgaagtgggcaggagcatttgttagcccaaaagacattaccaaatactcaaataaaccataccgcgtagtaaacgcggtcttcggtatatccttgggccgaatacagatctggtga

SEQ ID NO: 13997 - DNA, 457 bp, Zea mays
agcttggtgactggagtggattgaaaccattatagaatacctcagtcactcccaagctcatcaaagtcacccaacctaaggctaccactgaaagttgcctagagggggtgaataggtgaaacctttaaattataaactttgaacatgaacttcacccagtgttaggattaaaaacaaatgataatgaatacagagtgcggaagagagtcttcttgctatgcgttgctcaataaatgccgataaacttgggagctaactcaaaagaatatgagcaaaagaacttagagagaggagagaggaggaatcaaatcgtaaggtgaggatcaacacacatgaacacaacgattttgttcctggggttcggttccaatgaacctactcccctgtgaggagaccacaaagggtcggtctttttcaaccctctccctctctcaaacgatcactaagaccgtttgag

SEQ ID NO: 13998 - DNA, 471 bp, Zea mays
  unsure (1)..(471): unsure at all n locations
agcttgtgaagaattttcattccaacatgtgctagtcggcgatgccagagccagcccatgttagtcttagcaattaagcaagtgtcgagttcagctctatcaaaatctactaagtatcgctgaccctctaacactcccttaaatgctactgaatcatcacttcttctaaagacagtaacacctgtatccgtaaaaagacagttgtaacccaatttacataattgcgaaactgaaagcaagttgtaatctaaagaatctacaagaaaaacatttgaaatggaatggtcaggtgatatagcaattttacccaatcctttgaccaaaccttgatttccatccccgaatgtgatagctctttggggaatcgtggttttctcataggaggagaacatcttcttctcccctgtcatatggtttgtgcacccgctatcgatgatccaacttgagcccncggatgcataaacctacaaa

SEQ ID NO: 13999 - DNA, 462 bp, Zea mays
  unsure (1)..(462): unsure at all n locations
acctgaggcatgcaagcttgtaggcacantttggtacccatcgcttgacgggtccgttaaggttagtaaacaaagatctaggaacccaagcgtcctttgtgctagcgcttggtaaactcgttacctttctagcacaagttacaatcttgggttgcctagttatatacgaaatgattgacaagctagaggtggggttgttaccaatgggacaatccttgcattgatgtccctttttccggcatgtgtagcataagcgtttttgaagtcttgaaaattccttctttccttggttggtgcttgctacatggttagtaaaaactttcttttctaaccctatgcctctntgtttcacatggggacaagaatagattaagtgtcccttctttgagcatttaaaacatagtctatcatcctttgtaataatcaagccttntttaatgtagggacatgacctaaacaagt

SEQ ID NO: 14000 - DNA, 452 bp, Zea mays
  unsure (1)..(452): unsure at all n locations
ngcagctttcagtcgggccatctactggcgctgttcccgacccgggtccgaacctcgactaccatcaccaagtactcgggggagtcaaagccggaactgtggctcgcggactaccggctggcctaccagctgggtgggatggacgatgacaacctcatcatccgcaaccttcctgtcggcgtttcgaccccggggggtccctggaccgacgagtgaattgtcgccatgtgccccagcccagatgggtcggcgcgaggtggagcacgaaggggggaagaaaacaggcaaagggggaacctgcggccttcgtgttgccctgcgcccaggtcgggtgcgcttgcagtagggggttacaagcgttcgcgtgggagagagagccttatgcgccggtccgttctcccgcgcgggcaaccttctcgtacgagagccctggacctttcttttatatgcgt

SEQ ID NO: 14001 - DNA, 442 bp, Zea mays
  unsure (1)..(442): unsure at all n locations
gcttctaatttttggtagtcgtctaattcatttgtagatgatatagctatggtaacgaactcgtgatactaaaacgaaagagatatatcattccattccaatgatcgtcagatagctatgtcttcagagccactgcatagagattcctcatcaatcaacatcgtcttctaggctactgcactacagttaggcgaaaggtgagtatcctttcctgtgtccaacatcgaccagagcggtgacgaanaaaataaaggcttagttgtacgtcgtctggatgttatggccaagcagccacaaaaaagctaatcgccgcctgccgcttcatatcgtcaacaacgcccgggccgtagcgagaggtcgagagatgcttanagggatggccaactgcaatgactaatctaccattagcagcctcctattccatatggagtcgtcagaagaa

SEQ ID NO: 14002 - DNA, 336 bp, Zea mays
tgagctcaactgatggacttatgttgcaattatatttaaaaaaagatacattgtgtgaatttttatgtatcacccctattaaaataagaataaatatcacaaacaatgtcttatggattaattgctccctacaaccaaaaaaagggaagaaattaccgaatttattttcaatcccaccgaattttattttattgaaaaatagataattgagttactttatatcttacagctcatgtaaaaacagatcaagttgatagaaatatatgcctattattccaatcaagaaaatgaccaaaaattgattaccaataataccgtttcgaccggtttatccaa

SEQ ID NO: 14003 - DNA, 374 bp, Zea mays
agcttctgtagaatctgctgagcattaggatcttgctcgtattcttgcactacctgtagtaaccaattcggaactactgtggaaactgacactacattcagctgaaaatgtgcctcatcttgttccaatccatgccggcgtgacaaagcgtcagccaccctgttatctgtcctcttgtggtacacgatcttgtattgtaagcccaacagttttgtcagtgccttctgttgccaagccgtagacactctttgatcatcaaggtgaatgagactttgttgatctgttttgataagaaattctccatgttgcaaatatgaacgccaatgatcgacagctaaaagaatatccaaacattctttttataaatggataat

SEQ ID NO: 14004 - DNA, 391 bp, Zea mays
  unsure (1)..(391): unsure at all n locations
agctngcttctgccatggttcaacggccgattagagtgccatagcgtgcgtatcttggcaaagtcactgtgtacggtcgcttctctgctccaaatcctatcttttgctgtgagttccaagtcgagatatggtcggngtaaggagatagagaggggagaagtttgctgtgtcagccaagcccgagccgagacaaaaggggtgtcaagtcgtgtctagcgccctagggtaggtgtcatctctttccagggtgttctagggttaatttggcgccattttgtcaattgggtcgaaaggttttgaaaaggggattagggtgaacatgtggagtctttgtgcaagggttagtttttgtacttangcaaaaacctgaattccccttgtgctaaatctt

SEQ ID NO: 14005 - DNA, 374 bp, Zea mays
  unsure (1)..(374): unsure at all n locations
agcttggatattcttcatctgagcgctatggtcattgntgtgatacataaaaatttttcttcacgaagcatgaaaagaagggaaggtgttttttcgccaaagactcaaaaaaggtatgtatgaaaagtttcatgcatcgtaaagaattaaaccataaagaanaataaaacaaatatgttacatacaggattacaagatattacacgtgttacatttaaaatgtttttacaatagcatctagtcttccctaagtaccacttctgcagcttcgttcaacagtcgatcgacaacctcatccataatagcttcagccatctttttaatctcatcgtcacccttaggccgtgcacccggagatacttcagtangatctg

SEQ ID NO: 14006 - DNA, 435 bp, Zea mays
  unsure (1)..(435): unsure at all n locations
agcttctaaagggagaacacgtgataggtttgactaacgttcaattcgaaaaagatagaccttgtgcagcttgtcaagcagggaaacaggtgggaggagcacatcacagcaagaatgtgatgaccacttcaagacccctggagctgctgcatatggacctcttcggacccgtcgcctatctaagcatagggggaagtaagtatggtctagttattggtgatgacttttcccgcttcacttgggtgttctttntgcaggataagtctgaaacccaagggaccctcaagcgcttcctcaggagggctcaaaatgagtntgagctcaaagtgaaaaagataaggagcgacaacgggtccgagttcaagaaccttcaagtggaggagttccttgaagaagaggggatcaagcacgagttcttcgcttcctacacaccac

SEQ ID NO: 14007 - DNA, 405 bp, Zea mays
gcgatcttaagcacctgaggctgcagcttgcaccactcttgcatgcataactgcatacatacgtataaccgtcggatttgagagagaggcagatccaacggttgcaaataaacatgccaaaaatacccgcccattttcggcctccgtatggcgcgcaccaccccatcggctaccgccctcgtcggcaggccgcaggcggacgagaggagaccatgcactcaacatgccgcgacgcagagagacaaacagagaccccccaaacatagccaccgactccaccgtgctcctctcatcgtcgcttatatatagctcccgtggcgacgctagctaccttccatgtgttgtgacaccgccacacactagtcggtgaaaacgatcgaacgagcacaggcacgcacgcaccat

SEQ ID NO: 14008 - DNA, 472 bp, Zea mays
  unsure (1)..(472): unsure at all n locations
agcttgggaaggttcttcatccccacatgtgctaagcggcgatgcctcagccagcccatgctagtcttagcaattaagcatgcatctagaccggcctcttcttttgcaaaatcaactaaataaaggttgccgtctaatacacccttaaaagctagtgaaccatcacttcttctaaagacagacacgtctacatttgtaaatagacagttatatcccatatgacataattgactaacagatagcaaattatatccaagactctccactaaaaatacattagagatagaatgctcattagaaattgcaattntacctaacccttttaccttgccttgattcccatcaccgaatataattgaatcttgggaatccttattcttgacgtaggaagtgaacatcttcttctcccccgtcatatggtttgtgcatccgctgtcgataatccagcttgaaaccccggatgcataaacct

SEQ ID NO: 14009 - DNA, 455 bp, Zea mays
  unsure (1)..(455): unsure at all n locations
agcttgaaatgtgttttcctccatcatttnttgatatgcaagtacacctaatcatacatcctcgggatcagataaaaatattagggccactatatttacatcatatgtttcagttggagcgacacctgggagtattaaaaggttatgtgcgaaatcgcgctcacccagagggttcaatcatggaaggatacactacagaagaagtgattgagagctgtatagattacatcagtgacggaacaatgataggtgtgcctgtacctaaacatgagggtaaactatgtgggagagggataatgggcaggaaaactttttgcgttgaggattaaaagctagtacattgtgctcatggtagtgtactacaacatctcactatagccgagccttatngttgggccttcggtttacgaaggtccttcaaaacaggatntaacagtatttctggagtttaatgt

SEQ ID NO: 14010 - DNA, 451 bp, Zea mays
  unsure (1)..(451): unsure at all n locations
agcttctaaagggagaacacgtgataggtttgactaacgtgcatttcgaataagatagaccttgtgcagcttgtcaagcaggtaaacaggtgggaggagcgcatcacagcaagaatgtgatgaccacttcaagacctctggagctgntgcatatggatctcttcggacccgtcgcctatctgagcataggaggaagtaagtatggtctggntattggtgatgacttttcccgcttcacttgggtgttctttttgcaggataagtctgaaacccaagggaccctcaagcgcttcctcaggagagctcaaaatgagtttgagctcaaagtgaagaagataaggagcgacaacgggtccgagttcaagaatcttcaagtggaggaattccttgaagagaanggatcaagcatgagttcttcgcttcctacacaccacagcaaaatggtgtggta

SEQ ID NO: 14011 - DNA, 379 bp, Zea mays
  unsure (1)..(379): unsure at all n locations
gccatggtaagtagcatangcattaatatgtgaattgactcaagcctttctatgggtgcataggnttcaccgaaatccaaacctttgacttttgaatatcccttggccacaagtcgggctttgttccttgtcaccacaccatgctcattttgcttgttgcggaagacccacttggttcctacaacatnttgattacgacgtggaactaaatgccatacctcattcctagtgaagttgttgagctcctcttgcatcgccaccacccaatccgaatcttgagggcttcctctaccctgtgtggctcaatagaggaaacaaaagagtaatgctcacaaaaatgtgcaacacgagatctagtggctaccnccttatgaatgtc

SEQ ID NO: 14012 - DNA, 382 bp, Zea mays
  unsure (1)..(382): unsure at all n locations
cttaagcacctgcngcatgcaagcttggtgctgatggataaacaaaaatccttgttatcttggctatcaaactgcttgccgttgtcaactgttaactcggacggtactccgaagcggcaaacaatgtnttgccagaagaattcttgggcagtctttgatgttattgtagaaatagccctcgcttcaatccatttggtgaagtattcgacggctacgaaggcgaacttgaggtttccctgagcggtgggcaggggcccgacaatgtccacgccccagcgctggagaggccaagtatgggcaaccagctttgtatactgcgaggggctgcctgaccgaagagaaaacttctggcaggcttcgcaggaccttgtgacccgattcg

SEQ ID NO: 14013 - DNA, 458 bp, Zea mays
  unsure (1)..(458): unsure at all n locations
agcttgactctcgaaatctaacgaagtttcttctcgaagcctatttcgtcagaagaaaaaaacttcggaagaaaaatatttagttcccaaaaaatccagaattaaatggctagagtgcgttctaccgctagagttgagcgtgagagaggcgaagctgaaggatcggagactgttcccatctccgaagcgatgcaacgatccggactggtaatctcggaagaaatccccactgctgaaacagaacaggcaactgccgaagcggaagaaggagacattgaggaaactgattccgaagatgattatcatattgccatgccaagtaagcccagccacttggacatcgganaatcgactgtctctaaggctgatctctccaagatggtgaagtcgggttatttcagtgagaatcagaagaaactatcttacttcgggggggaagaaactaccccgaagccgga

SEQ ID NO: 14014 - DNA, 439 bp, Zea mays
tggacgtgaagagagcctttctcaatggaccaatcaaggaagaggtctatgttgagcaacctctcggctttgaagatagtaagtaccctaaccatgtgtataaactctctaaggcgctctatgggcttaagcaagccccgcgagcatggtatgaatgccttaaggattttcttatcactaatggattcaaagtcggaaaggccgatcctacactcttcactaaaactcttgaaaatgacttgtttgtatgccaaatttatgttgatgatattatatttgggtctactaacgagtctacatgtgaagaatttagtaggatcatgacacacaaattcgagatgtctatgatggaggagttgaagtatctcttaagatctcaagtgaagcaactccaagagggcaccttccttagccaaacagagtatactcaagatattct

SEQ ID NO: 14015 - DNA, 388 bp, Zea mays
  unsure (1)..(388): unsure at all n locations
agcttcggcggtggtttaaaattttggcagcttatcagtgcatatagcaggaaatgctgtggtaactccacacctactcgtctgtntatatagcgccgcaagtaagaaggcgaagcgccagaagttttacaccatgcggacacccgctcgcactcgctgtacggtggaccgcagagaccgaacagtaattctgcacggtggggccgctacgcgcagggaaattaaatcgtttctcgacaacgagctcaaggaaggtggtttttgagaccttcggcgctccgaagcttaagaaacttcacggatcaagctcgttacgaaaaacgatctagcaccgcgaaaggggctactgttgggtctatgcttcgtcgccgaaggttttatagaaaga

SEQ ID NO: 14016 - DNA, 448 bp, Zea mays
agcttcttgcgtcaggcttcagaccttggctcctcgcggcccacacgaagatatttagccttataattgcctcgggagtaagttgatgaagatagacttcgaagattttcaacacctccacgacgaagctgctcaaggggaatcgcaatccagctttcaaaaagcttcggtacaccacaacttcattttcttcagggtgtggacaagttttttccccttcgtccgccctcacaacggacagatcccggaaataccttcctctcatattaacaagatgattctctttgatagttgatttaccataaactgaatggcttggtcgccaggggcgatcttcggagtcttcgccatcgctgtccacatcataactttcactgtcaccagtatcttcagacagccccttcagaatttccttggtaatcttttctgtgttggacttcgacatcgc

SEQ ID NO: 14017 - DNA, 314 bp, Zea mays
  unsure (1)..(314): unsure at all n locations
agcttctaaagggagaacacattntaggatttttttatgttcattttgagaaagacaggatatgtagcgcatgcccggcagggaagcaagttggagcccatcatccacacaagaacaccatgacgacgacaggccactggagctcctacacatggatctattcggcccgattgcttacataagcatcggcgggagtaagtactgtctaggtattgcggatgattattctcgcttcacttggggattcttttacaggagagatctcaaacccaagagaccttaaagggattcttgagacgggctcaaaatgagtt

SEQ ID NO: 14018 - DNA, 346 bp, Zea mays
agctctgccttccttcagtctatcatccgctttctaacggcgtcgaggagcgcgccaatgggaaaatcttcacaacttgtaagaagacgctcctcgacgaaaaaaggcagatggaccaatttattaccggaggcagtttgggcgctaaacacaactgagtgcacggcgactgggttcactcctttccggcttctatacggatcggaggccatgaccccgcaagaaataaagcatgggtccccgcgtacagtctcgtcagccgctcccgacgtggacgagccaacttcaaaagatctcattgacggagaccgtgtcttcgccctacaggccctgaacaaataccaag

SEQ ID NO: 14019 - DNA, 323 bp, Zea mays
  unsure (1)..(323): unsure at all n locations
agctnttgtactggtggaccagaatgaagagggaaatagcccagtatgtattagagtgtgacacctgtcagaggattaaggcaagccacttgaagtccgctggggctttgcaaccactgtccgtaccttcgtggaagtgggacgacatcagcatggatttcattgtgggtctacccaacacctctcgtcatcatgattcgatttgggttattgtggaccgattgacgaaagtggcacattttcttcctgtgcacaccactgataaggctcagaagtatgcagaaatgtatattgaccggatcgtgtgtttgcatggattacct

SEQ ID NO: 14020 - DNA, 467 bp, Zea mays
  unsure (1)..(467): unsure at all n locations
agctttctttgtccagaacaccctatanatatgttcatcaattagtatattgctgctacatttgcaaataaaaatacagttttgatgccttatctaccttcactagatggtgttgcagccttatgcaccaacttcagctggtgcaatcaaggttaatcatcattaagttgctggctcatataaatctaaacataaacaagataagatataaatagaaatatacatatgaactaataactcactggaaggaacttgaatgacttcttcatgacaacaagctagcgtacttccaaggcaccctgagcgctgaacacttggaccacaaaacaagagtctcatattaattatagtatgaactatgagcagagtanatntctaacagctatagaaaaaatgaaagataaactgggccaatatccatctaataagccaatcaatatcactccgatcacttagatatgatgagt

SEQ ID NO: 14021 - DNA, 469 bp, Zea mays
  unsure (1)..(469): unsure at all n locations
agcttcttcttcattctgatgcttgcttcaactaatgttccaactccgagatgcttgcttcaacccataaatggatttctgaagtttgcatatctttccagcattgatcggatcgacaaaaccctcgggctgtatcatatacacatcctcatctaggtttccattaaggaaagctgttttgacatccatctgccaaatctcataatcgaaatatgcggcaatagctagaatgatccgaatagatttaagcatcgctactggcgagaatgtctcgtcatagtcaactccttgaacttgtcgaanaccctttgcaacaagtcgagccttatagatgtgaacatttccatccatgtctttcttcttcttatagatccattngcattctataggtctaacaccatcaggcgggtcaaccaagttccaaacttgattntctcccatggaatctanatcggatntcatggcgaca

SEQ ID NO: 14022 - DNA, 398 bp, Zea mays
  unsure (1)..(398): unsure at all n locations
agcttgcttcggccgagggatccttcatgtcatcaatagagaaagcagcttaggcttgggccagaatcttcacatgttcgcatccttccttctccaaaatagccgcaattcccctggcacctaagaaggcgcagacatctccacggccactcaaaacttcctcaaaagcttcggcttcgccgttgatccattcgattggaccttcgggatcgcccagtacgaagttgtcttcatttaaatatgcgccaatattggcgaagctagtttttatcttttgtacacatgctacagatttttcatagcatctttcttttgaanaacgaagctctacaactgttttttcccacgtaattttccagtagtcactggcgtctcggtcagcttcggcgatagcacat

SEQ ID NO: 14023 - DNA, 448 bp, Zea mays
  unsure (1)..(448): unsure at all n locations
attgctaactgtcccaacaatgatagtgaccaggatcaagggaacaagagggagaagaagaagaactataagaaggcaaagggcgaggcacatcttggcaaggagtgggattcggattgctcctcatccgactccgacaatgaaggactcgccgccaccgccttcaacaagtcgtccctcttcccaaacgagcgtcacacatgccttatggcaagggagaagaaggtatgtactcgagactctacctatgcttcttcaagtgaggacgaatctagtgatgaggatgaaatagattattcatgtntatttaagggactagatagaaccaaggtagataaaaataatgaattggttgatgccttgaatgataagaataggcttttagaanaacaagaagaattgttgtatgaagaacatgacaaatttatagaagcacaaaaatcttatg

SEQ ID NO: 14024 - DNA, 431 bp, Zea mays
  unsure (1)..(431): unsure at all n locations
agctngacgaggaagcatggcaacttgtgcatctccggcaaaacatcaagcaagagtgggcaggccgagcactcgctggagaagcgcgtcatcaggcccaggacgtccagcgccgtaacgctgacgatgccaaggcaaggctgcccccggcctccagcggggtcggccagaatctggctgcagcggcaatactactccgagcaatgacggagccatccaccaccgaggggcagagtatctagggagaactcaagaatctcttggaggatgccgcggttcgacgggccgaaagctctgcctctcgaaggcaagggtgccccccggagcatcgcgcaacgacttcccgactcatgcgggaggcctcggtccacaacgggcgcacgcgggacgcgacgcctgcagccccggatcgcctcggcaacaagcaccac

SEQ ID NO: 14025 - DNA, 442 bp, Zea mays
agcttcatctatttgcctctgaaggtcagctagacgagccatcttctccttctttcgttgcacctgttgttcgagcatctccaggttttggatttcctggtccaagtcatcctccggaggcattggactggtggccttcctcttctggcttcgggcctccctaagagaaaggacgtcctgattggggtccagcggctgcagagtggcagcccctgtcgctgaagccttcttcggcggcatgacgaaggtgatgtttgccgaatatgttcaaaagctcaagaaatggaagtgagttcaccggaggtgggcgccaatgttggagactcgttctcaaatgctatgaatcaagaacaaggcaacacaagatgttaaatatcaaaacccttcgtcctttgaatcattatttcccttcgggtataatgaatttcggacgaaggtcatg

SEQ ID NO: 14026 - DNA, 378 bp, Zea mays
  unsure (1)..(378): unsure at all n locations
ctctctggtgacgttcttgctgttgagctcggagaacttggaatttcctcttgaggtgccctttttcttcctcttttgccctttccacttggatagctttgttagagaggtgagagaagctatggaagtcttggctggcgaggatggtcttaagctcgggtcttaatcctctcagaaaacgggccatctttctggactcggtgctgacatcctcaggcgcgtagcgggccagctctgtgaacttgtgcacatactcactgactgttctcccgccttgagttagctcccggaattcatcctccttgagtngaactatcccctgnggtacgtggtgctcacggaaggctgcttcgaattctgcatatgtagcatctctga

SEQ ID NO: 14027 - DNA, 431 bp, Zea mays
  unsure (1)..(431): unsure at all n locations
agctnttgcttcataatatactgacgaaaccttatgaaaggcaaaggtttaccaaggtttccattgccaacggacgagagaggacgacgtgggccgcggcctgtggcgtgctagcgacagtgcggctatcatccggagttgcgccgttaagcgcgtggtgcttangccagagccttgccgccgcactcccattcgtcctcgccgtcgtggccatttgaacgaccaaaagggtggtaacaggaaacatagcaatgcccacaattaatgatggcaccatcattgctagaaatatacggaaaaccattttctttgccttccacatagacagaccttctagtgttaatcatattntagggcttgggaatccaacaaagaactgcgaacaaaaagaaacttttatatggagttgggcaatgttttgtccatttttc

SEQ ID NO: 14028 - DNA, 455 bp, Zea mays
  unsure (1)..(455): unsure at all n locations
agcttctaaagggagagcacattntaggactaaccaatgttcattttgagaaagacaggatttgtagcgcatgccaagcaggaaagcaagttggtacccatcatccacacaagaacatcatgacgactgataggccgcttgagctactccacatggatctattcggcccgattgcttacataagcatcggcgggagtaagtattgtcttgtaatagtggatgattattctcgcttcacttgggtgttctttttgcaggaaaaatctcaaacccaagagaccttaaagggattcttgagacgggctcaaaatgagttcggcttaaggatcaagaaaattagaagcgacaacgggacggagttcaagaactcacaaatngaaggcttccttgaggaggagggcatcaagcatgagttctcttcttcctacacaccacaacaaaatggtgtagtggag

SEQ ID NO: 14029 - DNA, 261 bp, Zea mays
agcttagacgaacgccattccaggttgcctccgtatctggccccgcccctgctatcctcgcccccacccccgtgatcccttacatcatggccccctacatcaccatctcgggcgaccgcatggacgcgtctgctttggcgagtaggcgcgcgaggcgcactgatccatgggcggctttggcagagagcacctatggttgcacagccacatcgaaggttgttaaagcgtcgtcatcgacagctcaaaggtaataccggcact

SEQ ID NO: 14030 - DNA, 333 bp, Zea mays
agctttctcttcatttctgttcaagagcgttgtcttacccctccccgctatggcttcgcccctttatcctctgtcgcgtggcaagtcttgtcttaactcgatcttttgatgtgcttacgcctgttacctcatgtaccttagacaccattggatccttccatgtggcttatcttatgcctaccttttgaatcatcatctttcccatctcgattcgagaagtggagtttatctatcgcgaccctggtttcattctctccctgtccgtacaagcattgctttaccttcatccattactatgctcatgcacctatcctgcatgtcttatcattcccc

SEQ ID NO: 14031 - DNA, 443 bp, Zea mays
  unsure (1)..(443): unsure at all n locations
agcttcagataacctatgttatccatcatttctcggcaaaacatttatctccttgttgtccggtagacagtaaaggaagtcatcttcgtcacttccaccgtacactaaggacccctagggatatttcaggtcctttgcataatattgcacttcggtaatttgctcttctgataatcgtttccctaaagcatgtcaaacaatataccccaaatcgtcttgagaagatacttcgggtataggcgatgctagcttctccggaagatcttccttttattgctctgttgccttaattcctgagggttcggcttaagcgtaggtgggagaaagcactacaataatggctcctccaaactcctcaantttgtcttcagaagtcttagcagaaacaggagttggcacctttgaagattntagaacagcatccagaacactagtcattctcc

SEQ ID NO: 14032 - DNA, 475 bp, Zea mays
  unsure (1)..(475): unsure at all n locations
acctgcngcatgaagcttctaagggagaacacgtgatangtctaactaatgntaccttttaaaaagatagaccttgtgcagcttgtcaagcagggaaacaagtgggaagctctcatcatgccaaaaatgtgatggcaacatcaagacccctggagttacttcatatggacctctttggacccgtcgcctatctaagcataggaggaagtaagtatggtctttgtataagtgatgatttatcccgcttcacttgggtatttcttttgcaggataaatctgaaacccaagggaccctcaagcgcttcctaaggagagctcanaacgatgttgagctcaatgtgaagaagaccacaacaacaatgtgtccgagttcaagaaccttcaagtggaggagtatcttgaggaggaangaatcaagcacgagttctccgctctcgacacaccacagcataatggtgtggtagagaggaagaac

SEQ ID NO: 14033 - DNA, 448 bp, Zea mays
  unsure (1)..(448): unsure at all n locations
agcttgtgaagattcttcattccaacatgggttatgtcggtgatgccagagccaacccatattagtcttagcaattaaacaagtgttgagtttagatgtgttttcattaaaatcaactaaatatagctgactctctaacactcccctaaatgctattgaatcatcacttcttctaaagacagtaacacctaaatccgtaaaaagacagttgtagcccattntacataattgagaaacagaaagcaaattgtaatctaaggaatctacaagaaaaacattggaaatagaatggtcaggtgatatagcaattttaccaagtcctttgaacaatntaggccttgttcttaggtacccaaacagtcttgggtcctttgacgttagaaacaagcaccttgtgtacccanacacaagtctttgagcccttgtgtttgcccncaacatattgaca

SEQ ID NO: 14034 - DNA, 466 bp, Zea mays
  unsure (1)..(466): unsure at all n locations
agcttgcaccccgatacattggtctgtttcctattcttgaacaatgtgggccagtggcataccgactccaactgcccgaaacattgtctgcggtgcacaatgtgttccatgtatcccaattaaagaagtgtattcgagttccatattgaaccattgatgtgctggatgttaccttggaaccagacttaacatattcagaacatcccattcgaatcctagatcaaaaggacagggtcacccgaagaagagttctcaaattttataagatgcaatggaaccaacatacggaagatgaagctacatgggaaacccaagacttcttagaaaagaatttcccaggctttntagcttcatgtaattngtaagatatgtaccaatgggtttgtaagatggaatagacccataccaccccttatttgtagacaaataaggaaataaagatgtgacgtgtttcctttttcactac

SEQ ID NO: 14035 - DNA, 466 bp, Zea mays
  unsure (1)..(466): unsure at all n locations
agctttatcaaatggacgtgaagagtgcttttctcaatggaccaatcaaagaagaggtctatgttgagcaacctcccggctttgaaaatagtgagtaccctaaccatgtttataaactctctaaggcgctntatgggctcaagcaagccccaagagcatggtatgaatgccttagagatttccttatcactaatggattcaaagtcggaaaagccgatcctacactcttcactaaaactcttgaaaatgacttgtttgtatgccaaatntatgttgatgatattatatttgggtctactaacgagtctacatgtgaagaatttagtaggatcatgacacanaaattcgagatgtcaatgatgggggagttgaagtatctcttangatttcaagtaaagcaacttcaagagggcaccttcctaagtcaaacgaagtatactcaagatattctaagcaagtttgggat

SEQ ID NO: 14036 - DNA, 380 bp, Zea mays
  unsure (1)..(380): unsure at all n locations
gcgatgccacagccagcccatgcaagtcttagccattaagcatgcatctagaccggcctcttcttttgcaaaatcaactaaataaagtttgccgtctaatacaccctcaaaagctagtgaaccatcacttcttctaaagacagacacatctatatttgtaaacagacagttatatcccatattgcacaattgactaacagatagtaaattatatcctagtgactctactaaaaacacattagagatagagtgctcattagaaattgcaattttacctaacccttataccttgccttgattcccatcaccgaatatgattgaatcttgggaatccttattcttgacgtangaggtgaacatcttcttcttccccgtcatat

SEQ ID NO: 14037 - DNA, 436 bp, Zea mays
  unsure (1)..(436): unsure at all n locations
agctttacactaagcagttgttgaacacttattacacttatcatgtttctaattgggctgtcatctacaccaccaaaacccacaagagagctttcaatctccctctttttagtgattgatggcaacacaattaaagcttacacaagtttaagatttaaagcacaattttgaattataagctatagaatactccccctaaatatgtgcttacatgaaagtctcaacattggccttaaataccaaattgcacatacttaggttgagcgtgaaacattactacattttagcattggtgtggcgcattgtatcaagaatcaaaccatgacgcgcatgacacacanatgcatataattagagttaagcaccacataactagatatattacaggatatcaacctactgctattcatcataaaggcaccaattaaagcccatg

SEQ ID NO: 14038 - DNA, 420 bp, Zea mays
acttgaatgcacctttctattgcctcattgttgaactgctgaaacatatacgcatttggtgttctcaggactatttcctcagctttatcaaaagctccttttagtcctttggtaggatcagttaacacaatctctgctccgaatgcacgcagaagaatgcgtctctcgacatctaacgatgaaggcattgttgctatcaacttgtatcctcttgctgcagccacagaagcaatggctacaccagtatttccagttgttggttctaccaaaatggtctgcacaggtagaaaccatctgcatatattacaatgtaggcgatgataatattgctaataacatgagatggtctttaaccttgtctggagaaaataatcccttctcttcagcaatattaatcatgcttaatcaatcctgtaacat

SEQ ID NO: 14039 - DNA, 386 bp, Zea mays
agcttgaagccatggtaagtagcatatgccattaatatacgaatcgactcaagcctagctacgggtgcataggtttcaccgaaatccaaaccttcgacttgggagtatcccttggccacaagtcgggctttgttccttgttaccacaccatgctcgtcttgcttgttgcggaagacccacttggttcctacaacattttgattaggacgtggaaccaaatgtcatacctcattcctagtgaagatgttgagttcctcttgcatcgccaccacccaatccgaatcttgtagtgcttcctctaccctttgtggctcaatagaggaaacaaaagagtaatgctcacaaaaatgtgcaacacgagatctagtgataaccctcttataaat

SEQ ID NO: 14040 - DNA, 414 bp, Zea mays
agcttggcgccaagccgtctgacgaggtgattgacggacggttcctcggtggcgtgcacggagccggccgggaggtggacggcgacggcgtctccggcggcggtagcgagcagctccgcggggtccatggcgtcgaggttgaagaaggccagctggaacgggacgcgcgtctcggccgcgaagttggacaggttctcgtggacgagctgcagctccagcgggtggtgcgacgccgcggacaccaatgcggtgaccttgagcgcggcgcccgggcggcggctggccagctcctgcatgagcgacgcccactgctcgccgacgccgatgtccaagtccagcacgtggatgcaggcagcgccacccagctcgtcgagcatggcctggacgcatgtgaagtgcgcgaactggagcacg

SEQ ID NO: 14041 - DNA, 388 bp, Zea mays
  unsure (1)..(388): unsure at all n locations
aaccttctgctatcttacacaaacagctgcatccgaggatcacttctttttataagaccttcggcgacgaagcatagacccaacactacatctagtgcaaatagtgacatgctcagtggtagatgtaaagggtttgcaagagttaagttcaacaatcttagcacgcaatatatcatttgtatctctaagatcggaaattgtaacattgcaaacatctaattctttatgcttagcaagcaattttttattttcatttctaaggctagcaagagagatgttcaattcttcaatcttagcgagcaaatcaacattatcatttctaagaattggaattgaaacatcacacaccattgaatcaacctaactaacanattagcattttcatttc

SEQ ID NO: 14042 - DNA, 287 bp, Zea mays
agcttatagccatggtaagtagcatacgcctttattatgcgaatggactcaagcctagctacgggtgcataggtttcaccgaaatccaaaccttcgacttgggagtatcccttggccacaagtcgtgctttgttccttgtcaccacaccatgctcatcttgcttgttgcggaagacccatttggttcctacaacattttgattacgacgtggaactaagtgccatacctcatttctggtgaagttgttgagctcctcttgcatcgccaccacccaatccgaatcttg

SEQ ID NO: 14043 - DNA, 447 bp, Zea mays
  unsure (1)..(447): unsure at all n locations
agcttatcatatntggacagagtggctggtgctcggcagcaaataaaattggagatcggaccatttgagtccttttaaaaggtttatcctacgagaaggtcactagcgaataactaatcagtgccttcagaactaagcgttgcatttgttctcaaatttaaccttaaactacgtccaaaaaataatcttaaacttattactaattttacattccactgttctgctgttttcgaataggctcaattaccacacttaagagtatcttcagataatattaatcagcatatgcttccattngtgtatgcaaagacatgtgttactcgatatattagttttggcagccacgagaatgactgttctggtacatatgacaaaacgatgaagttagaagcaccatctcacaagaaagttgcaggaggtatatgtcctgcttctgatgtaatatgc

SEQ ID NO: 14044 - DNA, 473 bp, Zea mays
  unsure (1)..(473): unsure at all n locations
agcttatcaaatntaacttaagttataaaaatcacaaagatttactgtatcaaatgcatatattatacaaatagaattgttaaaaaaaatcataatggttcttatttggtgtcgtgaatgttattattgcactatagagatttgatcgagcttgagatgttttaactctaaataaaaggtacaatggcttttattctagaagaggggggggggggagatcatataagagtatagctacaaggcaaattaaatcgaaatggtgaccagcatgcaatgcanggttcatctgagcaactagatgcaagctttangacatgtttaacagagcctccacgagtgcaaaaataaataaaattggatcataatacacctagattcacagtggagcagctttaccatggacgtaaagcttttccatgttactcatcaaagtcttttgtacaacttcacctctccctatatctcactatcac

SEQ ID NO: 14045 - DNA, 431 bp, Zea mays
  unsure (1)..(431): unsure at all n locations
ggatttataagcgccataagcgtgccgtatcttcggctanagtcacttgtgtacgcgccgctatctctgctcccaaactcttatctttttgctgtgagttccaagtcgagatatggtcggngtagggagatagagaggggagaagtttgctgtgtcagctaggcccgaaccgagacaaaaggggtgtcaagtcgtgtctagcgccctatggtaagtgtcatctctttccagggtgttctagggttaatttggcgccattttgtcaattgggtcgaagggctttgaaaaggggatcaaagtgaacatgtggagtctttgtgcaagggttagtttgtgtacttaggcaaaaactgaattcttccttgtgctgaaccttangtgaactttctagggcttntctgaaaactttctgggggtacttccttactatt

SEQ ID NO: 14046 - DNA, 455 bp, Zea mays
  unsure (1)..(455): unsure at all n locations
agcttcagctccatctattgtgnggattgccttttaatctgttctactcccttcagcccttctagcagcttcttgacttccatggacagcaatgggcccttgttgaaggtatcttcatgcataagtatgctgcgtgaagtattgcttcgaaggcattaagtgtccctcgaccaatgattgcattgtacgggtactccatgtcgacaatgtcaaaaacaacttgctcagttcttgtgttgtggacataaccgaaggttactgacattgtgattttgccaagtgccacaatctgtcttcctccaaagccacaaagaggatgtgtagcatcatgaatcttgtcttctagttcttgcatatgcctaaaagcctntgcaaatataatgtccgntgcactgnctgtgtcaaccaaaacattgtggaccagaaatcccttaatgacacaagatataaccata

SEQ ID NO: 14047 - DNA, 328 bp, Zea mays
  unsure (1)..(328): unsure at all n locations
agcttcgtctcagtaggttctaagggccctgtctctgnttcaacctaagttattgtagcttcaacttctatttgcttagtatcagctttgggttgcgttttgtcagcttcggcaaccttccctgtgggagcgagacttatggagtcagttgtttccaatacatctaatacatttaccatcctccttctcctaggagttgtggcagaactcttttgtgccttcagcgctgttgcttctattgaaggacttaaaatccctggcatctttgttacttcttcagtttttgacctttcagctntatctttgttaaccttcgtttcaactaact

SEQ ID NO: 14048 - DNA, 406 bp, Zea mays
agcttcagctccatctatgttatggattgcttttgagtcagtccagtttccttcggcccttctggcagcttcctgacttccatgaatagcgatgggtccttgatccgaaggtatcttcatgcaaagataggcaggatgaagaattgcttcgaaagcattgagggtgccacgaccaataattgcattgtaagggtattccatgtcaacaatgtcaaacacaacttgctcagttctagtgttgttgatgaacccgaaggtcactgacatggtgatcttgcccagtgctacaatctgtcttcctccgaagccacagagaggatgtgtagcatcatgaatcttatcttctggctcttgcatttgtctgaaggccttagcaaatatgatatcagctgcactacctgtgtca

SEQ ID NO: 14049 - DNA, 423 bp, Zea mays
  unsure (1)..(423): unsure at all n locations
agcttgaagccatggtaagtatcataagcctataatatacgaattgactcaagcctagctacaggtgcataagtttcaccgaaatccaaaccttcgacttgggagtaacccttagccacaagtcgagctntgttccttgtcaccacaccatgctcgtcttgtttgttgtggaagacccacttggtccctacaacattttgattaggacgtggaaccaaatgccatacctcgttcctagtgaagttgttgagctcctcttgcatcgccaccacccaatccgaatcttgtagtgcttcctctaccctgtgtggctcaatagaggaaacagaagagtaatgctcacaaaaatgtgcaacacgagatctagtggttacccccttatgaatgtcaccgaggatggtgtcgacggcgtgatctcattga

SEQ ID NO: 14050 - DNA, 366 bp, Zea mays
  unsure (1)..(366): unsure at all n locations
agctttatgtagctgctgtattaaatgagattaatattgagtgcctctatccgatattatcttctttggaataccatgtaagcacacacatccgagacatgtataactctgccaacactgcactgttataggtggtcttgactggtatgaaatgggctgcctttgtcaaatggtccactactacccagatggagtcataaccggctcgagtgtggggaagaccaactataaagtccatcccaatctcatccaattncactgtggaatctacaacggctccaacaaacctgcgggtctctgatgctctgccttgatcctctgattactatcgcatctatccacatactctactatatctctttcata

SEQ ID NO: 14051 - DNA, 417 bp, Zea mays
  unsure (1)..(417): unsure at all n locations
agcttttgaaggttcttcatccccacatgtgctaagcggcgatgccatagccagcctatgcaagtcttaaccattaagcatgcatctagaccggcctcttcttttgcaaaatcaactaaataaagtttgccggctagtacacccttaaaagctagtgaaccatcacatcttctaaagacagacacatctacatttgtaaataaacaattatatcccatttgacataattgactgacagatagcaaattatatccaagactttccactaagaatacatttgatatggaatgctcattagaaattgcaattntacctagcccttttaccttgccttgattcccatcaccgaatataatngaatctggggaatccttanttttgacgtaggaggtgaacatnatcttctccccgtcatat

SEQ ID NO: 14052 - DNA, 466 bp, Zea mays
  unsure (1)..(466): unsure at all n locations
gcttagatctcttgccttgctacttttgtctatatggccagaaatgacttgggtttcagttttaagggtcgcccttcttattcccattgcctttagctcccaaatccncaatagaagagcttcgtattcagcaatattatttgtacaactgaagtccaaccttgctgcgtagcatgttctgactttagagggcgctactagaacaacagccgctcctgcgccaaaggttccccaagaaccatcacagaagactgtctaggcttcatcgtcttttgttacttcttctccctaagcccctggcgtccaatcagcaatgaaatccgctaatgcctgggattgaatngaggatctatgtacataaacaatagtgaattcattgagctcgtgtcacacccggatttcangggtccaaagcccgggcgcgaacataatcaccaagtgtgctaggaccaagtctcacacatat

SEQ ID NO: 14053 - DNA, 465 bp, Zea mays
  unsure (1)..(465): unsure at all n locations
agcttagattaanaagtatgtacttagtttctttntaatccaatacttaaaacttcggaaatccataacttcttcgttttaattccgatttggttcgttcaagtcgcgttagcttcgtataaatatttactatgctgtaacaacattgattataccatatcgcataattctgtagttagatatttatttaacctatgtctactagattaactcttctaatcaaagctaacatgttcataattataattgattaaaatataatctctagtcaagttataattaagattaaagttgaattaattatttctttagattatctttataaaatcaaaacaagacctagtgtaattacttaatcacatatgtcttccgaatactatacctcttaaatcgtacctcccgaattagtggttctcgaacctaggggtctcgtacgacacgtagaatattataataattcactct

SEQ ID NO: 14054 - DNA, 464 bp, Zea mays
  unsure (1)..(464): unsure at all n locations
agcttgccttcgcctcagtatatcacccgcagtccaacggagttgtggaacgtgccaatggaaaaattttcacagctgtcaaaaagatgctcctcgacgaaaaaagggcaggtgggccgatttgttacccgaggcggtctgggcgctaaacacgactgagtgcagggcgaccgggttcactcctttccgccttctatatggatcggaggccatgaccccacaagaaataaaacatgggtccccgcgaacagttccgtcagctgtccccgacgtggacgagcccacttcgaaggatctcatcgatggagaccgagtcttcgccctacaggctctaaataaataccaagcccagacaaaagcatggcgcgaccacgcagtcatcccgagggaattcagcgaaggggacctcgtactcgtccgaacagctcggacagagntccagggcaagctggagcccaagtggg

SEQ ID NO: 14055 - DNA, 448 bp, Zea mays
  unsure (1)..(448): unsure at all n locations
agcttatgaagattcttcatcccaacatgggctattcgacagtgccagagccaacccatgttagtcttagcaattaagcatgtgtcgagttcagctctatcaaaatctactaaggatagctgaccctctaacacacccttaaatgctattgaatcatcacttcttctaaagacagtgacacctacatcagtaaagagacagttgtagcccattttgcataattgagatacagaaagcaaattgtaatctaatgaatctacaagaaaaacattggaaatagaatggtcaggagaaatagctattttaccaagacctttgaccaaaccttgatttccatccccgaatgtgatagctcgttggagatcttgagttttctcgtatgaggagaacatcttcttctcccatgtcatgtggtttgtgcacncgctatcgatgatccaacttgagc

SEQ ID NO: 14056 - DNA, 455 bp, Zea mays
  unsure (1)..(455): unsure at all n locations
agcttgtagagtcaaagtcaactcaagaaagtcgtggacaacctaagaaccaaccttgtccttcctgctagcctctcttgaatcccgggggcgagattcctgttaagggggttagatttgtaacaccctgaatttgggggtataaaatttcttttctaatatccaccaaattcaggtgttactctctcatttctctgcttttcttctctttgtcctaaaaaagtggagaattattttattttataagcaggtgtaagcctattaaaataaaatcttagggagtcttgaatgtttcatcacatgctagagcacatatttcgattgatgaaacttaatggtgtacatttatttaacttgtgcgtcatgctcgagttcgagtctaaacagaaagaaaataanatgagtaaggtaaatagaaacaaatagaaaggggaaaataaccaggcaacaatcct

SEQ ID NO: 14057 - DNA, 445 bp, Zea mays
agctcgcatatctcgtttcttgttttgcctatattaatccataactttgttttctttctaatcttattgttcgacataggcaaagagaaacaaccttaatttgtagatactatatatgtttatgaatttattgacaccttcgtaggtacaagtcggtggcaaaaagttatggaggtataaatatggtgttaatgttgttttcacgataataaaatgtctcgacttgaatttgatataataataatattttttattaatatttttttttcaaatcatatttaattaagatgaagaagacaattcatattgagaggatatatgaagatatatttagtagttaggagatttaatagacactcgtatatattactatcagtattcattttaatatacattttccattgtgtggattagtttggcaatatacatatatacacatagtagt

SEQ ID NO: 14058 - DNA, 391 bp, Zea mays
  unsure (1)..(391): unsure at all n locations
agctngcacacatagctcattngaataccttttatcatatctcttctatatgctatgactaatgtgttttcaagtctatttcaaaccaagtcataggtatattgaaagggaattagagtcttcggcgaagacaaaggcttccactccgtaattcatgcttcgccatcactccgagcaactctctattccttggggagaaatgagcatcaaagaataggacttcatccttcgaggagagagtaaaagctcaaaagcaaaaggaccggatntcgtctttggtataatcttaactcatttacttatgaccaaaggggaagaacttacttcgagggctctaatgattccgcctttggcgattcatgccacaaagggggagaaatgagcccaaagc

SEQ ID NO: 14059 - DNA, 338 bp, Zea mays
  unsure (1)..(338): unsure at all n locations
agcttatcanaggaaatttctataatcaagaatattgagctcatgcctaagtctggtaaaagattgttcatcaagtggcttggtaaagatatcggctaattgatctttagtattaatgtaagaaatctcgatatcccccttttgttggtgatccctaagaaaatgataccgaatggctatgtgcttagtgcggctatgctcgacgggattgtcggccattttaattgcactctcattatcacatagcaaagggactntggttaatttgtaaccgtagtcccgcagggtttgcctcatccaaagcaattgcgcgcaacaatgtcctgcggcaatgtact

SEQ ID NO: 14060 - DNA, 285 bp, Zea mays
ccacaccatgctcatcttgcttggtgcggaagacccatgtgggtcctacaacattttgggtaggacgcggaaccaaatgccatacctcgttcctcgagaaattgttgagctcctctagcattgccaccacccaatccgaatattgaagggcttcctctatcctatgtggctcaatagaggaaacaaaagagtaatggtcacaaaaatgtgcaacacgagatcgagtggtacccccttatgaatgtcgccgaagatggtgacgacggggtgaactcgttggattgc

SEQ ID NO: 14061 - DNA, 357 bp, Zea mays
  unsure (1)..(357): unsure at all n locations
agctttatcaaatggacgtattagtgcctttctcaatggaccaatcaaggaagaggtctatgttgagcaacctcccggctntgaagatagtgagtaccctaaccatgtctataaactctctaaggcgctttatgggctcaagcaagccccaagagcatggtatgaatgccttagagattttcttatcactaatggattcaaagtcggaaaggccgatcctacactctttaccaaaacacttgaaaatgatttgtttgtatgccaaaattatgttgatgatattatatttgggtctactaacgaatctacgtgtgaagaagttagtaggatcatgacacacaaattcgagatgtctat

SEQ ID NO: 14062 - DNA, 452 bp, Zea mays
  unsure (1)..(452): unsure at all n locations
agctngccgagcgatccgcgaaccatggctgtttatacctangcggngatgctcctccgatccagaaactgtgcttagaacaaggtcgagcggagttnttttctggctcaataaaagagcgagccagttcagctcgcgagctggctcgaacaacaaccattttgttatataaattttaattagcatatattataggtactaaatagatgattaatttatatttttagattactgtacaaaattaacttattctctatattatatgatatatatttaatttactaatttaagacgtgtcacttacattatttctgagactntatattatattttggagactgatttcatgcttatggtcaggctcgttggctcgccgaaccgagccgactttntaggctcgctagaggagcgagccgagccgaaggctcgtacttgaccgagccgcagatagt

SEQ ID NO: 14063 - DNA, 470 bp, Zea mays
  unsure (1)..(470): unsure at all n locations
agctntaagttttacaggatcacctattcaccctcccctctaggtgctctcaattggtatcagagccgttctcttcacaaagggacttaccgcctgaagagatggatcctaaggggaagggaatcgtgatcaacgacaaagaaaaggaatccttcgtcaacgagccaaaggacgacaagcctaccgactccggctcggggcatagacggaaggaaggaaagaagaagaagacaaggcgcatcaaggagatcatctactacgacgatagtgatgagtctacttcttcccaaaaggatgatgacaacgactacaaaaagacggtcaattcgaacttttcatttgattattctcgtattcaacatagttcgaattcgcatttgctttccattcctcttggcaaacctccacacttcgatggggaggactacggatnntggagtcacaaaatgcgtagtcacttattctctctt

SEQ ID NO: 14064 - DNA, 454 bp, Zea mays
  unsure (1)..(454): unsure at all n locations
agcttatgcaacatcgcttgagatggttnggtcatatccaacgattacctgaagaggcaccagtgcatatcggaataattaggcgtcccgaaaatgtgaagagaggtagaggccgaccaactttgacgtggacagaggctgtgaagagagacctgaaggagtggaatattgataaagagctcgccgcagataggaaggggtggaagtgtgcaattcacgtgccagaaccctgactgatagtttcgcttttcctccttaatcgtttgaccttttcttgtgtccatnttagatcttgctggtccttggggagtttatctcttttatgtgtttccccgtttcgntgttttccggtctcctttgcctttggttccctcttctgttcttttggggttgagctctgaggttttcatacngngtttcatctctagcctacnccaacgtgcttgggacaaaa

SEQ ID NO: 14065 - DNA, 471 bp, Zea mays
  unsure (1)..(471): unsure at all n locations
agcttgtgaggagcagtggcnngggggtttgttttcaagcacacttcganaacacggaggtggtcatagcgctgaggggtaccgaagagtgcctggtgaggagtatgggccaggcacgtagtggaagggagacggttgaggaggtatgtggaggtgtggaggccctcggcccagaagcatgccggaaggtgcacctggagaagagtgcggatggtgtcgttggtcgtgcggatcatgcgctcagccttgccgttctgggaggaggtatacgagcaagacatccgcaattgcatcccgtgggagagaaagaaggcgcgggaggtatagttatcgaactcccaaccattgtcacactggacggccttaatggtgaggccgaactgagtggacacccagacgaataagtggaggagggcggtgaaagcttcagacttggcacgcacagggaaagtccacacataatgagaaaaa

SEQ ID NO: 14066 - DNA, 379 bp, Zea mays
  unsure (1)..(379): unsure at all n locations
cgcttgtgaagattcttcattccaatatgggctaatcggcgatggcagagccaacccatattagtcttagcaattaagcaagtatcgagttcagctctattgaaatcaactaagtatagctgaccctctaatactcgcttatatgctactgaatcatcactttttctaaagacagtaacacctatatccgtaaaaagacagttgtatcccattttgcataattgagaaactganagcaaattgtaatctaaagaatctacaagaaagacattggaaatggaatggtcaggtgatatagaaattttaccaagtccttcggccaaaccttgatttccatccccgaatgtgatagctctttggggatctttgnttctctcgt

SEQ ID NO: 14067 - DNA, 436 bp, Zea mays
  unsure (1)..(436): unsure at all n locations
agcttgagaagattctttattccaacatgtgctagncgacgatgccagagccagcccatgttagtcttagcaattaagcaagtgtcgagttcagctctatcaaaatctactaagtatagctgaccctctaacactctcttatatgctattgaatcatcaattcttctaaagacagtaacacctgtatccgtaaaaagacagttgtaacccattttacataattgtgaaactgaaagcaagttataatctaaagaatctaccagaaaaacattggaaatggaatggtcaggtgatatagcagatttacccaatcctttgaccaaaccttgattcccatccccgaatgtgatagctcgttggggatcttggttatctcgtatgaggagaacatattcttctctcctgtcatgtggtttgtgcacccgctatcgatgat

SEQ ID NO: 14068 - DNA, 438 bp, Zea mays
  unsure (1)..(438): unsure at all n locations
agcttctaaagggagaacacgtgataggtctaaccaatgttcaattcgaaaaagatagaccttgtgcagcttgtcaagcagggaaacaggtgggaggagcgcatcacagcaagaatgtgatgaccacttcaagacccctggagctgctgcatatggacctcttcggacccgtcgcctatctaagcatagggggaagtaagtatggtttagttattgttgatgatttttcccgcttcacttgggtgttctttttgcaggataagtctgaaacccaagggaccctcanacgcttcctcaggagagctcanaatgagtttgagctcaaagtgaaaaagataagaagcgacaacgggtccgagttcaagaaccttcaagtggaggaagttcttgaagaggaagggatcaagcacgagttctccgctccctacacaccacagc

SEQ ID NO: 14069 - DNA, 403 bp, Zea mays
  unsure (1)..(403): unsure at all n locations
agctngaaatgtgtttttctccattcatttttgatatgcaagtacacctaatcatacatctcgtggatcagataaaaatactagggccactatatttacatcatatgtttcagttggagcgatacctgcgagtattaaaaggttatgtgcgaaatcgcgctcacccaaagggttcaatcatggagggatacactacagaagaagtgattgagagctgtatagattacatcagtgacggaacaatgataggtgtgcctgtacctaaacatgagggtaaactatgtgggagagggagaatgggcaagaaaacttttcgcgttgaggattacaagctagtacattgtgctcatggtagtgtactacaacatctcacgatagccgagccttacatagaggaacacct

SEQ ID NO: 14070 - DNA, 400 bp, Zea mays
  unsure (1)..(400): unsure at all n locations
agcttaggacagcaacttttatttgcttgttttaatcataactcacaagacattcatctagaaatagtgatcaaatactctgtggaaagcataagacacactctacaactgtggtattgtcatctcaatctgattagacacttaacaaggttaaatagtgacaaacggcagctttatttcaatttatatgaagacacttaaacatttcaagaaacacacacgcttttgtttatntctaatttgtcactaattcttcttataattataaaatatgtgtcatttcagcaccatatgaaactatctaatttgagtctggaatctttatgaggcatatgtaataacaaattatgatcaatgtataaatcttacatgcccaggctttatattttatttaatacaa

SEQ ID NO: 14071 - DNA, 340 bp, Zea mays
agcttctgaaaccccatactcctagccatctttcttcagacagataattctttattatcagggaggcagtataggaagtcatcttcgtctgttccattgaacactaatgctcccttcggatattttaattctctagcatagtgattagcttcataaatctcttcttcagatagttttttccccgaagcatgccgtacaatgtaatcgcttatgttggaaggtgcttcgggggcagcagtgtcaatttcttcaaccgaaattggctctgacatttttaattttttggcttccaatgctgcctttgtaacatttgtttcttcggtttccaaaggttgtcctt

SEQ ID NO: 14072 - DNA, 311 bp, Zea mays
agcttgtacctttaaacaggatgatacaagatactggagtggttgtctgaatgcttttgaactgcttgaagcattactgtagctttggtgcttttgagactgatcagctctggagcagctagagtgatatagctgggggcttttgaacaatagttagagtgatagttatagtgatatgaaacattagtgatctagttgcgaatgatattataattgtgacgcttttgtgaatatataattgtggagcttttgtgtttatgtgatggatctatgactgtggtatactgaataactgagtatgtgtttatgat

SEQ ID NO: 14073 - DNA, 265 bp, Zea mays
cgaagtaaaaagactcctcagtgctagagtgatcaaatacgtgacatacccagaatgtctagccaacactgtgatggtgaagaaggccaatggaaagtggagagtgtgcattgatttcgaagatctcaacaaatcatgtccgaaggatgaatctcccttgccaagagtatactccctcatagatgcggcagccacttcggagcttatgagcctactcgcattattatgtaaggagagtgatcaacggcacaactttccttaaact

SEQ ID NO: 14074 - DNA, 262 bp, Zea mays
tataaaacgtgctcgccatacctgctttcgccgtcgcacacgctcctctgctcttcgactgctgctcgctttctctcgagttcacttgccgtcgcgccacatcaaggacagagcactaccgcgctcgtcgtcgcggatatgcaccgttgagcgccattgccgcctgtttctactggccgatcatgcgccggagctccacccgtctcaccgcccggcgcatcgccgatgtcccatagccgacaccacgttctgcgtgctctac

SEQ ID NO: 14075 - DNA, 295 bp, Zea mays
  unsure (1)..(295): unsure at all n locations
gacagacacatctatatttgtgaacagacaagtatatcccatattgcacaatggactaacagatagtannatatatcctagtgactctactaanaacacattagagatagagtgctcattnagaaatgcaatttntacctaaccctttaccttgccttgattcccatcaccgaatatgattgaatcttgggaatccttattcttgacgtaggaggtgaacatcttcttctcccncgtcatatggtttgtgcatccgctatcaataatctagctggaacccccggatgcataaacc

SEQ ID NO: 14076 - DNA, 459 bp, Zea mays
  unsure (1)..(459): unsure at all n locations
catgcaagcttgcggaccatgtggttcgggcgaggggctccgattctctccgctgtcgtagcatcccccatgcctggggtggtnagcctcggcgcaccttatcgtcnaggtgggctcgacggtcgtggcggcggtgcttcgtgtcganggcgtccggggccgcangcgctgtgtcccgcgtgcgtccggtgtggaccgaggcttcccgcatgaatcgggaagtcgcggcgcgatgctccggngggtacccctgccttcgggaggcagagctctcggcccgtcggaccgcagcatccttcaggagattnttgagctctccctggatacgccgcccctcggtggtggatggttccggcatcgttcggagtagtattgctgctgcagccaggttctggccgaccccactggaagctggaggcagccttgccctcgcatcgtcggtgatgcggtgctggacgt

SEQ ID NO: 14077 - DNA, 375 bp, Zea mays
  unsure (1)..(375): unsure at all n locations
catcattcacacaagaacatcatgacgaccgacaggccggttgagctacttcacatggatctattcggctcgattgttacatagcatcgacggagtaagattgcttgaatagtggatgattattctngcttcacttgggaatctttntgcacgaaaaatctcanacccaagagacctctaaggggatcttgagacgagctcanaacgagttcggattaaggatcaagaaaataagaagcgacaacggaacggagttcaagaactcacaaatggaaggcttccttgaggaggagggcatcaagcatgagttctcttctcccttacaccctcaacanaatggtgtagtggagaggaagaatcgaactctattggaca

SEQ ID NO: 14078 - DNA, 513 bp, Zea mays
  unsure (1)..(513): unsure at all n locations
agcttgaagcaccctacacagatggggatgcgactcctttcttatttcatgtgaactgttcccagcaccaagtgtaatagccccagtaccctgatgatccannacaaaacgggcaggtacagtgtcataaaacaacaatattggcttttgaacgacttaatgtgaacagggacagtatacataccaatggcatgagatgccagaanaaactccttagtagatccctttttgacagaattattgaatggactcagcanagtggcactaccttcagagagtataaacaaactatgataatacatttcaccaagtggattcagataaaacataccataactgaaagagaactagcctgatagcaatcatagcatataatgtaaccatgtaacacatggaaagtttgttaagttcatggtaattaaaaatatgacttacatganaataagcannaaaatgcatacaacatttcataatttaaggctcacagctcactaacagaaatacatatacctg

SEQ ID NO: 14079 - DNA, 447 bp, Zea mays
  unsure (1)..(447): unsure at all n locations
agcttgngaaacccaatcacaagttattgaataatgatactataattaatcggccttcaagatgtaatgaagcctttgagcagctgaaagtattattggccactactccggtattagctcaaccggacattgaaaagccattngatgtgtattgtgacgcatcangcagtggtctaagttgtgttctaatgcaagaaggtcgagtgatagcttatgcttcaaggcagttgcgccggcacgaggaacattatccaactcatgacctggagttagctgctgtggttcatgccctanaaatatggcgtcattatctactggggaatatatgtcatatntatacagatcataaaagtttgaagtacatctttacccagtcagagcttaatatgagacanaggagatggctcgagctgataaaggattatgaatnggagattactatcaccc

SEQ ID NO: 14080 - DNA, 411 bp, Zea mays
  unsure (1)..(411): unsure at all n locations
agctntaacagatgctccgaaagactcttctgcataagtatctagagaanatntgtaatatgattgtgaagaaacttatgtaaatctgtgcgtaccttgtaatatatcttttcccctttgtccgagtacaatctgctctgctgtggacgatattttctttttgagccgaaggcgaaaaacaccttcccttcttttcatacacaacgaagcatgaaaatntcttctttctccgaagctttatcctcatagccgaagcatctgccttttctgtatgatatgatgataatgatcctatgtatgtctaaatgaatatttatgaatgcanatgtcatgatgtaatgtatcgngcaaatgaatatccgaatatatattcgaagccataatcatagccttcattcccttaggaatgac

SEQ ID NO: 14081 - DNA, 223 bp, Zea mays
  unsure (1)..(223): unsure at all n locations
gattcatacaagacataatattcagattcgggataccaacagtatcatcactgacttangatccaacttcaccagttcagaattcttcgacttctgcgagcaaaagagcattcagatcaagtacgcatctgtagcacatccgagagccaacgggcaggttgagcgagccaaaggaatgatattggaggcactcacgaaaaaggtcttcgataagaatgaaaaa

SEQ ID NO: 14082 - DNA, 260 bp, Zea mays
tttgtccttgttgagactgtgtttccatcaatggtaatggtgatcttgcaccataaaacaccggcgaaacccagaattcagaaaccctgacacatcgtcgtggagaaggtcctgactacttgccatcattttaatacctccgtaccattatgctaagatgctactttgtatcagtctgtacctttgggtgatatatagtagttatgcttgtactctatcatgactgagaatattatgatcctgtcttttttttgagtgct

SEQ ID NO: 14083 - DNA, 387 bp, Zea mays
gccccactggaaaaagcttagcccaagatcttgaccgttggacatgcccttgcatggttttctgtcgcgaggtgggcacaatgacatacctgattggcgaccaagatctcctatctggccatatctgcatgcaactccggatgagagacagcctatgtgcaggaaagactcgtgccgaattttgccaaaatcgcacgttgtacttggggagctgtggacacggcagaagaaagctcacgtgttcacgcctctgtggcgccaagatgccgccgccctccgccggcaacggcagcgagcatggccgccccgcctataacccgtcaggtcacccctttctgacctaacctacagagtactacatgttgcctgacgggtcggcaccaccct

SEQ ID NO: 14084 - DNA, 466 bp, Zea mays
  unsure (1)..(466): unsure at all n locations
agcttgntttataattgtgaactagactatnatcttgttgnattcanaacatgttcaccatttaagattaacacctagcatgtgtaggatgtgcttgaaatcctttgtagtgtctctagtatgctaggtggctatgtctcatgctctgagtcattcactgtcttgaatcatattctgtgcttataatcaaaatcaagataagtgcacaattcagaaagattgagatgggtttgcaaccacctctctgtatcgagactgctgtcattcgcacttttggatgaactcgagctcggcagtgaatgatcaaactagtgtctttaccttctgattgcttttctacataagcaacacccggttgaaaagttagacaatgacaatgcttacaacctctcgcactcacatgctngtcattgaaattngtaatccgctgcanaatctcgaaaatcttgagaatatcatctggtat

SEQ ID NO: 14085 - DNA, 338 bp, Zea mays
  unsure (1)..(338): unsure at all n locations
agcttctacacatggatctattcngcccgatcgcttacataagcatcggcgggagtaagtactgtcttggtattgtggatgattattctcgcttcactcgggtgttctttttgcggaaaaatctcacacccaagagaccttatagggattcttgagacgggctcanaatgagttcgacttgatgatcaagaaaantagaagcgataatgggacggagttcaagaactcacaaattgaaggcttccttgaggaggagggcatcaagcatgagttatcttctccctacaccncacaacanaatggtgtagtggagaggaagaatagaactctattggaca

SEQ ID NO: 14086 - DNA, 504 bp, Zea mays
  unsure (1)..(504): unsure at all n locations
agctntanacattggttctatagcattgggcggtacttctgcttactcgctctntaatctcactagaagctcttggttctgctgttttctacgcttgataagctctaggctttttgtttggttcacaccagtccactatttaaggcatgaatatgttgtgtttctctcttgtaagaaaatatggagtctattctctcaggtttcattttttttcaaaatcatggtcatgtgcacaccctatcgacgtattcttcgttactactgggtgcatgcataagcattcacgggtaatctggcatttctattagcacttagtaatcagcttattaggacntgatgtgtctaccatctaaatcactgcacatttaattaataatgcctctcattaatattaatgttcttcctcactttgctntatgcctaatnatgtatntcactactttgaaacttttatcagtccattatggttgcctccacttctctatgctgaccgntctcctttaa

SEQ ID NO: 14087 - DNA, 482 bp, Zea mays
  unsure (1)..(482): unsure at all n locations
agcttctanagggagagcacattntaggattaacaaatgttcattttgagaaagacaggatctgtatcgcatgccangcanggaaagcaagtnggtgcccatcatccacacaagaacatcatgactaccgacaggccactggagctcctacacatggatctattctgcccgattgcttacataagcatcgggcaggagtaagtattgtctagttattgtggatgattattctcgcttcacttgggtattctttttgcaggaaaaatctcatacccaagaaacattaaagggattcctgagacgggctcanaatgagttcagtttgaggatcaagaaaattagaagcgacaacgggacggagttcaagaactctcannatgaaggcttccttgaggaggagggcatcaagcatgagttctcttctccctacacgccacaacanaatggtgtagtggagaggaagaatagaactctattggaca

SEQ ID NO: 14088 - DNA, 460 bp, Zea mays
  unsure (1)..(460): unsure at all n locations
agcttgcaaccttgccaggcaggtaagtatcacttttgtttttctatangccgcngnnagcttctgagttgtaactgtcttttgtgttgctcgcttgaatctcggctgaaagaaaaggtgcaaacatgaatgtgaatttggtcttccaaaactaaaacacacaaatcttactgtttcactgcaagtattattagatccttctgttgcttgttcatcagagcaactggatgactctgctggttctatatgatcactcatatgggctctagtttcaagtggattgcggatttcttttgttcagttcactgttggacatctggcacaatagcattgntggctacgatatgtgcctctcttcatgctttggtaatgagcattcttggcactttttgccgcacgaaccaataccctatctaacagttgcagccagaattcatcgccataccttcttaataatata

SEQ ID NO: 14089 - DNA, 490 bp, Zea mays
  unsure (1)..(490): unsure at all n locations
tgcccgccgcagcttanagtacccggtgaatggagcgaccactntctcttgctctccttatatgtatcgcaatctgggatggaccccttaattagatatcacgctcttgatgataatccaacacttctttgtttgatctttccacttcacattntctatgtntattgcattgncttatgctcgtactatggtgcgctctctatgtgctcagcgggtttctcatattggagtgcataatattttcaatcggtgtgaacaccatttctatcntttctcaataaacatggtagttactaccatttaacggttctgtatgccccaactaacanagaattangacaacatttgcatctttacaaaataaaaagaaaaatttctggaccattgataataaaattctagaaatataatacctacatgaattaaatattcaacgttggtcatataataaccatgcatctaatacaaactntctaattctcanaattct

SEQ ID NO: 14090 - DNA, 388 bp, Zea mays
  unsure (1)..(388): unsure at all n locations
aagctcgaagcctctcttttctatggcagctgattgctcttttatcttgctttctaagctcctcaattataacttcgtgccttttatcctctaagtcctgctgcatttataaagcctcgctcataagcatactctgtggacaaataaccttcgttaaaaaatatttatgctattaaaaatagtaaagcgtacgcacaagatatttaccttaacattggaatagaacatactgccgacaatgtgttgtcgtcggtatcggctgatgtctgctttgagcttctggacaccgatactccttgatagagtaccgataaccttcgcaccggtntgatctcgcatgcagcctaacccttatcatcattgcaccgatagaagtgccccggccgac

SEQ ID NO: 14091 - DNA, 181 bp, Zea mays
  unsure (1)..(181): unsure at all n locations
ccggtgtggaggttgttcatacncgcggngacagaaccggagttccgtttgtgatggcaccttgaatgccggtctctcgttcattatggctactggggcctgaacatgtatgtattttcggcacggagcccgtgtttttcctcatttcgagcactaagactcacctgtcggctatctgacc

SEQ ID NO: 14092 - DNA, 505 bp, Zea mays
  unsure (1)..(505): unsure at all n locations
agcttctanagggagaacacgtgataggttgactattttcaatncgaanaagatagaccttgtgcagctggtcaagcaggtaaacaggtgggaggagcgcatcacagcaagaatgtgatgaccacttcaagacccctggagctgctgcatatggatctcttcggacccgtcgcctatctgagcataggaggaagtaagtatgggctagttattggtgatgacttttcccgcttcacttgggtattctttntgcaggataagtctaagacccaaggaaccctcaagcgcttcctaaggagaagctcaaacgagtttgagctcaaggtgaagaagaataggagcgacaacgggaccgaattcaagaaccttcaagtggaggagttccttgaagaggaagggatcaagcacgagttctccactccctacacaccacagcanaatggtgtggtagagaggaagaacangacgctcatcgatatggcgaggacaatgctangagaagtca

SEQ ID NO: 14093 - DNA, 376 bp, Zea mays
  unsure (1)..(376): unsure at all n locations
aacatcatgacaactgacaggccactaaaactcctacacatggatctattcggcccgattgcttacataagcatcggcgggagtaagtactgtctaggtattgtggatgattattctcgcttcacttgggtgttctttntgcaggaaanatctcatacccaagaaaccttanagggattcttgagacgggctcanaacgagttcggctttaggatcaagaagattagaagcgacaacgggacggagttcaagaactctcanatngaaggcttccttgaggaggagggcatcaagcatgagttctcttctccctacacgccacaacanaatggtgtagtggagaggaagaatcgaactctattggacatggcaagaa

SEQ ID NO: 14094 - DNA, 325 bp, Zea mays
  unsure (1)..(325): unsure at all n locations
ataacattcaagacactagatagctgttctctntggnggacanatgtgcatgtacgacananggtanaacgtggcacattccccgcgagatgtagtcgaggctgccatgcatcangacctcccgaaccgagcacaaaanaggaaaaaaggtaaggccctaanggcccccaaatcagtgccccaatgggaagccatagtaagcctgcccgtcaggcgagaagcagcccgacctgatgctcgagagcatcgtgaagtactgccctatgcattaaatatccatgggttntaaggtttagagtgagtgtanggaggtcaaggacttgac

SEQ ID NO: 14095 - DNA, 455 bp, Zea mays
  unsure (1)..(455): unsure at all n locations
ctgcagctatgaagatcttcatccaacatgggctantctgttgtgccagagccaacccatgttagtcttagcatatagcatgtgtcgagttcagctctatcnaaatctaccaagtatagctgaccctctagcacaccccttaaatgctattgaatcatcacttcttctagagacagtgacacctacatcagcagagagacagttgtagcccattttgcataattgagatacagaaagcaaattgtaatctaatgaatctacaagaaaaacattggaaatagaatggtcaggtgatatagcaattntacccaatcctttgaccaaaccttgatttccatccccgaatgtgatcactncgtggggatcttggtttttctcgtaggaggagaacatctttttcttcccagtcatgtggnttgtgcacccgctatcgatgatccaactttgacccccgg

SEQ ID NO: 14096 - DNA, 486 bp, Zea mays
  unsure (1)..(486): unsure at all n locations
agcttgtcaatacttatcataacagcaacatctaccagttcagcaactggcaaaccatacctgtaacatggccatttcacgtgctggnggggctggatatgatntggaccctttcaagaaagctcaaggaggatacactcatgtactggttgctatngtcaaattcactaagtggatagagtacaagcccatcgcttctctaacttcggctaagctagtggaattcatagaagacataatattcaggttcggaataccgaatagcatcataactgacctaggatccaatttcactagttcagagttctttgatttctgcanacaaaaaagcatccaaatcaaatatgcatcagtggcacacccgagagccaacgggcaggtagaaagagccaatagaatgatattggaagcactcanaaagaanagtcttcgacaagaatgaaaagttcacaggaaagtggatagaagaattgccgatgtggtctg

SEQ ID NO: 14097 - DNA, 472 bp, Zea mays
  unsure (1)..(472): unsure at all n locations
cactgcgctgcgctgtattatcatttaaatagcacctctctcacatagatttctatggataaactcaacacaagagatggcttagtacacaagactagttcttattagcacccttttatgtgaagtcaacgagttgctaaatagagaaacctcataatatggactaaatttccttgaaccctcatgcacaatatantttgaatgacatggataatatgcatggttattcaatgaagtctaaagggatgacttaatccatattatggtgagtgtctaatatagaagaatcaaatccaaattaactagatagagaatacgtcacataattttggatggttcaccatatgataatattcattcaacttctaattagacctttatttcataatcaacatctgatgtatatcctcaagtgcttctttttccttagtggctacacaagtcacaaaaagataagatntgaaaataatat

SEQ ID NO: 14098 - DNA, 405 bp, Zea mays
  unsure (1)..(405): unsure at all n locations
gctgcagcttcagattgctggcgtgagcatttatttttgtattccttgcaggcctgtgcagcctactcaatcctttctgtggaaactaggtcgtcatctgaggccccaatgagtaactactaatgtatgaataaaggccagtcgcagattgatcgtaccccagacctgctttcgtataaacaaatcagcacaaaaataaaactggatgagaaataaatcaggacggacaaatcagcgacataaacgaanaatatggacaacataaaataactaagtgacaaagacaaaaagtttaaaaaacgcctaccgtggngctcgaacccacgaccacaagtttaagagccttgtatttaccaactgagctagacaagttgtctgtacaaaacgagctcggcgccagatcta

SEQ ID NO: 14099 - DNA, 478 bp, Zea mays
  unsure (1)..(478): unsure at all n locations
gtcacctgcacgctgcagcttttggcacagttcacctccgcaccatactttctatctattcacgaggtcagtagccagaaggggcgccacacacccaaaagtagcgggattttagggaggaatccgaagctcgcacagtcaacagtactgtgccggagtcaaagcacatctattgagagatatcctaccttctgaaaaacttttttattctatgccagtttgtttttttaataagggacaagtaatgcaaatctagttntaattccttgaaatagtttcacttctattaaaatgaaatatatcttcttcacagatttacgaagctcgaanattgtcgaagctcanaaagtcgttcctaagggagcgcagcataagttntgctgaagctacaaaaagtcgtttccaagggagcgcagtgtaagttttctgctcanaagtcgttcctaagggaatgcagagccaaatgccgncgaaatac

SEQ ID NO: 14100 - DNA, 530 bp, Zea mays
  unsure (1)..(530): unsure at all n locations
gtcacctgccgcatgcaagcttcggagagggttcttgtggaaaggaangatagatgttacattatcttctagctgggccaaaggtgactcaaccaaaggacctatgcagtttangcttgcttagttgcttgacctacggtttcatggctgggctttgagggtttgctaatggtggctccaaaaaactgaattgaacaagccatggactgattatcctattcagacatgtaaggaggttcgaaattagtttagtgtgccagtccttattcaaattgnggatggttctaacaccctgttttggaaagatcggtatctgtcaggcaagtgtgttaaagacgtggccccttcgttgtttcagttggtgcttgcccgactggttagtagaaggttgatcagtgaggccctgcccaattttcagtgagtcgctgatttaaaagatgccctcaccgtaacagtgttggcagaattcttggacttgcacgaaacactctantatatagtgcttcaacaagggggctatgtttttggtc

SEQ ID NO: 14101 - DNA, 158 bp, Zea mays
acggagctgagagccgggtccgggacggtcggttgctgatataacgcgcggactcactaaaccacctcgcactgtcctagttgctgaattccggccaacatggaatctctgctggatcgacgtggtctggttaaggcacagacctattaccccggtca

SEQ ID NO: 14102 - DNA, 506 bp, Zea mays
  unsure (1)..(506): unsure at all n locations
agctntaccanatggacgtgaaaagtgccttcctcaatgtgccaatcaaggaggaggtctatgttgagcaaccttccggcttttgagatagtgagtaccctaactatgtatataaactctctaaggcgctntatggggctcaagcagccccaagagcatggtatgaatgcctaagagattntcttatcactaatgacttcaaagtcggaaaggccgatcctacactatntaccanaacacttgaaaatganttgtttgtatgccaaatttatgttgataatatcatatttgggtctactaacgaatctacatgtgaagagtttagtaggatcatgacacannaaattgagatgtctatgatggnggagttgaagtacttcttaggatttcaagtaaagcaactccaagagggcaccttcattagccaaacgaagtatattcaagacattctaaacaagnttgggatgaaggatgccaagcccatcangacacccatgggaactaat

SEQ ID NO: 14103 - DNA, 215 bp, Zea mays
  unsure (1)..(215): unsure at all n locations
tgttcgccatggcgcacggtccgaatacggatgctcgggcacgaactcgcaaataagctaagctcaagcatgtggaaagacaccgaacatacagtgtatgtctntggtgaagggcacagtggaacggagggaaaactacacggaggcacgcggcgacgggcggcatggctgttcggccttgcgtttgggctgaaaacgaggcgttcgccatgtcg

SEQ ID NO: 14104 - DNA, 457 bp, Zea mays
  unsure (1)..(457): unsure at all n locations
agcttcttcgagcttgttgacgaagtgttgaagcttgctatgttattcatcggggtggtgatgaagcttcttgtggagttcgtgagttcaccgaagatgggtgccaatgttgtgcacttgatttcaatccccagaagtattaaatatcaaggtaacacagttagatcgggcttcaacttcaccctataattccatcgttctcaaagagaaggtagattgataggatgaagatgaagggttagataaataggtgtgtcaaacaagggtaattcataatgtagactgaatagaaatacacacgaattanatgtaactaataccattcatctccttcctctntgctttttatttaaacaaaagttntacaagtaccttggaatttgtgaaattacaatgaggaagatgtagagaatacaacttcatacanagagtagtgacaccacctcaatcaaaaagt

SEQ ID NO: 14105 - DNA, 99 bp, Zea mays
attgcagcaccccaccagcacagtacggatgcacataatagcacaaatctccataatgactggcaaatccgagtcatgtgtactagaatgcgaaaagtc

SEQ ID NO: 14106 - DNA, 483 bp, Zea mays
  unsure (1)..(483): unsure at all n locations
agcttacaagaaacattctaagactccaagactccaacttctcgcattcgattccttgagatagtgacttgagaaccatttgagtngtgaactccgtgcgttgtgttntgagcttgagttgtgacttgtgtgcgtgattgcgctgttggattgagtcttgcatgtgttgctctcccgtcccttccttctgtgcttcttttgtgatcatcattgtaagggcgagaggctccaagttgtggagattcctcgcaaatgagagaaagactaagaaagganaaatcgtggtattcaagttgatcatcggatcacttgaaaggggttgagtgcaaccctcgtccattgggacgccacaacgtggaagtaggcaagtgttacttggccgaaccacgggataaaatcgtgtgtctcttgtgtgctttctctttgattgtctgtgtcacaagagctcgtttcaagcttacttagccgtctaactttcataac

SEQ ID NO: 14107 - DNA, 470 bp, Zea mays
  unsure (1)..(470): unsure at all n locations
agcttgnggcgccctcgggcgtgctgacgcagttctatttccttgtctnccacctggaagtatcgcggccgaacccctcaggcatggtagcgacgcagagactgttgataccgcgtcgagtgtagtaaggccatgtcctgagcctcttacagctggtccagtgagttttctcggctggtctggctactttggtcgtcgtacgccctcgtcctcagggaaccgtattctaagtctgtgggcaagatagcctcgtccccatagactagagagaacggcgagaaacccgtggcccggcttggcgtcgtcctcagactccagaccaccgagggtagttccttcatccatcgctttgcgaacttgatgaggacgatgtagatcctcggttgtagtccctgcagaggcataccgttggcacgctctacctgcgcattcatcatggngtgagctgcggcgtcccagtccacacggat

SEQ ID NO: 14108 - DNA, 342 bp, Zea mays
  unsure (1)..(342): unsure at all n locations
ctatttctagtgacagtgacaggggcgacgacaagaaggggagaagaaaggagaagaagaagtactacaagaagaagggcggcgatgcccatgtttgccgggagtgggactccgacgagagctccaccgactccttctccgacgagggacaccgcaacatcgccgtcaccaagggacttctcttccccaacaacagccacaagtgcctcatggcaaaggacgacaaaaggaagaaggtaaaatcaagatcctccaccanatatganacctctagcgatgaggataatgctagcaatgaggaggataacttacacattctttttgccaacctanacatgcaat

SEQ ID NO: 14109 - DNA, 445 bp, Zea mays
  unsure (1)..(445): unsure at all n locations
atccttaagtcacctgcngcatgcaagcttctntaagctctctctatgtgagacatccaccttttctgtcaggaccaccgaccttagcctcatatggaagatgtataaagagatgctgcataggattgaagaaacccggtggatatattttntccaatttgcacaaaagcactggtgcctctttctccagctggtccatcacatctcttctgatttctttagcacacaactgtctgtagaaatagctaacttcagctaacgttntccacacagcttctgatatgtatccacgaaacattacaggcatgagcctctccataattatgtggaagtcatggctcttcagtccattcatcttcattgtcttcaagttcacagatcttctanaaccagcggcataaccatcggngaatttaatatccttcatccacttcatcacttcttt

SEQ ID NO: 14110 - DNA, 399 bp, Zea mays
  unsure (1)..(399): unsure at all n locations
agcttgagttttcgccaccggaaccatttctttctttttctcaacaaacatgcccaatccactactttaggtccaaaacatatagctcgtggcggtttcacgcaatctcgatgccgcacgtcacccgttcagaaaacgggtgacggngtgcatacaaagcacgagttttttttccaccgcaaccatttcttcgtttttcgcaacgaacatgcccattccactactttaggtgcaaaacatatggttggggtggattcacacaatttcgttgccgcacgtcacccattccgaaaacgtgtgtcggggtgcatacaaagcatgagtttttgtcaccggaaccatttcttcagttttcacaacgaacatgcccaatccactactctaggtccaaaactcatg

SEQ ID NO: 14111 - DNA, 303 bp, Zea mays
ggagttcaccggagtggcgccatgtggaacttgtttcaatgtatgaataaaacaagcacacaaatgttaatgtactgccttcgtcttcaagcattatttctaaggatataagattcggacaagttataagactaccttatcactaaatatatatgaaaaaaatcttgaacatataatacataacggtatgatactgataatattcatgtatatgagaaaacagaatgattaaatacaagtccttcgtcggaaagtaaattaatggaccaaaccatgcaatacggaacagcggatcgtacatta

SEQ ID NO: 14112 - DNA, 198 bp, Zea mays
ctgatccataattcatatttaagtactatatgtgattgacatgtttattgccctctatactttatttatgtatctataattccctgaatttatacgaggttaagcttgactatgcttgcaccttcgtcaaacatatctcaaaaaaatgttatgacaagagtacattacattatgtgctgtttatcaatattagacagc

SEQ ID NO: 14113 - DNA, 381 bp, Zea mays
  unsure (1)..(381): unsure at all n locations
atcatccacacaagaacatcatgacgaccgacatgccgcttgagctactccacatggatctgttcggcccaattgcttacataagcatcggcgggagtaagtattgctttgaatagtggatgattattctcgcttcacttgggtattctntttgcaggaaaaatctcaaacccaagagaccttaaagggattcttgagacgggctcaaaatgagttcggtttaaggatcaagaaaataagaagtgacaatgggacggagttcaagaactctcaaattgaaggctccttgaggaggagggcatcaagcatgagttctcctctccctacacgccacaacanaatggtgtagtggagaggaagaatagaactctattggacatg

SEQ ID NO: 14114 - DNA, 387 bp, Zea mays
  unsure (1)..(387): unsure at all n locations
atcctgttgttgaagtcggaatctatcatgttgttntaactcttcttcgtgataaaatcttgaacttggaaccgtgtgttaagtatgtatgttggttttcagatggccgggaggcagcgtcttggccagaacgagcgtcgttctccaccgncggcaccaccttccactcttgaggagctcagcagaatgagatcctgaggcagctggctcaacgtcagccaccacctcagcattatggtggtggagaccatcagcgtcacccagcggcggctacataccanngaatccttagcacctagcctccattgttcacaagggcggaggacccgcttgatgcatatgtatggttgcgagtggtggaatccaaattcccactgctccatggag

SEQ ID NO: 14115 - DNA, 403 bp, Zea mays
tgaagtctgctaacgcctatgactgaatcgaagatctatgcacataatctatgcaaaactcattgagttccgcagcccattttccaaccctttcagcagcttctctatatctcataatattcttcaaagggtgtgaagaagggaacaatatattgtatgcttgataatagtgccgaagcttcctggaggccattaaaatagcatatagcaccttctccaattctgtataatttttctttgataaactaaagacttcggagacgaagtatattgtggcttgctttttgactcgcccctcaagcttctctggacaagtgccgcacttaccgctgagtgcgaagctgccacatataacaacagaggagcccctggcgttggtggagttaatgtcgttaagtctatc

SEQ ID NO: 14116 - DNA, 398 bp, Zea mays
  unsure (1)..(398): unsure at all n locations
atctcttgacacaagagtgtgtcagaggtcttcaccataagacagtggcaggaagccttactgctcagtgcatctgccaccacattggcttgcctgggtgataatggatctccagttcatagtccttaataagctcaagccatcgcctttgcctcatatttaattctgactaggtgaagatgtacttcaaacttttatgatctatatatatgtgacagatatttcccagcagatagtgacgccaaattttcanggcatgaaccacaacagctagcttcagatcatgagttgggtaatgctcctcatgtcggcgcaactgccttgaagcatatgcaattacttggccctcttgcattaatacacagccgagtccactgccagatgcatcacaatataca

SEQ ID NO: 14117 - DNA, 497 bp, Zea mays
  unsure (1)..(497): unsure at all n locations
agcttaacagatgctccgaaagactnttctgcttaagattttctagaganatntnngnaatataagtggtaagaaacttatgtaacattgtgcataccttgtaatatatcttttcccctctatccgngtacgatctggcttgctatggaccgaaatttatttttgagccgaaggcgaaaaacaccttcccttctttttgtacacaacgaagcatgaaaatttcctctttctccaaagttttttcctcatagccgaagcatctgcctcttctgtatgatatgatgataatgatcctatatatgtctaaatgaatgtttatgaatgcaaatgtcatgatgtaatgtatcgtgcacatgaatatccgaatgtatattcgaaaccataatcatagccttcattctcttgngaatgactcanatcttnttgtcgtttattttttggcttcaccgtttacttttcggtgtatcaacgctgacttttcgctgtaaagcctcctt

SEQ ID NO: 14118 - DNA, 417 bp, Zea mays
  unsure (1)..(417): unsure at all n locations
agcttgtgaaggttcttcatcctcacatgtgctaaactgttatgccacagacagcccatgctagtcttagcaattaagcatgcatctagaccggactcctctnttgcaaaatcaactaaataaagtttgtcgtctagtatacccttaaaagctaatgaatcatcacttcttctaaagacagacacatctacatttgtgaataaacagttatatcccatattacacagttggcttacagacaacaagttatatccaagcgactcaactaagaacacattagaaatagagtgctcggacgaaatagcaattnttcctaacccttttaccttgccttggttcccatcaccgaatatgattgaatcttggggatccttgttcttgacgtaggaagagaacatcctctnttcccccgtcatg

SEQ ID NO: 14119 - DNA, 440 bp, Zea mays
  unsure (1)..(440): unsure at all n locations
agcaccgccgccgcagctttatgaacttgaactgtgacggatgctgtaattatcctctgaancgaagcaattacatcgtgagctactacattcaggatatgtgcatagcaccctcacaacanatgagctgtcccttatgcatgacgttgttcttattggagaggtgatccctaagatatgcactgtaaatatcatgggaagagcaatcattatccaatgtgatagtgaacagcttgttcttcatattccactcagaaaggcttgagctaatagcttcactaagtgcattctctgaatggngagaagacaccatcatgaagttgagcattcttcggtgcactgtccaatcggagtcaatatactgcccagcaagagaaacatagccaagagtctgactgggtgtccagagtcctatagtgaggctgatccttcctggcata

SEQ ID NO: 14120 - DNA, 510 bp, Zea mays
  unsure (1)..(510): unsure at all n locations
agctttgtagctacatcaccatcaactggtgtggaaatttcttatatactcatgatcgaagaagtagataagcatggtgacatactcatgatcgacgtagctgcatcaccattaccttgtgtcatgtccatgctctggccttttatcttaacgaaccatanaagatggttcgttacacttgttatcatcctctagatgttcgacttcaacatatntatcanacgatgaataaatgtcatgacaacctttgacgtgaaatgaaactaanaccaaaccgattttgaggcggcgaggaagcactgtggctctggcatcggtgagcgctctgccacagtatttgaaaaggctctgaagccgtcgcgccgatggaaaaaggtgtgggtgtgtgaggcggcgaggaacccctgcagctctggtgttggcgagcgctcggccacaaattntggagatggtgagaggcaatggagtcgatctgggcgacgtcgataactggcacatgtcactatttat

SEQ ID NO: 14121 - DNA, 519 bp, Zea mays
  unsure (1)..(519): unsure at all n locations
ctgccgcatgcaagcttctaaagggagaacacatgttgtgactatcttattttcattntgagaaaaacaggggttgtagcgcatgtcaagcaggaaagcaagttggcgctcaccatccacacaaaaacataatgacaacgaacaggccactcgaactactccacatggatctatntggcccaatcgcttacataagcatcggcgagagtaagtactgtctagtaattgtggatgattattctcgcttcacttgggtattctttttgtaggaaaaatctcatacccaagagactntaaagggattcttgagacgggctcaaaatgagttcggattaaggatcaagaaaataagaagtgacaacaggaaggagttcaagaactctcaaatagaaggctntcttgaggatgagggaatcaagcatgagttctcttctccctacagaccacaatanaatggtgtagtggagaggaagaatagaactctactagacatggcanggaccatgcttaatgagtaca

SEQ ID NO: 14122 - DNA, 386 bp, Zea mays
  unsure (1)..(386): unsure at all n locations
atggaagtgagttcaccggatgtgggcaccaatgttggttacttgttcttgattgatgtgaatataaaacaagacaacacatatattaaatattatggaccttcgttcttcaaagcattatcttctcttagagataatatttcttggacgaangtgatgaagatcgggtcttcatctttcataaagagtatattacattgaatatcatatcaagtcttcattatatatgacatgtaagagtaatgttgtaatactgattacatgctaataaaacatatcaagcgttacattacattggtaccttctgcttgcacacaagaaggagaatgtgagaatgactctcaatgaaagcgtgaacaatatggnggtattgttcatctatttat

SEQ ID NO: 14123 - DNA, 261 bp, Zea mays
tacatgatgtcgtgtgtggcgcgcgttatcgtgatgaacacatcttggcgtactctctggagcagtatacagaatctattacacttgccaactattaaaacaatgctcaccttaccctatttgtgatagcctaccttacatgagctcaccttcgtgagttatgccatattctcacacttgtgagtatgactttgagactacctgtggggccttgttcgaagtctaaaacagatacaatgttcgaggaaactgacggacttc

SEQ ID NO: 14124 - DNA, 421 bp, Zea mays
  unsure (1)..(421): unsure at all n locations
cttctttcttgattcttcattgcgatcaaactcacttgtaattgaggcaagagacaccaatcttgtggtggtccttgtgggaactctgtgttccaagcatttgagaatagatagctcactcggtccgagggaccgtttgagagagggaaagggttgaaagagacccggtctttgtgaccacctcaacggngagtaggtttgcgagaaccgaacctcggtaaaacaaatacgcgtgtcacactctttattcgcttgcgatttgttttgcaccctctctcgcggactcgattatatttctaacgctaacccggcttgagttgtgattattttgagaattcagtttcgcctattacccctctggcgactttaattggatcagagcccgggcttcatagacctaaccgtcgaatgatgtcgagac

SEQ ID NO: 14125 - DNA, 213 bp, Zea mays
tttttttcagacccgcagagctgaactatcagccacatcactatacctcattgtttgggaccgcggaccttgggtttatactcacttgctgagatatatccgagtttgtcgtcatctatctctatttcggctgaatgtcgcttcatttggcgggttctttaaatcgggcttagctaagcaaccagatgggcgtatataaggctcgggaacctc

SEQ ID NO: 14126 - DNA, 397 bp, Zea mays
  unsure (1)..(397): unsure at all n locations
taaaccttcacttgaatggcttgcttggtgntgttaacaaactatattggccaaacctttataaatttattggacttaataggatttaatcttataatggctagccatgattcatgttttaatggtctttatcccttttcttcctttctacttacgtggcttaattagggttggtctaacgtttcatcatctcnnttttttgaaaacctcattaaatttaggcatgattctttagatgcaaacttagtggatcttttattcttaagtggattggtgcttcttgcccaatgtggttacatgaaatgatggcacttgagttagtactgagaagaaaccctaggtgacactgnngtgtcgcaattntagctcgtatgtatacttacattggagatatctg

SEQ ID NO: 14127 - DNA, 501 bp, Zea mays
  unsure (1)..(501): unsure at all n locations
gatccttgagtcacctgccgcatgcaagcttgggaagattcttcatcccaacatgagctagtcggttataccagagccaacccatattagtcttagcaattaaggaagtatcgagttcagctctattaaaatcaactaagtatagctgaccctctaatacccccttaaatgctactgaatcatcacttcttctaaagacagtaacacctatatccgtaaaaagacnagtgtaacccattctgcataattgagaaactgaaagcgagttataatctaaagaatctacaagaaaatattgaaaatggaatggtcatgtgatatnagcaatttaccaagtcctttgaccaaaccttgatttccatccccgaatgtgatagctctttggggatctgtgtttttctcataggaggagaacattcttttctcccctatcatgtggtttgtgcatccactatcaataatccaacttgagcccncggatgcataaacctgcaaaacaat

SEQ ID NO: 14128 - DNA, 465 bp, Zea mays
  unsure (1)..(465): unsure at all n locations
agtcacctgccgcatgcaagctcgtaaggttcttcatcctcacatgtgctaagcgtctatgccacagccagcccatgctagtcttagcaatcaagcatgcatctagatcggccctctctttggcanaatcaactaaatacagtttgccgtctaatacacccttaagagctaatgaaccatcacttcttctaaagacagacacatctacatttgtgaataaacagttatatcccattttgcataattgactaacggatagcagattatatccaagagactcaactaanaacacattagacatagagtgctcatttgatattgcaatcttgcctaagcctttcaccttgccttggttcccatcaccgaatatgattgagtcttgggaatccttgttcttgacgtaggaggtgaacatcttcttctcccccgtcatgtggtttgtgcatccgctgtcgataatccagc

SEQ ID NO: 14129 - DNA, 430 bp, Zea mays
  unsure (1)..(430): unsure at all n locations
gctngactntcggactcagacgaagctccagcttgattttctgcttcgcagaagaaaaaacttcggaagagaaaaagtatttaatttccacacattcagaattaaatggccagaatgcagtctaccgctagggntgagcgtgaggggggcgaaactgaaagttcggagactgttcccatcttcgaagcgatgcanagatccggactggtaacttcggaaaagatccccagtgatgatgcggaacaagcagaacaagcaattgccgaagcagaagaagaagatattgaggaaactgatcccgaagatgattatcgcattgccatgccaagcaagcccagccacttggacttcggaaagtctactgtttcgaaggctgatctctccaagatggtaaagtcgggctttttaatgaaaatcagaagaagctatt

SEQ ID NO: 14130 - DNA, 448 bp, Zea mays
agcttgcaatagctacagtcgagctacggtacttggagttgtcgaacaacttcttagatagctatatggaggtgaatagcctataaaaaattatgtaacaaaatcttattaattcttagatagtactctgtgtaatatgtaaatatatagtaagtgtaacttagaatttaaaccacatgaggcaagaggtagacacaatatgaggttcaattgcttgctgacaacgtacatgatcattacggtgagtctaagcctagatgaattatgttcttattggtgtaatacggcaatcccacatagggcaccataagaatcattgtaagggaaaactccaacaagcaactattctactagagttggtatttgcgactctcctataggaatgaccacaaaagccccatacaatatgatgatgggagctagcaatagtcaccaaagcacctcaacg

SEQ ID NO: 14131 - DNA, 253 bp, Zea mays
aacttaagccacgccgctgcagctatagcatctagacgtggagccctttcttttgaagagagcgacaatgcacggaggtacagccacccatcattaatcgtcccagaccgcactagccataagaagaagagaatcaaactgtgtatcttgacgaccaccgctattgccgttgaccaataggacacagcggttctccgctttcgatgtctagaaaggaacggagctgagctatatcacagcaaaatacagcaga

SEQ ID NO: 14132 - DNA, 460 bp, Zea mays
  unsure (1)..(460): unsure at all n locations
agcttcgtcatccgaaagacaagtaccttggatgaaagatacaatttcagtactccaatcttcactatgtactggggaaattgcaagcactgctctcttcataagttcaaccgaatgtgcttntattggttcanaaaatacttncgaagctagagggagccnctgtgccactaatntggctaacagatctgcattgctcgtttctcctcttgggatattcttgacagaaaaaccttcgaaagaagcctncaaccttcggactgtatccaaatatttttcaagcttcgattcccttgccttgtactttatctacatgaccagaaatgacttgagaatcagttttcaggatggcccttcttattcccattgcctttaacttccanagccccaacagaagtgcttcgtattcagcaatattatntgtacaactaaagtcaagctntgctgcataacatgttct

SEQ ID NO: 14133 - DNA, 165 bp, Zea mays
  unsure (1)..(165): unsure at all n locations
ccacattatcttcattccatactgagtccacagcccagtgctntctattatagcggctatccaccggagaatactcgcatcttgttgataggaagacctctcggcatgaattgcacgatcgaggacttacctctttcgctatgcttcaacatctctattgtatat

SEQ ID NO: 14134 - DNA, 208 bp, Zea mays
ttctgattaccattgcctttaacttccgaagacccaagagcagagcttcgtactcagcgatattatttgtgcaactataatcacgtcttgccgcataacacgttttaactttggaaggtgaaatcaacacaacagccgctccttgcccgaaggttcccccagacaccatcgcaaatactgtccatgcttcggcatctttattgggttc

SEQ ID NO: 14135 - DNA, 227 bp, Zea mays
gctatagacaatatctttctctctggaccgatcttgatgatgatgcccgacgtcgtggtgcctgacgaatatttcgtctatgtcaaagctgctcccgatgcttcaagacgtacttactcttccctcgctcctgtgaaagacattgctaacaaaggtgtttatatgcactgatgtcctgcataacattcgatgtaatatgaattctatgtgtatgtgattgttatgtt

SEQ ID NO: 14136 - DNA, 209 bp, Zea mays
acagacctcacaatggcgagacaactccgccttcttctgcaacaaggccagcgcacgggcagtatccaaagtactaggacgttggactcaaattatagatttaatgtcggcgcgtaagccatcgataaatagcatggtatatgaaaggggatctgtggtatgttcataggtcactaacagaacaaccaattcactaaaacgatcaacat

SEQ ID NO: 14137 - DNA, 282 bp, Zea mays
  unsure (1)..(282): unsure at all n locations
gcaagttggtgttcaacatccacacaanaacatcatgacgaccgataggccacttgagctactccatatnggattaatttgctcgatagcttacataagcatcggtgggagtaagtactggctagttattgtggatgactattctcgcttcacttgggtggtctttttgcaggaaaaatcacaaacccaagaaactttataaggattcttgaacgggctcanaatgagtcggatcaagatcaagatatagaagcgctacggacagagtcaagaactacaata

SEQ ID NO: 14138 - DNA, 391 bp, Zea mays
atctgaactcaccaaattattgcagcttccacatcaataataacacgtgcacgccgattctcgatggcgaagaatgtctataacaaattatggcgttgctgcttctctgttgattcaggctgagaactaagaacacgctgcaccatgatgcttcgaaggttcaccgtagcatcagcaccaagcataacatcatcattagcagcaacatcactggagtcatcatcgtcatcctcaccgtcggaagcactaatgtagccatcatccgtagcaatgtatgttcgctaactcgggcaatccttcttcatgtgaccaatcccatgacagcggtggcaaacaatacccgaagaacgaccactggaatgtgctacaggtgctggtcaatttctgttct

SEQ ID NO: 14139 - DNA, 340 bp, Zea mays
  unsure (1)..(340): unsure at all n locations
catgcatcaagaccggcttcttcttttgcaaaatcaactaaataaaagttgcccgctaatacacccttaaaagctagtgaaccatcacttcttctatagacagacacatctacatttgtaaaaagacagttataccccatgttgcataattgactaacagatnagcaaatataaccaagagactctactaaaaacacattagagatagagtgctcattagataattgcaatntacctaacccttntaccttgccttgattcccatcaccgaatacaatcgaatcttgggaattcttattcttgacgtaggaggtgaacatcttcttctcccccgtcatat

SEQ ID NO: 14140 - DNA, 308 bp, Zea mays
  unsure (1)..(308): unsure at all n locations
agcttcgaacgctggttagtgagtngataggtttcttcgctgctcgttgcttccctcattntaccctctgtgctctgnttctttttgcctttccagctntgacttggcagttctccgatgctgaagagaggtatgctcagagtcaagctaacttgaaccaggtttctgcattcttggatggtgcccgaaccctgaactcttccttgaatgctcagcttgattcgaagaagagagcccatganggtagattttctaactgttcctgatgcctttgtttcgcgcctttgtttcgatgttcagtacccctc

SEQ ID NO: 14141 - DNA, 345 bp, Zea mays
gcgctctacttggaaccatcgtttctggtggagtatcttcttgagtatagtcacccttgctcaatctattggtgtcgcgtgagaattcttattggttacgtctggtactggtgttatgtctaaaattgatgatggcgcgccaaaactgagggcctccttgtggtatacacacaaaggtgtgctgttcggacacgctaatatcacagtagtagcataatccttataaactaattgaatgtatctctaccaattatctacacgtagatcagattgtctagtctgaatgggcatggtaaaacttggactgacgaactatagctctgtaatggacactgatttctgttg

SEQ ID NO: 14142 - DNA, 399 bp, Zea mays
  unsure (1)..(399): unsure at all n locations
gcttctcctgtagaacatataatctagagcanactagntagtccaattatttgtgtngggcaatccaaccacataatcatttatgataaggtttgaccctatttccctttcagctntcaatcaccagactgtccggtgtgcacaaaactatcaggtgtgcaccgaactgtccggtgtgcacaaaactatccggtgtgcaccgaactgtccggtgtgccttgaactgctatgaaccaaattcgcatatgcagcaactagcaacggtgagtgagatggggagggtttatgcggattgaaggagagaatgaaaatgaaacaaactntcgatcagcatagcatagcacattgacacacctttactgataacggtgatgaatgtgttagaggcaacacctctcg

SEQ ID NO: 14143 - DNA, 334 bp, Zea mays
tagactacttaaccaagtatgatgtgtgtatatctttgggatagtggatgggtacattaaccacaccgcaaggagaaagaaatgaagtcaatgtcagtatgccagcaacagcagaagcaatgtgttaatcaaattgtaagataaatctttggaaaacatcagaatagtgtgtgaatacccagaacgtatttcatataaattaccaagtatgccagctgatcgtgatatatttttctattgattatacccggaactacaccaatttcaaaaagagcttaccgagtggatgtcataaatttaattgaactgaagaagcagatagaattattactat

SEQ ID NO: 14144 - DNA, 462 bp, Zea mays
  unsure (1)..(462): unsure at all n locations
ttaagtcacctgatgctgcagcttgtaagggagaacacgtgatanggttgactaacgtgcatttcgaataagatagaccttgtgcaacttgtcaagcaggtaaacaagtgggatgagcacatcacagcaagaacgtgatgaccacttcaagacccctggagctgctgcatatggacctcttcggacctgtcgcctatctgagcataggaggaaagaagtatgggttagttattggtgatgacttttcccgcttcacttgggtgttctttttgcaagataagtctgatacccaagggaccctcaaacgcttcctcaggagagctcataatgagtctgagctcanagtgaanaagataatgagcgactacgggtccgagttcaagaaccttcaagtggatgatgtccttgaagatgaagggatcaagcacgagttctcttgctcctacacaccacatgcaaacg

SEQ ID NO: 14145 - DNA, 254 bp, Zea mays
cagtgattgtagcgcatgccaatcatggaagcatggtggtactcattattcacacaagaacatcatgacaactgacaggccactggagctactacacatggacctattctgcccgatgcttacataagcatcggccggagtaaagactgtctagatatatgggatgattattctcgcttaacttgagtattcgtttcgcatgataaatctcatacccaagagaccttaaagggattcttgagacgggctcaaaa

SEQ ID NO: 14146 - DNA, 188 bp, Zea mays
accaacaccagtcaggttaaaacctttaacccatgttttttaaaaggtgaactgcggcggacaaaagtatatcccaaacactacatacagcgtgactctccatgacatcgccaaactacatacaaccggataaatgcaattgaatatatccatcctggggtttgtgaaacctaaccaaacctaaagtt

SEQ ID NO: 14147 - DNA, 151 bp, Zea mays
  unsure (1)..(151): unsure at all n locations
cttggtgagccttctgtgcatgagcagntgcagtcctagtgggggtgtgattagtaaaacatattatgcanctcaactggattntacttgcaccaataatattgctgagtatgaaacacttctattggggctctcgaaactaagggcaatg

SEQ ID NO: 14148 - DNA, 293 bp, Zea mays
  unsure (1)..(293): unsure at all n locations
acaattgataacctaacanaatatctatatttctctctctacataaatacacaagaacacaccatggaaacaactaagtatatcatggatgaactaaattgagaagtaaacatgaaaatgaagtgaggagggacattatctatccatcttaagcaacctcaattgatgaaatggagacaataagctagctactcttctctctaacacatggtgaaaccctagatccaaaaaatgactacaattgagcaagaatgaacaatatgaggcaagagagacatanactaacctgtcat

SEQ ID NO: 14149 - DNA, 142 bp, Zea mays
  unsure (1)..(142): unsure at all n locations
atctttaatattaatgtaagaaatctcgatatcccccttttggtggtgatccctaagaaaatgataccgaatggctatgtgcttaatgcggctattctcgacgggattgtcggncattttgattgcactctcattatcacat

SEQ ID NO: 14150 - DNA, 221 bp, Zea mays
  unsure (1)..(221): unsure at all n locations
accccttcacttttcttatcccttcattgtctcatggcnaagggaggtgcttgatggaatatcatcagcgacggagatgatatatatgttgatgatagtgatgatgatggctattcatatgatgatctctgtagaatgttaggtgaagccgatgacttcattctcaaagaatatgaaaagtcaagaccttgaagaattgttataaaccttcagtgtctttg

SEQ ID NO: 14151 - DNA, 378 bp, Zea mays
  unsure (1)..(378): unsure at all n locations
cgacgactattctttttctttctcggaagagaatatgtggacgttgaagtttcaccaatgaagggtgtatcgctgttcgggattaaagggaagctagcacccaggtacattggtccattccctatactngagcaatgtggaccagtggcatatcgactccaactacccgagacattgtctgctatgcattatgtgttccacgtgtcaaaattgatataatgtcttcggattcccgaacgaaccgttgatgaacagatgttgtccttgaaccatacttgacatattccgaacatcccattcgatgcttggaccataaggacagggttacccgaagaattactatcaagttctataagatacagtggaaccaacattccg

SEQ ID NO: 14152 - DNA, 342 bp, Zea mays
  unsure (1)..(342): unsure at all n locations
tgacgcgtgcaagcttanaggcgtcnattgagagtctatttggggtatactcttccttcttctcnttttgtgctttgaatgcgacatgttgcaactcgggtgtggaggtggcgccttccttcaagttaacaatgtgtntggagtctttgatcattatttcatagctcacaaacttgccaattacttcctcgggagatatctgtttatatctatgatctccacggattagttgcacttgagtgggattacgaanaacaagagatctaagaataaccttgatcattgcatggtcatcaccctaggtgctcccgaggttgcgcacttggttgaccaattatttga

SEQ ID NO: 14153 - DNA, 530 bp, Zea mays
  unsure (1)..(530): unsure at all n locations
gcttgtggagtaccanatcatcgaagcatataagtttctggatgataagtagtcacccaagttccgttgatgaagcaccagaagaccaatcaaggaatgaatccatgtgggagttcgcaagagaaaggtttgncgtgtggcatcgatgcttcttcaataagctagttgccaagcgaaagctagaagcctgaagatgatcttgagtagccagaatcagcgtttgcaatcagcagccggatgctccgcaagggccagattntgttgaagttccatctcctcgaagagttgcaagtgaaatatgtagctgaagaaagctatacccataacccttctaagccgaatctcgaggatgagattccttttaagtggggtagaattgtagcatcccanatattcanatcctgatattntctcanactcgctctaaattcaaaatgaatntcanatntcatttcacaattgttggttgtgaagtgtatagcaaataaatatatggtctttatctctccaaatcctctcnatatctacaa

SEQ ID NO: 14154 - DNA, 442 bp, Zea mays
  unsure (1)..(442): unsure at all n locations
taaataccaatcaaattcttctgaaatccagagtcgcgtaggatgcataagcagagcaagttcttaaaggaacagagctcaccaacttgcttgctaaattctaacaggtacttgttgtacctaaactgtatgcactggcaattgaaaaacgcagcaaccatatcacatgacaagacaagaccacacgttacagctgagaaacggttccattatacctaccattgaaaattgctgcangtattatgtgtattgtacctgtactgctgacaccagtataatctcgtatcttctctttgtggtgagtggccattgggggctatatatctggggaaatggcttgtccaataaaaaagttccatacagcacaccatgcactgtgatcaaaacatngataaagtcctaccctcttgtcctgcatgatcttcctctttgaattaatcat

SEQ ID NO: 14155 - DNA, 244 bp, Zea mays
gtttaccctacaccttacaaacaaatgagctatcgggttactcttgctatgttatacctaagttgtaggattaataatatatttgaattatgatcatgctctattattattgctggatttttattgctcttgataagattattttgatgattggaatatggagaaccacccgagaaaacattgctaccataagggtggtatgggacgcccttgtgccaatatttaagatagttggggatagatt

SEQ ID NO: 14156 - DNA, 183 bp, Zea mays
  unsure (1)..(183): unsure at all n locations
ttgcgcgtgcggatgccantctcgctcgccatgcgccttgttgttgaacgagctatagcaacctgtgcgaccgcctggacaaagcggaggcctctacttgcgcagaggtcgaccggacgcatgcacagctcgtggacgcgtaccgggagcttggtgcgtggaccgctccctttgatgcgttcg

SEQ ID NO: 14157 - DNA, 444 bp, Zea mays
  unsure (1)..(444): unsure at all n locations
tctcttcttatgttccttatagcaacctgcataanaacacttactgatatcatattcattatagtccggacaggataagataacaaagtggaacttatgtgtaaaaaacagaaatgcttagttaaaaaatctccaagtaagaagataaaaaggtaatgttggaaatggaagcaaaaacatagtgagaaaggtggaaagataaaatttgggataataccttgccatcttcagctaatttagctactgtctntgataattcctgcagaaacatcaataatntcagaacgcaccaaattgctaaaaatttataaatcagcgaggacataagatgttatatgtgagtgcatgtgcgttgcattagatgtccnctgtgcagttggattcctgacatgcanatggtaggctagtagttggttactttggtcttatttcaggctaccccac

SEQ ID NO: 14158 - DNA, 307 bp, Zea mays
  unsure (1)..(307): unsure at all n locations
gatggcgagagtagcgtgttccctccgtggcaagatgctggaccgtggtgtatctgtgctctcggatgatgtgaacctgatctggtcttaagaaccccggtggcgggttgacatantgcagggttaagtactacatatgtcgngtgattggagatcctctgctgagtataatcgattcggatcgccgtacctccgtggttatgaagacttggtcactggcctatacgtagaactccagtaaagattaagggttggtaagaaattggctcgtgtaggtcaagtgtttgaactactgtagaaagaactc

SEQ ID NO: 14159 - DNA, 336 bp, Zea mays
  unsure (1)..(336): unsure at all n locations
ctccgaagctataaaaaagttttgtgttgtctctctaatgaagctacacttcgtctcgatgtatcttgtgccttatcacgattttctctctttcaaaatattctccgaagatcaacactgtatccccttcttgttccacatgcaatatgctgtatgatngcttatgtatgcaaaatgatgtgatgatgttatgttatgcgaaatgatatttgtgccgcagatacatgtccctgtaatagagcacacacactnnttatatcagcgctgactttttcgtgaagccttccttatgagcttcttcgccttttactctcagcaggaatcagcgttattttt

SEQ ID NO: 14160 - DNA, 252 bp, Zea mays
  unsure (1)..(252): unsure at all n locations
ctctaaaatatccctgacgttgctgggatcaaccgcaatcccatttgcagatagtacatgtcccagaaattggatttcctccagccaaaacgcgcactngctaaattgagcatatagttgatgttcccttaagcgtgtaatacgatccgtagatgctgagcatgctcctcttcattcgtggaatatatcaacatgtcatcaatgaagaccaccacaaattttgccaactcggacataaataccgatttcatc

SEQ ID NO: 14161 - DNA, 256 bp, Zea mays
accttcgacttgtgagtatcccttgggcacaagtcgggcttagttccttgtcaccacaccatgctcatcttgcttgttgcggaacacccacttggttcctacaacattttgattagaacgtggaaccaaatgccatacctcgttccttgtaaaattgtagagctcctcttgcattgccaccacccaatccgaatcttgtagtgcttcctctactctgcgtggctcaatagaggaaacataagagtaatgctcacaa

SEQ ID NO: 14162 - DNA, 313 bp, Zea mays
  unsure (1)..(313): unsure at all n locations
agctntaattgatctgtgctcgtatgatacacacctcccttttattgtcacaagctttaattgatctgtgcttgtctgagacacacctccgcggatagctataatgatgctattgccattaatataactacatgtttaagattttgtcataggtgttatcatattgatactgcacacaactaactatggaacctatgagtatgtcaataaaaaatggatactttatctcttgttgatcttgaattctgcatctgaccaatgtgtaccattctattattgcgtgaactgaatctagcaataaccgataactatc

SEQ ID NO: 14163 - DNA, 335 bp, Zea mays
  unsure (1)..(335): unsure at all n locations
gcttctanagggagaacacattttgggactaacatatgttcattttgagaaagacangatntgtancgcgtgtcantgaatggaagcaagttggtgttcatcatccacacaagaacatcatgacgactgacaggccactcgagctcctacacatggacctattctgcccgatagcttacataagcatcggcgggagtaagtactgtctagttattggggatgactattctcgcttcacttgggtgttctttttgcaggaaaaatctcatacccaagaaaccttaaagggattcttgagacgggcttcaaatgaggagttcaagaactcacaaatc

SEQ ID NO: 14164 - DNA, 372 bp, Zea mays
cctgtcatcacttgagccgggattgtggattgttctgacatgcctatggtggagcctctcttcgaagcccctattcatctcagagtatctgtaggtctcttcccttctctgtcaagagtcattattagccctgatgtattcatccatcttctagaggagctcttccagagtttacagtggctgtctatgcaaatactgcattgtcgagtctggctgaaccccttgatatacttcgaaacaatctatttggaccgtggtgcctggcttgagcgaaaatcttgaaattgcctgcagtactttattgctgcgacctgaacaagctgacggtactgctcgtctgaaactgaaactatgatagcatatcttactttg

SEQ ID NO: 14165 - DNA, 416 bp, Zea mays
  unsure (1)..(416): unsure at all n locations
tggtgcactctgaaggcaagtgggactccttgaagcaccagctcctcttcgtcagggccgacctgtatggcctgaatctctgaggaaaccctnctcaggtacttcattgccagcttcactgattgcaggttgatctgcacgtaagacccggcttgtcatcaaaatgccgtgtatgtttgaggaagtaaactcaagtgcagatctggtgttgagtttaaagggttaagcttatcctagtaacagaatggaacaaaaacgatagagaactgatatctgtgcaactatgagacagcatcagtggttgacactagtgaagtgggaattcccttcctgaacctcataaatanatgtttcttattngacattagatgtaaatttggtccctatataacactgacgtttgttctgaaatttat

SEQ ID NO: 14166 - DNA, 510 bp, Zea mays
  unsure (1)..(510): unsure at all n locations
agcacaatctctacttatgtatttccacgaaatatcttaaaagaggttgtgttagtaacacaagcaatatgttcctatttagcaacctcctatatatgaatgacaagaaggttactaaaacaaggaaacctcatgatatgaactataattgccctacaagcatcatgcataacatcaattgtaaaaaagatgaaagtagtatgattatttaattaaagtttacatggcaagtttaattcatagcatggtgagtgattaatgtagaagactcaaaaccaatttaaacaagaatgaatacatcacatagtattggttcgatcctttttgaatgttgaatggcacactccatttgngaaacacattctcattgtgtgagaactacataacannctagatagaacattagtctacaactctagcatatagagaatccncatatggtaagtctataagaatatgaattcttactagcactctattattaagaacatggatattctattatgctag

SEQ ID NO: 14167 - DNA, 413 bp, Zea mays
  unsure (1)..(413): unsure at all n locations
tcctgaattctcgagcaattgctataccttctcagataagatacgaaagaattctggagggctatttgagatcagatgatagccatagttatgatgtggaaagtggtggcgaatactctgaatatcagtcgtggcgactaagtcacacagtcttcggaaaatcgaccatcatgcaaagtcatcttgataacatgagaggaaggtatgttcgagacatatccatcgngagggctgacaacggagacaggactgctcctgctcctgaagagattgaagtccgtatctatcgaagcttcttcatggctggcttcgattcccctaacagattgttgtgaagtttaagattacanattttcttaccgattactccgatccatatagaatggaactttgatggctggaagagcatgttg

SEQ ID NO: 14168 - DNA, 216 bp, Zea mays
ctgaacttgcttgcttgtccaatttgtgagcagtggcggtgtactcatctgagctgaaacctttgttataagttcctacaatggactacatttgggtgaaaacgggcggaaaaagtcccgtctcgacccttacctttttccacatttgacccgcccatttttgtatttgcggaataatctagaaacgggacgaaaacgagagagagtctattatgt

SEQ ID NO: 14169 - DNA, 420 bp, Zea mays
  unsure (1)..(420): unsure at all n locations
gcaagcttcgcatccgatgtgtgcagcggctgaaggacttgttttattctgtcgtagctagctcttcgtaattacaccttcagctgaaaacctgcccanacattagaacatattgaagacgaagttgttgcccttgacgaatatatttggtgggcacgctgacttctgcgccctgtgcttctcggggcacaactgctgcttttttgaaggctggctgcacacatgtgaacattgtgaacagaccaaacttcagcttgtcagcttcagatgtgttatatatcccatagctagccagaagcatcggatatagattcatgacccagatctgggtaagtggcgtgcggaaaatggcatgcgactaagctcgataccatcttaagccggtgaaaaacttatgtttggtactcttaccttctgctt

SEQ ID NO: 14170 - DNA, 412 bp, Zea mays
  unsure (1)..(412): unsure at all n locations
agtcaattcaattcttattaactcaagctatcaatcttcaatgatctatatatccaagactgacccaaagttgttttgaattattatgtctaaaactcatatcatctcggggaagatattgatgttgtaggaaataaagaattatcctgtgcggaaaaatcaaggcctacgagatggatgaaagccaaaggatggttactnttatgctnttaagtgcaagtatcttaaaattatcatttcttatgtgtcttgtgtagncacatagaaaaaggaagcacctcatatgtttaaattggttcaccatgctttgaagaaattcctctcatatggtagatggcatattcatcatctctatactatggcaatctgcatactntaaattatcgnaagcacctcatgtcatgccttacac

SEQ ID NO: 14171 - DNA, 119 bp, Zea mays
tctcatgtgttctgaccttgatatatattgaattaaacctgtgatatttataaattaagttgataaattccattaactttctaaaaagtctaggaacacctgatttggatacccgaaac

SEQ ID NO: 14172 - DNA, 312 bp, Zea mays
  unsure (1)..(312): unsure at all n locations
gagctgtggccaaagacagnggattgtgtctntcttggatatgcttcgtgtagcatagcatatagaattttagtagggaaatctgatgttcctgatgtgtatgttgatactattatggaatcacgtgatgctactttctttgaacatatatttccaatgaaagacattcatagcaattctagatactcttctgagataactcctgaacatagtacacctattgagaattttgacagccacatgaaatgcctataggaggatgacatgatgctctaaatgagcagagacaagggtgaaaatcttggtgatatt

SEQ ID NO: 14173 - DNA, 464 bp, Zea mays
  unsure (1)..(464): unsure at all n locations
actgagctgcactgaaggtttctcatatttttgatctccatacacctaatcatacatctcgtggatcagataaaaatattatggtcactatatttacatcatatgtttcagttggagcgatacctgngagtattaaaaggttatgtgcgaaatcgcgctcacccagagggttcaatcatggagggatacactacagaagaagtgattgaaagctgtatagattacatcagtgacgaaacaatgataggtgtgcctgtacctaaacatgatggtaaactatgtgggagagggagaatgggcaagaaaacttttcgcgttgaggattacaagctagtacattgngctcatggtagtgtactacaacatctcatgatagccgagccttacatagaggaacacctggatgagcttcgtaaagaaaatcagaaccgcacagaggactggatcatganggagcacaaaca

SEQ ID NO: 14174 - DNA, 332 bp, Zea mays
  unsure (1)..(332): unsure at all n locations
tcatattatcttctttggtactccatgcagacanacaatccttgacatgtatagttctactaactgggctcccaagtaagttgtcttcacaggtataaagtgtgcaactttagtcaacctgtcaataacccatatggaatcatagccatcatgagtacggggaatccaactatgaatatcataccgatttctttccatttccactcatgtactntaagggggtgtagcannacctgttgtctttngatgtctgccttaactcgttgacacacatcacatagtgcaacatacgtagcaacatctcttttcaaaccgtaccaccaatacttttc

SEQ ID NO: 14175 - DNA, 388 bp, Zea mays
  unsure (1)..(388): unsure at all n locations
tattttattagcaacacatgtcttactaataagtgtgtatcccaagtatcccatttaaacaaaggtataatagtatatcaaaaacacttaagtgtaaaccacttaatcaaaccattggcagatcattatatctcgatttattgtccatctttaagttcaattatcatgtgagggtccaggttgctcttaaccgtgagcacggctgacatantcagtttacactctacagaggtggtacaactttacccacaagccatgtatcccatctatgcctatgtgtacggacccttaaacactgccgaggtgaatggctagggatccactatgatggtntcacagaatacacttaatacanagcaacctgctaatggttctaagtcggtgtgga

SEQ ID NO: 14176 - DNA, 301 bp, Zea mays
tgaaagcacaatggtccactatccagaaaaaaagcttcggtctaatcaaccgtgaataccgatgtgcttaaaccgacctacaattaaacatcatctaggtggacaaaagaaggtaccgaagaaacctaaattcaaaatcaatgaaccacacacaaaataactcatggaaccaacttcaaaaaaatacagctttactcatgaatggaaataacatgcgaaaagataacccacaccctgttgcaaaaatagaaaaaatacggttcttcatactgctagatataaccggacaatctatggggag

SEQ ID NO: 14177 - DNA, 391 bp, Zea mays
  unsure (1)..(391): unsure at all n locations
ataggatagttgataggactggaacctggttgataactccttttatcgtagagatagcaacacttagtcgaaactttaattgcacatataaacgtttgtgtatctaaatacattgtgattaagaataaatagaggccatatgttaaagcaaaactagattgtataattcaccttcccttttaggtgtcaacattctctacaagtggtattagagccaatggctcaattagaacttttggtaaaatgacattgagccaacactattaaaaggggatggatggatatctctaggccacatcaattngatggcactaacttcacctattatagtgatagatnggctngctacatagaagccaatgatctatgtgtntggagaccactcacaatg

SEQ ID NO: 14178 - DNA, 297 bp, Zea mays
  unsure (1)..(297): unsure at all n locations
agagcacattttgggactaaccaatgttcattntgagaaagacanggtatgtancgggtggcatcaaggaatcaagttggcgtccaccatccacacaataacatcatgatgaccgacaggcctcttgaactactccacatggatttattccgtccgattgctcacataagcatcggcgagagtaagtattggcttgtaattggtgatgactattctcgcttcacttgggtatgctctntgcaagagaaatttcaaaccaagagaccttaatggattcttgagaccggctcaaatgag

SEQ ID NO: 14179 - DNA, 474 bp, Zea mays
catcatcgcccattattttgtatctcggaacatacaatctagccaacgaccaatgcgatgtctaccgcaacgctcgtgacatacaacagctacgtcgcttctactcttaagatgtttcaagttgttcatatacgctcgttgtctttacatacattaataaaatctaaccgtcaaggaagaatcagcctttgctcggtcaagcctgaccctccatcggggctagaggggggaaccccctctgcgcaaaatttcctcgaaaaatctttgcagaacgtcttcgcacttttgactgcttcatagcacggcctaaaacgacgagagtcacgtaacagccaggtcaccgagcgatggactccatgcttcaggatactgatcctactcacaccttcgcgaaagaactacgctcgatagcgttctgtacgacatgctacgctcgaactttctgcatacgacttcggcgttcactgttcatac

SEQ ID NO: 14180 - DNA, 391 bp, Zea mays
  unsure (1)..(391): unsure at all n locations
gagcaacattagatggagcgtcatcattattatctttgctcaataacattgaatcataccggtagaccaatgcatcatgagagcaccttagctcctcatgttctttggtcatcttctccacgctgttagttgttttgatgagagtctcctctagcctgagaagcgtctcgccttgttccttgttccttctcaacaacttaactaagagagctctgtccgctcttgtgagatgattgtagaaacggcgaatcttcttttcttcacatcatcggtctcattttccctgtcattaatgtcagtggaagcaatatangacaatgtaccttgtgatgatgaagaatcatcctcgctatcatcctcatattcctcctcatcatggctgtcgtctcca

SEQ ID NO: 14181 - DNA, 478 bp, Zea mays
  unsure (1)..(478): unsure at all n locations
atgcttgtgctcttcacatactacagacaagatctctagtatttctttcatatccgctagacagccttcattacatatggtgataaacaagacggcgaacaatataaatataagccacctatagcatggccagaaataatcttcttggtcataaaccataatgtgacgagtgaagactcacctggacatttggatggtccagtatttcagtgcttntaagatgtaccgcctgcagatacaataccaaaatattagatgatagttcaacaaaatttacgctacagctggttntctatagctcacatgtaaggttactagcatcaaccttaaacaatctgctgctccactgaatgtgcatgtgttactataataataagcgaccatatgagatagggaccacactaagtgctctcagacttatcgactcacagcatagttatttctttgtgcatttatagtcacacagcatcacgatgac

SEQ ID NO: 14182 - DNA, 410 bp, Zea mays
  unsure (1)..(410): unsure at all n locations
gcttatgaagattcttcattccaacatgggctaatctgcgatgccagagcctacccaagttagtcttagcaaccaagcaagtgtcgagttcagctctatcaaaatctaccaagtatagctgaccctctaacactcccttaaatgctatggaatcatcacttcttctaaagacagtgacacctacatcagtaaatagacagttgtagtccatttgacataattgggatacagaaagcatattgaatctaaagaatctacaagaataacattggaaatagtatggtcaggtggatatagcaatttacccaatccttggaccaaaccttgatttccatccccgaatgtgatagctcgttggggatcnntggtttctcatatgaagagaacatctttntctcccctgtcatgtg

SEQ ID NO: 14183 - DNA, 437 bp, Zea mays
  unsure (1)..(437): unsure at all n locations
atcttaatgagcgtgctcagctgtggtatgtaaatatctagtaccattttgtctaaggaatagaggggaccttatcttttgtaccagcattaagtgacttactctanattagatcattatagattagataaaatctagattaggttggatatgactagattagacctagttaagttacgtggatctactaaggtaatagagtatctcttaagataagatggatctatgagtgtaggatagaatcttttaagatgagatagatatcgttaggctagatcatttaatgaaggataatctatgttggctaattacgtttataagcattatatatatgcaaatgtaattgtggacattactccacaacccatcacactcaatcaaagatccaattcagacaatgatcataagaacatacattcaagcacatagatacttat

SEQ ID NO: 14184 - DNA, 212 bp, Zea mays
  unsure (1)..(212): unsure at all n locations
ctcaccatantctataccaaaccggcatgtattgtctggcttctttaccaacaagacgggcgatgaaaatgctgatgtgcactcaccaatgatccccttgctgaacatttggtcacactgcctctcgatttcatccttcacaaattgggggtatctgtacggtcgcactgccacctgttctgttccagacagtaactgaatatgatgatcat

SEQ ID NO: 14185 - DNA, 168 bp, Zea mays
gctgggccttatgaatcaccaatctgctcttgaaccataacacacctttctcattctggcggaacaactatacttctcaaccttctgatggagattcttcttgattatctgcactcccttgtgactgaaccgggccttgatgatcttggcttgcatagcttggctaac

SEQ ID NO: 14186 - DNA, 166 bp, Zea mays
catattgaatttgcttataatcgatcattgcattctactacaaagatgtgcccatttcagattggatatgggttggtacctcgagctactattgatttaatgcctttgccatcttctgaaaactaaattgtgatgctactaggcgtgctgaattgatgttaaaact

SEQ ID NO: 14187 - DNA, 277 bp, Zea mays
  unsure (1)..(277): unsure at all n locations
ctataatcttaaatcgcatatgtattttaaaaaattatatattggtcatatttttgtagttcacctttttggcgcctcagttaatatcttaaatcatttaaacatttacaaaatgcgtattggtagaacttaaaattntatatattaatagagtaagtaatacaacatttccataatggtgattcataatttntcttaaaaatatttggagaacctganatttatacctttganaataaataataaattggatctataattggttctaaatatatat

SEQ ID NO: 14188 - DNA, 246 bp, Zea mays
  unsure (1)..(246): unsure at all n locations
catgtgctagtcggcgatgccagagtcattccatgttagtcttagcaattaagcaagtgtcgagttcagctctatcaaaatctactaagtgtagctgaccctctaacactcccttaaatgctattgaatcatcacttcttgttaagacagtgacacctacattctgtaagagacagctgtagtccattntacacaatggtgagactgaaagcaagttataatctaaagaatctacaagagaaacat

SEQ ID NO: 14189 - DNA, 367 bp, Zea mays
  unsure (1)..(367): unsure at all n locations
gcttgtcaagcacgtaaacaagtggaatgagcacatcacagcaagaacgtgatgaccacttcaagacccctggagctgctgcatatggacctcttcggacctgtcgcctatctgagcatacgaggaagtaagtatnggttagttattggtgatgacttttcccgcttcacttgngtgttctttttgcaggaaaaatccgaaacccaagggactctcatacgcttcctcaggagagctcataatgagtttgagctcagagtgaanaagataagaagcgacaacgggtccgagttcaagaaccttcaagtggaggagttccttgaagaggaagggatcaagcacgagttcttcgctctctacacaccac

SEQ ID NO: 14190 - DNA, 383 bp, Zea mays
  unsure (1)..(383): unsure at all n locations
gcttcggatctttagccttgcaactcttgtcgatatgacccgaaacaacttgtgaatcagttntaagaacagcccttctgattcccattgcttttagcttccgaagacccagaagcagggcttcgtactcggcaatgttgnttgtgcaactaannatcaagcttgccgcataacaagttntaactttggaaggtgaaaccaacacagcagccgctcccgctccgaaggttccccaggacccatcgcanaacactgtccatgcttcggtgtctttatttacttcttcctcctgagcccctggcgtccagtcagcaatgaagtctgctaacgcctgggactgaatcgaagatctatgaacatattcaatacanaattcattgagc

SEQ ID NO: 14191 - DNA, 357 bp, Zea mays
  unsure (1)..(357): unsure at all n locations
agagcacattntgngactaacanatggttcatttgagaattacagggtttgtagcgcatgtcaagcatggaagcaagttggtgttcatcatccacacaagaacatcatgacgatcaataggccacttgagctactccacatggacctattcggcccgatcgcttacataagcatcggcaggagtaagtattgtcttgtaattgtggatgattattctcgcttcacttgggtgttctttttgcaggagaaatctcatacccaagagaccttanaaggattcttgagacgggctcacaatgagttcggcttaaggatcaagaaaattagaagcgacnacgggacggagttcaagaactc

SEQ ID NO: 14192 - DNA, 263 bp, Zea mays
  unsure (1)..(263): unsure at all n locations
agctcgtcggtcgatcggataactctcaccatcatctagctgtcgcccgtgcgtgccacatgcttaagcgctggccctcatcatggtgaaccatgggacatgtccggtgatcaccggagtgactgccacggtgaaagccacctgtttcacacaccgagctctttntctcctccggccgccagcgctgctcgaccgaattgatcaccaccgctcaagtatcctataaatngaagcctcagcatgttccgctaggtaatcgtgcg

SEQ ID NO: 14193 - DNA, 203 bp, Zea mays
  unsure (1)..(203): unsure at all n locations
catttccaaatagatataccttgtgcagctggtcaagcagggaaacaagtgggaggctctcatcacaccaaaaatgtgatgacaacatcaagacccctggagctgctacatatggacctcttcggacccgtcgcctatctgagcatangaggaagtaagtatgggctagttattggtgatgactcttcccgcttcacttgggt

SEQ ID NO: 14194 - DNA, 278 bp, Zea mays
  unsure (1)..(278): unsure at all n locations
ctactcatcgaagcaagaatataatgaccacatccataccactagaacttctccatatggatctatttgagcctggtgcttatcctaacagccggggaaagaagaatgggcctggtattggtgatgaacttttccgcttcacttgggtattcttttgcaggataaatcataaacccaagatactttaaagtgccttctaaagagagctcanaatgaagttgaactcaaggtgaaaaagataagacgcgataatggatcacaattcaagaatcttcaag

SEQ ID NO: 14195 - DNA, 228 bp, Zea mays
  unsure (1)..(228): unsure at all n locations
gcgcaattactttggatgaggcaaacccttatggactatgggtacgaattaaccaaagatcctcttctatgtgattatgagagtgcaatccgcatggcggataagtccggtgagcacacgccgactaagcacatagccattcggtatcactttntaagggaacaccaacaacggtgagatatcgagattgcttatattaacaccggagaacaattagccgatatcttt

SEQ ID NO: 14196 - DNA, 355 bp, Zea mays
  unsure (1)..(355): unsure at all n locations
agcttagcaagtgcgagttctagatcagtgaagtcctgttcttgggtcacattattaactgagagggattggttgtagaattgaagaaggtaacaactatcttggactggaaagcaccaaaagatgtccgaggaatcaagagtttcatcagaatggtcggttattatcggggtttctgaaagggaaatgtgcccttgggccatttctaagtattttggtgattaagtgtccaacacaagtgcctaagtgttaaattgtgccaaggactcaagaagtgcaaatcaagattaaaggtatgattctagacttagtacatttggttttgtgactaacatgnttgctaagtgctagaatc

SEQ ID NO: 14197 - DNA, 250 bp, Zea mays
  unsure (1)..(250): unsure at all n locations
taatgcacgtcggtctagtaactcccgtcggcattacctggcccacgtgcattaattgttaatccccgtcggattgaccatagtcgacggngattaacctatactgctgcaaaactaacaccaaatgaggtcattatttctccacagntgcacacataacatatatatcatcatacagaacagacacattacatacacatacattggttatcaattcacacatcacaaacttcacatcaccaacatagtt

SEQ ID NO: 14198 - DNA, 458 bp, Zea mays
  unsure (1)..(458): unsure at all n locations
ctgcagcttctgtcaaggatagttgttataactagttgtgcgcactatttaatttagttcatgtcgntatgggtgtcttcccattgctagcagattattaatgtcattatgtttcatatcatgatatctatttatacgttggtgcttccccgtttatgctattttcaaaggagatgctgtcgaaattttatatacgaatgttagaggtgtagtttagttgcattctanggtgtttgtggatcccggngtgttacagttggtatcagaggataggctntagattcttgtcaatttgaagataaatntgacacacttgcacatataagaagggtatgggttcaaatatctttgatatatngtaatgtctttgaagtgcagatgaaataatttcaccctccctattcctttacggngatctggannagtgttatgactaaatgcctgatataattcatttc

SEQ ID NO: 14199 - DNA, 238 bp, Zea mays
catgtgctagtcggcgatgccagagtcagtctatattagtcttagcaattaagcaagtgtcgagttcagctctattaatatctaccaagtatagctgaccctctaacactcccttaaatgctattgaatcatcacttcttctaaagacagtgacaccaatatcaggaaaaagacagctgtagcccattttgcataattgagaaacgggaagcgaattggtatctaaagaatctacaag

SEQ ID NO: 14200 - DNA, 259 bp, Zea mays
  unsure (1)..(259): unsure at all n locations
gagaacacgtgatatgtttgactaacgtacaactcgaataatatagaccttgtgcagcttgtcaagcaggtgaacaggcgggaggagcgcatcacagcaagaatgtgatgaccacttcaagacccctggagctgctgcatatggacctcttcggacccgtcgcctatctgagcatagggggaagtaagcatggtctaattattgtcgatgacttttcccgcttcacttgggtgttctttntgcaagataagtctgaaac

SEQ ID NO: 14201 - DNA, 414 bp, Zea mays
  unsure (1)..(414): unsure at all n locations
ctgcagcttggactaaacttgtctcaccacatgcccccctaactgattgcttactgaagtggtgaatcgtacattgtcaatgctgctgcgagcaatggtaaagaagaacttgaaggattgngagggaatgttgccacacgtggagtttgcttataacagggcagtacattctacaactaatttatgcccctttgaaattgtatatgggttcaaacctattgatccgatagaattgttgccccttccattgcaggaaagaaccaatatggaagcttccaagcgtgctgcatacataanaaagatacatgagaagactaaggaagcaattgagctcanatcagtgcatanaggctgcangcatgaacaagcataggaagaaagtgtatttgaaccggagacttggttnggatcact

SEQ ID NO: 14202 - DNA, 442 bp, Zea mays
  unsure (1)..(442): unsure at all n locations
tggacgtgaagagtgccttcctcaatggaccaatcaatgtatatgtctatgtngagcaacctcccggctctgaagatagtgggtatcctaatcatgtctataagctctctaaagcgctttatgggctcaagcaagccccaagagcatggtatgaatgccttagagatttccttattgctaatggcttcaaagtcggcaaggccgatcctactttattcactaaaactcttgacaatgatttgtttgtatgccaaatttatgttgatgatatcatatctgggtctactagcgaatctacatgtgaagaaattagtangatcatgacacagaaattcgagatgtctatgatggnggaagtaaagtactttctaggattccaagtcaagcaacttcaagagggcaccttcattngccaaacagagtacactcaagacatactaac

SEQ ID NO: 14203 - DNA, 446 bp, Zea mays
  unsure (1)..(446): unsure at all n locations
taaaaatacttcactcagntntaacaaagattcattaatgaatgtttgagaagttaaactaggtatgaagcacggctaatgcatgaacatgctttctcttcctttntatacaagatatgctaagaaagtatggaanaagggagatttatgtacaagttagaatgaaaggaagttggtttacccttttgtaccttcacatagagacgctctcttcattgggcgttgtacttagtcttagatgcttaagacctatacttaagacaatatatganaatattntgcacaagagagagttctacaattagtgatcattntctaagcatngntattatatatcaagtagatcacacattgcataaatatatcatgaattcntcttttaacttagtgcacatcaagagagatatcgatggaaattatgaggcactaagaagcataagtgttta

SEQ ID NO: 14204 - DNA, 286 bp, Zea mays
  unsure (1)..(286): unsure at all n locations
gaggatgattagagctgagcatcgccntttaaagtggtctatattttattatcagntactaagtataagtaaataccaacccaattaagaaaagtaataacatcacctgcgatgcaatgcatatgacanaatgaatttagttccataaattaatcatgtgagggtccgagctgctcatgaccgtgagcacggctagtataccagttttacactctgcagaggttgtgcatctctacccacaagtcatgttacccatctgccaagggatcgcgacttcccatacacc

SEQ ID NO: 14205 - DNA, 245 bp, Zea mays
  unsure (1)..(245): unsure at all n locations
accctcacagttcttgtgcttgttgaatacctgaggctctgggagtcacgtgatggtgttaccttgcaaccttctagttcagatcagcatgcgatgaacgaccattattgaagaagtggactggccagggtaatgttaaagaagaaggccgtactggttcacaagatatagagccgattgaaaatgtgggttgaaaatgtggtaaactgtgtcatangatgtgcatctactgggatatcatctat

SEQ ID NO: 14206 - DNA, 136 bp, Zea mays
  unsure (1)..(136): unsure at all n locations
aattcatacataggttctcgctcgatgacatttatgtgcanggtatttggtgggcggtggtacatctgcngcgggcacaccctacactgtagcaagctctggcgcatnctggacggactcttcctacagtacccca

SEQ ID NO: 14207 - DNA, 336 bp, Zea mays
  unsure (1)..(336): unsure at all n locations
acaacatctagcacattngccattcttctcctcttaagaggtgcgacacaacagatttgtgccttcggcactggtacctctgatgaagggctcaaaatctctggcatctttggtatttcttcaattcttgacccttgagccttatacttatcagccttcgtctcaactagctcaactgaaggtaacttcggtattatagccggctctttagtcctctgcgcagaaggaacatttactctttgttcagcagctgaagaagccccctcgccaaattcaggtaccacggncgattcaatgtaacgcgaccaatgggtaagaaccttcacctttttgccc

SEQ ID NO: 14208 - DNA, 273 bp, Zea mays
  unsure (1)..(273): unsure at all n locations
catgctccaatatatttcgtcctcgaatttcttatgttatcacagaaaaaatatacagaattggaaaaagtcctgtatgctcgtttgatggcctccacgaagcttcggcattattntcaagcttataacataattgttccttcttcacaacctttgaaggatattatgagaaatcgagaagctactggaaggattggaaaatgggctgcagagctcaattgaatttgtattgattatgttcatagatcttcgattcagtctcaagcgttgtca

SEQ ID NO: 14209 - DNA, 189 bp, Zea mays
  unsure (1)..(189): unsure at all n locations
ctcaagcctatctacgggtgcataggtttcaccgaattccaaaccttcgacttgngagtatcctttggcacaagtcgagatttgttccttgtcaccacaccatgctcatctntgttattgcggaagacccatttggttcctacaacattttgattaggacgtggaactaaatgccatacctcgtttcta

SEQ ID NO: 14210 - DNA, 241 bp, Zea mays
gcttctgacttgtgggcccgccgaggtgtccggtgcacaccggacatgctctgtttgatgtccggtgcaccggtatgggcagccctgacgtctgcgcgcgctgcgcgcgcatataatgctccgcacggagccggtggcgccgcaaacagccggtgctccgctggcacaccggacagtccggtgcacaccggacagttcggtgaattatagcggagcggctgtcgtgaaaacccgatgatga

SEQ ID NO: 14211 - DNA, 494 bp, Zea mays
  unsure (1)..(494): unsure at all n locations
tagatcttgccatgagaatcgccgaaaggatgttcctcanaatgaaggaagatgaggcgaagaacaaaattgaagaagaaaatgatcgatggagaccaaacgacgaatccacctcttcacaaggatcgtctttcaaatccacttctcatatgtgctttattgctaatgggagtgacagngaaagcgaaagtgaggatgaggaggagcaagaaagtgatagtgaagatgaggatgatcttcaacaattcttcgcttagctaagcaagaaacatcggatgagcttgctcanactcatgaaaagagcggaagaacataaagaaatgtttcataagcaagaagacttcctcatcagaaaaatcgaagacttagagaagttgaccaaagagcatgagaagctaaagtgctctcatgatgattcgtccacaggtatgaagacatttcaattgagcaannntaagtgtaatcattcatatatattgtcattagaaataaaa

SEQ ID NO: 14212 - DNA, 516 bp, Zea mays
  unsure (1)..(516): unsure at all n locations
aacccatacttatagccatctctcgacagacgcgataatctttgttgtccgagaggcagtataagaagtcttcttcgtctgtcccattgaacactactngccccttcggatatttcaattctttggcatagtgattagcttcaaaaatttctccttcggataatttcttccccgaagcgtgccgcacaatataatcgtatatattggaaggtgcttcggcggcaccagtgtcaagttcttcaaccaaaagtggctctggcatatttatttnttaggatgcctctgcaatgttcgtttcttcggtttcaaaaggttatacctnggctggctctgatggcccgactntagttgcaaattgttgcttcgaagcttcagcaccaacggctttcagagacacttcagaagtttcaacacgtttctttggagttatgctcgaagattaatagtctcanaacatctaatacattaacattcttntcttttggagtacggtggaccttctgcttttctgctaat

SEQ ID NO: 14213 - DNA, 334 bp, Zea mays
  unsure (1)..(334): unsure at all n locations
gcttctgccctgacataccgcatctggagtctccgtcaactccactgctgttattataccggataaagctccaagctagccagagacgtgaggtctggaaacagtcgttggaatattgagaagcttgcggagatcaagggttctactgctggtatagctgattatcaactaacagcactgcgggctgatgtcactatgtagttgagccacagccttgccgaanaagttgccgagcctgatttgatacattggtacttcccagtccagattctcttatctgaccaagaggagacaggctatcccaagactctcaagcaccatgtcagacgaaatg

SEQ ID NO: 14214 - DNA, 425 bp, Zea mays
  unsure (1)..(425): unsure at all n locations
tgcagcttcgagcgccgaggtctaaaaagcaccttcctgagctcgntgtttatattcgattcaatttctcagcgtgtatcggacccacctttcatagttactgttcggtctctgcggccaccacgcaacgagtgcgagcgggtgtccgactggtgtataaattctggcgcttggacttcttacctgccgcactatataaacagactagtaggtgtgaagttaccacagcattcattgctatttgcactggtttgctgccaacaattttaaccgtcgccgaagcttgtctgtcggaatcgaacgaagctgctgtttgaaacctgcttcggaggaagaaagtattaaagttgcacaagttcataattaaatggccagagtgcgctctaccgccagggttgaacgtgagggggacaaaactgaagctt

SEQ ID NO: 14215 - DNA, 442 bp, Zea mays
  unsure (1)..(442): unsure at all n locations
caatacaacttatttgatatttttgtctagtgaatgcactctaagtgtgtcaaacatatgcaatgccaatgcttatgatgccatgctcaagttttagttacagtaacaccaggggtgttacagtgttgatggaggtgtaccatgatgttgtgtgccggtggcaattttatgactagtttaactattaatgtaattatttgttattntactaaagaataagtggtaaaaaaccttaggtagctagaanaatctaagaacttgcatgtacacttcattntggtgtacaatggtgacaaannaaatttattatgacanagtggtgatatacangtctcgaacatgcatacanttctcacantagagcctagtacttagtgagagatgttcatgcttgtgatggatctatactaccactttctccanaccantcttaaatttaatg

SEQ ID NO: 14216 - DNA, 425 bp, Zea mays
  unsure (1)..(425): unsure at all n locations
tcctatctcttttccttctcacatccaccacactattcttgatgctcatatcaatcgacaaatctactccgttctatntggagttgtccctgtgtaccaaaacttgaagtcattattgtccacctccttcgccttctgatccttccatttagtctcttcgacagataagatatttatacgccttctaggtggtgtctcaactaactcccttgactgtacctgtaagcgggccggcattccaactacctagacagatcctagggttgactagtttctggtgaagtgtataagtggattggctaagtggctaccttctcccatcagcttaagcttttgggttgaacttggtagtgtggtcacttttaacagttctttaccattcgcactcatcaatgatgtgaagacccttgcacattttcactaca

SEQ ID NO: 14217 - DNA, 418 bp, Zea mays
  unsure (1)..(418): unsure at all n locations
tggacgtgaagagtgccttcctcaatggaccaatcaatgtatatgtcgcgagtaccctaatcatgtttacaaactctctaaggcgctntatgggctcaagcaagccccaagagcatggtatgaatgccttagagatttccttatcactaatggattcaaagtcggaaaggccgatcctacactctctaccaaaacacttgaaaatgatttgtttgtatgccaaatttatgttgatgatattatatttgggtctactaacgaatctacatgtgaagagtgtagtaggatcatgacacacaaattcgagatgtctatgatggcggagttgaaatatttcttangatttcaagtgaagcaactccaagagggcaccttcctcagccaaatgaagtatacttcagatattctaagcaagttt

SEQ ID NO: 14218 - DNA, 290 bp, Zea mays
  unsure (1)..(290): unsure at all n locations
ctacatcaacctagaaacaaaaaccgatccacgccatccgggttgacccanaccaattccagcttcaactctactanggccttgatttaattatgtgtcactatgataattacatattctaatgaagaangttcagtagattgaaatgaaatatagctcttacacaacattgaacttgaaatgatgaacaataagatagcattttagaaaaacaattgtggtggactcactcgtgatgatgcaaaataatngagcaccattgtgtatactatcatatataggaacatcgt

SEQ ID NO: 14219 - DNA, 299 bp, Zea mays
  unsure (1)..(299): unsure at all n locations
gcttcgtctttgaaaaatagtttttagcgtctccgaagatgtctgattataataatgtgtgtgctgagatgaagctgagccttgacgaagagaanaacttggggtttcttatagcgatgtcnaagaccaatacagaaaagattactaaggagattctggaagggttgtccgaagatactggtgacagtgacagctatgatgtggacagtggtggcgaggactccgaagatcgtccatggcgaccaagccattcagtttatggtaaatcaactatcacagagaatcatcttgtcaatatg

SEQ ID NO: 14220 - DNA, 251 bp, Zea mays
  unsure (1)..(251): unsure at all n locations
gcttctaaagggagaacacgtgataggtctaactaacgtgcatttcgaataagatagaccttgtgcagctggtcaagcaggtaaacaggtgggaagttctcatcataccaaanatgtgagaccacatcaagaccggtggagatgcttcatatggacctcttcggacccgtcgcctatctaagcataggaggaagtaagtatgggcttggtataagtgatgaattttcccgcttcacttgggtattcttttt

SEQ ID NO: 14221 - DNA, 467 bp, Zea mays
  unsure (1)..(467): unsure at all n locations
tcaccaaaatccaaaccttcgacttgtgaataccccttggctacgagtcgagctttgntccttgtcaccacaccatgctcgtcttgtttggtgcggaagacccacttggttcctacaacattntggttatgacgtggaactaaatgccatacctcgttcctcgtgaaagttgtgagctcctcttgcatcgccatcacccaatccgaatcttggagtggcttctctaccctgtgtggctcaatagaggaaacaaaagagtaatgctcacannaatgtgcaacacgagatcgagtagttacccncttatgaatatcgncgaggatggtgtcgacggggtgatctcgntggattgcttggggactcttgggtgtggcggccttgttcttcatcctccttgcttcatcatttgcatctcccttgatcatttcgcatcttgggtgctcatcatttgtcttctcttataactg

SEQ ID NO: 14222 - DNA, 478 bp, Zea mays
  unsure (1)..(478): unsure at all n locations
aagactcatatttgcagagaagctngctagtagtggattcttatgccaaacttttacttcacaagataagtactttctcctaaatctagatgtagggtgacagatttcatccaagcaacactaattacccttatcggcaaagtgctagaaataataagcatattctttttctaaacatcaccacagaacaacacatctcagacatcgaatctactaaatcgtactcgaaaatcacataaaccaaattgtagccttcttcctaaaccaaccaggtctagcccaagtatcaagaaagcattgaaccatacatataaacaaatggacattccaacgcacgtgcgtcacacataccattacatgaacacataagagtagaataatctaattctaagccacgagtaccatggncggtatatctactctatccactaataactcgatgagtagtagtaacaaatcagagtactcgtattaatcc

SEQ ID NO: 14223 - DNA, 513 bp, Zea mays
  unsure (1)..(513): unsure at all n locations
caacaacatctgccggcacagcaactgtttactataccagtaactnggcctttcgcatgctngggactggatatgattggacctttcaagaaaactcaaggaggatacactcatgtattggtagcgatcgacaaattcactaaatggatagagttcaagcccatcgcttctttgacctcagctaaagccgtggaattcatacaagatataatattcagattcgggataccaaacaacatcataactgacctaggatccaacttcacaagttcagaattcttcgacttctgcgagcaaaaaagcattcagatcaagtatgcatctgtagcacattcaagagccaaagggcaggttgagcgagccaacggaatgatactggangcactcanganaaaggtcttcgataagaatgaaaaattcgcaggaaagtggataagggaatngccttatgtcgttnggacctaagacccaacctagccgactctgatggaacactctttcttatgtctatgg

SEQ ID NO: 14224 - DNA, 251 bp, Zea mays
attctgacgaacacattccaaagccctcgatttcgcagaagaaggagattaatgaatttgacatagtaatggaacggcacggcgacttctgcgcgctggtggcttcttgtggcacaactgctgttttgttaaagctgggtgcaatcacataagaactgttaataggcccaacttcaatctctcatcgtctgacctggcttatattccagtcgaagctagcagcatatgcaacatattcattacttagatct

SEQ ID NO: 14225 - DNA, 530 bp, Zea mays
  unsure (1)..(530): unsure at all n locations
tgcagcttaactggtgcctagatcactcggcctacccacaactgacctactatttttctatcttagcctcttgtcccaaaaccggatggagacaccaaagaacatgactgggtaaggataagatcaacctcgtcaaggaaggagagaggtcaaacccaaccttcacctgcattgccactcaacacgcagttctttctcaccataaattntattaccccaggctattcttgccctaatctacccatcttccatcccacaggtcaagaacaggtatcgcangatgaggcgcatggatgatgctgtggcgagttcgtgagaggtctangccgtcgtctcccagtcaactntgngttgctagaaccgtngtctcttataatgtannatattacttagtttcgatagaactcctcgtatgtagtaaagatgtgacattcgatcctgtgccatgantcatcatatgtgtgagactnggtcccagcacacctgggtgatatgttacgcccgggcttgtgaccctanaacccggtgta

SEQ ID NO: 14226 - DNA, 236 bp, Zea mays
  unsure (1)..(236): unsure at all n locations
ctcttatgccgaagctaaatcaagatgatgctctgctcgagaatgttatatanaggcttcggctatgggtaaattnttcaatagcacaacagtgcaatggcaatgaatggtgtggaacttcacacatacccgtctgtttatatagtgttgcaggtgtgaaggtgaatcgtcaagctgctcgcacccgctgaacagttacccgcatccactgaacggtggaacactctgcgcgtggg

SEQ ID NO: 14227 - DNA, 251 bp, Zea mays
actccaaaatatccttgaccttgctgggatcaactgcaatccccttggcagacaatacgtgtgccacaaattgaatttcctacaggcaaaatgcgcatttactaaatttagcatataattggcgcttgcttaagcgcatttatacgatccgcaaatgccgagcatgctcctcttcattcttggaatatatcacaatatcatcaatgaagaccaccacgaatttgtcaactcgggcatgaataccaagatca

SEQ ID NO: 14228 - DNA, 171 bp, Zea mays
  unsure (1)..(171): unsure at all n locations
gcttctaatctttccttaacgggataaatataatngtagcgagagtatttttctgtatatgttatgaacgaagcgaacccatatactgtcctaactagaaaaggaccacaaatatctttatgaataatttctaacactctcgtactgcgcttagcatttttctcaatctac

SEQ ID NO: 14229 - DNA, 219 bp, Zea mays
gcatgcatctagaccgacctcctctattgcaaaatcaactaaatagagttcgtgcgctaatacacccttaaaagctaatgaaccatcacttcttctaaagacagacacatctacatttgtcaatagacaattatatcccatattacataattgacttacggataacaaattatatccaagtgactctactaagaatacattataaatagagtgctcatt

SEQ ID NO: 14230 - DNA, 315 bp, Zea mays
  unsure (1)..(315): unsure at all n locations
aatttcacagccatcaagaaaatgctcctcgatgacaagaaaggcaagtgggccgacctgttacctgaagcgatctgggcgctgaacacgactgagtgcacggcgactgggttcacccctttccgccttctatatggatcggaggccatgaccccacaagaaataaaacatgggtcaccgcggacagtcacttcagtcgtccccgacgtagacgagcctacttcanaggacctcatcgacggagaccgcgtcttcgccctacaggccctatacaaataccaagctcatacaaaagcatggcgcgaccacacagtc

SEQ ID NO: 14231 - DNA, 303 bp, Zea mays
  unsure (1)..(303): unsure at all n locations
agcttgtggagggtcttcattcccacatgtgctaagcggcgatgccacatctatcttatgctagtcttagcaattaggcatgcatctagaccggcctcttcttttgcaaaatcaactaaataaagtttgccgtctagtacacccttaanagctagtgaaccatcacaccttctaaagacagacacatctacatttgtgaatagaaaattatatcccatattgcaaagttgactaatggataacagattatatccaagcgactcaactaaaaacacattagaaatagagtgctcggacgaaata

SEQ ID NO: 14232 - DNA, 384 bp, Zea mays
  unsure (1)..(384): unsure at all n locations
gtagatagattctacaaattcgcaaagagcaataattgggactatgtttaagcgtagagagattngatagaatacgtgtcgtactggtattgagcaaccaaacgcaacaagaggcaaacttgtatgcctatgaatctctgttgtaatacctatgacatgggtttaataagagatattttgtgaagnttttgaccgtgcaaatgataattaaatattntgtgcgaaaaattgaattcccgtaatattttgtgcaaacagtcttcanatctgtaggtaatcctgatcacccctatctgttctttaagctnntcagttatttactgactaaaccatatcgctttgtttaatctcttgaaacattctaaccacagccctatctgagag

SEQ ID NO: 14233 - DNA, 343 bp, Zea mays
  unsure (1)..(343): unsure at all n locations
gcttcggagcgccgaatggtctaaaaacaccttccctgagctncgtgtctatattactatcaatctcccatcgtatagcggccccaccttgcagagntactgttctgtctctgcggccaccacgcagcgagtgcgagcgggtgtcccgctggtgtaaaaattctggcgcttcgccttcttacctgcagcactatataaacagacgagtaggtgtgaagttaccacagcattcattgctatttgcactgttntgctgccaaacattttaaccgtcaccgaagcttgtctgtcggaatcgaacgaagctccagcttgaagtctgcttcggaggaagaaagtatta

SEQ ID NO: 14234 - DNA, 407 bp, Zea mays
  unsure (1)..(407): unsure at all n locations
acacatccatgagaaaatagaggcccagaaagccaaatgtttcagaaaagacgatcaaggcattgtatggttcaacaaccgcatagttgtgccaaagaatgaagaaatccgccaaccaaatttggatgaagcacatcttagtcgctattctattcatcccggaagcactaagatgtatcaagatctaaaacagcattattggtggacgaagatgaaaatngaaattgcacgctatgtggctagatgtgacacttgtaaacgcgtcanagccatacatatgaagactgtcggtccattacaatctttacctatcccaacatggaaatgggaagatataagcatggacttcattgtgggattgcccaggactgcanaagggtatgattctatctanggtataattgatc

SEQ ID NO: 14235 - DNA, 283 bp, Zea mays
  unsure (1)..(283): unsure at all n locations
aacaactntggctgctacagcttcgtctctcggtccggngcaagctgtcccgtaccaacctttcggaagagatggcccggggattggatgacagaatggttttatgtgaagaatgacttatcagcacgagaagacatcaaaggtataattatgcgtcctatttggcaaagcttcggccttcggaggccgaaagttgaaatgaacgaagccgccgaagagtgccaaagagccttcggcgttgtctgctcttttataggaacaagggacttagtacaagagcata

SEQ ID NO: 14236 - DNA, 448 bp, Zea mays
  unsure (1)..(448): unsure at all n locations
acatgtgctaagcggcgatgccacatttcttctatgctagtcttagctattaagcatgcatctagaccagcctgttctttggcanaatcaactagataaaggttgccgtctaatacacccttaaaagctagtgaaccatcacttcttctaaagacagacacatctatatttgtaaatagacagttataccccatgttgcataattgactaacagatagcaaattataaccaagagactcaactaaaaacacattagagatagagtgctcattacagnatgcaatgttacctaacccttttaccttgccttgattcccatcaccgaataatattgaatcttgcgaatccttattcttgacgtaggaggagaacatcttcttctcccccgtcatatgcgttgtgcatccgctgtcgataatccagcttgaacccncggatgcataaacct

SEQ ID NO: 14237 - DNA, 551 bp, Zea mays
  unsure (1)..(551): unsure at all n locations
gcttgtcaccatcaatcanagtgcttttgtcaaagggaggagcatcctgtattattttttgatggtgcagcagctggcaaggacgttacatcataaggagcctcatgtgctctntaaactggatatttccaaggcctttgattctgtgtcctgggctttcttagtggagcttctgcaacatcttggctttggtcgcaagtggtgtaatctgatcagtttgctgctgtccacatcctctaccagaattctaatcaatggtgaacctgcggactgcatctctcaccgtcgaggccttcgtcaaggtgaccctctgtcacccatgctatttatactggtcatggaagttctaaattctattgttcattntgcaactcaggagcatctcttacagcccattgctcatcagcangctaaacatcgtatatctttctatgcggatgaatgtgcatattcctccggcactagatctgacctcttatggcactcagctcttgatattntgggcatttacaggcctcaagacaacattaccaaagtcagcacacctatca

SEQ ID NO: 14238 - DNA, 344 bp, Zea mays
  unsure (1)..(344): unsure at all n locations
atttttgatatgcaagtacacctatttatacatctcgtggatcagataaaaatattagggccactatatctacatcatatgtttcagttggagcgatacctgngagtattaaaaggttatgtgcgaaatcgcgctcaccaagagggttcaatcatggagggatacactacagaagaagtgattgagagctgtatagattacatcagtgacggaacaatgataggtgtgcctgtacctaaacatgagggtaaactatgtgggagagggagaatgggcaagaaaacttttcgcgtcgaggattacaagctaatacattgtgctcatggtagtgtactacaacatct

SEQ ID NO: 14239 - DNA, 257 bp, Zea mays
  unsure (1)..(257): unsure at all n locations
taaaaactccaaacaagcttctcaagtgaggtgtctatatggatttctgaaattcagatttctgaatttcagcccttgagccaaagaccgagcgcgttcaccttgatccctggctcanatcctaatgacccttgttgggggccttcgccttccgaaggtcctcaaaaacatgatttaacaatgcttttggagtataatacatgaacaagtaccttcggactcggatcagaaccacagtgtaagaagcacaaagaata

SEQ ID NO: 14240 - DNA, 347 bp, Zea mays
  unsure (1)..(347): unsure at all n locations
catattcatgagaaaatagaagtcggcaaggaaaattgcttcacgaaagatggccaaggaataatatggtttaatgatcgcatagttgtgcccaaagatgctgaggtccgccaacagatcttggatgaagctcatcttagtaaatattccattcaccccaggagtactaagatgtatcaggacttatagcaacattattggtggacaaaaatganaattgaaataacatgctatgttggcagatgtgacacctgcagacgagtcanagccatacatatgaaggctgctggaccactgcaatcttttcacatcccaacttttgaagtgggaagatattaacatggact

SEQ ID NO: 14241 - DNA, 431 bp, Zea mays
  unsure (1)..(431): unsure at all n locations
attgaaagagcacaatctctacttatgaattttctgtattatcttataagagatnnggattaggacacaagcaatagtttcctatttagcaacctctaatatatgaatgacaagaaggttactaacacaagaaaacctcatgatatgaactaaattacccttacaagcatcatgcataacatcaattgtnaaaaaagatganagtcgcatgattatttaattaagtgtacatggcaagtttaatttatagcatggcgagtgattaatgtagaagactcataaccaacttaaacaagaatgaatacttcacatagtattggttcgatcttctttgaatgttgaatggacactccattcggaaacacattctcatgttgtgagactagataaacactcggatagaaacattagtctcacaactttagtcatat

SEQ ID NO: 14242 - DNA, 327 bp, Zea mays
  unsure (1)..(327): unsure at all n locations
gaatattccacgaggataaaatgaacacgctgatctactatccaagtcagcagcacaggagctgcctttaccttcggaagttttctttgaaacaatataagcaccttcgattgaccttcttgaaagagcagtgctcaatatatctcctgtttatagcgaagatttgagaactgagatcatgtcttttctccagggcacattttctttcagatgacgaagtttatcaaaagagaatagcggcaagagcctgtccatatgtaataatagaaggggggagtatacaagcatggagttgttctccattactcanatgtctatccagaactg

SEQ ID NO: 14243 - DNA, 398 bp, Zea mays
  unsure (1)..(398): unsure at all n locations
gctttcttcagatgatgctatccctagcctatcatatatatcatcgntccgtactcgataccttcttatatggccacaaaaccaacgcaacataagcatgtcgacaacaattatcagttgaacatgtcatctttttgtagaccaacattgtgcattgtgcaacatagcaagtctaatcattttcctataaaatttgcatttatagcttatgtgataccccctcttgtcacatagaatgtcagatgcttgacaccacttgatccacccttgtgtgatttatggctaacatcttcatcaatatccacgtctctctatagaatcgatcataaataccanaagggtaaaggtactacttgatcttctaaactaacatcttcctcatgtgtagtagtagttat

SEQ ID NO: 14244 - DNA, 283 bp, Zea mays
  unsure (1)..(283): unsure at all n locations
gcatgcttctagcacatgtaaacttttattntctagttatgctcggaatttagcagttaatttagctatgtgatcattttgttggttaatcatggcaatgtgatcatgcatagcttctatattaacatctctacatctagtacaaatagaaatatgctcaacagtagatgtagatgggttgcaagcatttaatacttctatcttagcatataatctatcattctcatctctaagacacgaaatagaatcattgcanacattcaattgttcaatcttagaaact

SEQ ID NO: 14245 - DNA, 346 bp, Zea mays
  unsure (1)..(346): unsure at all n locations
tgtatataacaaagctgtatattatatatataaatctcaggagaaggtaagcaacaggtacagggttattaccggcttgagatgacttcgagcttcgtcaccagttaagtttcgtccatccttcgtccagatntgtgttataaatctatntccaatgcttcgggccagactggngatgtcagtaaattcgctggtgatatgctgaagtttggcctgctcacgatcttcccatgcgtgcaaccagtcttcatgaaagcaacagctatgctgcgagaagctagcagggcacagaagtcaccgtgcccagctataacttcgtcaagcgcatcaacttcgccctcaatat

SEQ ID NO: 14246 - DNA, 413 bp, Zea mays
  unsure (1)..(413): unsure at all n locations
tacactgtctagttgaagaataggacaaccaaaattattaggaatgtctcatgtatctcgttcacaaaaacgatacaatttatactgaaagccacaaaacacaaatgttattgtgaaacttactgatatgatgggctggcatgacatcatacgtgcgacattcaactcagacatgttgagaaactcccacctcattcatggaatattgagcattanggaccataacttctattgaaggcatacggtccttgttacttagtttagtgaaataataacggggggatcatgaacatttacggataaccaatcaaacattggactgagtcccatcattacatacgcattgaggcatagactataattggtctctgaaccatgtgaagactaactggatatatgctatttgatacact

SEQ ID NO: 14247 - DNA, 437 bp, Zea mays
  unsure (1)..(437): unsure at all n locations
gcttctatagggagaacacgtgatatgtctaaccaatgttcaattcgaatagatataccttgtgcagcttgtcaagcacggaaacaggtgggaggagcgcatcacagcaagaatgtgatgaccacttcaagacccctggagctgctgcatatggacctcttcggacccgtcgcctatctaagcatanggggaagtaagtatgggttagttattgttgatgattcttcccgcttcacttgggtgttctttttgcacgataagtctgacacccaatggaccctcagacgctctctcatgagagctcaaaatgagtctgagctcanagtgaanaagataagaagcgacaacgggtnccgagttcaagaaccttcacgtggaggagttccttgaagaggaanggatcaagcacgagttctgcgctctctacacaccacagc

SEQ ID NO: 14248 - DNA, 435 bp, Zea mays
  unsure (1)..(435): unsure at all n locations
gcagctanaccttgactagaagaatcaatgccaagttttgaaaacccaatgttcatctgctgtggagaacaagagatcatacaagtcgacagttcatgcactctntntctattcacaccaaggagtgtgatctcacgtcgtaaagtcttcatagcgcccatgacattgtcatttcttagaagttcacagaatttctgctccaatatcaaaaatgccgcagatttcatgatgtttacatcttgaaggccaatcttattcaagggaacaaccgcattatcccaattcccatcaatcacctgctctctgaanagattcaccatagggttatgtaaagtaatccctgagtcctcttncagaactgctccactattctcatatccaagactatacagagntntgctgatatgctaacagattctccttcttaaaacaccc

SEQ ID NO: 14249 - DNA, 227 bp, Zea mays
  unsure (1)..(227): unsure at all n locations
gaccttgagccagtcatcggcatccagaggatcaacctcatgagataatgtcggngggtgatgactcatgaaatcccggtgcttatctctggccggnggtgcatactgctgctgttggggttgctgattctcgttggttctgtgtatttgctgaacagccgtagtgagtccttgcagaatctgcatctgcgcagcgatgaactgctccatgttgggattcggtgggg

SEQ ID NO: 14250 - DNA, 364 bp, Zea mays
  unsure (1)..(364): unsure at all n locations
gcttacatcgaatttctgctnttgctgtgtccaagtttctgtctgtgcgaggacttcgctattcaatctgggcaatttagcttgggcttccgccagtaagccttccattgattgaagttcanaatccttcttctctagagcagcttcgtgatcttttattctgctctctaagccttcaattataccctcatgttttttatcttcaaggtcttgttgcattctcaaggctgtactcaatagcaggctctgcgcagaaacaaccttcgtcagaaaacaccttcgtcggtaaaacaatgaanagccgaagtaaagattttatctttgaattagaatagaataaactaacgacgatatgctgtcgtcg

SEQ ID NO: 14251 - DNA, 495 bp, Zea mays
  unsure (1)..(495): unsure at all n locations
agcttgcccgagcttgaaccgatgacccgcgccaccggaatagcgcaatcgtgctcgccggagttcggaaccccgccggagcacgtggaccgngtaaacctctgcaccatttctcaattcggtgcacgcatggcctctacatcaccccgtggagctcctcatgcactntgattgaacccgaccgttgtggtttggccggagcatgagccaccgacgacctccgccgcctgcgctcgtggccagggcagcttcgaccacctctgacgtcgacccgcacaccgacgtgaccaccatgacctccccgacgtcactgaccaccccgtcggagctctactgccgccggtaagcctcgccgccgtaatctatgccgtaagcttaaactcgaaattcattagacttagctagtgcttttggcaaccaaaccctcaccaaacagctgcatgttagaggagaggagtagactctacaccggtaagctagctgagatagatactc

SEQ ID NO: 14252 - DNA, 275 bp, Zea mays
  unsure (1)..(275): unsure at all n locations
catataagattatggntcttgggttagcacttgagaaaaaccctgtgtgacactgtggtgtacagccttccccccttaaaggaatctcgtcccgagatttgggccacagtccttccggngtgaagcgaaaggtgagacttatacgaagtgggtgattattggtattattagagcaaactgctcttcgaatgtcattctctttgaaacttcagaaggaagtcctttntaaattntggttcatgaatacttcattctgatttaagaatatatctctg

SEQ ID NO: 14253 - DNA, 424 bp, Zea mays
  unsure (1)..(424): unsure at all n locations
acatgtgctaagcggcgatgccacagtcagtccatgcaagtcttagccattaagcatgcatctagaccggcctcttctttggcaaaatcaactaaataaagtttgcgcgctaatacacccttaaaagctagtgaaccatcacttcttctaaagacagacacatctacatttgtaaacagacagttatatcccatattgcacaattgactaacagatagtaaattatatcctagtgactctactaaaaacacattagagatagagtgctcattagagaatggcaatttacctaaccactttaccttgccttgattcccatcaccgaatatgatngaatctggggacatcttattcttgacgtaggaggtgaacatcttcttctnccccgtcatatggttggtgcatccgctatcaataatccagc

SEQ ID NO: 14254 - DNA, 477 bp, Zea mays
  unsure (1)..(477): unsure at all n locations
atatttccacccggcttcttcaatccaatgccagcattgattctttatctcctcatgaggcacgaatggnggggcatgtanggacattggtgctatccaatcgagatatgtctaaagactattcgaaagaaatgtagaaataaatgcanaatcgaggcttccattgcagaggcatacattctagaggaggtgtcaaacttcacaacaacttactatggtgacaaactgccaagcgtgcataatccacccnctcgttacaatgatggcgacaatgaatcgaacctcaacatatttcgaggccaactcgaaagtgcaagtggttcgaccaccaagaccctgacacatgaagagtggcggcatatcatgctatatgtattgaccaaccttgaagaggtgacgccatacatggaacaatntcttcatgcattctggcgtngatcaagggacccaactncacaggaatatgatactcttctt

SEQ ID NO: 14255 - DNA, 477 bp, Zea mays
  unsure (1)..(477): unsure at all n locations
atctctaagtcacctgcggcatgcaagcttcgtctagctctctgctcaatnntgtcatttgagatcgtgcctcggtaagtgagccttcggntgtgtaaagcccaaaatttgtatcagaanaaaatctacgtggagaccaggagatagaattccaagatttaagttnttttataataagagattaaataaaagacccacatataatttaaaccaacctttgttgaataatgtgatcagagatattctccaaaagaattaagtttaaagaaataccctaatgaatactatacactagannaatcttttcttttagaataactataaacatattntaaatagaataaacattcaagggaataagttttacgtgtgtgcaatctatacttaagatatttggatataataaataagactaaacatatgtatatattcatgccatatcaagtggagttctatttgttgatgcatttaatcctg

SEQ ID NO: 14256 - DNA, 322 bp, Zea mays
  unsure (1)..(322): unsure at all n locations
atcttcttggcttaagcgagcgtagagtttgctcatatcttctntcttgctgctcatcctcatttgagcttccgctatcatttgcattcgccacacaacacatgtgggaattgaaatgggaagacanaacctttggagaggtggattcatcgtttggtctccaccgctcattttattcttcttccttgcaagggttagtatcacaaataccaaaggaagtagaagcacaaaatgaactatcatgtttggactcattaaatntgcttttaattctatgccaaatatcatgcgcatcatggattgattcgtcataattcgatat

SEQ ID NO: 14257 - DNA, 508 bp, Zea mays
  unsure (1)..(508): unsure at all n locations
catgataaatatggttcatgagaaaatgtcagagatagcagtacccatcaagctagccgctttgcagctgctgcacagttggcattgttgaagaatataaggaacgtccgcccacttggcatcaatctattgtaatttggcacgagaactacagtttcaagctgctgtagtatactgagttcacttggcgcacaatgctgcccatctgaatctctaacaagtacatcatgacacattgacagacttggcagtattgcagaacccttctgacatgtgtagcctgcataatctgaacaacggaattcacatttaccattatcacaaacccctccatgtaaactacattngtcatcgcacaccgctgcattaaaaanagcaggatattacttcntgcttacatgaaaaagatatagttcgcanacattgaagatacacgattctttaccacacaagttcaatccattgcccacatgacactgcaaacaaacattctcatgtataatctatg

SEQ ID NO: 14258 - DNA, 475 bp, Zea mays
  unsure (1)..(475): unsure at all n locations
tgcagcttctaagggagaacacgtgatacgttaactaatgtgcaattcgaaatagatagaccttgtgtagctcgtcaagcacgccaacaggtgggaagctctcatcacaccaaanatgtgatgaccacatcaagacctttggagatgcttcacatggacctcttcggacccgtcgcctatctaagtataagaggaagtaagtatggtcttgggtatagtgatgacttttcccgcttcacttgggtattctttttgcaggataaatctgaacaccaatggaccctcaagcgcttnctaaggagagctcanaacgagtntgagctcaaggtgaanaatatacggagcgacaatgggttcgagttcaagaaccttcaagtggaggagtaccttgaggaggaanggatcaagcacgaagtcttcgctccctacacaccacaacanaatggagtggtagagaggaagaacatgacactta

SEQ ID NO: 14259 - DNA, 265 bp, Zea mays
cacaagctcataattgaatggccagagtccgctctaccgccacgggtgagcgcgagggagaagaaactgaagcttctgagactcttcccatctccgaagccatgcaacgatcgggtctagtgacttcgggaaagatccctcatgatgatactgaacaagcgatcgctgaacgagaggaagaagatattgctgaaactgattccgaagatgattaccgcattgccatgccaagcaagccgagccacttggactttggaagatctag

SEQ ID NO: 14260 - DNA, 312 bp, Zea mays
  unsure (1)..(312): unsure at all n locations
gcttcgtattctttaattgtggtctctaaaccctcgattataatttcgttctttttatcttcgaggncttgctgtatttgcaatggcttgcttaacaacatactctgtaaagataaatcttcatcaacaaaattgcttcttcgcacaaagaaaaaaaaagaaaaatttcgcttcatcataagaactttaccttgaagttggaataaaacaaactaccgacgatatgttatcgtcgatagctgctaatatcagcttcgagcttcggaaaatcaacactcttcgatagagtgccgattatcttcgcccctgtgc

SEQ ID NO: 14261 - DNA, 194 bp, Zea mays
  unsure (1)..(194): unsure at all n locations
ctcacaagggagctttcagttacagagccctttatgggttatttttggagagagccttattacaaaccgcctcatgagtattctctattgggacagtaactncacgccagatccgctaggaacatagttcctttggtggtgaacaccaaactcaacaagatgcagaaggtcagcctcagaaacgacacaaacat

SEQ ID NO: 14262 - DNA, 205 bp, Zea mays
  unsure (1)..(205): unsure at all n locations
ctcattntcgggccagacgcaaggccgaacagccatgccgcccgtcgccttgcgcctccgtgccgttnttcctccgttccgccatgcccttcacccaagacatacatattaccttcggtgtctttccacacgcttggacttagcttatttccggggccatgcccgaacctcggttatccgcccctgcgccatgggcgaaccactc

SEQ ID NO: 14263 - DNA, 358 bp, Zea mays
  unsure (1)..(358): unsure at all n locations
agagcacattttacgactaaccaatggtctatttgatatatgtatggtttgtagcgcatgccaagcaagaaagtaagttggcactcatcatccacacaagaacataatgacgacagacaggcctctagagctactccacatggatctattccgctcgattgcttacattagcatccgtgtgagtaaatactcgctagtaattgtggatgactattctcgcttcacttaagtgttctttntgcaggaaaaatcacaaacccaagaactttaaagggattcttgagacaggctcaaaatgagttctgatcgagaatcaaaaagattagaagcgataatgggacggagatcaagaatactc

SEQ ID NO: 14264 - DNA, 330 bp, Zea mays
  unsure (1)..(330): unsure at all n locations
gcttcgctttcttgctccattcttatgatcctgcagctggacgctcattcaaaaattagctttcttttgagccacaggggtcaacacatggcgatatattatctacatgtgcacatgcgcgagaatgaggttcacatgaatttaagtttgaaattacaacctcatgagcaacattaagcatgatatggtcatcaactaattcattatgagaataagatagcataccatattnttcacttagagcaagttnttctaaatgtatcatttctacttactcttaagcatagaaatctcagttctaagtggagcaacatcagataatacatcatg

SEQ ID NO: 14265 - DNA, 407 bp, Zea mays
  unsure (1)..(407): unsure at all n locations
atctgtgataaatcggcggaataaccagccagtccaatgtaacttctgacttgatgtacagtggttggtggtttccactctaanatatccttgaccttgctgggatcaaccgcaatccccttggcagacaatacgtgtcccanaaattggatntcctccagccaaaacgcgcatttgctgaatntagcatatagttgatgttcccttaagcgtgttaatacgatccgcagatgtcgagcatgctcctcttcattcttggaatatatcaagatatcatcaatgaagaaccaccacgaattgtccaactcacgcataaataccgagttcatcagatatgtgaaatgggcaggagcattcgttaatccgaaagacatcaccaaatatttgaacaatccatatcacgtagt

SEQ ID NO: 14266 - DNA, 391 bp, Zea mays
  unsure (1)..(391): unsure at all n locations
acatgtgctaagcggcgatgccacagtcagcccatgctagtcttagcaattaagcatgcatctagaccagcctcctctgttccaaaatcaactaaataaagttggccgtctagtacacccttaaaagctaatgaaccatcacttcttctaaagacagacacatctacatttgtgaataaacagttatatcccatattacaaagttgactcacagacaacaagttatatccaagcgactcaactaagaacacattagaaatagagtgctcggatgaaaatagcaattttcctaaccctttcaccttgccttggttcccatcactgaatatgatngaatctngnggatccttgttcttgacgtaagaagagaacatcctcttctcccccgcat

SEQ ID NO: 14267 - DNA, 235 bp, Zea mays
gtgaggaagttaggtttttactatcggcaaaggaaaggaggttgttcattatttggctgtcttgactcttaaagctaaagagcagaaataattaccctctcgctatattattagaggcggcaaacacgtacacctattttatggatagatataataacacccttgtataaatttcgttttttttttttccctgattttaaaataaatttgaacaaggatttaacagcgagttgag

SEQ ID NO: 14268 - DNA, 458 bp, Zea mays
  unsure (1)..(458): unsure at all n locations
gcttatganatatgagagataagacgaataatcatatgacatcatcaatttatctttttatctcatcatggatgaacaagaaccatattgaattacatttgtaccttcggctcgatagaaggaaaaagtccaaacgtgacgcacgagcgaatacaagtcagcgtgaacaatacggcggtactgctcatctatttataggcacagagcacagcctgtgtaaaattacattcatgcccttcatgtttacaattgacttaaggacaacctatcgaggactagatagccttttcctctttaagtcnggtcctttttctgctactgagcggaagcttacttgcgcgtagcttcggaattgatttgacctttgtcccgatcgtgcttttcatattgtgaacagcttcgttccatgttcgaaggttcctgtatatatatttcacttcggaaacattagtaatcat

SEQ ID NO: 14269 - DNA, 491 bp, Zea mays
  unsure (1)..(491): unsure at all n locations
tagcatactctgtgcacaagcaaccttcgntagaaaacactcttcgtgntaataacaataaanagtcgaagaatagttcttaccttgaanatagaatagaatacactaccgacgatatgcttgcgtcggtagcggctgatgtcggtctcaagcttcgggaaaccaatactctntgatagagtaccgataaccttcgctccagtttgatctcggaggcaggctaacctttcatcgtcaacaccttcgaagagtagtgcccctgtgtgatacccacaggatatggtgtattctcttaactcttctttctcagccttcgacaattcttgcccattaagntntgaaagtaagattttcttcttctgaagcagtttcggctatttccttctccttctcaggtactatagcacgtggttctttggcggctgaacagcttcttctgcggcatgntcagagtatttatcaatatagaaagtgtgtttctaatgtgacct

SEQ ID NO: 14270 - DNA, 353 bp, Zea mays
  unsure (1)..(353): unsure at all n locations
atgttagtcttagcaattaagcatgtgtcgagttcagctctntcaaaatctactaagtatagctgaccctctaacacacccttaaatgctattgaatcatcacttcttctaaagacagtgacacctacatcagtgaanagacagttgtagcccatttgacataattgggaaacggaaagcaagttgtaatctaaagaatcaacatgaaaaacattggaaatagagtggtcaggagatatagcaattntacccatacctttgaccaaaccttggattccatncccgaatgtaatcgctctttgaggatcttggttcttctcatatgaagagaacatacttttctcccctgtcat

SEQ ID NO: 14271 - DNA, 303 bp, Zea mays
  unsure (1)..(303): unsure at all n locations
gatgtgcactcaaagctagtttcgtcatgctcttaaagggaaagatatgttccttgctaatattctaagtgaatcaattctctatatactaatatgtattctgtttacaatatatgtgaagataatgtggatgttcatagctcttcggcatgtcttgaagacattgaagaggaaatgaaggaggatccttgtatcgcttcggatgattagtataaacttaaatttgngagtgtatcctataactcgcttgacatttattattgctatgaactgatgtcttggaaggtgaaactatatatgtat

SEQ ID NO: 14272 - DNA, 407 bp, Zea mays
  unsure (1)..(407): unsure at all n locations
gcttcggtattacagcatgtccgaagatgatggatcaaaccgacttatagatataatgactctntagtccataagggtctgagtcaatgttgtaaaactttatgaggngcatgggtgtaattcttgacaggctgtgccctgtgcctataaatagtgaacagtatccctttactggtcacacattcctgtaattgctaacgcatcactcgagaattattgtttgtcaaggcaaaggtataaatgtacctaaatgttgtattcaaatatcttanattcatataataagatatgtgaatgatgtcatttattcttcaatgtatntatgtttaatgctntatgntttactttaaatttgattatctttataagtttaaatacgaaggtgaaaccttcgtaatattattctc

SEQ ID NO: 14273 - DNA, 230 bp, Zea mays
  unsure (1)..(230): unsure at all n locations
gaccgagccgagggattcccatgcctctgggatacggatacctcactcgtcccttccgcgagaagtaactctcgctcacacaaacatccctgttaccgacagagtccagatgctcgaaacaagaggaaaaaagacgcggcttcgcaagcacggcgagggtgtgttntctggcctcggcggccgcagaaggcacacgctacaagacgatctgatcctgcaggctcgggtct

SEQ ID NO: 14274 - DNA, 362 bp, Zea mays
tagtcctcatgcaaatacaaccactagatgctctatgaggcactaagttttacacagatcaaagtcattgacccctcttatagtacgactatctaacctattaatccagtcaagtatctttttaaactcctgaagaccggcaaaacaaaacctatgtatacctttgccttacttgatcacaaccaatgttatgaatctgcaagattcctttctatgtggtccaccctgcattttattggtcaagaaccgtagtccacaacaattgttataattaccaaaacatactaagggcctagatgatcacacccaatatgacatctcaaattttgatcatgacctactaactctacatgtagattgta

SEQ ID NO: 14275 - DNA, 147 bp, Zea mays
  unsure (1)..(147): unsure at all n locations
tttaaagacagtgacacctacattcagtaatagacagttgtagcccattgacataattgggatacggaaagcannatggtatctaaagaatctacaagaaaaacattggaaatagtatggtcaggtgatatagcaattttacccaat

SEQ ID NO: 14276 - DNA, 367 bp, Zea mays
  unsure (1)..(367): unsure at all n locations
gcaagctggtaaagagagagcacattgtatgactattcaatgnncattnngagaaagacaggatttgtagcgcatgccaggcatganagcaagctggtgcccatcatccacacaagaacattatgacgaccgacaggccgcttgagctanctcacatggatctattcggcccgatagcttacataagcatcggcgggagtaagtactgtctgtaatagtggatgattattctcgcttcacttgggtgatcattttgaggagaaatctcacacccagaaccttaaagggattcttgagacgagctcanaacgagttcggataatgatcaagacaatagaagcgacaacgggacgggagtcaagaactc

SEQ ID NO: 14277 - DNA, 294 bp, Zea mays
  unsure (1)..(294): unsure at all n locations
tgcagctagccattatggagatatggtttttcctggctcatngatgcacttccacttctgaatagtgactggatgctcacaagttctgaatcatcttagtactgaacactaagtgcaattgaagagatgaagatcgatgtgctataagtngacgaatgaatgaactgtgactgtgtggttattgagaaggatagttcgattgagaaataactatcccactgagtctatgcgcgtcacccgggtctgacacagaacgcgcgtgccaccaatggcaccaacgacgcagggtaacga

SEQ ID NO: 14278 - DNA, 255 bp, Zea mays
tgggcctggcgctgtcatcaaacagctcactaagctgagtcaacctggcggacgccaaacgtgtccggctagatagcactccagcttcactgtcagagctttgtgctgtgttgcgtgatgcctgctggaccattaattgggaatactgcctaacatgcggttaccgggtctgacacagaatgcctgtgcaccaatgtgccaaggaacagggaaccgtggtatctccagggtcctgcaaggtcactgagaaaaata

SEQ ID NO: 14279 - DNA, 372 bp, Zea mays
  unsure (1)..(372): unsure at all n locations
agctntatcaaatggacgtgaaaagtgccttcctcaacggaccaatcaaggaagaggtctatgttgagcaacctcccgactttgaagatagtgagtaccctaaccatgtgtataaactctctaaggcgctttatgggctcaagcaagccccaagagcatggtatgaatgccttagagaattccttattgcaaatggattcaaagtcggaaaagccgatcctacactctttaccaaaacacttgaaaatgatttgtttgtatgccaaatttatgttgatgatatcatgtttgggtctactaacgaatctacatgtgaagagtttagtaggatcatacggcgtgtaagattaatagaaagagcacatcggggac

SEQ ID NO: 14280 - DNA, 423 bp, Zea mays
  unsure (1)..(423): unsure at all n locations
agcttatggaagcagnaagactgcttgctccgttccacttccacacccagtcttggagtactacttcactagtcatgcatgcttcggtgcaggttgacgtggacaagagtggcagcattgactacaccgagttcctcactgccatgatgaacaggcataaactggagaaggaggaggatttgttccttgcttttcaacacttcgacaaagacgatagcgggtaaaactagttctgccacatttacatcgttttgcttggttaaactcagctgtggaaaaccaaaaataaaaggtttaatacaattgaaccgagataataacatacatgcataacaaccacaggtacataacatgagacgaactggaacaagccatggcggagtatggtgtgggtgatgaancaagcattaaggaagtgctgga

SEQ ID NO: 14281 - DNA, 349 bp, Zea mays
  unsure (1)..(349): unsure at all n locations
agctaagttatgagtgtttgagatattatgtctgaatctgnccacttatggacagcagagtcttttagtgatgtctatccttacttaaataatgaatcaccttgagatgtttataaatgatatgtagacaattttattagcctttcagaaagtctaggatcaccttgtttggatgtctgaatctttcagtatgaaagtttaaagtcacaagtttgaatctgtccaaatctggacagcgcttgtgtgttaacaccttttgaccttgctaagtgttaatcatgctgtgatgacataccaaagttgtaaagcacttttcaagctttctagaaagtcctagttttactatttt

SEQ ID NO: 14282 - DNA, 192 bp, Zea mays
aagagagacttgcacgctaaaccgtctgctaatcgagccagcagcagcaacctgtggctgcagcccaaattgagggcggctcactgcgattcacactccgcctatgtcagaccgactggccaatacgcttgaccttgtgtagacaacttactgattaacctgggcgatacgctcgggaaagcctagaacacg

SEQ ID NO: 14283 - DNA, 284 bp, Zea mays
  unsure (1)..(284): unsure at all n locations
atagtacacaatattcttgtcaacatagacaatgcggcagatattatatttgccaggctttcaagcaaaagaaagagcccaaagataagattncagaatcagcttttcccctttgtggcttcggaggatagcaagtaatggcattaggaaagctggctatgcccatcacctttggttatgttaacaatacaaggacagaagaagtcatgcttgagaattgtgatatgcagttcccgtacaatgccatcattggaagaggaactctcaccatattcgaagcaatt

SEQ ID NO: 14284 - DNA, 472 bp, Zea mays
  unsure (1)..(472): unsure at all n locations
agctngtgaaggttcttcatcctcacatgtgctaagcggcgatgccacagccagcccatgctagtcttagctattaagcatgcatctagaccggcctcttcttttgcaaaatcaactaaataaaagttgccgtctaatacacccttnaaagctagtgaaccatcacttcttctaaagacagacacatctacatttgtaaatagacagntatatcccatatngcataatngactcacagatagcagattatatccaagagactcaactaanaacacattagatatggagtgctcattangaaatgcaattntacctaaaccttttaccttgccttgattcccatcaccgaatataatngaatcttgggaatctttattcttgacgtaggaggtgaacatcttccttctccccgtcatatgggtggtgcatncgctgtcgataaatcagctttgacccccggatgcataaacct

SEQ ID NO: 14285 - DNA, 200 bp, Zea mays
  unsure (1)..(200): unsure at all n locations
agctngaagccatggtaagtagcatatgctattaatatgcgaattgactcaagcctagctacgggtgcataggtttcaccgaaatccaaaccttcgacttgtgaataccctntggctacgagtcgagctttgntccttgtcaccacaccatgctcatcttgcttggtgcggaagacccatttggttcctacaacattttg

SEQ ID NO: 14286 - DNA, 354 bp, Zea mays
  unsure (1)..(354): unsure at all n locations
aatgcaatatcgcatgtcatattctatgcacgtttaatttacttgttctcttgtatggngtactgtttgtttcctaatatgaatggatggatgtatgtatgtttgcaatcgcatagagaacgattcggttgaggagctagaagaactcgcaggagaagcccctgagcagcagtcggttggtggaggcaagtgtcccttgacctatctctgtcctattcattatttaattcacctcccgctttacacatttatgcctaaggattgactagcttttgtatccatgtccttgttacctatcnntggtggattattattgcttagtcttatgataccgctgtttcccttctcttatct

SEQ ID NO: 14287 - DNA, 461 bp, Zea mays
  unsure (1)..(461): unsure at all n locations
ctgcagcttgagcggcatttgctactacctgcgacaacatatcgncngcagtctggtatattcaaatttcaaggtaaaaatcctgttagtttcttttaattttatgacgaagcacaattttctgatgcaagcttatttctacagagtatgcttctgagttaagcactaaggatgcaacaagacctcgagggacagaaaaacgaaatcataatcgagggctttggaaacaagattaaagactacgaagcttctctagagaaaaaatacttcctgcttcangcaatggagggttcacttgcagaaattcaagccgaaaatgctaaattaagcaggaacttgtccaaaaatcagagagcttcgaacaatataaaaaagaattgcnagacaaatacgaagccgaagcttgacaaaatacaaagctgcagcaatcttttgaagagcttcngaacatgtgtttgaac

SEQ ID NO: 14288 - DNA, 250 bp, Zea mays
  unsure (1)..(250): unsure at all n locations
attgagtggatataagtcgatgtactcgtaagacataaaattttgcaagcactggaaaacgtttgcagccatgctccattcactnatagaaggacaaatgttgttatacttttgacggtttgctgttttagcctaatgaaagctgctttgtagtgcaaggcatccctaagcatcaaataggttgaattccacctaagtgaaacatcaagctgtatgcccttcgatgtatctaaaccacattcggtagcac

SEQ ID NO: 14289 - DNA, 374 bp, Zea mays
  unsure (1)..(374): unsure at all n locations
agctnttccttgtcgtcatcaaccttgacatatatccactctgatttccagcctgctgcccacttgcttcggtagctaattacagggaacttggtagttntccgataggcaaagntatagcaaccaaaattatcgtgcaatccatcttttctagcctttgtttgataatgcagctcgtggaacccgcagaagctgtccgcanatggttccactgcttggcttcggagcgcccagatataaacaataagcctaacgatagcgttaggggtcagctgatgaaaatagataccgaacctcttcagcacctctncaatgatcccatgtagggggaatcttaatccagccctttaaaagctcttgaaaaaacanattca

SEQ ID NO: 14290 - DNA, 443 bp, Zea mays
  unsure (1)..(443): unsure at all n locations
gctgacgagctggagtattatgtttgctgctggactccggtcccactcccacagcattaaattaggtatgatcacattatatccatcactttcacattatcaggaaaaaaatttgtattgttgagctgcctcgacgtgtcaacaacgacgatgcctcgttatcattcaatttatggatgggaagtttatttcttcatagagattaaactctcttattatcaactctctataagccatganattaaatatctacgaaattatggaatgcggntntctagtctagtattgaaaagtgccgtgttcgttcaaattatatttggttctacgttcttgaaaacaacgcaatgaaactatccactcaataagggttaatntaggcgagtaatanatacgtacangtaccaacctctaatggtattatggtcgtatcagtctgtcacacc

SEQ ID NO: 14291 - DNA, 305 bp, Zea mays
ctgtcgatacctgaactaggtccccctactacttatgaagagcagtccccacgcgctatcttagtcgcgtggaaaggagctgacgtgggacaggcatgactcgcccaggctcggcgatactctggctagcaacacacctgaccaccacatgggcggcttcaggccgcacgtgtcagagaagtgatatactcaggcataacagtgagccagaccccatgggaagtgctgacccctgatatacagccggaccttcagtgtcaggaccccacgtgacaactaaccctaaatgggatcgaccgcccatt

SEQ ID NO: 14292 - DNA, 315 bp, Zea mays
ctgcagcttctctcatttagtcagatttgtttaccctctcgtcttgtcgtccctatcctctgcatgtgcagtttctttactaatctttggggcttttctgtacctctgtaccttgaatcactagatctttccatgatgcctatcttaatgcctacctttgaatcatcatctttcccatctcgatttgagaaatgggtttacctatcctaaccttgttgcattctcttcctgtcggtacaatccttgcttagccccatcctttattatgctcatgcccctatcatgcatgtcttattattccccctacctttcgat

SEQ ID NO: 14293 - DNA, 468 bp, Zea mays
  unsure (1)..(468): unsure at all n locations
agcttgtggnttctcatattcattgcaaatattctaccaaactaacgaatcatctattaaagtaatagccacatattcaattntcgctatcacatatacgacatcatgaaaaatattatccattgatacttcacattcattatactcattngcaatattttcatcaaaagaagagaatgatggatatatcgaacctgagggatacaaattatcatcaatgatgtggctctcanaggctntagttaatgcgcacatcatctccttcaaatccagataggagacacactcatcattagtagacttagggcccttattgttggttacttgttcccaattgctatacacagttgaaaacaagggaacataatcattcaaaagatgaccaacctttgtccttaagtagttgtctcttcaaaacaactccttcgaagaatcaaacatcagcgtataaatgaatatataagaaat

SEQ ID NO: 14294 - DNA, 427 bp, Zea mays
  unsure (1)..(427): unsure at all n locations
taatagcaatactctattaagtagattccaattcctctanaccaaacaactcctgactgtattagcaatggaaattacatgttcctaagcgagattggatccaaagatatagaaactatttttttaaaaggattctagaaaaataaaattaggtgtgataagaggatttgatgatttgacacattaaatattaaaaggtaataagagttttattaggaaaaagtttattgtcacagaaaaataataacgtgacagtcttgatattgtataactaaactcttcaatgaaagtagactntacctccgtgtcaagtgcattaagaaaacttggtgaacttagataccccaatgcacgttccaacgctgcataccaattntcaagagacccagtagactgccagatctcagttcacgagcgagtagacaca

SEQ ID NO: 14295 - DNA, 478 bp, Zea mays
  unsure (1)..(478): unsure at all n locations
gtcacctgccgcatgcaagctngtaacagtacatattcagaatgtttattcagcttcagcagaccagccgaagcctatgctcttatgtgaggacatagcacagcanaaagtgttgttaggctctcagttatccgaagagcaggagaaaaccttgataagggttttgttcaataacaaggatgttttcgcatggtcagccaatgatctctgcggagttaatagagatgttattgagcactcgctcaatgttgatccatccttcagacccagaaagcaaacgcttcggaaaatgtcatatgataaggccgaacgagctcgcaacgaagtcaaaagactcctcagtgcaggagttatcagagaagtgaagtacccagaatggctagctaacactgttatggtaaataaggcccaatggcagtggcgaatgtgcattgatttacagatcttaacaaggcttgtccgaaggatgaattccact

SEQ ID NO: 14296 - DNA, 441 bp, Zea mays
  unsure (1)..(441): unsure at all n locations
agcttgcacacataactcatttgaatacctttgtcatatctcctttatatggtatgactaatgtcgttttcaagtctatttcanaccaagtcataggtatattgaaagggaatgggagtcttccggcgaagacaaaggacttcactccgtatcacatacttcgccatcactccgagcaactctctcgtcttttggggagaaatgagcatcaaggaaaaggacttcatccttgggggagagagtaaaagctcaaacgcanaaggacttcgtctttggtataatcttaactcatttctttatgaccaaaggngaagattgcactccaagggctctaatgattccgttnttggcgattcatgccaaanagggggagaaatgagcccaaagcanaaggaccgcaccaccaccaatttcaaaaacttagtgttttcaaagaagtat

SEQ ID NO: 14297 - DNA, 364 bp, Zea mays
  unsure (1)..(364): unsure at all n locations
agcttcagctccatctatgttatggattgcttttgattcagtccaatntccctcggcctttctggcagcttcttgacttccatgaatagcaatgggtccttgatccgaaggtatcttcatgcaaaggtaagcangatgaangattgcttcgaaagcgttgagggtgccacgaccaataattgcattgtaagggtattccatgtcaacaatatcaaacacaacttgctcagttctggtatttgtgatgaatccgaaggtcactggcatggtgatcttgcccagtgctacaatctgtcttccttcgaagccacagagagggtgtgtagcatcatgaatcttatcttctggctcttgcatttgtctg

SEQ ID NO: 14298 - DNA, 238 bp, Zea mays
agtgcgatatgctcagacacaactctaaattcgtccacatcatctgggcatgatgatcccagcgtcatgctgcactggggcctagttaacccgaaggtatgtccagtgtgctctgaactagcttctctttttttcatcaacattaacataaaaccactcagttttccaaccggttgggcatttggtgtggtagctaaccaccagagtcttcatatctttgcggtaagcaaattgtaac

SEQ ID NO: 14299 - DNA, 464 bp, Zea mays
  unsure (1)..(464): unsure at all n locations
agctttatatggacgacggtgtcggactccgtattactggtctgttccaagagaaagaaatttctttaggcctgatatgggaaaggaaatagaagagaaagtttaacgaatagttcataatttgaaggaagcccagcccgaccaatgagttacgcagacaaacgccggatacccttgtactttctagttggagagtatgtctacctgaaagttcaccaatgaacggtgtatcacgttcngggtaaaagggaagcttgcaccccggnatattggtcctttttctatccttgaacaatgtggaccagtagcatacccacttccgttagcccaaacctttgttgcagtacataatgtgttccacgtgtctcaattggagaantgtcttcgggttcccgatcgaaccattgaagtaacagatggttgcttataaccagacttgacatattcagaacattctattcgag

SEQ ID NO: 14300 - DNA, 419 bp, Zea mays
  unsure (1)..(419): unsure at all n locations
ttgtaggtccccggcctcctggtgttttctgtannggctcttatctgttntctatggatccctgaaaacttttaatttggaatgtgagggggctgaattcctctgttaggcaggactcaataaaagaattggtggactcctcccaggttgatgtggtgtgcttgcaagaaacaaaaatgcagaacatctctaggagaaacattctgtctatgttgggagctgatttttctgagtatgtgtacctcccatctgtggnggcaagtggtggtattttgattgcttggaggagacacattggtcacacaggacagacaaaatttcaaaatcacagtatttcggtccagttttgtagggcagaggggcacgctnggtggcttacttgtgtgtatggacctcanggtgaggnggaaaaaattcag

SEQ ID NO: 14301 - DNA, 264 bp, Zea mays
  unsure (1)..(264): unsure at all n locations
catattcgccacccatcatccatggaccaatcataagctgcacatgaaggtccaagagcctagatatgatcttatattgctcgctctctggttcttttatttaacatagttntggctcctaaattattgaacaaccatttattccatatcatttttttatatntataaatctataataatggatagtatgtttgattacaaatctaactataccaattntatattgtattaactataaatactagtcaaattattggatacaaa

SEQ ID NO: 14302 - DNA, 265 bp, Zea mays
gacagtccggtgcgccaccggacactgtccagtgcgccagccacgtcaccaggccgttgggttccgaccgttggagttttgacgagtgggcccgcctggctgtctggtggtgcaccggacaagtcctgtagactgtccggtgtgccacccgcgcgtgctctgctcctctgcgcgcgctggcgcgcatttaatgcgttgcagtcgaccgttggcgcgaagtacacggtgctccgctggctcaccggacatgttccgagaatatagc

SEQ ID NO: 14303 - DNA, 210 bp, Zea mays
gaggtatctgcgaatgacttgcgccaggaacctccatactactagcagttataagacagtgggtctagttcgataaatgacagccctgggactataagacatataggttaaaatgactcacctatttttatatcgggagagggcacccctccattctactagcacgtataagacagagggtccagttcaatagagatagccatgtgacta

SEQ ID NO: 14304 - DNA, 363 bp, Zea mays
  unsure (1)..(363): unsure at all n locations
ctgtcaaactgcttgccgttgtcaactgttagctcggacggtactccgaagcggcaaacaatgtttgctagaagaatttntgggcagtctttgatgttatcgcagaaacagccctcgcttcgatccatttggtgaagtattcgacggctacgaaggcgaacttgaggttcccctcagcggtgggcaggggcccgacgatgtacatgccccagcgctggagaggccatgtatgggcaatcagctttgtatactgcgacgggctgcctgaccgangagaaaacttctggcaggcttcgcaggaccttgtgacccgattggcggcgcagatcattgcgggccagtaaaacccttggcggatcacct

SEQ ID NO: 14305 - DNA, 362 bp, Zea mays
  unsure (1)..(362): unsure at all n locations
tcttaatcatatgtaaccttagcctattcgctaaatacataaattgtgctaggtatgattgtctaacatgcaaatacgtctaacacatcgattagcgagtacgtgactagttcgtaaaactctataatattntatatacttatttaaaatatccataatctatggcattgtgtgggacaataatgttttatagaccgacatgatcatgttccactgatcattgatatagagatatcaaagcaatagcgtagatacatgataaattctatggtgttagattaacccgctctaggatgttgctatgattattatngttaaaatgtgtcatcaagcattttggagtggtatacctaatggatcct

SEQ ID NO: 14306 - DNA, 447 bp, Zea mays
  unsure (1)..(447): unsure at all n locations
agctngngtttacaagagagagagtgggagcgttgttgtatttctgatcttgtatgtggatgacatattattgattgggaatgacattcctatgctggagtccatcaaggcttcactgaaaaagagtttttctatgaaggacttaggggaagcagcatatattntgggcataaggatctatagagataggtcgaagaggcttataggattaagtcaagatacgtacattgacaaggtattgaaacggttcaacatggaacagtccaagaaaggtttcatacctatgtcacatggtaaacaccttagccagatgcaatgtcctgcgacggctaatgagcgagagcgcatgagtaaggtaccatacgcctcagcgattggatcaatcatgtatgccatgataagtacacgcccagatgnttcatacgctataagtgctacgagtagata

SEQ ID NO: 14307 - DNA, 275 bp, Zea mays
atgcttcctcataagctagctgccaagcaaaagctagaatcctaaagatgatatttgagtatccagaatcagtgtttgcaatcgacaaccggatgctcctcacaggccagatattgaagctccatcgcctcgaagagtctgcatcacgaagacttgtagctcacgtaaagctatacccataacacttctaaaccgaatctcgaggtcgaattcattgtaagtggggtagatctgtatcacgcccgaaattcaaatcttgaaatgttctcagactc

SEQ ID NO: 14308 - DNA, 255 bp, Zea mays
agctcgccttcgctgcagtctatcattttatgttatcagggtcttggagcgtgccagtgggaaaatattcacagctgtccaaaagatgctcctcgatgaacaaaaggcagatggaccgatttattaccggatgcagtctgggcgctaaacacaactgagtgcagggagaccgagttcactcctttacgtcttctatacggatcggaggcaatgaccccgcaagaatatagcatgggtccccccgtacagtttcgt

SEQ ID NO: 14309 - DNA, 456 bp, Zea mays
  unsure (1)..(456): unsure at all n locations
agctgtggcaactaataagcatagcataaagcttctagtttaatcaatgtttaggttggtaaagactagtaattgcttactacngtagcccatcaaattatgcatatcataaaatgtaaacttagttatcctgatgattaggatcacaatataaatacagggngaagatgtccacttgccttcctcgcagaaatcttgagattcctcttcgaattgaacctgattttctaccacgagagtgtcttctaatagcacacatgcaaaanaaatttagaattaactcacgttntggaggttataaaacttctataaaactgtcctagagtaattaatcaatactttagaaagtaaataanacaagaaccaatttctttgaggataaaatagtcattatatgaagaaataaagctgcaaggacctaactagggcttctttgaggataaaatagtcattata

SEQ ID NO: 14310 - DNA, 444 bp, Zea mays
agcttgaaagctgtcccagacggctcactcattatcaacctcctgtccacaacactaggcctctcaagagacctgggatccgttccctctctcgcaaagcttgtatcccctactacaagcaccccggtgcaagataatataagcctcatcctccccctgctggaagtagggccttcttagcccaaaccaggataaaccttgtgtttcatcttgcatcaatccatccgggcagggacacgcagcataaaatttactagtcggttgagggtcccccgggtccaaaacaccgacagttggcgcgccaggtaggggagcgctgcgtgttgacaatactttcccgttaagttcaagatggacaatcttcaacagcctcttcagcccggaacggtgctccgctttgggagtctcgagttcatgtccctcgacggcagctacgacagcaac

SEQ ID NO: 14311 - DNA, 360 bp, Zea mays
  unsure (1)..(360): unsure at all n locations
aattctccatatctcgttagcggaaccgtaatcctgctctnaaaaaacttttgaaaaccacacttcatcaactttcggtgtcggagtggtctcttccccagcannaacaaatagttntttctcggcttctcctaagtagcccagcttcatcatcatgggcatatcagcttcagaaacagtagattnttcanaaatccaagtgactaggttttgatgggattaagatactataatcctcttcttcttcttcgtcaataatttcttcctcgatgtcatggtcagtttcgacaacaggtgcaccttcttcaatggctccctctgntcacaactagtcccgatggctcatcacttcngagatcg

SEQ ID NO: 14312 - DNA, 255 bp, Zea mays
  unsure (1)..(255): unsure at all n locations
gtactgtctagttattgtggatgattattctcgcttcacttgggtgttctttttgcaggaaaaatctcatacccaagagaccttanagggattcttgagacgagctcaaaatgagttcggcttaaggatcaagaaaattagaagcgataacgggacggagttcaagaanctctcaaatgaaggcttccttgaggaggagggcatcaagcatgagttctcttcttcctacaccccacaacaaaatggtgtagtgga

SEQ ID NO: 14313 - DNA, 211 bp, Zea mays
  unsure (1)..(211): unsure at all n locations
tgggtgttctttttgcaggataagtctgaaacccaagggaccctcaagcgcttcctcangagagctcaaaatgagtttgagctcaaggtgaagaagataaggagcgacaacgggtccgagttcaagaacctttcagtggaggaattccttgaggaggaagggatcaagcacgagttcttcgctccgacacaccacagcaaaatggtgtggt

SEQ ID NO: 14314 - DNA, 423 bp, Zea mays
  unsure (1)..(423): unsure at all n locations
ggggacacgtccaccgtcaaaattgttaaaatctgcatactctattgctttagcaagcataaccatgcgatcagcccggaagttgatagtgacaactgcatcaccatctaatacaggcccaacagctctgccgctgtcatcaactatcacaaatggnggcaagtattggacattagcattgggctgtgctctcagtgttttcacagcctcaagtgcacttttgaatatgtagggtgcttctccgagcacctgagcataccagccacgtttaaccacatcccagtcattctggaaggtattaaacacaacaaaactgtaagccaagttgctagacaatgaacactgatgcttgaatacgacaagaaacattcacctcataacggtccatggtaacatacatccttgcaccaccagaagcaatct

SEQ ID NO: 14315 - DNA, 350 bp, Zea mays
  unsure (1)..(350): unsure at all n locations
atatggagacttgaagatttgaaatagtagatagagtttttgttgtcaaagctttattgctctttgtcaaagttgcttcttgggngagaagtatngattatgggaaatagggggagtttttgaaatctttgatcaatctcttttggaatgactctctttatacttcaacatgtgtgtttgacttaaagatagagatttgagttngatttgcanaaacaaaccaagtggtggcaaaggatgatccatatatgccaaaatngaataaaaccaatttgagtttttatttgaagtgaatttgcacttgttccacttgcctttatgtgtgttgcataaatcaccaaaagggggag

SEQ ID NO: 14316 - DNA, 469 bp, Zea mays
  unsure (1)..(469): unsure at all n locations
agcttgagcagtaactggctgcgtctgtaactcttggaaactggngatcagcatgtccttcagcttctaccatgatgtgattgttcctggccgaagagaggagtaccaaagttgtgcaacattcttgactgccataacgaaggacttcgccatgactgcagtattgccccaatatgaagatatggttgcttcgtagctcatccaaaactgcttcggatcagagtgcccatcatacatggngagctagggtggcttgtatgatggcgactgtcacacccggttttggaaggcaaaccgaatgcgaaccatgtatgtgccangatcagaaactcacgtacacagcgattacataattggacatcatcacacaatgctcgatataaatagcggagaggtacttgattacatcaagatgtccaagacatccacagagtctattacgtaaccattggtcaacataattatcaaa

SEQ ID NO: 14317 - DNA, 205 bp, Zea mays
  unsure (1)..(205): unsure at all n locations
agctanccttgatgtagtcctattctaatctgtaagtcactngtctccattacttattcgaacactagtccttaacgatcaaagtactccgttggaactttatgttttgctaaagcccaccacataacagtcctttgtatttttgcataaaccctttcccactcaatgaaaaccatgtgtacgtccttctgttccctataataca

SEQ ID NO: 14318 - DNA, 348 bp, Zea mays
  unsure (1)..(348): unsure at all n locations
cacttganacgaaaacaatatggattaatgataatttttcattcgacaaagcacattatacagtattgtaacagtcttctatgggggctccatatactagatacattaccanaacctagggaacattgaaccctagattgtacatgagcatattgatacctttgcagactggttgcaacaacatctgatagccaatgagggtataggtaagcaactaacatggttagctaggggatccatcttcctcgatcttgacattctaaggatacgagataagtggatacacattntacacaagagtgcaagacaacaagagcactaaccagagtagtggtgttcgtatagatg

SEQ ID NO: 14319 - DNA, 283 bp, Zea mays
  unsure (1)..(283): unsure at all n locations
caacaagtcatccctcttccccaacgagcatcacacatgccttatggcaagagagaagaaagtatgtaatcaaaacagtgtcacttatgattcttccagtgatgatgaatctagtgatgatgaaatagattactctagttngttcaagggattggatagaactaaagtagataaaattaatgaattgattgatgccttgaatgaaaaagatagactcttagaaaaacaagaggaccttntgtatgaagagcatgacaaatttgtagaggcacaaaaatcttat

SEQ ID NO: 14320 - DNA, 360 bp, Zea mays
  unsure (1)..(360): unsure at all n locations
agcttggaaatgtacatttttttttggctatataccatcaaatatcacagtattctatatgtcaggacggcaaaaccttccattccagagagacctgaattgaatattatgagggcgactataacatatcataaaaatctatatgactcttagaaacaanttatacgatattgtaaatggtttgtttgacatcaatttaatctatttgggtcgngcatattataataatattatatatttatatcgtcaatataatattaactgtaacacgagtttttcatatcatagtgatatttgtcgttccgtatatatatttcatactatttttttactctcgtggctcggtgactgaacgagctc

SEQ ID NO: 14321 - DNA, 316 bp, Zea mays
  unsure (1)..(316): unsure at all n locations
atgatcttcagacgaaggtcatgagggacataccttcatcatttccatatgtaagaatatgaacagagatatagaagaagacatgaataattatatcaagccatcattntattcatatgatcattatatgattatgaacaaacattaataatatcaaattacattngtaccttcagctcgacagaaggtaaaaattcaagagtgacgtgcgagcgattacaagtcagcgtgaatagtacggtgttactgttcatctatttatagatacatgactcagcttgagtnaaaatacattcgtgtctctgacatttactat

SEQ ID NO: 14322 - DNA, 315 bp, Zea mays
  unsure (1)..(315): unsure at all n locations
gcaagctggaagatcttatgcaacanacttcctttatctccttaaagcactgcggacctgaacagggtctgcacaccgtttaaagcaaccgatgcaacattcgtgcagatcacaatacgacacgcagtcatacatggcatatacacgtgtaaatatataaaaaaggatatagcgatacatataactgaactcactagcttacataataaaggcgaaaaacgaataaccgcatacagcgcgatgggtgcgtaccacctaactgcgatttgactctgagctctcatgctatcttctacaggtgatgtacactggggg

SEQ ID NO: 14323 - DNA, 390 bp, Zea mays
  unsure (1)..(390): unsure at all n locations
taagacacccccgctgcaactaaagcctggtagtagcatatctaatttatgcgaatgactcaagctagctacggtgcataggttcaccgaatccaaccttcgactngngagtatcctttgccacaagtcgagccttgttccttgtcaccacaccatgctcatctngcttgttgcggaagacccatntggttcctacaacagtttgattatgacgtggaaccaaatgccatacctcatttctagtgaaagtgttgagctcctctngcattgccaccacccaatccgaatcttgtagtgcttcctctaccctgtgtggctcaatagaggaaacaaacgagtaattntcacaaaaatgtgcaacacgagatcgtgtagntaccccttatgaat

SEQ ID NO: 14324 - DNA, 343 bp, Zea mays
  unsure (1)..(343): unsure at all n locations
aggagcgcaatcacagcaaagaatgtgatgaccacttcaagacccctggagctgctgcatatggacctcttcagacccgtcgcctatctaagcatagggggaagtaagtatggtctagttattggtgatgacttttcccgcttcacttgggtgttctttttgcaggataagtctganacccaagggaccctcaagcgcttcctcaggagggctcanaatgagtttgagctcaaagtgaaaaagataaggagcgacaacaggtccgagttcaagaaccnttcagtggaggagttcctttgagaagaagggatcaagcacgagttcttcgcttcctacacaccac

SEQ ID NO: 14325 - DNA, 150 bp, Zea mays
taagcaccgcggctgcagcttaccaaaaactaaataaattccttatcagcccttgatctatgaacccttggagaaattcagatttctgaatttctgaatttcagacctcttctcaaagatcatttgtgttctctgttttcaaaactcaaa

SEQ ID NO: 14326 - DNA, 261 bp, Zea mays
accttcggcccaacagcagagttcttttcggtctccagcgcctatgggcagaggcgccaggggcttctgtggaaggtttggagaccagccaagaaaaatatattgcctattctgtggtgaagacaagggccatactaccatgatgtgccatgttaccatccagaagcagaaggaaatagcggaagcagcagcgcaacagagtcagccgaagcaggtcatgcatacttgttcatatcactcaccttatattccagaatatgt

SEQ ID NO: 14327 - DNA, 419 bp, Zea mays
  unsure (1)..(419): unsure at all n locations
agcttcggcagctntatttgcttcttcttccttatcncctggcgcncaatcagcagtgaagtctgctaacgcctgggactgaattgaggatctatgcacatagtcaatactgaattcgttaggctccgcagcccactttccaaatcttccaggagcttctctggtcctcataatatccttcagaggttgtgatgaaggaaaaattatgtggtatgcttgaaaataatgtcgaagctttctggaggccattaacatagcatacaacaccttctctaattctatatagnntttctttgataaacttagaacttcagagacaaagtatactggggcttgggcttttaattgtccttcaagcttctcctgtacaagcgccacactcactgcagagtgcgaaactgccacatacaatagtaatg

SEQ ID NO: 14328 - DNA, 359 bp, Zea mays
  unsure (1)..(359): unsure at all n locations
acgacgaaagtgtttctgatgaaggttgntttgcacagagtatgctactaagtaaagcccttgaggatgcaacagggacctcgaagataaaaacacatgaggttataattgaaggcttagagagcanaataaaagattatgaagctgcccttgaaaagaaagattntgaacttcaaacaatggagggttcactggcagaagcccaagccaaaattgccagattaaacagtgaactcctcacgaagttagaaagcttcgaacaagaaaagaagaattttgatgcgaagtttgaagctgaagtcgaaaatagttcgaattcgcagaaatcattgagggagcttcangataaatgtctagac

SEQ ID NO: 14329 - DNA, 463 bp, Zea mays
  unsure (1)..(463): unsure at all n locations
cgcggctgcaagcttttcacacgcgcgcgtggattcttgtaaaggtgagcaatgggtctctccttagttgtctttgcttcttgttcccacacaatttctttgtaaccctgcagcttgatgcttattcaaacattgtctttcttttgaacaacaggggttagcacatggtgataaattatccaaatgcgtacttgtgcaagaatgaggttcacatgagttaaaactagtaattactacttcatgagcaatatcaagcatgatatggtcatcaactagtttattatgagaatatgacaacatatcatactcttcacctagagcaagcttttctaaatttagaatttctacttgcctctcaagcatggtgttttccattntaagttgagcaacacaagataaagcatcatcattatttctttgcttcaaataaaatgaatcatactgttggaccaaatcatcatga

SEQ ID NO: 14330 - DNA, 196 bp, Zea mays
  unsure (1)..(196): unsure at all n locations
aaaaatgcacttagcccccttcgatacagtgcattcccaatgagggtgtagtgggctcactgnctggcgatgcattctgctgcagctttgncatctgggctctcttcattctttatatatctgatgatgggctcccttcagtcattagagtctgactctagctggctcaaaacgttgcactcttctacttgatctg

SEQ ID NO: 14331 - DNA, 167 bp, Zea mays
  unsure (1)..(167): unsure at all n locations
atgctgngtggagtattgcaacgaaggcattgagcatccctcgaccaatgattgcattgtatgggtactccatatcananatatcaaagagaacttgctctgtcctttgtgtgtaacatatccgaaggtgactagcatngttatcttaccaagtgccacaatctgtc

SEQ ID NO: 14332 - DNA, 315 bp, Zea mays
  unsure (1)..(315): unsure at all n locations
aagaggacgaagntatcgttttcaaaagcttcttcagagcaagacttctngttcccttanatgacatgataggagaagttttaaagaactttgagatataccttcatcaattgacactcaatgctattggtaggctcattgtttttatatgggctctccgaagtcagggtatggacgctaatgccgaagctttntgccgggtacatgaactgcactatcatactaaggctcaggcagatggtcttcataagaactttggctgctacaactgtgcatatagaanagatacaaaggcttcagtgattgtctatcaca

SEQ ID NO: 14333 - DNA, 176 bp, Zea mays
  unsure (1)..(176): unsure at all n locations
ggtataatcttaactacttattatgacaaggggaagttgacttcagggcttatgatccgttttggcgatcatgccaanagggggagaaatgagcccaaagcaaaaggaccgcaccaccaccaccaaattcaaaaacttagtgctttccaaaagtatntatcattcggtatcctatt

SEQ ID NO: 14334 - DNA, 381 bp, Zea mays
  unsure (1)..(381): unsure at all n locations
tgcaaccttcgggacaagatagtgcgtggcaatgatgatgagttatctttcagangctcttnttgatgttatatcagtcgacttctttttcatctgctccatggggcattacgaacaatgaggtactaatgactttcaacatggcccggatggctgatattgactggtgtcaactactttatactgatttgtgtgatgcttgcagtcgttggcacanatggaacaaaacatacattacaacaacaatatatggatgttcactcattgttctagtaagtaattctttgttaccaagcatatatatatgatatgcaaatatttggtttggatatatntttttgcattctttattggtcaggtatactatcttgatcacttaca

SEQ ID NO: 14335 - DNA, 369 bp, Zea mays
  unsure (1)..(369): unsure at all n locations
cctgatgcatataaggaagaagggtccacatgcactattctctgtggcatagcaaaatcgagctcgatgtccttgaagattgatcgagataatattagtcagtactgaatttaattttaatgacaacgttgtaatgggtaggataataagggatatgttacaggttgtttgtttcttggatgaatatgctgctgcatanggttaggcctgaaaggagaaacagaataagattggttttggagctctccttccctcatctctccatgggattagaatatatataactttgtgaagttatatggaaagcaatagatattgttatttnctctcttctcttctcttcctctctctcctctctatgccatatta

SEQ ID NO: 14336 - DNA, 363 bp, Zea mays
  unsure (1)..(363): unsure at all n locations
gggataaaattgtcaagataagatagactacatgatgtagattaaaagtttgtttgatgttaggtgagaatagatagaatattcaattaatcatgactatattggttgagttagctcatggttgagttggtctaatgtgctaagttaacacctggctagaagggtccaagtactactagtctgtttaagcagaccacattggnatggatcacactagattagatcacattagattctatgattctattcaagaatatcattaatttaagcatatcaagctgactttatctntatgaaattctagtatatattttttctaagtgaacttncaataatatttttatacctcacattttcttgcca

SEQ ID NO: 14337 - DNA, 390 bp, Zea mays
agcttgtgctggacaagctctgtacttaccgttgtatgcgaagctgccacatattataacagaggagcccctggcgtccgtggagttaatgttgtgagatctatcaaatactgtgtcagctcttcaaaagccttctgctggattggtccccattgaaagacttccgctgacttcagtacttcgaagaatggtaagttgtcttctgctgatctggatatgaatctattgagagatgccaaccttcctgtcaatcttttgagccccctctatgttgttggtggctccattctaagtataacttcaattctacttggattcacttcaattcccactgtttaaacccagcgtccaataaatttgtccttctctctcccaagactcattttcttg

SEQ ID NO: 14338 - DNA, 153 bp, Zea mays
  unsure (1)..(153): unsure at all n locations
ctaataaaggttgccgtctagtacacccttanaagctagtgaaccatcacatcttctanagacagacacatctacatttggtaatagacaattatatcccatattacataattgactgacagagagtaattatantcaagagacnntcactaa

SEQ ID NO: 14339 - DNA, 395 bp, Zea mays
  unsure (1)..(395): unsure at all n locations
agcactgagctgcgcttgcaaagacctaatatccttgatgcttctctgctgataatcattcttcacataagacattctgtcatcaatcccggccatctttccgaaagttggtactgacaacttgcccgaccgagaacaagctgagcagcaaagtgtatggactgttcttgcccaagcttgttctatatattatgacatacaaactttgcgtggcttaaacctgctcctgcgccaacaaatttacctatatgctcggagaatgaaaaaactcaaattcaccttacacactgctaggatcatcacttaaaacttcgcacaatctttttaggggacatnttcctctccctcaagacaacgaaactctttataacaaattttgtatatacaacgaggtg

SEQ ID NO: 14340 - DNA, 261 bp, Zea mays
  unsure (1)..(261): unsure at all n locations
tgcaagctngctagcgcaatctgaaatccgcgatcctcatccaattccggtcgacggcttataaattgcgcccgagttcttgcttttcaccacatcccgcacctcagtgactgagcaatcgactcaatttcattggagcactcccgcagcccccaaataccctttctccctggtcttaactccggcgtggtcagcgctcttcgggttaataacttctcaattgctccctggtctagctcatttgtagcctctattactctc

SEQ ID NO: 14341 - DNA, 306 bp, Zea mays
  unsure (1)..(306): unsure at all n locations
ttgtctttgatggagtcaagcatgtctttgtcttgcaagatttggcattgtttgcgagggttatagttcgttatactttaaaccacantaacataaagcgaccaataggacgacatgatatatgttatttatcaaagcagaattcaagagcatgctaggtacttattcgttcgtccattcaattcaacacatggatgcagatcaaatgtgccacgaatatttcactgtataatagcacataaagccacgaagaattatctctctttctgatcttgtataagaaatagtctagaatattctgctatc

SEQ ID NO: 14342 - DNA, 356 bp, Zea mays
  unsure (1)..(356): unsure at all n locations
gctngaagccatggtagtagcatttgcaataatatactaattgactcaagcctagctacgggtcataagttcatgaaagccaaaccttcgacttgtgaataacctcttggctacaagtcgggcttttttttcttgtcacaacaccatgctcatcttgcttgttgcggaatacccacttggtacctacaacattntgattaggacgtggaactaaatgccatacctcattcctcatgaagttagtgagttcctcttgcattgtcagcacccaatccagatctcttagtgcatcctccaccctgtatgactcaatagaggaaacanaagagttatgttcacacaaatgagcaactcga

SEQ ID NO: 14343 - DNA, 256 bp, Zea mays
  unsure (1)..(256): unsure at all n locations
cactcttgacggccatgacanaagactttgccatgactgcagtattgccaccatacgaagatatggntgcttcatagctcatcaagaattgcttcangtctgaatgaccgtcgtacatggggagctggngtggcttgtagactanggccatggtgtagcctgcagttctgttgatagaggagaagcatcatcaaaagcaaaatttcatgatggaaatcttcataccagtcgtcctcgttgtagaagcccttctgat

SEQ ID NO: 14344 - DNA, 291 bp, Zea mays
tatgttcaccttctccattgcagggatggtgttgacccctactctcttgagagtgccctgcagcctcttgtcgtccgtggtgaccgtcttgtgtacagccttcttcttctgaaacccaagctattttctaatcaccactggctcgcaccacatatgacacaaacatgcagagccgactgtcagaacactacctgccatgggccttgccgcgggcgacggcccggcatctcatgacctctcttgtcatctgcgacaaacggacggaccaccagtcgtcaacggacatgacac

SEQ ID NO: 14345 - DNA, 183 bp, Zea mays
tgtagcgcatgccaagcacgaaagcaagttggcactcatcatccgcataagaacataatgacgaccgacaggccactggagcttctgcacatggatctattcaggccgatcgcttaactatgcatcggcgggagtaagtactgtcttgttattgtggatgaatattctcgcttcacttgggta

SEQ ID NO: 14346 - DNA, 265 bp, Zea mays
agctgcaactgactgatgcctacttcatggctattttatctttagctgcacacagcttctttgctgctgctcatcctcattagagattccgctatcatttgcattagccacacaacacatgtgggaattgaaatgggaagacacacttttcggagaggtggattcatcgtatggtctccaccgttcattatcttcttacttgcaagggttagtatcacatataccaaaggaagtagaagcacagaatgaactatcatgtttggac

SEQ ID NO: 14347 - DNA, 438 bp, Zea mays
  unsure (1)..(438): unsure at all n locations
gcttcttctccttctacttcctgcattcagcaactcgccttattntctgctcgtcttcacgttggtgctcggcagctagctcctctcgtctcttctcaatcctctctttgtcctctgcatnccactttttaagattatccaaccacttcttgtctttctctgatatttctgtggcaatccactgctcaaaatcacatagtggtggaggagtctacaaaacagtcaattattagtatgcaaaaaaccattaccattaaattgtgaacatattataagactattctcaccattagattcatccgacgttgaacaatacttggctcatatgcaangttagcacacattcaatacctctgtcgataagtctcatgatcctcagacttatcaatcttancaggatcaccacanatacacatatgcactggaacaccactttgc

SEQ ID NO: 14348 - DNA, 275 bp, Zea mays
  unsure (1)..(275): unsure at all n locations
gcttgtcttagcaatgaagcatgcatctagaccggcctcctctgttgcacaatcaactaaataaagtttgccgtctagtacaccattnaaagctaatgaaccatcacttcttctaaagacagacacatctacatttgtgaatatacagttatatcccatattacanagttgacttacagacaacaagttatatccaagcgactcaactaagaacacattagaaatagagtgctcggatgagatagcaatttttcctaaacctttcaccttgcctt

SEQ ID NO: 14349 - DNA, 289 bp, Zea mays
  unsure (1)..(289): unsure at all n locations
gtggcactcatcatccacacaagaacataatgaccactgacaagccactggaactactccacatggatctattcggcccgatagcttacataagcatctgtgggagtaagtattatctagtaattgtggatgacaatactcgcttcacttgggtattctttntgcaggaaaaatcacataccccaagaaaccttanangggattcttaagactggctcgaacgagttcggattaaagatcaacaagataagatgcgacaatgggacagagttcaagaactctcaaatcg

SEQ ID NO: 14350 - DNA, 107 bp, Zea mays
gccactgaaatggcacaagatatactctcaatgccagctcctatttatatgcccaacgccccacggtttggtgggtcctgcatgtcagtgtcattcgctattctaac

SEQ ID NO: 14351 - DNA, 379 bp, Zea mays
  unsure (1)..(379): unsure at all n locations
tgcagctngcgccttttattaattggtacattgactttcgccattcacccctagtgcgcaagtatgacagtgatggttttcttccaacccacttctcataaagggatttctcttctttgcccataggaattctattcagaacatgacatgaaggcaggactgccttccncaccatgacttagataaaccacaagtgtctaacatggcattcaccagatcagtcaacgtacgggttntcctttcagcaatcccgtttaattcgggtgaatagggaggcgtcctctcatgaataatgccatgttctgtacaaaaatcatcacagactntgggaaagacttcgccaccacgatctgatctaagacgttngatctttctctct

SEQ ID NO: 14352 - DNA, 310 bp, Zea mays
ccaagactcgctcacttacggcacccggtgacctacttttaggtactagccgcgaccactaataagaaagccgatctaacacgtcgcgcagggcacgaggcgagccgccgacgtttggaagaacgggttgggacagacgagggaataactggcgggattgaagggtgataaccctgtaaaccatcggagatcaggcgaccaccgtatgggatgtaagggcggaaatctggcgtcactctcttgtgtaataaacgctggcgcaatgacccgcacggatctagtaaataccaacctgtctctgataccacag

SEQ ID NO: 14353 - DNA, 316 bp, Zea mays
  unsure (1)..(316): unsure at all n locations
cacgcagctcaccaatatnaccttaaaccactatgcattttgtttgcactccaacacgcagatattttatcattctacatctggacaaatacatcgtatatgcatgactatgtacacaaatatacacatatacaactggatagtatnaccttgtcttcctcaacatcactaacatctggtgactcattacatcccataatctggctctaatcaacatagaacgccatcgagctcatccaacacattcatcgccttaacgtaccctgcgtttgacatacacgcctggcgaactactatcaatgtttcgttaacaaca

SEQ ID NO: 14354 - DNA, 359 bp, Zea mays
  unsure (1)..(359): unsure at all n locations
ctacattgatagagtgttcaatgacatctctgttgacaccacaaagatcatttggtgaccaagcataaacatccttgttgttgaacagaaantttaacagagctttctcttgtcatcaaacagttgagacccaaacaacaccttctgctcggctatgtcttcacacagaagcatagactctggttgatccgctgaagcagctttggctcttatatgtttattctattgatgagcttcgacttcatctatattattgatgggctttgaatctgccaattctcttggccctttagcaacctctgacttcatgcacaggaaaggacctggcaatggatcttatgctaatatctgatgggatc

SEQ ID NO: 14355 - DNA, 295 bp, Zea mays
  unsure (1)..(295): unsure at all n locations
agctgtggagattcttcatcccaacgtgggctagtcggctatgccagagccaacccatattagtcttagcagataagcaagtatcaagctcagctctattaaaatcaactaagtatagctgacgctctaatactcccttagatgctactgaatcatcacttcttctanagacagtaacacctatatccgtaaaaagacagttgtagcccattttgcataattgagaaacagaaagcatnatgtactctaaagaatctacaagaaaaacattggaaatagaatgggcaggatatat

SEQ ID NO: 14356 - DNA, 365 bp, Zea mays
  unsure (1)..(365): unsure at all n locations
gcttcgctttgcgctctcgctccctgtagaagagtgagcatgatcgccttatcttctaagcttagatgagcgtanagttgcatgacgcttctttcatcctcctcatcctcatttgtgcttccactatcattttcattagtcacacaacatatgtgggaatcgaaattggaagacatacactttggagagatggattcatcggttggtctccatcgttcattttcttcttacttcacaggggtagtttcacaacgaccaaaggaagtagaagcaccaaatgaaccatcatggtttgactcatcataattaattttaattctagtccanatatcatgcgcgtcacgaatagattcattataattcat

SEQ ID NO: 14357 - DNA, 184 bp, Zea mays
acaagtttgaggtcagctatgttctcattaaaatcaactaagtatagctgaccctctaacagctccttaaatgctactgaatcaccacttattctaaagacagtaacacctaaatccgtaatagacagttgtagcccattttgcataattgagatactgaaagcaaattggtatattaagaatc

SEQ ID NO: 14358 - DNA, 338 bp, Zea mays
  unsure (1)..(338): unsure at all n locations
acttatcaaaacagctgcatctaccagcacatctactatcaaccatacctgtaacctggccggtcgcgtgctggggactggatatgaatggacctttcaagaaagctcaaggaggatacactcacgtactggttactatcgacaaattcactaagtggatagaagtcanacccatcgcttctctaacttcaactaaggcagtggaattcatacaggacataatattcanggtcaggataccgaatagcatcataaccgacctaggatccaatttcacaagctcagagttcttcgatttctgtgaacaaaacaatcatttagatcaaatatgcctcggt

SEQ ID NO: 14359 - DNA, 329 bp, Zea mays
gctcactttctaatggggaaggctcgtggatacaattatgagctacacaaagctgcatttttcattgaaaagaagaagagactggacaagtgaatagcatatcccggggcttgtgagcatttaccacgatctcaaacaaatggatacagcagcctgaaaacagtggaaggatgctgcggtataatattctatagcatatttatcatgccagaaaaagagccaatccaactgtcttgattagaaacaagactatttagaattgccctgggaataactgataatgccagcaactacatgaacagttggtgacacattttgtgacatcattc

SEQ ID NO: 14360 - DNA, 244 bp, Zea mays
ctgagcatcagctggacgctgaccttattgcctcatattttatagcccatacttggtctagagcttttccagggtgatttaaatcaactccaccccgcccacgttgttgcgctggaactgcatggatagggactgcgtctgacaatttggattggaatatgcgggacctggttgacattgctaagaaagtctgacacaatctcacagatctggttgtgctgaggcctcaatgacagcacgcata

SEQ ID NO: 14361 - DNA, 236 bp, Zea mays
tatatgcataaccgtattattatatgctactttactacacttaatgcctggtggataggaatgtgcacttaagtgtaggagatgcttgaaacccctagctgcatgaacttatgattcctttttgagatgcttatcaggatctcagtagaagtcgagtgattttctagcactcgcgcgaggtcaggaattgaatgtattcatcttgataatgggatctatgttggtctatggacttg

SEQ ID NO: 14362 - DNA, 266 bp, Zea mays
  unsure (1)..(266): unsure at all n locations
tgagcccctgtcatccaatcagcgatgaagtctaccaacgcctgtgactaaattgaggatctatgtacataatcaatggtgaattcattaagttctgcagcccattttncaatcctttcaatagcttctttgttcctcataatggccttcagaggctgtgacgaaggaaaaattatgccatatgcttgataataatgccaaagctttctggaggccattaacacagcatacaacaccttctccaatcctgtataattttctttgac

SEQ ID NO: 14363 - DNA, 239 bp, Zea mays
  unsure (1)..(239): unsure at all n locations
acgcatgccactagcctgatggaccattgtaagtacaatgctatttttgtaattaaaagctattaacagaagagagaggaggatgtctttgatacttactcacctatagctcgattgaccacaatncatgtgctactttcattggctgcctctcatggtcttctctgccataatatggatggtaagatagcattcctaaatggagaccttatgaggaaatttacatggagcacccagct

SEQ ID NO: 14364 - DNA, 286 bp, Zea mays
  unsure (1)..(286): unsure at all n locations
tgagtgccggagtgatcatataggtaacatattcaaagtggctcgccaatactcgtatggtgaagaacgctaatggaaagtagagattgtgcattgattttacagatcttaataaagcatgtccgaacgatgagttctctatatccaagatagactctcttgtggatgcagcatctacctcagagctaatgaggctattggattgtattcangctaccatcaaatttggatgaagaaagaacatgaacccatgacaagctccataaccccatgtggacctactact

SEQ ID NO: 14365 - DNA, 284 bp, Zea mays
  unsure (1)..(284): unsure at all n locations
tgcgagcttaaaacaaaggagagaatgcacactcctatggatgattcggtatttntaccaaaggatccacaagcgctcaagattctgactaatcctcgttggtgcccctatgccaaggaaagcccatgccaggtccaagtacacagtccagtaacttcgtagagagccacaggccttctccacgtgccagtggtacattgctttcgggctcctctcggatgctctccaccatcttcaatcgagtttccgggcaaaacacagnggacctcttccctctggtacat

SEQ ID NO: 14366 - DNA, 436 bp, Zea mays
  unsure (1)..(436): unsure at all n locations
agtattctcatgtctcataatactcatatgggatcatttacatgtccntctcagtggttgattaaaccatatttcatatcttaaagctcctatggtgctataaatgcatatgttggcaaaatatatcctttacctatgcataagggaagttagtctaatgaaactaaatcttgcatctttctcatgtgtttttcctaagtagagaatcttcgtcagggggaatatttcttcgtctatgacanacggtgagaatattctttcaaagtgagaactcgttatgggagtagatttttagagggcatactnntttgcttctattgctttaatgcttctttcggggtgagccaagggagacttttggctcaagctgaaattataacccaacccaccattattttaatcttgtctcagtgtttgcttcagatttggctaaaag

SEQ ID NO: 14367 - DNA, 164 bp, Zea mays
atatcaaattatcaacattcatcttagaactaacgtctctgattgctcgggtgtatttactaataacatctttcaccgcttttgatgagtgtctctgcaaaatatatagatcaaacagagatgctagacttggaagagtgatgatgatttattatgtgaactat

SEQ ID NO: 14368 - DNA, 331 bp, Zea mays
  unsure (1)..(331): unsure at all n locations
tttgatatgcatttacacctaatcatacatctcgtggatcaagataaaatattatggccactatatttacatcatatgtttcagttggagcgatacctgtgagtattaaaaggttatgtgcgaaatcgcgctcacccagagggttcaatcatgganggatacactacagaagaagtgattgagagctgtatataatacatcagtgaccgaagaatgatatgtgtgcattgtcctatacatgatggtaactatgtgggagagggagaatgggcaaaaaactttcgcgttgaggatacaagctagtacattggctcatggtagtgtctacaca

SEQ ID NO: 14369 - DNA, 396 bp, Zea mays
  unsure (1)..(396): unsure at all n locations
gcttatgaagattcttcattccaacatgggctagttggcggtgtcagagccaacccaagttagtcttagcaaccaagcgagtgtggagatcagctctatcacaatctaccaagtatagttgaccctctaacactcccttatatgctattgaatcatcacttcttctaaagacagtgacacctacatcagtgaatagacaggtgtagcccatttgacataattgagaaacggaaagcaaatggtaatctaatgaatcaacatgacaaacattggatatggaatgggcaggtgaaatagcaatntacccaaacctttgccaaaccttgagttcatccccaatgtgagcgctcttgggacttggtttctcataaaagagaaatcttcttttcccgtcat

SEQ ID NO: 14370 - DNA, 421 bp, Zea mays
  unsure (1)..(421): unsure at all n locations
gtcacctgccggtgagctactatgagggaaacctttaattgccctttatttatgggtgacaattatctgggacaaacagaaatgtgttggcttttacacaataaactaaaatagatgtgctcaaaaactattgtcttggttgccctctctgggaatctgctgatgaagcacacttgatgtcccctggcaagtgggcaagcaatggnggccaataaatatgctagtctacttaacaaaatgacatatgatgattcgtctgattccaagatacatctcacagacagacaaaagaatgtgttctgacaatgttaggaccgacttactaattctatataataagtctgtgcagcacaaccataaagtatgttttggttctgattgacacatgaaattcccacaaaataatatcatgcaaaaagat

SEQ ID NO: 14371 - DNA, 393 bp, Zea mays
  unsure (1)..(393): unsure at all n locations
gctgatccatttatcactctggcccttattttctcccccttgtgcattaagcaccaatacgggatcaatcttggcccctctaccccattgcctcacaaaaatcttcaattaagatcacatggcaataagagttcatgagatgaacatggaattatgtaccctctcatcggagtgcaagggaagtctttcatgggccaagtacaccttttccctttcaattctcttcgagataagtcaacaaactcagcatatggtagtctcaagggtcaagtgtacacatctnctctaaactgtgcatacttgaacgacttggagccaggagtgttgacacttggcacacataacacaaatgcaatgacatgatcaagctaaccatgttgctacatcatccag

SEQ ID NO: 14372 - DNA, 323 bp, Zea mays
  unsure (1)..(323): unsure at all n locations
ctgtgatcctgctgggcttctccttgccttcgaattgctttcgtcagcgctttgccctatcacgcccactggccgcgcactttcttcttggtgtcctcagtgcctccagaactatattcaccacagactccgagtcgggttctcttattcgcaggcgaatcagaaccactaccaagaccatgctttgctgaccacttgtgctcgtagcgaacaacttgccaccaatgatggcgcttatatggatgccccatnntaccctcgaacctcgccattgctgcattcatgaccattgcattgtcagctccgctctgacgcaacctttc

SEQ ID NO: 14373 - DNA, 359 bp, Zea mays
  unsure (1)..(359): unsure at all n locations
taagcaccgcggctgcagctttgcaaacactactaacttttgtatcaccaagaagtgatttcttgtttaatcacaacaaacattacagtgtttcaaatctgttcagacagaggacagaacacaacaaccagtntgtgaattcataactcttaaactgtcacgcctatggttatgaaattttacaccagcaagatgagaaaagcatctaccacttttttataacgaccatgaacagggtgcaacacttatttgagcaaaaaatgcaagttctgaaaatctgacctaatatggacagaatcagttacttgatttgtgaacagcataacttctaaactgtcacacctatggctgtcaaattt

SEQ ID NO: 14374 - DNA, 271 bp, Zea mays
gcaacttgcgaaatcttcattccacatggcgtatttgttatgctcgatgccacccatattatgggtagaaattatgcgagagtcgagttcatctctattaatatcgactaagtatagcttaccctctaacactgccttaaacgctactgagatatcacttcttctacagacagtgacaccctcatctgcgaatagacagttgtagcccacatggcataaatgagcaacttgagagcaaattgtaatctaatgaatctacaagaaaaacatt

SEQ ID NO: 14375 - DNA, 214 bp, Zea mays
tcactataagaccaccctttcttgcaggagaatctggctcctttagagcctggttgattaaaaacttggcttcccctagcaatttcagatgtcccctcttatagcactagcttgtcattacacccttagatcaagcatcatggattcgtacctcctacctactcgcatttaaaccccaaggaatcagttattccaacattcatttcacttaaca

SEQ ID NO: 14376 - DNA, 363 bp, Zea mays
  unsure (1)..(363): unsure at all n locations
aacatggaaaggagcaatccttctctcccttgggatgagcacacaaccaagcagttagaaggctattgacttttgcaaaatcagccaagggtcttggatgaccattaatctacagaatgctggatgtttcttatcattttgaccacgcttgcccacatgtgttgttttgcaaattcttcgtaaatacttttcaaatccttttgacatagtncaaagacatgaattgatttgagaagcatttaagattgaaatttttcccctgttcgatgctttctttgataaacaaactcccttatagatctctctatgtcagaggttaaatacatttgaatttagtttcttcttgataataaatcataaaat

SEQ ID NO: 14377 - DNA, 301 bp, Zea mays
acacgagggcgggagaataaccgaaggaatcatattttatgctaaaccacagggacggagaagcctatgaagaaaaaactcaaggaatatcaactactaacggaagcgttgcacgacagtaaatcaatatatgagcctaagcctcaataaacgaaccgaccaggcgacttggacgacggatacctcgaggctgccatacggataaaacctccacaaggaggtagtttacaggacacagtttgttctataccccccctggcagacctctgagatgcacttccggggagacggcgatctcatt

SEQ ID NO: 14378 - DNA, 125 bp, Zea mays
tactcccaaacttttcaagtaccacgcaatgaaaaaaacccttccattgctttgcctccttcacccagaattcccaaatttccatttctaaacaatccctttctttcgagtccatatactccata

SEQ ID NO: 14379 - DNA, 353 bp, Zea mays
  unsure (1)..(353): unsure at all n locations
tttacaataattactttttcaattttatattcaacttgttattaattatgtaagtctttaactaaaatagtattttattattagaaattatagtgtcagataataggaactttgtcgtaatgcctttttaaagaaacatangaataatatcctattagcgttgttgtgtcgtgtctacttgcataattagctaaatttattttggtctaaagctatgttcttcaatagatcgactaaccctagattagttatgaaggtgttagacgagaacccaacagaccttatggatatgtgctgactngcacatctaaatcatcacaacatttttgcttcatgcatacaaattgatttgt

SEQ ID NO: 14380 - DNA, 314 bp, Zea mays
  unsure (1)..(314): unsure at all n locations
agcttatctggttgccagtaacaactgcacatggtactgggtacaaagtttntaccatttttttggttcttttgggttccttttctaagaattacagggccatagcatacaaatatcttcgtaaatacacaatcagccgaaatagaacaatgaacatgcatacaaagatcttcataaataacaatgtcagtggatatcccacttgcacgaaccagcaaattgctgcgtattcttggatgcgtcacttatcatccatttacctcctcaagcactcaagcttatataattacccagaggtcgatcatgcatatgct

SEQ ID NO: 14381 - DNA, 409 bp, Zea mays
  unsure (1)..(409): unsure at all n locations
agcttatctgagcgcctcccctcagtccgccggtggtaccttgggtttgctgcgacagttgctgctacttcgccgtttccaaatagctgcacgcgctgcacgggcgtgtgtttcctttgttattaattgtttctcaattgtgtggcgtgagatatgtactgtcgccgaactgctgtggttcaagcaatatccttttggatggaagtgaagagatgtgtttctgtccatcattcttcttctgttagtgtatgcataattggaaaaattaatggatcctttattcatcagcagttaatgatgttctccacgcctgtcaaatgtcaatagagttgttgaaggatatcagcttagattggatcatctctttttatgttctactgtcttcagncacatgccattcataatgaaa

SEQ ID NO: 14382 - DNA, 453 bp, Zea mays
  unsure (1)..(453): unsure at all n locations
agcttgttagatatatgtattctcgtctaaacctaatcatcaatgagctcaattctattggcataaataagctaggtatgcggacattgtgaggaagattatctccttgctaccaaaacaaagatatgggagcatcatcactattcttcacaacatggaggacttgagtacaatgaccccgacaattgtgattgggaaaatcgcggcttttgaaatatcgcgaaaaatgtgtcagggagaggagccaacttcttcaaggctatatggttctgcatgtgatgaaaggaagggtaaaaagaaggctcccactctaagttcctcaagtgaagaagagtaagaataacaaagtgatgatggtaaagataatcaaccatcaacatcattctccgaggacgaaaaaacaatctgacgcgtcngaaaggtaatggtgatgatccgcaagattaatctaat

SEQ ID NO: 14383 - DNA, 470 bp, Zea mays
  unsure (1)..(470): unsure at all n locations
agcttctttcttcctcctcatccttatttgtgcttccgctaactntttcattagctacacaacatatgtgggaatccaaatgggaagacaaacattttggagaggtggattcatcgtttggtctccatcggtcattttcttcttcttccttgcaagggttagtatcacaaataccaaaggaagtagaagcataaaaggaactatcatgtttggactcatcaaatttgattttaattctagtccaaatatcatgcgcatcatgaatagattcattataattggatatgaaggcacgataatcttcattgctaagagaattactcaagatgtcaaaagctaggtagtttaagcgaaaacatctttgatcctccttggaaatgatttctctattataactagaggtaagatactctngtctataatttgttctaattgtggatctacggntctaaaagcatctatcactctag

SEQ ID NO: 14384 - DNA, 445 bp, Zea mays
  unsure (1)..(445): unsure at all n locations
agcttctgtagtcaaggacagtgacttcctcatctttatcatcgaggtcgttataactgcaaccaaagccaggtatgagttgcattttgttgccaaaaaaaatcccactaaaaactacagcgacattttttaaagttcatccaaaaaagaataattagccttcgcagcaacaaaattgcatgaacatcagagcacccaaacatgaggaaaacaagattctgaaactgggggtaaaccttctcaggcggcgaggatcatggcggaaatttggaggcatagctataatcggtgctgggccacccatcattggcccaagcattccagcattgccatgtggtgcgccatttggttcaaaaggaggaggtggcccttgctctctcagcatatgcatcgctatctatggaggtgcangaacaaatgggcccaatggactgaaaacaataac

SEQ ID NO: 14385 - DNA, 193 bp, Zea mays
agcttggtgctgatggagaagcacaagtctctatagtcctggctatcaaactgtttgccattgttgactgtgagctcggacgggactccgaatcggcaaacaatggtttgccagaagaacttttgggcagtcttcgacgttattgtggataccgccctagcctcgatccacttggtaaaataatcgacggcga

SEQ ID NO: 14386 - DNA, 447 bp, Zea mays
  unsure (1)..(447): unsure at all n locations
agcttcacgagcggtagcttcggtattacgtattttcaggttntgccgaaggtgtttcttcctgtaggaccttcngcgatgaagcatggtcccaacagtagtccttcgcggtgctagatcgtttttcgtaacgagcttgatccgtgaaaaaagtctcttagccttcgggaagccgaaggtccgaaaaacaccttccctgagctcgttgccgggaaacgatacaacttccaagcgcgaagtggtgccaccatgcaggttcaccttctcgggttttgtggcccactgttcagtgggtgcgagcgactgtttgtccggtgtaaatgactntgacgattcaccttcttacctacagcactatataaacagacgggtatgtgtgaagtaccacagcattcattgtattacacttgtttgctgcaaaaaataaccataaccgaagcttgactt

SEQ ID NO: 14387 - DNA, 430 bp, Zea mays
  unsure (1)..(430): unsure at all n locations
agctntattgcatagcatgttctgactctggttggtgcaactaagacagcagccgcacctgccccgaaggttccccaagaaccatcgcagaacaccgtccaagcttcgacatttttatttgcttcttcttcctgagcccctggcatccagtcagcgatgaagtctgctagcgcctgggactgaatcgaggatctatgcacataatcaatgctgaattcattgagttccgcagcccactttccaatccttccagtagcttctctgttcctcatgatgtccttaagaggctgtgacgaaggaacaattatatggaatgcttgaaaataatgccgaagcttcctggaggccattaagacagcatacaacaccttctccaattatgtataatttttctttgataagcttagaacttcggagacaaagtatactg

SEQ ID NO: 14388 - DNA, 436 bp, Zea mays
agcttcgcctcatccttagctcgtcggtcattctcttcatatgtttgatcaagcactttagttgaaggccgtcgtcgttcacgcaactaccaaatcgagttgtgatgtggtgagccgattcgctatttttactatcggttttatgatcgtaaaataagacgctacgtatgcgtataggattaagttagaaataccactaaggcgaggtgtgcttcgaggagtttagttgccgaatatatttgaactagttctattctgtagaatatagtatttcggtgacacgtaggttaaatttagtattttaaaatgtgtagacaataatattgttagtattactattgacgaattataattgcttgataaaattaaattggttcttgggaagcaaggtggtataatatataaagcgagggatgaatttagcatttaacccatt

SEQ ID NO: 14389 - DNA, 435 bp, Zea mays
  unsure (1)..(435): unsure at all n locations
agcttctaaaggaagaacatgtgatatgtcttttcaatgttcatttcgaaaaagatagaccttgtgcagcttgtcaagcagggaaacaggtgggaggagcgcatcacagcaagaatgtgatgaccacttcaagacccctggagctgctgcatatggacctcttcggacccgtcgcctatctaagcatagggggaagtaagtatggtctagttattgttgatgacttttcccgcttcacttgggtgttctttttgcaggataagtctgaaacccaagggaccctcaagcgcttcctcaggagggctcaaaatgagtttgagctcaaagtgaaaaagataaggagcgacaacgggtccgagttcaagaaccttcaagtggaggagttccttgaagaagaanggatcaagcacgagttctccgctccctacacaccac

SEQ ID NO: 14390 - DNA, 427 bp, Zea mays
  unsure (1)..(427): unsure at all n locations
agcttcggagccgaagcaactccatctatgttcttaaccatcagctcagaaagtggaagtgagttcaccggaggtgggcgccaatgttggggacttgttctcaaatgcttcgaattaggaataagacaacacacaagatgttaagtataaacgcccttcgtccgctgaagcattatctccccaaggatttaatgatcttctgacgaaggtcatgggtaaagcatcacaaagatttcaccttcgtgattatatttgtaagacgacaatcaatgaagaatgaaatataaaggataaaatattttcatatgttttttattatatgaatatacaagtntcacaacataatacttaagcacattataccttcgccttggcggaaagcaataattcaagcataacgtgtccgtgattacaggatcgcgtgaac

SEQ ID NO: 14391 - DNA, 456 bp, Zea mays
  unsure (1)..(456): unsure at all n locations
agcttgtatcacgtgacctaagctcaatagtatatccagcaatgtgaagaactgtttcaccaggccggtgaaaactcaaagaatgcaaatgctccaagggatgaaaagcaagtgttgaacccctagcaggacactgtaactggtagtattgacagacaacttgcaaagaaccatatttttttgcctggataaaacatttaagttaaaaaacaaagccaccaaaaaaggaaaatgaaagcagttgtgcatgagttcatgcataaaccttagcccactgcagtatgttgttgtgtttaactaagtctccatcaccaatggaagatggctcctctgaatccgattcttgggtgtcaaaatttctgccttcagaaggagaaccctgtgaactgcagcanaagatggtaactattttgtgactctaatcagacactggtngtcgtgtatagtaagtgctac

SEQ ID NO: 14392 - DNA, 415 bp, Zea mays
  unsure (1)..(415): unsure at all n locations
agctntgccaaatagggcgcataattatacccttgatgtcttctcgtgctttcagatcattctttacatagaatcattctgtcatccagccgctgggccatcttttccgaaaagttggcacggggcagcttgacccagaccgagaaacaaaattgtagcagccaaagttattgtgatactgttccttaccccaaggtattgtctcgtatgataattcgtgcatattgcagaaactttttgcatcaggcttcagaccttggcttcgcacggcccacacgaagatattcagccttatgattgcctcgggggtaagttggtgaagatagacttcaaagatcttcagcacctccatgacgaagctgctcaagggcaatcgcagcccagccttcaaaaaactactgaacactacgacttc

SEQ ID NO: 14393 - DNA, 480 bp, Zea mays
  unsure (1)..(480): unsure at all n locations
gtagacctgangcatgcaatctagctataattgtgttgaagaactcaatattatttatccactgcaccaatactggtaatgccagacatccacaagggatttgatgtgtattgcgatgcatcacaccttggacttggatgtgtgctaatgcaagaaggaaaggtgattgcttatgcttcaagacagttgaagaaacatgagaagaattattctacgcatgattaggaactaactgccgtagagcatgctgtgaagatttggacgcactatatgattggaaacaagtgcgaaatctttacggatcacaaaagcttgaaatatatattcactcagaatgaactcaacctttcacatagaagatggctcgtgttgattaaagattatgatgcgtgaatacaatatcaccgccggaaagcaaatgtagttgctgatgcttttagccgttagggtcaagtgtataacatcactacttattcgatg

SEQ ID NO: 14394 - DNA, 453 bp, Zea mays
agcttctaaagggagaacacgtgataggtctaaccaatgttactttcgaaaaagatagaccttgtgcagcttgtcaagcaggtaaacaagtgggaggagcgcatcacagcaagaatgtgatgaccacatcaagacccctggagctgctacatatggacctcttcggacccgtcgcctatctaagcatagggggaagtaagtatggtctagttattgttgatgacttttcccgcttcacttgggtgttctttttgcaggataagtctgaaacccaagggaccctcaagcgcttcctaaggagagctcaaaatgagtttgagctcaaggtgaagaagataaggagcgacaacgggtccgagttcaagaaccttcaagtggaggagtttcttgaggaggaagggatcaagcacgagttctccgctccctacacaccacaacaaaatggtgtggtag

SEQ ID NO: 14395 - DNA, 387 bp, Zea mays
agcttgaagccatggtgagtagcataggctaataatatgctaattgactcaagcctagctacgggtgcataggtttcaccaaaatccaaaccttcgacttgtgaataccccttggccacgagtcgagctttgttccttgtcaccacaccatgctcatcttgtttgttgcagaagacccacttggttcctacaacattttggttaggacgtggaaccaaatgccatacctcgttcctcatgaagttgttgagctcctcttgcatcgtcatcacccaatccgcatcttggagtgcttcctctaccctgtgtggctcaatagaggaaacaaaagagtaatgctcacaaaaatgtgcaacacgagatctattggttacccccttatgaata

SEQ ID NO: 14396 - DNA, 419 bp, Zea mays
agcttgtggaggttcttcatccccacatgtgtctttgggcgatgccacagccagcccatgcaagtcttagccattaagcatgcatctagaccggcctcttcttttgcaaaatcaactaggtaaagcttgccgtctagtacacccttaaaagctagtgaaccatcacatcttctaaagacagacacatctacatttgtaaacaaacagatatatcccatattgcataattgactaacagatagcgcattatatccaagagactctactaaaaacacattagagatagagtgctcatttgagattgcgattttacctaacccttttaccttgccttgattcccatcaccgaatattattgaatcttgagaatctttgtttttgacgtaggaggtgaacatcttcttctcccccgtcatatg

SEQ ID NO: 14397 - DNA, 444 bp, Zea mays
  unsure (1)..(444): unsure at all n locations
agcttcgggaaccccatacttctagccatctcccggcagacagataattctttgttgtctgggaggcagtataagaagtcatcttcatctgtgccgttgaatactaaggcccctttcgaatacttcagttcttgggcatagtgattagcttcaaaaatttcttcttcagataatttcttccccgaagcatgtcgtacaatataatcaagtactttggaagatgcttcgggggcagcagcgccagtttcttcagccaaaatttgttctgctatttttgttttttcggcttccaaggatttcaccttggcaggctctgaaggcccggcttcaatttcagactgttgctttgaagcttcgacgacaaaggcttcagtttgtacttcggaagtttaacaattntctttggaggtgtgcttgaagatttgattgtctctaanacatcta

SEQ ID NO: 14398 - DNA, 463 bp, Zea mays
  unsure (1)..(463): unsure at all n locations
agcttgtgaagattcttcatcccaacatgggctattcggcgatgccagagccaacccatgttagtcttagcaattaagcatgtgtcgagttcagctctattaaaatccactaagtatagctgaccctctaacacacccttaaatgctattgaatcatcacttcttctaaagacagtgacacctatatcagtaaatagacagttgtagcccatttgacataattgggaaacagaaagcaagttgtaatctaatgaatcaacaagaaaaacattggaaatggaatggtcaggtgaaatagcaattttacccaaacctttgaccaacccttgatttccatccccgaatgtgatagctcgttggggatcttggtttttctcatatgaggagaacatcctcttctcccctgtcatgtnggttgtgcacccgctatcgagtatccaacttgagcccncggatgcataaa

SEQ ID NO: 14399 - DNA, 458 bp, Zea mays
agcttgtgaggttttcaaatattctaaactcttatctcaacaattaaaagagctaaggattctgccaacatttagagatcacagttccatgggaattttgtatgaagatatttcaaagttttataaaatggctcttataacccctgtttggaagagtaatgaagcagcagtgattattcaaagatcccagtgactcagtatgatcgatcaaaacacctgctaccacatgattattcaaagttctatctgagctagcttgtgcttcaatttgatttgtccgttcgtcctcacggtccacatttgttgcttgcgtcaagattaggcggaggtgatgtcgacgctcatctacagagtgaggaactcatcctcccagcaggtgagaacaatgctcacagtgatttcattcatgaactttccttaattaataacttcgagtttgtcgaggctgttctgaaatt

SEQ ID NO: 14400 - DNA, 437 bp, Zea mays
  unsure (1)..(437): unsure at all n locations
agctngtaaaatcacacggatgggtgtgttttataaaggttctagccccgcttttcattcttaatataatgatacataactctcctatgtggtagagagacaaacgtacacccagattattgtgacttacatcctttgtttcagtatcttgagttgtacttacacattcctgctattcatagaatatgcaagatgaaatgacagatctgatggacgtgagctatgagatacaagagactcttggtagaagctacaacatccctgaggacgttgacgaggaagaactgatgggcggtatggaagtcacaattccatctttgcaatatgacatctatatctggatttaagacttccatagctgttggcacatcacttggcaatatggatatgtgctaatgggctaaaactgcaattgtgcacatatanttgtactctat

SEQ ID NO: 14401 - DNA, 450 bp, Zea mays
  unsure (1)..(450): unsure at all n locations
agcttctgctntttgggtcgcaccgaatggtctatccccaggctgtgttcgattatggctcggctgactccgaccagatcgagggcagaccaggcgaagacatctttattcttggccaggcagcagagaagtttctcttcttcaagtgacgtgaggtcttcgctgatagttacagtctgtttgggcgtggcctgatcgagggggacagtcttggtcccgtcttggcactgcaactgtgccttgtcgtgctgcttgtcggttgggctagccggcgcagggacttcgcgctgggtcgtgagacagtgtacatttctctgaccgggcacgaagtcccgctctatgttgcgcgccgtctgctggttgccgtatattgtgatggcgcccagcgggcctggtatcttcatacataggtacaacccgtggatggcggcttcgaatttgttgatggag

SEQ ID NO: 14402 - DNA, 468 bp, Zea mays
  unsure (1)..(468): unsure at all n locations
agctngagccctcaccaaggatggtgagatatatgcattctcataagcagagggaggcagcgttggatgacctgtttgcaatcatgtcaaagagtggtgtgccaacacagacagcaatgaatgtaatgtcagaattatttggaggccgtcaaaactggccgttcacagagaaagatgtacataacaagtaggtcataaaaaacactgacatcatatctttgtgcgatatattaagaccgacagattaacttgttttttcttttatggtacaggaaagctgagcaagcaagggaggagagggatggggacatggataaactgttccaattnttcagggagtgcaaagaacacaatgaatacttttactgggatgtnggatttgacccanaaacaaaggtgcttcggagcattntttggtgtcatgcaagtcagcgtgcagaatacaaggattntgggatgtagcacatt

SEQ ID NO: 14403 - DNA, 464 bp, Zea mays
  unsure (1)..(464): unsure at all n locations
agcttaccggcgctganttgacggctgtgagaagtttctgcgacgcggtggaaaccaaagccacgcggcatgccacggcgaaggcacgacggcggtgaaaagctttatccacgggtggtaagcaggggggaggcacggcgacgagccggagtggcgtccagcgcacggggagatgatatttttccacccaatcgttatcttcaagcccggtgcttgaatcatgacagcggcggcgcgaatcttcgcgcagagaggtcaccggcggtgaggacagccgcgctggcggttttatccagtgcagacactgtaccatcagtagttctattcagatagcctgaccgagcaagtttaagccgccaattctctgattttcaagtggcaacacaaccagtgatctatagcaaagntgtagtgctataatccatctatatctttgctataatgtgtactcacaaaaagtcact

SEQ ID NO: 14404 - DNA, 454 bp, Zea mays
agcttgtgagcgcgccagtcaaggtaagggtgctcttgtgtgtttcgtcgttgtctaaactgtgagcagcgcttctatctcatccgttcttgaaatcgcctgctggactcaccggagcgctgctcaccgtgaccgtggtcatggtgccaccagcgactgaacgcgccgccgcggtgggtgtgggcgctgtcgtgcccagtctgctaaaggtaggagatagagttcggatcgttgattggccaacgaacgaccaagattgggtcggtgcttgacgctttggtctgggagttcatcaccgtccgtttagatcggacggacgatactggagtagccctcgtaaaatctccaccgtagatctctaatcccacgggtggaaatagataccggttcgtgtgatgcgcgttctaatctgggccgtccgtgcccgatcggacgactgaaacaaacttatacc

SEQ ID NO: 14405 - DNA, 470 bp, Zea mays
agcttcatgatgagcagtgagccagttcacttcactttgtttgtactcctcagctgtcaagtggatttcacatgcctgcttgttggtcattctttgacccttcactttcttgaagtacacggtaacagctttgacccatgcatctgacattgaaccatttataacttttctagcagcattgtggaatacacgttttgcatgttcttcgtttgctgtttcgtccaatctaaattgttcctgcaaaatgaagaagcaattaaattcatttatagacgcccacggtaagtaaatttaaaagacataataaactcacccaaaacaatgaccacactacatcttggtgagtacggtcgggtccatatggtttgaggccccagtgagcccagtgatacgcccctatatctgccccgttgaattgtaccacccctggatagtgaaaacgagctatagatcccaacactatgttaact

SEQ ID NO: 14406 - DNA, 405 bp, Zea mays
aagtcatctgaggcatgcaagcttcggcttcatctatattatgaatagccttcatatcttttcaactcccttcagctctcctagcagcttcttgacttctgtgtactgcaatgggcccttgttctgaaggtatcttcatgcaaagatatgctggatgaagtattgcttcgaaggcattaatcgtcccccgaccaatgattgcattgtatggatactccatatcaacaatgtcaaagacaacctattctgttcttgtgttgtgaacttagccgaaggtaaccgacattgttatcttgccaagtgccacaatctgtcttcctccaaagccacaaagagggtgtgtcgcatcatgtatcttgtcctcatcctcttgcattttcctgaaagcctttgcaaagatgatgg

SEQ ID NO: 14407 - DNA, 428 bp, Zea mays
agctctgcgcatgagaggctgttaccctcatttttcaatagcatcagccaaattggcagggagagcgtgtcgcaatcaaagccaatgacgacattggccactactttcaaacaaagaaaggacttaaacaatgtgaacctctgtctcccatcctctttaatatcaatgcggacatgttggccattttaattgagagagcagacaatactgttgacttagaaggattagtaccacacttagtggatggaggactctctatacttcaatatactgatgatactatcctatgtatggaacatgaactcgataaggccaaaaatcttatactaggggtgagtacttctgagcagctatcgggtctgtaaataaacttccataccagcgagctatattgctatgaacaggctaaagagtttgagcatgaatat

SEQ ID NO: 14408 - DNA, 460 bp, Zea mays
  unsure (1)..(460): unsure at all n locations
agctgtcttgaccggagttagtatacatcgtatgtctgaaactntgctgcaaagactgaaatcttagtttgtgtttgcaggtgcatattcaatcttggcatcgatctactatatactatactatacccgaacagatgatgcattgccaagaccctgaaagttggattaatccatgtcaaatctgagtgaccaacaagatgttcttcgcatgcacgtatgggaacattctagaagccctgtatacgtgtgaatgttcacggtaccaagtagtgcgctaatttgctagaatgtacatgttggcctggatcagaggttcaaatctgtataatattgccataagttgccccaaacttttcaacgattattctttgggataaagaattaaacctttcttgacaagcgacagaaggccagttttagagtaagttctcataactgtaactctcatacgggtgagtta

SEQ ID NO: 14409 - DNA, 466 bp, Zea mays
  unsure (1)..(466): unsure at all n locations
agctnggacagtgtgttgagatgggtcatggtgtaaccttggcgtangagcagccgccattctcatttcaccatctaggattagaacctgctatgcagcaaggctggaattcaactgcacaaataacattgcggaatatgaagcccttctcttagggcttcgaaagcttaaggcaatgggaataagaagtgcaatccttaaaaccgactcacaagtcattttgggccacgttgacaaaagcagtaaagcaagagacccaaagctcgagaagtatctggacatagtccgaaggatggaagtctctttcgaaggtttctctgtaaagaatatcccaagaggagaaaatgaacatgcagacttattagctaagtcagtggcacaggggcttctgttacctttggagagtatttttgaaacaataaaagcaccttcagtcgagctcatggagagagtagtgcttacaatc

SEQ ID NO: 14410 - DNA, 433 bp, Zea mays
  unsure (1)..(433): unsure at all n locations
agcttctaaagggagagcacattntaggactaaccaatgttcattttgagaaagacaggatttgtagcgcatgccaggcaggaaagcaagttggagcctatcatccacacaagaacatcatgacgaccgacaggccgcttgagctactccacatggatctattcggcccgattgcttacataagcatcggcgggagtaagtattgtcttgtaatagaggatgattattctcgcttcacttgggtattctttttacaggaaaaatctcaaacccaagaaaccttaaagggattcttgagacgggctcaaaatgagttcggcttaaggatcaagaaaataagaagcgacaacgggacggagttcaagaactctcaaatcgaaggtttccttgaggaggagggcatcaagcatgagttctcttctccctacacacc

SEQ ID NO: 14411 - DNA, 368 bp, Zea mays
agcttctaaggggagcacatttaggatttcttatgttcattttgagaaagacaggatttgtagcgcatgccaggcagggaagcaagttggagtccatcatccacacaagaacatcatgacgaccgacaggccgcttgagctactccacatggatctattcggcccgattgcttacataagcatcggcgggagtaagtattgtcttgttattgtggatgattattctcgcttcacttgggtattcttttttcaggaaaaatctcaaacccaagagaccttaaagggattcttgagacgggctcaaaatgagttcggcttaaggatcaagaagataagaagcgacaacgggacggagttcaagaactcac

SEQ ID NO: 14412 - DNA, 444 bp, Zea mays
agcttctaaagggagaacacgtgataggtttgactaacgtgcaattcgaaaaagatagaccttgtgcagcttgtcaagcaggtaaacaagtgggaggagcacatcacagcaagaatgtgatgatcacttcaagacccctggagctgctgcatatggacctcttcggacccgtcgcctatttgagtataggaggaagtaagtatggtctagttattgttgatgacttttcccgcttcacttgggtgttctttttgcaggataagtctgaaacccaagggaccctcaagcgcttcctcaggagagctcaaaatgagtttgatcttaaggtgaagaagataaggagcgacaacgggtccgagttcaagaaccttcaagtagaggagttccttgaggaggaagggatcaagcacgagttctccgctccctacacaccacagcaaaatg

SEQ ID NO: 14413 - DNA, 467 bp, Zea mays
  unsure (1)..(467): unsure at all n locations
agctnttagattttctcaatttgggttatgtcttactcttttaacccctatttaggggtaagttccctatctagggttctatttgcaaaataccaaaacaatacaacttgtttgaattttttgcctagtgaatgcactctaggtgtatcaaacatatgcaatgccaatgcttatgatgccatgctcaagttttagttatagtaataccaggggtgttacatctattcctgtgcagccctactaatttattaaaaatgtgatatcttataggtcaaataatttgttttaatctgttcaagttgtgttgtgttcatattaatttttgtgtacgtagtaataacattgttttaattatgccacatgttttaattgattaatattaattagctagataatctagttaatctaatttatagttctaacctacgcattntataaaaaaaatgtaattattaataccaactcaa

SEQ ID NO: 14414 - DNA, 467 bp, Zea mays
  unsure (1)..(467): unsure at all n locations
agcttgtacatgttattcttattgtgtttcaatctttttaagattaattgtccctcatattgtttttgaaatttaggtggtgttcagagagcaacatggaattatgaattggagaagagcctcgttgatttgttgtttgagtacaatgtacctccatatagggctcaaaatggctagagtccagatgcttggaacaaaattgttactgaattcaacaagaagcatgagtatgtcacattcaacaagattcaaattcaggagaaggagtgggaattgaaaagggattacaagatgttgaaagaggctagaaagcaaagtggtgtttcctggaatgagaaacgatgcatgattgttgttgttccaccaatatgggaaaacatcatannagtaagttttgactccagctttatatctaattgtgaacttacctagtgtagttattcacctacagtcttctgttctaactt

SEQ ID NO: 14415 - DNA, 438 bp, Zea mays
  unsure (1)..(438): unsure at all n locations
agcttctaaagggagaacatgtgatagatctaaccaatgttcatttcgaaaaagatagaccttgtgcagcttgtcaagcagggaaacaggtgggaggagcgcatcacagcaagaatgtgatgaccacttcaagacccctggagctgctgcatatggacctcttcggacccgtcgcctatctgagcatagggggaagtaagtatggtctagttattgttgatgacttttcccgcttcacttgagtgttctttttgcaggataagtctgaaacccaagggaccctcaagcgcttcctcaggagagctcanaatgagtttgagctcaaggtgaagaagataaggagcgacaacgggtccgagttcaagaaccttcaagtggaggagttccttgaggaggaagggatcaagcacgagttctccgctccctacacaccacagc

SEQ ID NO: 14416 - DNA, 434 bp, Zea mays
agcttatgaagattcttcatcccaacatggtctagtcggcggtgctagagccaacccatgttagtcttagcaattaagcaagtgttgagttcagctctatcaaaatctactaagtatagctgaccctctaacactcacttaaatgctactgaatcatcacttctaaagacagtaacacctatatctgtgagaagacagttgtaacccattttacataattgtgaaactgaaagcaaattgtaatctaaagaatctacaagaaaaacattggaaatagaatggtcaggtgaatatagcaatttacccaatcctttgaccaaaccttgatttccatccccgaatgtgatagctctttggggatcttgatttttctcgtaggaggagaacatcttcttctcccctgtcatgtggtttgtgcacccgctattgatgat

SEQ ID NO: 14417 - DNA, 392 bp, Zea mays
agctattatcagcataatggaagatgtcttttatatggtcactgcccgcacttcttctgctcatgctgagacaggaccttcggaatctgcgccaaaatatcttgtggaagagagccttccagaaaaaccctcggcacctgctcctgaagcaccttccagggatcggctaagcaagtcgccgaaactgaacattatgctaaggagctaaagtacccccacggatccttggtatatggaggagataacgacgatgatgtcctctactgtctacttgacggtaaggagatcaatgattgccgtgaaatgatggataacatggtgtatccgaagcttgaactccgcttgtctgcaatgactaaggatcagcttgcacatagcctcgcctacaatag

SEQ ID NO: 14418 - DNA, 424 bp, Zea mays
agcttatttcctgtaccgtcaccgcgagtcattattcctataaaattcatcgtgtccttgccttcgtcgtccaaattggtcgtgcactgatatccgcttcccagttatagagctagctgctcactagccatcccttttcgtccaccatcgaccgagatcaccgtatttccctgggaacgatcatcgttgccgctatgaagaacccaactgtggctagccttcctccggctagttcatacccttctaatccttgttttggcatgcctttagtctctgggtgctcaccatgctggtcgattgaacactactgccacagagctcctagaacaccgcatcgtcgcccgggaacgccaccgtggacatcttgcacgccgacccactcttccacgctcgctccttccaaattcgcgcacgtaccacgttc

SEQ ID NO: 14419 - DNA, 449 bp, Zea mays
  unsure (1)..(449): unsure at all n locations
agcttcacaaatagcagggaaaacacatatatttatatagaaacccactaatataattatttagaagaacataatatataatgcattatcaattcacattttaatgaagtaaaggtgagtagatgacctaaaattttattggccttggctaaaattatgtgtgaataaggactcaaagttagtattttggggtcattaggcactcatgggtgaaaagtcacactttagccccatctaattattttacggatcggatcatatatagacccattgatgaaatttaacattcaaacccatatccaatgaatgttaaatccgtgggacatccacgtatgtgggtgcgacttccatctctccctagttaggaacatangtgggcttacgttgtcttcaacaagtgctgctaaaacgctatgtaccataaatataacgcatgaagacgttcgtca

SEQ ID NO: 14420 - DNA, 416 bp, Zea mays
  unsure (1)..(416): unsure at all n locations
agctntgaaccgtttagtattagatggtgattgtttatatggatgtcgattaaatgtgattgtcggccatcgtgccgttgatatatgtgtggatgtcagccattgtgttgtcagttttatttgcaggttttggaaacctccccgtgcaggggaggtgttgccgaaatttttttattgacaggtttgtttatttttttgcagagttcttcctagccgttgcgggtctgcctgcaccgcgtcgagtcgccactgtaccaacccgccacagccccgctagcctgactccaccgtcaccctaggtataacctcaattttcgcatcatggtcgtagatcacgtaacccagttagtcgtctcccgtttgaaagagataccgtgtagatatgcatatctttgcatatctacacaaatgtatct

SEQ ID NO: 14421 - DNA, 440 bp, Zea mays
  unsure (1)..(440): unsure at all n locations
agctnttccttgtcgtcatcaaccttgacatataaccactcagatttccagcctgctgcccatttgcttcggtagctaattacaggaaactttgtagttttccgataggcgaagttataacaaccaaaattgtcgtgcaatccatcctttctagccttcgtttgataatgcaactcgtgaacccggcaaaagctgtccgcaaatggttccactgcttggcttcggagtgcccagatataaacaatgagtctaacaatagcgttgggggtcagctggtgaaaataaataccgaacctcttcagtacctctgcaataatcccatgtagggggaaccttaatccagcttttagaaagcttttgaaaataacaatttcatccttctccggctttggggtagtctcttctcccccgaagcgcaatagcttcttctgattntcagt

SEQ ID NO: 14422 - DNA, 451 bp, Zea mays
  unsure (1)..(451): unsure at all n locations
agcttcttgtagctgctgccaaaagtgagatgtgaactgngatccccggtcgaacactatcttcttcggaacaccatgcaagcatacaatccgggacatgtataactctaccaacactacactattgtagctggtcttgactggtatcaaatgagccgcctttgttaagtggtccaccactacccagatagtcataaccggctcgagtgcgaggcaaaccgactataaagtacatcccaatctcatcccactttcattgaggaatctgcaatggctgcaacaaatctgtgggcctttgatgctctgccttaattctctgacaattgtcgcatatggccacatactctgcgatctcccttttcatactgtaccaccagaatcatttcttcaggtcttggtacattttctctgactagctgtatgtggggttaggctcaaagcagtttctttt

SEQ ID NO: 14423 - DNA, 461 bp, Zea mays
  unsure (1)..(461): unsure at all n locations
agctngacattgtctcccatttggaagtctttgccaccttaatgccagggcgtctcccactatagagcatgcatctagcaaatttaaaaattttcattttctaagtcatgctcattaatcttagcactaagttgagctatgtgatcattttgttgtttaattaaagctagatgattatgaatagcatcaacattaatatctctacatctagtgcaaatagtaacatgctcaacggtagatgtagagggtttgcaagtatttaattcaacaatcttagcatgtaaaatagcattctcatctctaagattggaaatagaaacattgcaaacatttaaatctttagccttagcaattaatttctcattctcaatcttaaggctagagagagatgcattcaatctgtcaatcttagcaatcaaattagcattatcatttctaagggtgacaagagaatcatcact

SEQ ID NO: 14424 - DNA, 434 bp, Zea mays
  unsure (1)..(434): unsure at all n locations
agctngtcaatacttatcaaaacaacaacatttactattatatcaactacacactatacatgtaacatggtcgttcgcgtgctggggactggatatgattggacccttcaagaaggctcaaggaggatacactcatgtactggttgctatcgacaaattcactaagtggatagagttcaagctcattgcttctctaacttcagctaaggcagtggaattcatacaggacataatattcaggttcagaataccaaacggcatcataaccgacctaggatccaatttcactagttcgaagttctttgatttctgcggacaaaaaagcatccagatcaaatatgcatcagtggcacacccaagagccaacaggcatgtagaaagagccaacagaatgatattggaagcactcagaaagaaagtcatcgataataatg

SEQ ID NO: 14425 - DNA, 447 bp, Zea mays
  unsure (1)..(447): unsure at all n locations
agcttcttgtagctgctgccanaaatgagatgtgatctgtgttcctcgatctgacactatcttcttcggcacaccatgaaggcagactattcgtgacatgtataactcagctaacgttgctccggtgtatgtcgtcttcacaggtatgaagtgggccacctttgttaagcggtccacaaccacccagatggaatcgtagccggcccgggtacgaggtaggccaactatgaaatccatcccgatctcatcccacttccactgaggaatccgcaatggctgcaacaatccggcaggcctctgatgctccgctttggttctctgacagctatcacagatggcgacatattctgcgatctcccttttcataccataccaccaaaacctgctttttaagtccttgtacatcttctcactccctgcgtgtatggagtacgctgtctcatgaac

SEQ ID NO: 14426 - DNA, 468 bp, Zea mays
  unsure (1)..(468): unsure at all n locations
agctntagtggtagtaacaccaggggtgttacatccttttccccataaaagaatctcgtcccgagattaaaagtctagagcaagtaatggaaaaggaaacgcgacataatctttttccttatttttggtacaagacaggggtggtatggtgttcattcctcttattacaagaaatgtacatatcttacaatttacacgaagctaaaaagtctgggaaattcttatctgaaaagtcttgagtttcccaagtagcttcatcttccgtgtgttggttccactgtatcttgtaaaacttgagagttttccttagggtaattatgtccttttgatccaagactcgaataggatgtttagaatatgtcaagtctggttctaaggcaacatccattacttcaatggttcgatcaggaatccgaagacacttcttcaattgagatacgtggaacacattatgtacaacagacaatg

SEQ ID NO: 14427 - DNA, 467 bp, Zea mays
agcttgccttcgcctcagtataccacctgcagtccatcggagttgtggaacgcgcaaatggcaaaattttcacagctgtcaagaagatgctcctcgacgagaaaaagggcaagtgggccgatttgatacctgaagcggtctcggcactaaacacgactgagtgcagggcgactgggttcacccctttccgccttctatatggatcggaggccatgaccccacaagaaataaaacatgggtccccacggacaatcccgtcagctgtccccgacgtggacgaacccacttcgaaggatctcatcgatggagaccgcgtcttcgccctacaggctctaaatgaacaccaagcccaaacaaaagcatggcgtgaccacgtggtcatcccgagggaattcagcgaaggagacctcgtactcgtccggacagctcggacagagtctatgggcaagctggagcccaagtgggag

SEQ ID NO: 14428 - DNA, 490 bp, Zea mays
  unsure (1)..(490): unsure at all n locations
ttaagtcacctgcggcatcaagcttcccatgcttgccccagtggtcggctaatcttgtctgaatagccctctggtaagtcgctccagcgcttttgaggccaaacgacatggaggtatagcagaaggctccgaacggngtgatgaatgctgttttttcttcgtcttcttttgctaggctggtctgatgatacccggagtagcaatccaagaaagacaacatagaacacccagcagttgagtctaccacctggtctattgttggaacttgctctctattgcaaggaggccaacaagggtgaacagtggtgacaacagggttacgtgctagaaggcaataactctgttaatctggcctcccacgggcactgtgcaggggtatttataggtacctgagcgcccagcgccttgtgctaaggacgcatgtgccctcagctacctatgttatcctcagaatattcccataaagcggggttatagactgtaattacag

SEQ ID NO: 14429 - DNA, 455 bp, Zea mays
  unsure (1)..(455): unsure at all n locations
agcttctaaagggagagcacattttgtgacttttttatgtgcattctgagaaagacaagatttgtagcgcatgccaagcagggaagcaagttggtgttcatcatccacataagaacatcttgacgactgacaggccacttgagctcctccacatggacctattcggcccgatcgcttacataagcatcggcgggagtaagtactgtctagttattgtggatgactattctcgcttcacttgggtattctttttacaggaaaaatctcaaacccaagagactttaaagggattcttgagacaggctcaaaatgagttcggcttgaggatcaagaaaattagaagcgataatgggacggagttcaagaattcacaaattgaaggcttccttgaggaggagggcatcaagcatgagttctcttctccctacacgccacaacanaatggtgtagtggag

SEQ ID NO: 14430 - DNA, 451 bp, Zea mays
agcttgacaatgaggatatgtttcttatcatttatatcttccggcaaatattcaaacaaaggaaggggaatgactacaaaccccgctctaagagggtgtgctacaggtgtggtaagtctgatcattttatcgctaaatgtccatatacaagtgatagtgacaaggacgacaacaagaaacggaagaagaaaatggaaaagaaaagatactaccataagaagaatggtggcgaggcgcacatgggccgggaatgggactctgatgagagctccacctactcctcctacgacgaggacgccgccaacatcgccatcaacaaaggccttctcttccccaacgtcgaccacaaatgcctcatggctaaggatagcaaaaagaagaaggtgcattctagagataccctcaaatacactactttcgatgatgagggtagctctagtgatgataatga

SEQ ID NO: 14431 - DNA, 398 bp, Zea mays
gaccttaagtcacctgcggcatgcaagcttcgcatctctgaactaactcggctgctttgttcttcgccgccggccaataaaatcctgacctgaagaccttcccgactagtgttctggaggctgcatgtattccacattgccctgcatggacctcctccagaagttgctttccagtggacgggagaatgcacttcatgagaacacctgatgcaccccttctgtataatatctccccaatgagtgtgtagtgagccgactgtctggcaatgcgctctgcctaattcttgtcatctggatcttcttcgctctttatgtacttaatgagaggccttctccagtcatcagagtctgactcgggatgatctacgatgttgcactcttctggttggactattgag

SEQ ID NO: 14432 - DNA, 452 bp, Zea mays
  unsure (1)..(452): unsure at all n locations
agcttgcctgctcgtgaggtcttgatggcgtttattaataagaaatacgggatagttacgcccgccattcccccaatcaatcctaatagccaacttcaattatgcggtaactaagcttctgttgtctctgagtctgatcttcaccatcttatcgaagtcagtgttctcccgcccaaggaacagggctcctggcggatctggcaagggatcaccgtcccaacggaggatactcatgagttagttggttttgttcccttcatgatccgaggattatgtatgtcggattcccctttcctccacggntttctcgaattttattctctcaacctgactcatctgaatcccaactgcgtgcttcaaatcgctatcttagtccatctctatgaagccttcctaggggtttatccacactgtggtctggtgacgtatctatatcatcgcaaacctggaat

SEQ ID NO: 14433 - DNA, 408 bp, Zea mays
  unsure (1)..(408): unsure at all n locations
agctngagcacattatcctccacaatattgtttttaccaaatgtgcttacaatgatgattgtttgtcttggtattcagaatgatatccataaaggatatgatgaatctgtgatagattcgaaaatttcagatcattaatgaccatcagtaatgaattgtcatttccaactggttatggttggagtcaggaagttttgcacgctcctgacttgtgattaactgcatgtacaagttcccctatggttttagtacgtgggaatccatgaaagatttcccatgcgtacattgggtatgttcccaatctcaccaccgcagcgtacatgtatgggcacacagaaagctggggatctatgtgagaattcattctccgtcgatcattaagttttagaatctcttcatgagaatcta

SEQ ID NO: 14434 - DNA, 375 bp, Zea mays
  unsure (1)..(375): unsure at all n locations
agcttctaaagggagagcacattttatgattatcaaatgttcattntgagaaagacatgatttgtagcgcatgccaggcggngaagcaagttggagtccatcatccacacaagaacatcatgacgaccgacaggccgcttgagctactccacatggatctattcggcccgattgcttacataagcatcggcgggagtaagtattgtcttgtaatagtggatgattattctcgcttcacttgggtattctttttacaggaaaaatctcaaacccaagagaccttaaagggattcttgagacgggctcaaaatgagttcgccttaaggatcaagaaaataagaagcgacaacgggacggagttcaagaactctcaaa

SEQ ID NO: 14435 - DNA, 457 bp, Zea mays
  unsure (1)..(457): unsure at all n locations
agcttggctgtcttatgcggntagcaaatctaaatctatttcctaaatttaacttggtcaaaaagtctaagtgccatgtgtgtgttgaatcaaaacaaccccactagcctcacaaggctgctgaggcgaggaatctggcacctctagaacttgttcattctgatctgtgcgagatgaatggaatttacaccaaaggtggtaaaagatactttctcacttttatagatgactccactagattttgctatgtgtatctcttaaaaacaaaagatgaagcgttcaattattttaagacctataaagctgaagttgagaaccaacatgagaggaaaataaaatgggtaaggtccgatcgaggtggagaatatttctctaatgtgttcgatgagttctgcgtggaacatggtattattcatgagaggacaccgccattctcaccacaatccaatgggattac

SEQ ID NO: 14436 - DNA, 429 bp, Zea mays
tgcaagctgggaggcgtctataggagacgacttgttgtattctcctacgttcattattccgacgacatgaatgcgacgggttgagcttcggatgaaaagggatcagcacaccttcctgatcatcctggagccttcgagcatgcactcgaggagtacgcaatgctcgataacttcctcggaggtgattgtacaacatctgggagtaccacgaattaattgaactatgagagggtaaacgaaaatcagtgaagttacactaacgctaaccacctctcgggagccccactttatgactgcgaggttgcgcacttggttcaccaaggtcttgagccggatgtacatgtgttgaggctgctgccgtccgcgaaacctgaaccgaccgagctaccgccttatcgttgaccgctaggagaactttgagagctcatc

SEQ ID NO: 14437 - DNA, 437 bp, Zea mays
  unsure (1)..(437): unsure at all n locations
agcttcggcgtggcagcaaaaagtgaaaccgtcttatatatgaaaaggctatctagaccccgatagattactatagaattattatcaagtgtaaagggcatgaatgtaattttgtatggttgtgtcccgtgcctataaatagatgaatagtacccccgtactgtgggggctgacttggcattcgctttttgcgtcacgcttgtactggcatctctttcaagttgaaggtacatttataattcaacgatatttctgtttatacatgataatatataattgtttatgttgtcttttgtattccctacattttatccttcgtcactatacaatgaatttatgaaggtacgcccttcataaccttcgtccaaaaaaccattatatcctaagggaaataatgcttcgaaggacgaaggactntaacgattaacattntctat

SEQ ID NO: 14438 - DNA, 453 bp, Zea mays
agctcgtcctggttttatgaaccgtgctatattttgttatcaatggcaatttatttatagtaccaaagtccttggagtcagtaaaaaaaaacaacaagatgaaagaaacggccgtgcaaactactaattaaactggagtatgtaggccaaagaaagcacttgagaagttgagagcaaattaaaccagattgtaaactcttatgagtacgttgggaagaggtggccgtcttcttcttgagagcgctgcatgaactgaagaggtggcactcgccccacaggctctgaagcggtgacatgttatgacagagcatagagttcagtgagagaatgcacactgcaagcaccataacaacaaacaagctaggctactacaaggtttgcattgcatgcatgttggatttgaattaagagagatcgattcaccatgaagtagtagtcatcgtccagctcccc

SEQ ID NO: 14439 - DNA, 454 bp, Zea mays
  unsure (1)..(454): unsure at all n locations
agcttaatcccgagaaatgtgttntctgtgtatcagcacgaaagttgctcgggtttatcgtcagccaccgaggaattgaggctaatccggataagattgaagctatcatgaagatggaagctcctcgatcacaaaagaaggttcaacgacttactggatgtatggcagctctgagcagatttatatccaggctgggagaaaaaggtttgccattttacaagctactcaagaaggtggataagtttcaatggacttcagaagcacaagaagctctagatgcactgaaaaaattcttgacaacaccaccagtactgaaaccaccccggcgagctacgtcaactcaaccagctgaagatttgctactgtatatctcttgcacgactcacgtggtaagcaccgcgttggtagtccagcgagtagaagaaggacatgcctatgcagtacaacattctgt

SEQ ID NO: 14440 - DNA, 440 bp, Zea mays
agcttgctaagtttattgtgaacaaatctgatttgtcggaaaaagatatcccagctttggctgatatagttggtgatgaggacaaggctaaagaaattgttgaagcagcaaaggcttcaatgggtaatgggatatgatgcagttactttagtttgactatcatgattgtagtaaatgttcttatgctttgttttttcttgtttgttttcaggccaggatctgtcaccagttgatttgatcaatgtccagcaatttgcccaaagggttatgaatctctctgagtatcgcaaaaacctttatgaatatctcgtgactaagatgaatgatattgcgcccaacctgacatcattgattggtgaagtagttggagctcgcctaatctctcatgctggcagtctttcaaaccttgccaagtgtgcagcttccacccttcaaatact

SEQ ID NO: 14441 - DNA, 431 bp, Zea mays
  unsure (1)..(431): unsure at all n locations
agctntagtagcagtaacaccaggggtgttacaccgccgagtacaagaaccctcggaaacctcctggaggtgccaatctcttcgacaagatgctcaaggagccgtgcccctatcatcaggggcccgtcaagcacacccttgaggagtgcgccatgcttcggcgccactttcaaaaggccgggccacccgcggagggtggcagggctcacgacgacgataagaaggaagatcacaaggcaggagagttccccgaggtccacgactgctacatgatctacggtgggcgagtggcgaacgcctcggctcggcaccgcaagcaagagcgtcgggaggtctgctcggtaaaggtggcggcgccagtctacctagactggaccgacaagcccatcaccttcgaccaagacgactaccccgaccgcgtgccgagcccg

SEQ ID NO: 14442 - DNA, 384 bp, Zea mays
  unsure (1)..(384): unsure at all n locations
agctntatgagcgaacactgacaggctggtatctacatgttgaagatgtgtcgncgtcgtcttcaccacgcgcacatatatgtacatgcatgtggattgaggtcatgcatctgcagagcaggtagcacatattaatttggatcatatatattgaccaatacacactgtatgctaaattgctatgttgctgtgcatggatcatattgatcaatgacgaccaggcctccctccgttttccttctatatttacgacctatttggttccttaagtccaatttgggtccttaagtccatggactaaactcccgtattcttacgagtcatttaataagttgtgaacactcttagtctcttcaaacagggtagggactaagagcatgtatg

SEQ ID NO: 14443 - DNA, 465 bp, Zea mays
  unsure (1)..(465): unsure at all n locations
agcttgaaatgtgttttcctccatcatntttttatatgcaagtacacctaatcatacatctcgtggatcagataaaaatattagggccactatatttacatcatatgtttcagttggagcgatacctgtgagtattaaaaggttatgtgcgaaatcgcgctcacccagagggttcaatcatggagggatacactacagaagaagtgattgagagctgtatagattacataagtgacggaacaatgattggtgtgcctgtacctaaacatgagggtaaactatgtgggagagggagaatgggcaaggaaactnttcacgttgaggattacaagctagtacattgtgctcatggtagtgtactacaacatctcacgatagccgagccttacatagaggaacacctggatgagcttcgtaaagaaaatcagaaccgcacagaggactggatcatgagggagcacaaac

SEQ ID NO: 14444 - DNA, 478 bp, Zea mays
  unsure (1)..(478): unsure at all n locations
ggatcttaagtcacctgggctgcaactatgaaatcttatccaacatggctattcggcggtgccatagccaacccatgttagtcttagcaattaagcaagtgtcgagttcagctctatcaaaatctaccaagtatagctgaccctctaatactcccttaaatgctattgaatcatcacttcttctaaagacagtgacacctacatcagtgaatagacagttgtagcccattttgcataattgagatacagaaagcacattgtaatataaagaatctacaagaaaaacattggaaatggaatggtcaggggatatagcaattttacccaatcctttgaccaaaccttggtttccatccccgaatgtgatagctcgttggggatcttggttnttctcgtaggaggagaacatcttcttctccactgtcatgtggtttgtgcacccgctgtcgataatccaacttgagccctcggatgcata

SEQ ID NO: 14445 - DNA, 459 bp, Zea mays
agcttcccttatatcctgaaacgagatacacttctttattggtgaaactttcaggtagacataatcttcaacttgaaagtgcaagggttgacgtcgcttgtctgcataactcttctgtcgagcttgggtttctttcaaattatgaattattcgctgcaccttttcttctgtctcctttaccatatcaggcctaaagaaacatctttcacctggttcagaccagtttaacgaagtacgatactgtcggccatacaaagcttcaaagggtgccattttgatgctctcttgaaagctattattgtatgagaactccgctaatggtaaacagtcatcccatttctgtgggaattccaaaacacatgctcgcaacatatcttcaagtatctgatttaccctctctgtctgcccactggtttgaggatggtaggccgaactgtgaagcaacttggtacccagtga

SEQ ID NO: 14446 - DNA, 442 bp, Zea mays
  unsure (1)..(442): unsure at all n locations
agctntgagcttaattatctctggattnttcttaacaactgatcttacactcttaagcaaagtcgttctcctatggttgggctacaattttgatgtggtgacctatggcaaaaaccctagaatttaaaagttgcaaggctccaaagttgagccaaaactctgaaattcagacttaacatgaaatctcaattagggtcctttttgcaaatgagtccaaaacttagggtttggcttgtaaattcacatatgagtgacccanatgacttaagatacttatttaacttggattttgcactttagtccaaaagtggactaattttgcacataggtcccaagggttcggttttagggttatccagggttccaattatggtttttggtatcccaggggtataaatgtgcttcaacattatnttggggaacattttatgactattcccct

SEQ ID NO: 14447 - DNA, 464 bp, Zea mays
  unsure (1)..(464): unsure at all n locations
agcttcgtaaaataatctccgaagccatacctcgtttatcaatattggttctccctgtaacttggcatgatttaccccttttcaaagcattttccgaagatcgataacatgcccccttctcgtgccacgtgcagcatgatgtatgatgattatgctatgcaaaatgatgtgatgatgttatgctatgcaaaatgatattttgtgccgaagatacacacattcctgcaatggggcacaatcttttgtatcaatactgactttgtcattataagcctcccttaggagcttcttcgccttttacttcagcggaatcagcgtttatttttcgctgtaagttctgcatccccttaagaacgtctttggaacttcttcgccctttacttaggcggaataagctctgcattcccttaagaacgtctttggagcttcttcgccttttacttangcggtataagctctgcatt

SEQ ID NO: 14448 - DNA, 438 bp, Zea mays
agcttatcaattgctgtaacagcccaagaagggatgtctctcgccagagcagcataaatcattcttgatgtcatcacaaatagaacataaatggctctaccagcctttgtcatcaaatcagctttccacccaggttactgtgctgcagttttatcgacaattgctcgaatttgacttctcctaagctttccaagagaaagcgggaggccaatgtactgacagggaaactccgaaatggaacatggaatgagctcctgaacacaagcaagatccgcctcagaatatcgaataggaaaaacattactcttctgaacgttggtctttagaccggacgcatccccaaagatccgaaggatttccagaatcagagttatgtctgaaggcaccggcttgaggaaaaccaccgcatcatccgcgtataaagagaatcggagctgc

SEQ ID NO: 14449 - DNA, 467 bp, Zea mays
  unsure (1)..(467): unsure at all n locations
agcttgagtcagtcctcttgcaaaggataattgatgctcaaaaggataatgagggcatgaaacacattcgtgagaagttaagggctggaaaagccaaatgtttcaaagaagatgatcaaggcattgtatggtttaataaccgcatagtggtgccaaagaatgaagagctccgccagcaaattattgatgaagcacatcttagccgctactctattcatcccggaagcactaagatgtaccaagacttgaagcaacattactggtggacaaagatgaagatcaaaattgcacgctatgtggcgagatgtgacccctgcagacgtgccaaagccatacatttgaaagctgccggtccattacagtcactaccaataccgacatggaaatgggaagacataagtatggacttcattgtgggattgcccaggaccgcanaagggtatgactctatttgggttatcattgat

SEQ ID NO: 14450 - DNA, 426 bp, Zea mays
ctatacagtagagctgcacgcgtgcgatgctatgcatatagtgtgataactcccatatcggatatttatgtatccgcgggggcaaaaacgatccagagatgtttatggtgatggtggacctcgtggtgaccaatacgcggtagaactcaaaactctcgatgaataaactaggaccagtgactagacacactcgatgcaaccatgaactcaacaagccctacctaagtaatactagctaatgctcaatggttgataagattgcggtaaaactaatctactatgtttttggctctttctggactataggacataagaagacagcgatagaaagtaaatctcttaccgataaaccttgctctgattaccaactgatgtgcacccgttgggtgattgcccgatctttatatgagagggtgtggaataact

SEQ ID NO: 14451 - DNA, 428 bp, Zea mays
  unsure (1)..(428): unsure at all n locations
agctngacaacaccatctgacattntacatattatttctgagatcaagaatatttagttcattccttaacatgcaaaagcaggtcttatcaagtggcttagtgaaaatatccgctaattgatcttatgacctcactccttctaaaatgatatcacctttagcaacatgatctctaaggaagtgatgacggatatcaatgtgcttggtgcgagagtgttgtacagggttattagcacatttaacagcactctcattatcacacaacaaaggtaccttttctagaactacgccatagtctagaagagttcgtttcatatataaaatttgtgtgcaacaagcacctgcggcaatgtattccgcttcggcagttgacaaggcaacactatgttgctttttggatgttcatgaaactagtgatctaccaagca

SEQ ID NO: 14452 - DNA, 415 bp, Zea mays
  unsure (1)..(415): unsure at all n locations
agctntacttccctctcatttcttttttattatctcgtgaactgttccgggtgtaccttgtgacctttntggtctttaggctgcccgcactgggcgacggtaaaagctactggaaaatttttacagttcactgaagactgcagcgggcgacgctacgcctactccattctctctctcttacctttcctacgccaaatacagcgttcgtctggtccctgcgctaaaccgagcgttcgtctctctcctacccactccagtgtttgtctggtctggtcctctgggttgggcccacgcgtaacacgaggagaacctgagcgcacagttttcaacaataatagaatatatataaagtggtatagggctgagatatagagtaaatatgattgcggaggattatggtatagggtaaagaaat

SEQ ID NO: 14453 - DNA, 464 bp, Zea mays
agcttgttggcggagagttattcaccgacatctgggaaaatggtggccgagggatggctcacgaaattataaagaaaagtgaaaaagatacccacgatgctagagaagcagcaaaggcagctgaaacaactgcagaacttgaaaggcggagaggtattgcctaattgcttttgggtttatgttttattcttgtgacttcgaacttattcatgttttatatcgcagccgaattatctcctcccctggagcccttcgggtcacaggtcgaccccgaagcaaaaaaggaagatgaaattactaagatggccgaagctattatggacaaagttgtttttcaactactaaacgaagctgcagaagtagttttgaaagaagaatagctattgttgtaaaaaccattggaatattgatgtaatatttgctgaacaaagtgtgtaatattctattagtttgaaagtaatata

SEQ ID NO: 14454 - DNA, 409 bp, Zea mays
cttaagtaacctgccgcatgcaagcttctagtatgaaaacagatgcaacaccgttttccatcactgttgaccggttagaaaacacacacacgctcacgacgactcggtttgcttggtcggagataaacaatttaaataatatatatatttctacaggaatcttattaataaaagactcctaacagagatagcggcgtatttttaatgtcaactttgttaacaacaatttaatacagcagtagcatatataatactttacagaaaccactatatggaaacatctgtttttttaatccataatatcaaaatgtctgttgaccatcacagttcaccgctaaaaaaaggcattcacaacacaactcgttttgcgtggtcgcagcatatacaatgatatgactatatttctata

SEQ ID NO: 14455 - DNA, 460 bp, Zea mays
  unsure (1)..(460): unsure at all n locations
agcttcgacctcttcgccgatccattgaataactccttcgggatcccctcagataaatttttgctctgatgagtatgcacccacctttgcaaagctatcttttagtctcttcgcacaatccatggatacttctgtataatttttctctagaatcctaaagttcttcaatatttttctgcacccttgctgtttccatttcacttatttcttttttcgcctttgcaacttcaaaatcttcattcatttcagaaattntcttctttaaaccttcaacctcggcttcgtgagcttcggcttgtgctttcagctgagcttcgctggttnttagcctatccactaaggagagcagtatcttgtctttttcaagtgcttcattccttagtgtaataacctctgatcgaagatttccaagcgctagctggcagctttcatctttggctattttctaggcctttaaagc

SEQ ID NO: 14456 - DNA, 463 bp, Zea mays
  unsure (1)..(463): unsure at all n locations
gatccttaagtcacctgcngcatgcaagcttcggttctaagctcaattttttatttgaagccgaagctgggccctcatagccctctaaggcgaaaaccttggagagtgaggcagacaaaataacaaagccgacttttgctgaacgaactggtgttgttacccccgaagcatccataattcgtgattatatttttcgtcatgcttcggcgaaaaaattaacagaaagagaagaacaagaggctcaacactatgcccaaaagttgaaatatccaaagggggcgttgatatttaatggcagtggagaagaggatttcttgtattgcctgcccgacagtaaggaaatttgtgtctgtctggagatgagcataagcttcggattttcaactttacaagacggactttcggtgttgcaaagaacgatctgggtgacgtctagcttacaacaggttagaggtgcgacaaa

SEQ ID NO: 14457 - DNA, 461 bp, Zea mays
  unsure (1)..(461): unsure at all n locations
agcttgtagagggagaaactgtgatntgtatgctataccacatggaaggccacaagtctttccaatgcaaggtgatgaccggagataatcaaaggcaaaagctccagcaaaagccatcaagcaaaatctccagcacctacataaaaaaggtgaacaaaaaggatgctacaccatatttgatcaagaagaaaaagaatggaaaggtgatagcaatcaaggccaacaagcaaggcaacaaagaaaagggggccaaacgcatctgggtgccaaaggaaataatttcaaccatgaaaagcaccaagaaggtttggatcccaaaagggaagtgagtggaccgaaggtctacgggaaatttggagacttcggcaaagtgggatgtatatcatgggatacatcatatngaatcaagtttatttgccagtgggttagtgaaaaatttggacccaaatttcccacccatg

SEQ ID NO: 14458 - DNA, 465 bp, Zea mays
  unsure (1)..(465): unsure at all n locations
agcttgccttcgcctccgtgtaccacccacattctttctgagttgtggaacgcgccaatggtaaaattttcacagccatcaagaaaatgctcctcgacgacaagaaaggcaagtgggctgacctgttacctgaagcggtctgggcgttgaacatgactgagtgcagggcgactgggttcacccctttccgccttctatatggatcggaggccatgacctcgcaagaaataaaacatgggtcaccatggacaatcacttcagccgtccccgacgtagacgagcctacttcgaaggacctcatcgacggagaccacgtcttcgccctacaggccctaaacaaataccaagctcaaacaaaagcatggcgcgaccacacagtcatcccgagggagttcagcgaaggagacctcgtactcatccggacaactcggacagagtcccggngcaagctagagccaaagtggg

SEQ ID NO: 14459 - DNA, 453 bp, Zea mays
  unsure (1)..(453): unsure at all n locations
atcctctgagtcacctgccgcatgcaagcttatgcgtctcaaggtacctggtctntgcctcgtggaggacctcgctgacgtagtagaccgccttctgaatggtccggacccctgtagccggtcccgagccctcaggttcctagtcttcttgtgtcgtcctctcgacgactagcaccatgctcaccgcttcttcagccgccgtgatgtataaatacagcagctccctaggctctggggctaccagtattggtagggacacgaggtgctgtttcaattcttggaaggcttgttctgcctcttcggtccaagagaatggaccggatttctgtaatagcttgaagaagggcagcgccctctcggccagcctcgaaatgaagtggctaagggcggctaatgaccctgcaagcttctggacatccttgatacgggctgggggccgcattacttcaatcg

SEQ ID NO: 14460 - DNA, 450 bp, Zea mays
  unsure (1)..(450): unsure at all n locations
agcttcttcaccacatgttcgaggatatcttgaggaggtctagtgcgacactnatgcctcaatttcttcacgttcctcctaagccttttgacttctccaatgagcatcttttcatcaggatctgaaaattgttgcataatcggagattatcttactttggagcaattgtggttagcacatggaaatatattttcaacacatgtgcatttatgaggttcacaagaatttaagctagccagaacaacctcatgagcaacatctaacatgatatgatcatcaattatttttttcataggaataatacaacatatcatatctttctagttagctagcttttcaagttgtagatatatctactgtggccttgaacatggcattatcaaatctaactagagcaatactagatagggcattctcattattgagttgctcaattaataatgatccata

SEQ ID NO: 14461 - DNA, 470 bp, Zea mays
agcttcctccacggtgaggtgtggccactgcgcggttgtcgcacctcggtgaagaattccgcttgttccgcgcctcgattggttccgcagcggcgtcaatttcactccctagggcgcggcaaaggtcattggccaaccacgcgtcccaatttgcttcaccggtgaagaacgggtgcagcagcggtcgcctcccttcacggtccgcagcgacgctccaacaggtgattcatggggatggtggaacagggcaagggcgcacacgtggccagggaagggaatgcgaggatttacccatgctgcgtgacagagcaaccaaacagtcacatgatacccatgctgcgtgaggcagcaccacacgtggcacaattattgcaggtattaccccaccgatggtagttgatcgcgtagatatgcaacaggtaaataatcaccggctattactatcttatattcatacacacgataaaaaa

SEQ ID NO: 14462 - DNA, 355 bp, Zea mays
  unsure (1)..(355): unsure at all n locations
agcttgtgaagatacttcattccatcattgtctagtcggcgangccagagccaacccatgttagccttagcaattaagcaagtttcgagttcagctctattgaaatcaactaaggatagctgaccctctaatactcccttaaaggctactgaatcatcacttcttctaaagacagtaacacctgtatccataaaaagacagttgtagcccattttacataattgagaaacagagagcaagttgtaatctaaagaatctacaagaaaaatattggaaatagaatggttaggtgatatagcaattntacccaatcctttgaccaaaccttgatttccatccccgaatgtgatagctc

SEQ ID NO: 14463 - DNA, 399 bp, Zea mays
agcttggtcgaagacctagaagtgcttttctttctcgcgggagagcgcgttcatcgccccctcgtaggtgaccagggaggcatacgacataaacccctccacgatagtggggagtgcctgcaactcctcctgtacccactccaggcagcgaagtccgggctctcggtccggcacttcgaagtcaccggtccgcgcccagctcatggtacgaatccataagttgtttgcgcgtgcgctcggcctccgcgcgcgtcgcggccttggccctctccacgcggctatacagggcgatgagccgctcctgcagctgctcggtgcgctccctggcaagattgccctccgcccacgccagattggcctgcgcctacacagcctgcgccttggcgagggcctcgatgg

SEQ ID NO: 14464 - DNA, 459 bp, Zea mays
agcttccaaccttcggactacatctaaatacttttcaagcttcgggtctcttgccatactgcttttatccacatggcccgagataacttgtgaatcagttttgaggattgcacttcttattcccattgcctttagcttccgaagccccaaaagaagagcttcgtactcggcaatgttatttgtacagctgaagtctaactttattgcataacttcttctgactttagaaggtgcaactagaacagcagttgcccctgcatcgaaggtcccctaggatccatcgcaaaataccgtccaagcttcggcatattttgttgcttcttcatcctgagcacctggcgtccaatcagcaatgaagtctgctaatgcctgagattgtattgaggatctgtgcacgtaatcaatggtgaattcgttgagttccacggcccatttcctgatccttcctatggcttctct

SEQ ID NO: 14465 - DNA, 464 bp, Zea mays
  unsure (1)..(464): unsure at all n locations
agctntagagcactgtaactcacctttgagctctaaggctctaatgtgaggtgggctgaaatttatagctaattntagaccatctgtttaaagctttatctctaaagtttagaggagtgagtttaaacaagtcttagacaacttcttagtgaagatgttgacaaataaagtcatgcggacttagtgaagatggcgacaaagtgagatattgtgaggacatggagtatacatacataaccaagtgcaatatactcctagacaaaatatagatcaatctctatatgcttagtaagttggtgttgaacgaagttcacatacatgtagacatcgctgatgttgtcacgatacacaaaggttgtcttgtataagagagtgtgcagctcanacaatagttggcataaccaggtgacctctacgatggcgttggcaacatgtcggtattcagtctcatcactgaaacatga

SEQ ID NO: 14466 - DNA, 459 bp, Zea mays
  unsure (1)..(459): unsure at all n locations
agctntatgctttctgaacaatggaaaagcttttactcaagcaattctaacatgccctagtagttgacacaatattcaaaggaacttggatatcacacggcaggaagtctgaaacgttgtagttgcgaccgtaagtaatgctcgattattgtagacctgcacgacgaattactcaaatagttagcgtagcgctatatagagattatggggggggcaagctagcagacccctattcaacttggtgattattttgtgggaagataattctttcagaaaatattattgtccaaggttagtgcgattataaaacttacccaacagcagtggcaccccatgaagcaacattataaatgactntagttccatcccatgccttccggatttacttttcttcttttagctgaaacgtctttcaagcgctggaagtcaaaagttaacatcaaatatccaataaaaaat

SEQ ID NO: 14467 - DNA, 459 bp, Zea mays
  unsure (1)..(459): unsure at all n locations
agcttatgaagattcttcatcccaacgtgtgctattcggcgatgccagagccaacccatgttagtcttagcaattaagcaagtgtcgagttcagctctattaaaatcaactaagtatagctgaccttctaacactcccttaaatgctactgaatcatcacttcttctaaagacagtaacacctatatctgtaaaaagacagttgtaacccattttacataattaagaaatagaaagcaagttgtaatctaaagaatctacaagaaaaacattggaaatagaatggtcaggtgatattgcaattttaccaagtcctttgaccaaaccttgatttccatcctcgaatgtgatagctcgttggggtcttggttnttctcgtaggaggagaacatccttttctcccttgtcatgtnggttgtgcatccgctatcaatgatccaacttgagtccccggatgcat

SEQ ID NO: 14468 - DNA, 421 bp, Zea mays
agcttgtgggcttgtcgccggtcatgtatctttctcttggcatgatctcccgacatcacttcgagttgtcagactctaatgaagcaccaggctctgataccaagtgaaagtctcctagaaggggggagaataggcgttatctaacatttacaacttttaacacacactacaagccggggttagcgttagaactataatcaagtctatgagagaggggaaaacaaatcaagtggagatcaagcgaatgatcaccgtgatttgtttgaccgaggttcggctccaaagaacctagtccacattgaggaggacacagagaccgggtctatttcaaccctttccctctctcaaacggtcacttatagcgaatgagccttatccttaatcaatcgggtcactaaaaccacgcgaggaccaccacact

SEQ ID NO: 14469 - DNA, 461 bp, Zea mays
  unsure (1)..(461): unsure at all n locations
agcatgcgaagatacttcatgccaacatgtgtctttcggcggtgccagagccagcccatgttagtcttagcaattaagcaagtgtcgagttcagctctatcaaaatctaccaagtatagctgaccctctaacactcgcttaaatgctgttgaatcatcacttcttctaaagacagtgacacctacatcactgaatagacatttgtagcccatttgacataattgagatacagaaagcagattgtagtctaatgaatctacaagacaaacattggaaacagaatggtcaggagatatagcaattntacccaatcctttgaccaaaccttgatttgcatccncgaatgtgatagctcgttggggatcttggctttctcataagacgagaacattttcttctcccctgacatgttggttgcgcacgcgctgccgatgattcaacttgagcactcggatgcataa

SEQ ID NO: 14470 - DNA, 261 bp, Zea mays
  unsure (1)..(261): unsure at all n locations
tgatatgcaagtacacctaatcatacatctcgtggatcagatnagaatattatggccactatatttacatcatatgtttcaggtggagcgatacctgggagtattataaggtatgtgcgaaatcgcgctcacccagatggttcaatcatggagggatacactacagaacaagtgattgaagctgatacatacatcattgacagaacatgatatgtgtgcctgtacctaaacatganggtaactatgtgggagagggagaat

SEQ ID NO: 14471 - DNA, 154 bp, Zea mays
  unsure (1)..(154): unsure at all n locations
tttctatgatatgagaggagacctgatagctttggtgtaccancatctggcgaggattatgactcttatagtaagtatagcatcaacgccatactaagaccacagggtgcgtgctcaaagcattactttggaggtcagcaggttctctatgtat

SEQ ID NO: 14472 - DNA, 288 bp, Zea mays
  unsure (1)..(288): unsure at all n locations
tcacctgcngcatgcaagcttctanagggagaacacattgtgtgactgacanatgnntcatttgatatagacaggatntgtagcgcatgtcacgcagggaagcaagttggtgttcatcatccacacaagaacatcatgatgaccgagaggccgctngagctcctacacatggacctattcggcccgatagcttatataagcatcggcgggagtaaagacctgctagntattgtggatgattattctcgcttcacttgggtattctntttgcaggaaaaatctcacacc

SEQ ID NO: 14473 - DNA, 217 bp, Zea mays
  unsure (1)..(217): unsure at all n locations
cgtacaaattatgtgatgcccaggctagagagaacataaaccgactgcaggttgcaggctgggacctcgacggacggtgtggtggttactcaagtaaatttatgcgaactgattaatgcaaacatgcatacaacctgtttggctcgagctaacatggataaggcctctaaatgtcaatgctggaatgcaagtcagtaaatcactgnaattgttgtca

SEQ ID NO: 14474 - DNA, 415 bp, Zea mays
  unsure (1)..(415): unsure at all n locations
tatcgtactactgttcanaaacttactggccttctaggattaactgtaatattcattctacatatttactcacctcagagtntggcatttcattagagtgcagctatctgtattcagaacagaaaaagggtggatgacttaccattgtggatgaatgcgcctttcgccttttccttagagatccccatatcagctactttaacatcttcatatgtctatagtctcgaactcctccttacaccttctacttgctctgaaggtctggatttggcttttatcatctgaaagcatcattcaaattgcctctccttgtgacattctcactccctagactctgcatagacctccacttttgcaaatcatcattgctcctagagctagcaatatcatatgtatcgaattacttgccactatc

SEQ ID NO: 14475 - DNA, 401 bp, Zea mays
cactgtacgcatcttaagcactcagctgcacttgcgacaaggtaactctgagtctacaatcaaacatgacttgttgtgaagcaatgtcttgaccatatgtccattacttatatacatggccgatctataacatctaggattactacttctattaactgtcctgattacctttgggtactatggtagtacatgccacgctttacttatcaatgacatgagagatcatgatgatctggatttatctgatagatattactgcggattaagggactgagcggttccagtacttcagaggactgtcgttgaaaccccggatacaggaacataggtgaagggcccctactaatataaggaacaaggagtgttccgctccgcatgggcaccatgtgttgcagtgggca

SEQ ID NO: 14476 - DNA, 66 bp, Zea mays
  unsure (1)..(66): unsure at all n locations
gctttgcacggnnaacactccttcttttggtctatggntcggatgctgttctacctgctgatctca

SEQ ID NO: 14477 - DNA, 297 bp, Zea mays
  unsure (1)..(297): unsure at all n locations
taagtagcatatgcaagtaaaatgcgaatggattctatcctggctacnggtgcataggtttcaccgaaatccaaaccttcgacttgtgaatatccctcggaacaagttgggctttgttccttgtcaccacaccgtgctcgtcttggcttgtgcggaagacccatttggntcctacaacnatttgattaggacgtggaactaaatgccatacctcatttctagtgaagttgttgagctcctcttgcatcaccaccatccaatccgaatcttgtagtgcttcctctatcctgtgtggct

SEQ ID NO: 14478 - DNA, 259 bp, Zea mays
  unsure (1)..(259): unsure at all n locations
atacttcaaatcatatcgtgtccctcttggacctgatntacttngcaatctacttcgaaataaatcggtccttttggcattgacatgtgatatctatcttgaaatgagatgatgttgttgaatgacattgtcaagatcacctatccaccatatttgatagactgtctcgtgtacttgttcctagacgcttgactctcgcttactagcgataacttgatcctagacggttgactctcgcttatagcggtacttgatccta

SEQ ID NO: 14479 - DNA, 275 bp, Zea mays
tgacgcacctatacggctcactgtggaaaactgagatccaacctaatgtccatgctgacgacagccggccttcaccgtgccctggtacctggccggctcatgaccgcgatgcgtcaacgcggccggcggcatagctcaagcccattgcgatacctacgagcattcttattgactttcccgctgccaacttgcctgcaccctacatttgggcagttgtatcgcgaccgaatgcaactgccacgatacgagcaacactacgattgttccgcgcggca

SEQ ID NO: 14480 - DNA, 89 bp, Zea mays
aaatataacaactagaaatctttattcattcagatatacatatggatccaaactgataggtactactagcttatatcatatgtaagctc

SEQ ID NO: 14481 - DNA, 246 bp, Zea mays
tcttgtaagcagttggaaggtggaaaacctggatcactcgaatgtatgggtggttggggtatttatatgcccaaccacccaactatcccgttggtggaagctgctgtcgcatggcgcactggacagtctggtgcgccaccggacacttgtcgttgcgccaaccacgtcaccaggtccgtgggttcagaccgttggagctctgtcttgtgggcccacactggctgtccggtggtgcaccgaacaagt

SEQ ID NO: 14482 - DNA, 280 bp, Zea mays
  unsure (1)..(280): unsure at all n locations
gcttgagtgatgctcttangtcattaacaatctngattaacacatggtctccaagggtgttatgttctccttaagtttctaccatatgtgatcacagtcctcagtagtaccaaggtgtgctctagccatggtaacacctgatgtgtacacgtacaagcttgccaacagcccaggcgaggtctacagcaacgcttggaacatctgacagctacgtcgcttctacccttaagatgctctcaagtcgttcgtacacctcattgacgcacaaagtctaaccatc

SEQ ID NO: 14483 - DNA, 277 bp, Zea mays
ctgcactattagggctcatcactgtggtagaatatttactataatatttgagatcgtttatagattggcatagtatcattgataaggagtttctggccattaacaaccatttctaattggggacattaatcaatgtatttatttttagactcaatgggtcaatgaaagtaagatattgcaaaataacatatgcgccttattagccattagtaggagaaatgtatgaaaaaaaggagcatgctagagtactgaataaaagatgtatatctgatatggt

SEQ ID NO: 14484 - DNA, 259 bp, Zea mays
tttcacactggaaaaccgcggatgtggcgtgctgcggtgcaccagtggaacggcaaaaaagatggtcgtctgataacataaggtcccaagtgtatctctgatttgtgaactcgactctagctcaatgcgacatgatacatcagaaacttgggactaaacaagcttctgcggaagttctgtaaaagaggaactcgccctgatatataatcaaaatagagactcgaaacctgtctggtgagaatcatctgacaacactcaa

SEQ ID NO: 14485 - DNA, 122 bp, Zea mays
cacctgccgcttcagcttgagctgaaaacgcacaggcgcgctctagagatgattgccaaagacaggattggagacactcctcagcagtacaaagaagaagagaagatgcgcgctggctgatc

SEQ ID NO: 14486 - DNA, 275 bp, Zea mays
  unsure (1)..(275): unsure at all n locations
gaagacgcaagtatcatagaagtcatggcatcagtcactgcanataaagatcaccagtatatctatgagatactgttggcatctggtcttttacacaaagaacatagtatcacggcattacctgctcaactccaaccatcatattatccaatcaatccggagctcttcctcattcttgagcaaacaaaaccagactttagttntgcattccaaactgtcagtggaactaagaaaaagtgtaagccttacacggtgaagcttcaccgaagacttgt

SEQ ID NO: 14487 - DNA, 276 bp, Zea mays
  unsure (1)..(276): unsure at all n locations
acttcctacatgctgttaatgtcttccttttcggtggttgatgccaaagggggagaagtttanggaccaaagcaatgaatactatatcaaacaccaaacaccaccaattttataatttatatctccanatgatntttcaagtggttttaagtatttggtccacaaataggaagtaagtgaattatggagttagggggaggcttaagtccataatatcacattgttggggacaatcatgcatcctagcaagtagattgcatattttcactcaaatac

SEQ ID NO: 14488 - DNA, 115 bp, Zea mays
tgatgatgctaaattctttcctaggatcaagcggaaggcgacctacctctcactaaactcttgaaatgacttgtttgatgccaatttatgttgatgatatatatttggtctacta

SEQ ID NO: 14489 - DNA, 445 bp, Zea mays
  unsure (1)..(445): unsure at all n locations
cactcttcaccaacttggtcatgctctcgcttcgntgtgtagagaccataagaccacaataatcttcttttgaaaatgcaggtacccaatctttgcgtatttcatataatcctgcaagggtgttgttctcgtgtagntggaaatcatcaagcatcatttgccaggcagcctcgaactccatttcattcaatggatgatgtattatagaatggaacctttgtttgaaatcccatgtctcaaatcttgcttataattcatttcagtggggcatataccttgtttgacatgcaacaaacacaatgatgtatggtgttgaaatactctgcaagggcaattgcatggcaggtcttgactaaatatataaatacatacatctgcatacaatatgatatcatatagacgnacataaaattacaaacatttattacacatacatgtcacatac

SEQ ID NO: 14490 - DNA, 363 bp, Zea mays
  unsure (1)..(363): unsure at all n locations
gcgaccttaagtcacctgcagctgcagcttgaccnatattcgacgagatataaatcatgcttgtngatctgctcgataagtaaagcanatttgaaattatacaattatgccaacttcccaaacactctatatcaactctacaacaaaagttattaagggttcatgtagacgaaaatccaagaaaatgtcaaagaaaatagtccgattgccttaacaatataattgagagctttataatgatactaccttgaccaaagtgaaactctaatttatattcaagatataaagtttgacctttaataaacattgtagagcctatngtatacaacanattntatatntaaaccaagcctttgatcaatc

SEQ ID NO: 14491 - DNA, 209 bp, Zea mays
tggtcaccccgagaaaaaaaggaccaattccttgtgcaaccctagggctgatcttatagagaaagcaggcacgggcgattccactgatgaggggctacatactgcctgctggaagtgcctcatgagtgtgcagaccatcgaaccatgccgagatttattctgtggaggcaacacggaggcacggaattactccggtcgagacgctgtct

SEQ ID NO: 14492 - DNA, 214 bp, Zea mays
acatctggagttgctgaacaatctgtggtgggccaaaactgcaggctattgatgtgagcacttttgctaaaagtgtactctaataatgtaactccatgctaagtgaatacaatggccaattatagtccttttagtgatgcgagccattggtgcgaagattaaagctgcgcttttaggaatatgagacgcatacgacactgctacgtgcgaagcg

SEQ ID NO: 14493 - DNA, 262 bp, Zea mays
tggacatataaggcttaccaagattggacccttgctctgctttcagtgactataggcatctctcaggaggcacgaagaatctacatgactatggaacatagtcgtctatgggatatagctcggactgatacttgtgtttcttatggaactattctcaaaagtgtgcttgatcctgacgatacatctttcagccatcaattataatagactatcccatgtggaaaagacccagaatcaggcacattagccaatacctttgtat

SEQ ID NO: 14494 - DNA, 447 bp, Zea mays
  unsure (1)..(447): unsure at all n locations
agctttgacccacgcaactagctgtgtggtagaatattggtcgcggtgctcctgacacanttganaatgggaatgaagggggcgcatgggaatgagaatggatctggtcgtggtgcgcgggacacagttgtgaatgggaaacgggtcacatgggaatgaagggggcgcatgtgaatgagaatggcagaaccagtaattggagcctaccccttaccggcttaatagtagtaaagattattagcctaactaaacctcactagctggagggcgggttgcatggttaggacacacatgcatcttaaacaatcactagctgagtgcccgtgcattgcacaggaatatataataccagttacttccatacctatttacaaattggtgttttctgttttagaaatatttatatcaattatgacctaccatcataatttgtatttaactaatgtt

SEQ ID NO: 14495 - DNA, 72 bp, Zea mays
caacgcccttttgagcaatttgacttaatcgggactgctattgagagctataccgttaagtggttcacttac

SEQ ID NO: 14496 - DNA, 202 bp, Zea mays
  unsure (1)..(202): unsure at all n locations
tgttcattctgagaaagacaggatttgtagcgcatgccaagcacggtagcaagttggtgctcatcatcacacaagaacatcatgacgactgacaggtcactggagctcctacacatggatctattcggcccgatagcttacataaacatcggcgggagtaagtgctcgctaantattgtggatgattattctcgcttcactt

SEQ ID NO: 14497 - DNA, 270 bp, Zea mays
  unsure (1)..(270): unsure at all n locations
tatgaactatctacttgtcatgaaaccattgctactttaaaagggtgtaataatgatttaaatgcctaactagaagtaactagtaaatctaactcttgtgtagaacatggttgcactaggtgtaaagatcttaatggtgatacttgtagtgaacacctagagcacatttctaaataaataatgaagtagctagtctcaatgcccaacttaagactagcanaagtgaattttgacaactaaaatttgcaagggatgcctacacaattggta

SEQ ID NO: 14498 - DNA, 292 bp, Zea mays
gaccaataatactactcactgaacgtaaatatggttggcctttttattgaaagacaaagctggatgttagacgctcatccatgcttatcaaccaagcaagtttatacaatatggccgaaaacttctgtaatgttgacttaaggcataaagagtcctgccgagtccaaccccaaaaatcactcgatttatgttttcaccctggcaccagatcgtagctgatgaaaatttccaaaagtaatggatcgacattaattagactttgtctataaaaaacttagtgaaagcatttgag

SEQ ID NO: 14499 - DNA, 144 bp, Zea mays
  unsure (1)..(144): unsure at all n locations
tgacacagttctatgtatgctacatcaatttcaattctaacataatatgttgatgattacacttctctgtcatcaattgatgactgttagagggaantttccgatagtggtcgtgatatcagtgacccgtgtactgagaatagt

SEQ ID NO: 14500 - DNA, 238 bp, Zea mays
  unsure (1)..(238): unsure at all n locations
cagcttcggaagccgaggtccanaaacaccttacctgagctcngtgtctagaaacgattcagtttcccagcgcgtagcggtcccaccttgcagagttgaccgttggtctctgcggccaccacgcagcgagtgcaagcggctgtccgcctggtgtaaaaatcctggcgcttcgccttcttacctgcagtactatataaacagacgagtaggtgtgaagntaccacatcattcattgcta

SEQ ID NO: 14501 - DNA, 328 bp, Zea mays
  unsure (1)..(328): unsure at all n locations
gctatgaagattcttcatcccaacgtgggctagtcggtgatgccagacttctcccatgttagtcttagcaattaagcaagtgtcgagttcagctctattaanatcaactaagtatatgtgaccctctaacactcccttaaatgctactgaatcatcacttcttctaaagacagtaacacctatatctgtaaaaagacaggtggaacccattttgcataattgagaaacggaaagcanatcggtatataaagaatctactagaanaacattggaaatagaatggtcaggtgatatagcaattntatcaagtcctttgaccaaaccttga

SEQ ID NO: 14502 - DNA, 297 bp, Zea mays
  unsure (1)..(297): unsure at all n locations
attgtctcttcttcctgagcccctggcgtccaatcagcgatgaagtctgcttacgcctanngactgaatgaagatctatgcacataatcaatggtgaatntattaagctctgcagcccattttcctattcttccagtagcctctctgttcctcatgtngtcatttagagggtgtgacgaaggaacaattatgtggtatgcttgaaaataatgtcgaagctttctggaggccattaatacaacatataataccttctccaattccgtgtaattnttctttgatggacttagaacttca

SEQ ID NO: 14503 - DNA, 297 bp, Zea mays
  unsure (1)..(297): unsure at all n locations
cttctgtcactgtaataattcttcgctttntcggcccagctgccttcttcattatcgagggctccttttcctgttgaaaagcttcgtcagatgcggccccagtggacttagcttgataggcaaagattcagtcattacctttaagatctcctncacgtcggtggcagaagggtgtgcagcagtttcttcttctatatcagntgccttctacttcggagccgcagcctttattttcttcgaagcatctgtcttctgctcaggcctcagctttctctttttcaagtnttcttcatcatc

SEQ ID NO: 14504 - DNA, 233 bp, Zea mays
  unsure (1)..(233): unsure at all n locations
tgttgatatngcatctagccgaggaccatttgcagtgtaggtgtaatgtgtaatgtgaaggtgggtggttaaaggggacttttaacatatacccaacttatgggttgttggtttgcagccactgtttgccacgtctaagattacacaaagttaaccaagttaggcatgtgtttggtttgaaaccacagttgtggcaagaattttccccttctacgtatgtcctactcgtcaac

SEQ ID NO: 14505 - DNA, 308 bp, Zea mays
  unsure (1)..(308): unsure at all n locations
agcttatgaagaggaaccttcggtcatcacatgcggacagcttcagcctaagctggttcttcctaccagaccttcggcgacgaagcatagtcccaacaaccctctaggcaccagcggcctcactgccaaggagaccgccacgtggttcctgaacaccctcgacgacccgctagagaaggacctatacacgtagctctggcatagcacgatcgccgacgccgccccgcaacacgagggcacgttcccgggccctacctcgcatncttcgccaccacnncgcgcccgtgggagcagcaacgtcgagtcta

SEQ ID NO: 14506 - DNA, 417 bp, Zea mays
  unsure (1)..(417): unsure at all n locations
agctggtgaaggttcttcatccccacatgtgctaagcggcgatgccacagtcagcccatgctagtcttagctattaagcatgcatctagaccggcctcttctttngcaaaatcaactaaataaaagttgccgtctaatacacccttaaaagctagtgaaccatcacttcttctaaagacagacacatctacattngtaaatagacagttataccccatgttgcataattgactaacagatagcannatatatcccaaggactcaactaanaacacattnagaaatgagtgctcatttgagaatgcaatttacctaatccttttaccttgccttgattcccatcaccgaatataatngaatcttgngaatccttattcttgacgtaggaggtgaacattntcttctcccccgcatatg

SEQ ID NO: 14507 - DNA, 339 bp, Zea mays
  unsure (1)..(339): unsure at all n locations
gcttcggtactataacatatccgaagatgaaggggcgaaccgacttatagatagaatgaccctctagcccatatgggtctgagtcattgtggtaaacttttatgaggngcatgaatgtaattcctcacaggctgtgttctgtgcctataaatagtgaacaatattcctttactgttcacgaatttctgtaattgctaacgcatcactcgggaattattggttgtcaaggcaaaggtataaatgtacttaaacgttgtattcaaatatcaattcattttaatatgattatctntaatggttcatgttctatcttaactttgaatatctttataaagttaa

SEQ ID NO: 14508 - DNA, 486 bp, Zea mays
  unsure (1)..(486): unsure at all n locations
agcttnctnccttctntagcgaaaatcattgtcagctcgaatatactcgtccatcttctggagcaacttctccaaagttngaggaggctttctggcanagtactgagctgcaggtcctggccgaagccccttgatcatggcctcaatgacaatttcattgggcactgttggtgcttgtgcccttagacgtaggaaccttcagacatatgcctgaaggtattcttcgtgatcctgngtgcactggaataaagcttgagcagtgactggcttcgtctgaaacccttggaagctggttatcaacatatccttcaacttttgccatgangtgaatgtcccctgcctaaggggaggagtaccaagttggcaacgctcctgacagccatgacaaaggactntgccatgaccgccgtgttgccaccgtacgaagatatagtngcctcatagctcatcaagaatnngttcgggtctgaatgaccgtcatacatg

SEQ ID NO: 14509 - DNA, 185 bp, Zea mays
  unsure (1)..(185): unsure at all n locations
gttctttgatcttaangaagaatgtgttagtttttgtgataatagntatcatatgcttcttattngattatatggngataatgcataattagtgcttctggtgatatgaatcaantgatatctattgngntngtcttataatagatattcatgtggntctcgtgctttaaattaatatcttaatg

SEQ ID NO: 14510 - DNA, 409 bp, Zea mays
  unsure (1)..(409): unsure at all n locations
ctcaatcaccaaaatacttagaaatggcccaaagacacatttnncctttcaatctcccncttttttggtgatttatgccaacacaacataaagcaactagaacaagtgcaaaatcacttcatatgaaaactcannatggttttgattcaattntggcatatatggatcatcctttgccaccacttggttngttntgcanataaactcaatctctattttatgtcaacacacatgttaggcataagagagtctttcaaagagattgatcaagattcanaactcccttaatcccataatcatacttctccccaagngccacttttacaataaacaaanagcttnacaaacaaaacttatttatatttcaaattctcaagtggactgaccattatactttgccttatttctc

SEQ ID NO: 14511 - DNA, 315 bp, Zea mays
atttctgaaatgaactataatgctaggagttgtaaaaaaaagtagcttctctttcacttccgtcacataatcactttctacatataatttatcctattgaaacgctttcaccatcgattacttctctattgaatacttccacagatacatgctaaagcttcagagcacatatttgatagacattttaagcacctttatattatgggcaaatacattctctatattttgtcaggtcatgatttagctttcaggatgaaccatattggataggatttacttgatatctatgacagtgaaatcactataagttatgct

SEQ ID NO: 14512 - DNA, 266 bp, Zea mays
gactacagcatgatacgatgatttgaagcgaacgtggccttccaacttgccgcagcctaactctcctgtttcgtatatataccattggagaacgcaaatggagaattgtatggattttgtgaaattacaaattagatttgacgtaatgatgtgaaaaataacactggcgttaacttaaaagtttggcagctactattttctaactcaaggaaaagaaaatttgctgagctgctgacaattgcgtgatgaaacgctgtttacgttct

SEQ ID NO: 14513 - DNA, 205 bp, Zea mays
tcttggctggcattctgcttgccgctgtcttctggtagctcggacggcactccgaagcggcaaacaacgttctgccaaaagaattttgggcagtctttgatgtgattgtggaaacagccctcgcttcaatccatttggtgaaatattcgacggctacgaaggcgaacttaagggtcccctgagcggtgggcaggggcccgacaat

SEQ ID NO: 14514 - DNA, 347 bp, Zea mays
  unsure (1)..(347): unsure at all n locations
gaatcatcccccatctccgacgatgaaccaaccgtgcatggggaagaacctnctcagtgagaagctcgccgacgaaggaaccgacgccgtaatgctcggcgacatcatgaagccagagaacaagacccggcgcaacctgtatcatgagatgagatctcggaggtgggagaaactcctgatgaacgagtcttcagggaaaggaggaactcccgctgacgtgatcgtcgggcagctcaagagcangtcgagcaggagggcgagacacgccgagagaaccctctcttcggacanaacctgaaccctgacttcgcccgagccatgaatacaccgagcgaggtcgatggagt

SEQ ID NO: 14515 - DNA, 356 bp, Zea mays
  unsure (1)..(356): unsure at all n locations
tcaaaacaacccccgcaagccacacaagggctgctgaggcgaggagttnggcaccgctagaacttgttcattctgatctgtgcgagatgaatggaattttgaccaaagggtggaaaagatactttctcactnttatagatgactccactagatnttggtatgtgtatctcttaaaaacaaaagatgaagcgttcaattattntaaggcctataaagctgaagttgagaaccaacttgagaggaaaataaaacgttaaaggtccgaccgaggtggagagtatttctctaatgtgttcgatgaagtctgcgtggaacatggtaattatcatgagagggacaccgcattctcaccacaa

SEQ ID NO: 14516 - DNA, 472 bp, Zea mays
  unsure (1)..(472): unsure at all n locations
agctngacacaggtatccacacaataatccttaattctttntcccgtcttatggacaangcatcctccctggattcaagtccatagaccaacatatatcccgttatcaagatgaatacaatcaattcctgacctcgcgcgagtgctagaanaatcactcgacttctaccgagatcctgattagcaaagcagctactcgacctagcatactagtattcatctcanaaaggaatcctaagttcatgcagctagaggtttcaagcaactcctacacttaagtgcacattacaaacctacaaacaataagtgtagtanaatagcatatataaacggggtatgcatataccggngcttgccttcaattgctggggctacggggagatcctcaatagcagctctgaagcctgctctggtcctctcttgacaggtcctgcttgngatgacacgtactctcgtcgcagatacatctatga

SEQ ID NO: 14517 - DNA, 384 bp, Zea mays
  unsure (1)..(384): unsure at all n locations
agcttcgacactatctctggagcttcgttcttctactctgcacctgctgtttctgcctggtcaatctgtacgaaagtattataagacanattcanaaatggaaaggacaaggtaagaataaggtatgatttcgttaccagctngaggtgactccgagcttcgtcaccagctttgctccgaccacccnttgtccatactaactntataaatctgtntgcaatactttgagccagatttggaacatcatctaagtctgccggtgaacaggctgaagtgggtctattaacaatcttgccgtgttcacagccagacttcanaaaagcaacagctgtgccccgagaagctgccagggcacanaagtcgctatgcccagctataacttcg

SEQ ID NO: 14518 - DNA, 221 bp, Zea mays
  unsure (1)..(221): unsure at all n locations
agtaccctaaccatgtttaccaactctctaaggcgctttatgggctcaagcaagccccaagagcatggtatgaatgccttatagaattccttatcactaatggattcaaagtcggaaaagctgatcctacactctctaccaaaacacttganaatgagttgtttgatgccaaattatgttgatgtattatanttgggctactaacgagtctacatgtgaag

SEQ ID NO: 14519 - DNA, 254 bp, Zea mays
  unsure (1)..(254): unsure at all n locations
tatgttgagcaacctcccagctttgaagatagcgagtatcctaatcacgtttataaactctctaaggcgctgtatgggctcaagcaagccctaagagcatggtatgaatgcctaagatatttccttatcactaattgcttcanagtcggagaggccgatcatactttatttactaaaactcttgacaatgaatttgttgtatgccaacattatggtgatgatattatatttgggtctactaaccgaatctacat

SEQ ID NO: 14520 - DNA, 325 bp, Zea mays
  unsure (1)..(325): unsure at all n locations
gcttgttgactaattaagacaccgtctctattacatcatgaatccttggttccttgcctatcaaatgttaattnnttttctcacctgaattgacagcagtctactctatatacatacttacatagtgaataagcactgctaaactacattggttagtttatggtgtagttcgtatcccagntaagcaattttcagagactaggttaatacattatgaatgaatatagcggcttttcacgtcccttaccccgcacgccacacacaananaaaagggaaaggaaaaagaacacacatagtacataaactttgactctcacatttata

SEQ ID NO: 14521 - DNA, 247 bp, Zea mays
  unsure (1)..(247): unsure at all n locations
gcttaagtgcctaagtcacgcctcatgggccgtaacacacttaaatcgttatactcggcagtccctcagatctagtctgatagagccactcaaccaggatcaaattccacaatctcactccaagggtgagtcacnagaagaaatacaataaaacaggaaaccttaaattaagtactgaattattacatagatcggagtttttcgagtagcaaataagagttcacgaaatataatgcagcggataatc

SEQ ID NO: 14522 - DNA, 427 bp, Zea mays
  unsure (1)..(427): unsure at all n locations
gcagaacagaaactgccaaacttcaaggcaacagataaaatatgcctagaagatacatccattgtcgtgcgtctagaagtggtaactgtcgagagaacaccacaaatgacaaaacaagaaatggtggaatgcagcaacacatttctaataaaattatgaaagaccaggactatagataataacaaacaaattaaatgagcagaactttgctaatcaaacaaagcatcaaatatngtactcccttctgtctttnntatttgccanntgtttagtaaaagtgaattaacggaagacanatattcgaaacggacggaggtagtacaagataaccattntttggataatatcctanacgttaaggtacagaattgaacataccaagctggtaatgatccagngagacatctgtactctgagaacacataat

SEQ ID NO: 14523 - DNA, 228 bp, Zea mays
  unsure (1)..(228): unsure at all n locations
ttgaaactaggaagtgagaagagaaagagggaaagagtatatagttacataaaatatatatataattaaatgctcaaagttagtacccaatctaatctgaagacanattgtcacaatattntaatttaaattcaaaatgaagtgtaattggaaagaagggaaacagaacattaataaaagaacaagagaaatgcttgaatgggctgagatcccgcttttcggcccact

SEQ ID NO: 14524 - DNA, 244 bp, Zea mays
  unsure (1)..(244): unsure at all n locations
acaaatgttcattntgagaaagacagggtttgtagcgcatgccangcgggaaagcaaagtggaacccaacatccacacaagaacatcatgacgaccgacaggccacttgagctactccacatggatctattcggcccgattgcttacataagcatcggcgggagtaagtactggctagttatggtggatgattattctcgcttcacttgggtattctttntacaggaaaaatctcanacccaag

SEQ ID NO: 14525 - DNA, 402 bp, Zea mays
  unsure (1)..(402): unsure at all n locations
agctntaaggaattctgnngaacaaatggtctattattcattntgtatctgtcagacatccggagtcaaatggacttggtgaaagagctaatggcattataatgacaggaataatgaagttgattcaatcagcccagaggaaagtggccagatgaattgatcaaagtggtgtggagccacaacacaacaatatcaaggtcaacaggttntacaccgttcaaactattgtttggtgacgaagcaataaccctagaagaatctaaggcaggatcaataagaacagtggcttcggcagaggacgaagctgattattctgtggcanaagatgctatagaaaggatcaggcttcangccgtggagaatatcaataaataccaagccaaaacaataaaatggcgtgac

SEQ ID NO: 14526 - DNA, 293 bp, Zea mays
  unsure (1)..(293): unsure at all n locations
agctcttgatatggagacaaccgatgatntattatatggaccaaggctctcacatgagttagcgtagtcgcaagttggtggaccatgtaatctgagctatactcgtcttgaccataaaaattatttgcacacaaagcgtaaatgtgatatggaatatggagaagcagggagtatgtngaagtattttcaagatataatatgcgagaaccaatgataangtggttcaaattattcatgcgtattttcactagtgaagtctatntgaatcttttaattttcttctcttcatatat

SEQ ID NO: 14527 - DNA, 142 bp, Zea mays
ggtaatacctgcgatgttaccgactggcgtgtttgcgcgaccccatctcttacttatgtgcgcgactgattgcttgttctcaaacggagtcttcctttgtttacttgtctgatgtcgctcatctcttccgacgtcgtgttta

SEQ ID NO: 14528 - DNA, 310 bp, Zea mays
  unsure (1)..(310): unsure at all n locations
actgtagagcatgcttctagcannattaagattctcattttctaagtcacgctcattaatttagcactacagtgagctatgtgattatttctgtggttaattaaagctaggtgacaatggatagcatcaacgtcaatgtctctacatctagtacaaatagagacatgatcacgctagatgtagagggtctgcatgcatttaattcatcaatcttagcatgtaacatagcatcttcatttctaagagtggaaatagaaaccattgcaacatttanatctttagccttagcaactnaattttcattctcatt

SEQ ID NO: 14529 - DNA, 151 bp, Zea mays
  unsure (1)..(151): unsure at all n locations
gagctttgctgtagtatgcgagatgnactgtgtaagtactcgtgctaattgcttcacaagcattattgtctatagacatctggacttatgagacttgcttagtctagacacctagcattccatatgtattgacaatcaactctagcacctg

SEQ ID NO: 14530 - DNA, 367 bp, Zea mays
  unsure (1)..(367): unsure at all n locations
gcttcggatctctggctntacaactcttgtcaatatgaccagaaatatcttgngaatcggntntgatgaaccgccttcttatccccatggccttcaacttctgaagccccaaaatcaaagctttgtattcagcaatattatttgtgcagctgaaatcaagnttcactgcataacatgttctaactttggaaggtgcaactaanatagcagctgcacctgccccgaaggttccccaggaaccgtcgcagaacactgtncaagcttcggcatctttacttgcttcttcctcatgagcccctgggcgtcagtcaccgatgaagtctgctaacgcccaggactgaatcgaagatctatgcacataatcaat

SEQ ID NO: 14531 - DNA, 402 bp, Zea mays
  unsure (1)..(402): unsure at all n locations
gcttatgaagattcttcattccaacatgggctagtcggcggtgccagagtcaacccatgttagtcttagcaattaagcaagtgtcgagttcagctctatcaaaatctactaagtatagctgaccctctaacactcccttaaatgctattgaatcatcacttcttctaaagacagtgacacctatatcagtgaatagacagttgtagcccatttgacataattgtgaaacgagaaagcaaatgtaatctaatggaataacaagaaaaacattggaaatagtatggtcaggtgaatatagcaatttacccaatcctttgaccaaacctgatttcatccccgaatgtgaagctcgttgggatcttggttttctcatatgagggaacatnttnntctcccagcatg

SEQ ID NO: 14532 - DNA, 287 bp, Zea mays
  unsure (1)..(287): unsure at all n locations
tcaagaagcaagctccaatatactntgtatctgatgttcttagtttatncaaagaaaattatacagaattggagaaggtgctatattgctgttngatggcttctagaaagcttcggcattatttccaagcatacaatataattgtcccttcttcacaaccattgaaggacattatgagaaatagagaagctactggaaggattggaaagtgggttgtggaactcaatgaattctgcattgattatgtacacagatcttcgattcaatcccaggcgttagctgacttc

SEQ ID NO: 14533 - DNA, 57 bp, Zea mays
gcgaatctcagttggaaaattctgctctcaggaaggaggtcagagtggaaccaatat

SEQ ID NO: 14534 - DNA, 542 bp, Zea mays
  unsure (1)..(542): unsure at all n locations
agcttaactaaagtcatctaagagtcggctatctatagatacaatatatgtcgctatacatcacacgcgtcggctagtctattattatcgaaatctgagacacaacatgtatatgacaatcgcttaacgaaatcgactcctacttaacatgagttggttaatcgcagttttggaccttagcgaaccatttagacatcacaactcanaaacatgggttggagcagattaatcagctnttcctaatcattgctcaacttanagntgttactacacaggtcacttanaatggcacattntngggatctaacatagagggcaatacacatggcgtaaaaactcataagactacattngctactggcatcaacaatacccaccgacctattattcaccatacgaacgcannatacacgccgctactagttntaacataatcctatatagctcggaatctaactactcactaacaataaatcacgcacgactactaccacatcgacgggtaantnattggacaccgctagtgaccactagtaccccga

SEQ ID NO: 14535 - DNA, 305 bp, Zea mays
  unsure (1)..(305): unsure at all n locations
agcttatgaagattcttcatcccaacatgggctagtcggcggggccagatccaacttatgttagtcttagcaattaagcaagtgtcgagttcagctctatcaaaatctaccaggtatagctgaccctccaacactcccttaaatgctattgaatcatcacttcttctaaagacagtgacacctacatcagtaaaaagacagttgtagcccttttgacataattgagaaacagaaagcaagttgtaatctanagaatctacaagaaaaacatgggaaatagaatggtcaggagaatatagcaattt

SEQ ID NO: 14536 - DNA, 320 bp, Zea mays
  unsure (1)..(320): unsure at all n locations
atctcagagtcacctgangcatgcaagctcgtgaggaatatngnggcctctnngtgtgacttcctctgtcatcattctgtgtggagtggatggacctgacatgccttgngtggattcttcctccgaagcccctagtcatctcagagaacctgtaagcctnctcccttctttggcgaaagtcattgtcggcccgaatgtattcatccatctttngaagcaactnttccaaagtctgtggaggcttcctagcaaaatactgggcagtaggtcctggacgaagtcccttaatcatggcctcaatgacaatttcattgagcact

SEQ ID NO: 14537 - DNA, 322 bp, Zea mays
  unsure (1)..(322): unsure at all n locations
gcttgtttcttaactatgaacttgactattacttactaaacccaaattatgnttcaccattgagaatggcacctagcatgtataggatgtgttngaaatcctttgtgttgtcactagtatgcttggtggatatgtctcttgctttgagtcatttactgtcttgaatcataaacaatgtgcctaaaatcaaatcaagataagtgtaaaattcagaaagatcgagatgggtttgcattgtcaccacctctctatatcaagactgcttccattngcacttttggatgaaaatgagcgggatagtggatgatcganactaatgttt

SEQ ID NO: 14538 - DNA, 213 bp, Zea mays
  unsure (1)..(213): unsure at all n locations
ctaacaagcacaaataagaacaatacatcaatcatggtgactttagtggtgtgtgccaattcttataccttattatatttgngccctataatttatttaaactanttttggtgcataaaatatcagcatataaatatacatatganaacgggaaanagaaaatggaaaataaaaaggagaaaggatttctagctaactgggccagggggtgat

SEQ ID NO: 14539 - DNA, 297 bp, Zea mays
tcttcatccccacatgggctagtcggggatgccagagcctacccatattagtcttagcaattaagtaagtatcgagttcagctctattaaaatcaactaagtatagctgaccctctaatactcccttaaatgctactgaatcatcacttcttctaaagacagtaacacctatatccgtaaaagacgagtgtaacccattttgtataattgagaaactgaaagcaagttgtaatctaaagaatctacaagaaaaacattggaaatggaatggtcagggtgatatagcaatttaccaag

SEQ ID NO: 14540 - DNA, 257 bp, Zea mays
  unsure (1)..(257): unsure at all n locations
ctgtcccgacatgatagngatcatgatcaagggatcaagaggtgagaaaagaagaactataagaaggcaaagggcgaggcacatcttggcaaggagtgggattcggattgctcttcgtccgactccgacaatgaaggactcgccgccaccgncttcaacaagtcatccctctttcccaacgagcgtcacacatgccttatggcaagggagaagaaggtatgtactcgaaactctacttatgcttcttcaagtgagga

SEQ ID NO: 14541 - DNA, 388 bp, Zea mays
  unsure (1)..(388): unsure at all n locations
tggacgtgaagagtgccttcctcaatggactcatcattgaagaggtctatgttgagcaacctcccggctntgaagacagtgagtatcctaaccatgtgtataaactctcaaaggcgctttatgggctcaagaaatccccaaggacaaggtatgaatgcctgtgagattntcttatcaccaatggtttcaaagtcgaanaagtcgatcctactctnttcactaaaactattgcaaaagacttnngttatatgccaaattatgtngatgatattatanttgggtctactaacaagtaaacttgtgaagagtttagtaggatcatgatacaganattcaagatgtctatgatgggggagtngaagtattttctttgatttcaaatcaagca

SEQ ID NO: 14542 - DNA, 244 bp, Zea mays
gcaagcttgccagggatcagggcaacaaatattaccacaaagactttctcatctatgaggatcgccaatgtgttgtcgcaaggatggaaagggcgggtcctctgtgccatgtctacttgcgatgctgaagataataacatacaccttttagctgcttcactttgtcttgtgttggattatgagtgatattgatgtttgatggacggtctgtgtctttattttaccaccaaactacgacccagca

SEQ ID NO: 14543 - DNA, 474 bp, Zea mays
  unsure (1)..(474): unsure at all n locations
gcttataacaagaggatagaggcaagagctctaccatatngtataatatattgngagctatacaagcgtggggtctggtctccgttactcaagtggttatccagaaccgaaggtacagaattgatgaaggaaatacacgcaggcctgtgtggatctcacattggatctaggcctttgctcggaaaangttttcgccaaggaatttattggccaaaggtagctttggatgcagcggaattggtccanaagtgcgaaggttgtcagaaatgtgcaagagatcaaaaacaaccttcgtctttaactcagttaatacaacccacttggcccgtgcaaaggtggngccttgatttgtaggtccgtaccaccagcgcaagggaacttaagatatgtngtagtggcagtggaatatttttctaaatggattgaggcanagccttttagccacataacttcggtcaccattcaaaagttttc

SEQ ID NO: 14544 - DNA, 295 bp, Zea mays
  unsure (1)..(295): unsure at all n locations
gcttcagcttcatcntatgtatggatggcttttgagtcagtccagttttcttcggtccttctgngcagcttctgacttccatgaatagcgatgggtccttgatccgaaggtatcttcatgcaaagataagcaggatgaagaattgcttcgaaagcattgagggtgccacgaccaataattgcattgaagggtattccatgtcaacaatgtcaaacacaatttgctcagttctagtggttgtgatgaacccgaaggtcactgacatggtgatcttccccagtgcttacaattgtct

SEQ ID NO: 14545 - DNA, 475 bp, Zea mays
  unsure (1)..(475): unsure at all n locations
agcttcagattatacacaccacaacntaattataattatgccttnntgcatgtnttgggcagacaagtttcacccaatgtcaaacttgtacctagctgcaatagccttccttgtgggtggaacatatacattatactcctgagtctctttgtgagaaatattgagatgccccgagtctcatagattgtgacantttatagttgaggtcttatatgtatgttctttcaagattactctgtagttaaacatctttgcttattaaagccaatagaacacaataaggcatntaccaacttgccttacaatgcatcacaactattagagtattcatcttcacttagagatgaaatatatatactttccccttatttaccaatagcctatccttttaggcccttagtcatgggttctccaatcanaagggtgagttactactcctatanatcacatgggtctcatacccatctacataata

SEQ ID NO: 14546 - DNA, 296 bp, Zea mays
  unsure (1)..(296): unsure at all n locations
agcttagaaccagctaacaagaagcanaagaaggaagcacaaagatgggttctgcttgtnngggtgcaaggacccttcatcagatccatgtggtctcacatnnccaatcaccttctccaggaagatctttagcttaaagactatcctcacaatgatgccatggntatatcttgtgtcatcaagtgatttctggtccacaatgttctggttgacacaggtagtgcagcggacatcatctttgcaaaggctttcagatagatgcaagaaccagaagacaagatacatgatgcaacaca

SEQ ID NO: 14547 - DNA, 320 bp, Zea mays
  unsure (1)..(320): unsure at all n locations
gcttgacaacaccattgacattnntacataaaattctgagatcaagaatatttagttcattcttcaacatgcanaagcgggtcttatcaagtggcttagtgaaaatatccgctaattgatcttccgacctcactccttctaaaatgatatctcctttagcaacatgatctctaaggaagtgatgacggatatcaatgtgctaggtgcgagagtgttgtacaggattattagcaantttaacagcactctcattatcacacaacanaggtaccttttctagaactacgccatagtctagaagagttttgttcatatacaaa

SEQ ID NO: 14548 - DNA, 305 bp, Zea mays
  unsure (1)..(305): unsure at all n locations
ttatgaagaatcttcatcccaacatgtgctagtcggcgatgccagattcagnccatgttagtcttatctaataagcaagtgtcgagtctagctctatcaaaattcactagatatagctgaccctctaacactcccttaaatgctattgaatcatcacttcttctaaagacagtgacacatatatcggtgaatagacagttgtagcccattttgcataattgagaaacagaaagcanatngtaatctaatgaatctacaagaaaaacatnggaaatggaatggtcaggagaatatagctatttacc

SEQ ID NO: 14549 - DNA, 433 bp, Zea mays
  unsure (1)..(433): unsure at all n locations
gtgccttcctcaatggaccaatcaatgaagaggtctatgntgatcaaccttctcggcttgaagacagtgagtatcctaatcatgtctataagctctctaaggcgctntatgggctcaagcaagccccaagagcatggtatgaatgccttagagattntcttattgcaaatggattcaaagtcggaaaggccgatcctacactctttactaaaacacttganaatgactnnngttgtatgccaaattatgtngatgatattatatttgggtctactaatgagtctacatgtgaagaagttagtaggaatatgacacagaanatcgagatgtctatgatgggggagtcgaagtatnttctangaattcaagtaaagcaacttcaagagggcaccttcattagccanacaaagtatactcaagaacatctaaacaa

SEQ ID NO: 14550 - DNA, 232 bp, Zea mays
  unsure (1)..(232): unsure at all n locations
aggaccagatcatcgaagtataagtntctagatgagaagtggtcacccaagttntgttgatgaagcaccagaagactaatcaaggaaggaatccatgtgggagttcgcaagagaaaggttngcgggttagcatcgttgcttcttcaataagctagctaccaaacgaaacctataagcctgaagaagatctttgagtagccagaatcagcgttggcaatcggtaaccagatgc

SEQ ID NO: 14551 - DNA, 430 bp, Zea mays
  unsure (1)..(430): unsure at all n locations
acgagaccttntctcgtttctttctaaccataatgaatgctatatctaatgtcatacttgatgcatattcactttatttgctcccttgtatgatgtactgtttgtttcccaatttgaatggatgaatgtatgtatgcttgcaatcgcatagagaacgatccggtcgaagagcccgaggaactcgcaggagaagcccctgagcagcagtcggttggtggaggcaagtgtcccttgacctatctctgtcctattcattctttaattcaccctccgctttacatatttatacctaagggtnngactagcctttgtatccatgtccttgttacctattgggntgggatatattnnntagcttatggattgctcaactctataatgacatgatgagatattatgatcgctgtttccttctctatatgatgtatac

SEQ ID NO: 14552 - DNA, 268 bp, Zea mays
  unsure (1)..(268): unsure at all n locations
agttattaaagaaaaatatacacgaatggagaaggtactgtatgctgttttgatggcctccaagaagcttcggcattattttcaagcttacaatataattgttccttcttcacaaccgttgaaggatattatgagaaatcgagaagctactggaaggattggaaaatgggttgcagagctcaatgaattntgtattgattatgtgcatangtcttcgattcaatcccaagcgttggcagatttcattgtgactggacgccacgggctc

SEQ ID NO: 14553 - DNA, 206 bp, Zea mays
  unsure (1)..(206): unsure at all n locations
attgagcgcatgccaagcanggaagccaagtggtgttcatcatccgcataagaacatcatgacaactgacaggccactggagctcctacacatggatctanttggcccgattgcttacataagcatcagcgggagtaagtactggctagntattgtggatgattattctcgcttcacttgggtattctttttgcaggaaaaatctc

SEQ ID NO: 14554 - DNA, 273 bp, Zea mays
  unsure (1)..(273): unsure at all n locations
agcnttgacgcacgcaacaacagagagaaagatagggagggagatcacttctcgtggggctgggaagcctgctggtcggctggccaggccgctacctgcgtgacagtgcaggctcgcagactcggctggccatggccagggagcagagcacgcacgccggcaaggaggcgagcagcgcgcgccatgtgagaggtcggccgccgctgcaggacggcaagggtacaggggtggggcgacatcggcgggaggagggccagcaggctaaccgcgcta

SEQ ID NO: 14555 - DNA, 383 bp, Zea mays
  unsure (1)..(383): unsure at all n locations
agctnngtggaatntagtgtngaattntatagaatcacctattcaccttccnctctctatgtgctctcagtaatggtatgcggaatgatgcgatgatatgatgcagcatgatgattatgccaaagacacatgtccacacggaaacagtctgactctgtatcgccttagggacgtcttttgagtctcttcaccttataattcggtggcatntaagctctgcattcccttaggaacgactatgtagcttctccgccttctatttcggnggcatntaagctctgcatccncttaggaacgactttggagcttcttcaccttctantttggtggagttttaccctgcattttcttaggaaacgacttggagcttcggaacttactct

SEQ ID NO: 14556 - DNA, 411 bp, Zea mays
  unsure (1)..(411): unsure at all n locations
caagctaccctngctataatcacaccgngagaagagcaggtaccactgattgatgatactatgatgagatctaggtgtcgtctcccagtcaactatggcatcgtggagatattatctaaattcgagttattttattatcagctattttgaagacattctcgttatataataaatattatgacattcgcctctatacactgcctcattatatgtgtgggtctttatctggcgcacatatgagacgtacatgggttngcccttanattcgagtgtgacagtcatagagaaactaggcataacanattctacatcanataatntcttaacattggcattatgataaatagtagaaacctaataaatcgattttgcttcctatccatccatcaatggantcatcaatttactaac

SEQ ID NO: 14557 - DNA, 294 bp, Zea mays
  unsure (1)..(294): unsure at all n locations
agcttatgaagattcttcatcccaacgtcgctagtcggcgatgccagagccaacccatgttagtctttacaattaagcaagtgtcgagttcagctctattaaaatcaactaagtatagctgaccctctaacactcccttaaatgctactgaatcatcacttcttctaaagacagtaacacctaaatccgtaaaaagacagttgtaacccatgttgcataattgagaaacagaaagcaaagggtaatctaaagaatctacaagaaaaacattgganatagaatggtcaggtgata

SEQ ID NO: 14558 - DNA, 466 bp, Zea mays
  unsure (1)..(466): unsure at all n locations
gcttacctttagtcttatggtactaagtggtagaagaactttaaaaatgtgagaaataattaacaaaaaggggaagtcataagaaaaacataagatgaagagaggttgatagtgcattccatgtcatgagcatcatgtntattntatgacacactgcaccctatgaatagtatgatantaagtggctatactttgacctaaatatgntgctttggcattngagaacaaaagtgtcattttctgaaatgcacatatttagggggaggaaactatatcatatggattaaaatattatttatcanatcttatgtangctnntaatggtgttgtcatcaatcacccaaaaggggnggagatgaaagtgcattcatccctttttgtgagtntggtgattnggataacaacacatttaaaggtctaacgagttttnnntagtgtgaacaggaaaatcagtatgatgaacata

SEQ ID NO: 14559 - DNA, 384 bp, Zea mays
  unsure (1)..(384): unsure at all n locations
gcttcggaacaccacgacttcattttcctcggtggtcgggccaagtttctctccttcgtcgaccctcacaatggataagtcccggaagatattccctcatgctgaaagatgatttctttgatacccgattngccaaaaaccgaatggcttggtcgccaggggcgatcttcggagtcttcaccaccactatccacatcataactgtcgctgtcatcagtatcttcagacaaaccttctaaaatctctttggtgaatttttctgtattggtcttcgacattgctataagaaacccccaggtcttctcttcagaaagactcagcttcatctncggagcagcctttttatcttcagacatcttcggaaacactanaaaattggtttca

SEQ ID NO: 14560 - DNA, 419 bp, Zea mays
  unsure (1)..(419): unsure at all n locations
agctngtcaaggatacttggtacccatcgcttgatgggtccatcatggttagtcaacaaagatctatgagcccaaatgtcctttgtgttagcactaggtaaactcattacctttctagcacaagttgcaattntgggttgcctagttacatgagaattaattgacaagctatgagtggaattgtaccaatgggacaatccttgcattgatgtcccttctttcggcatggtgtagcataggcgttttcaaagtttgaagntntcttctttcctttgttgtgcttgctacatgngtagtanaaactttcttttctaaccctatgccttttttgtttaaatggggacaagatctaagcaagtgtcctttctagagcattaanacanagtctatcatccttgtaataatcaaccattttaatg

SEQ ID NO: 14561 - DNA, 264 bp, Zea mays
  unsure (1)..(264): unsure at all n locations
gcttctanagggagaaacacatttaggactaacanatgttcantttgagaaagacagggtttgtatcgcatgacaagcagaanagcaagttggtacccatcatccacacaagaacatcatgacgaccgacaggccgcttgagctactccacatggatctattcggcccgattgcttacatgagcatcggcgggagtaagtattggcttgtaatagtggatgattattctcgcttcacttgggtgttctttttgcaggaaaaatc

SEQ ID NO: 14562 - DNA, 486 bp, Zea mays
  unsure (1)..(486): unsure at all n locations
atgantaagcttctctcgtcattccgatcattattcatacgtcactaggtatatgcccgtgccgtgctacggagttaatattataaaacacaatattttntgtatattaatgtattntatcatagcaacccacgagcatatacctagttggattcttatgtggtgaggtcacaactatntaattccattatgctctataggttgcatgtacacgagatagttcacgggcaacatactgatgaagtggttcctaaagagtttcgggctatatggcagtaacgtactgatgaagtggttcctaatgcaagaacatactgatgaagtggntctaatacaagagccgaagtacttaggactggaccgaattaatgcaaggactgaaaatgggaccgangctaggggtgcctatacagattgtacacagaactggagactattcagcngagcacatcgcttcacacatgtagatgttagtaaaaaacaccc

SEQ ID NO: 14563 - DNA, 387 bp, Zea mays
  unsure (1)..(387): unsure at all n locations
agctggggcgtactgcagcacggtacgactcccttgagtgagtgctagatactcgttgagctggcgatccatgatgcctgctggtatgtgatgccctcggaatgctgcttngaactcccccactcaaccacgtggtcagccggctgcatggcgaggaaatggtcccaccatgtcctagcgggaccacgaagctgctgggcggcgaaacggaccttagccgcatctgagcactctccattaagtagtgggaactttgattccaccaccctgagccaaacatcagcatcgagtgggatcttcaccctggtgaacaacggcggttgagtactgagaaaactctgtaagtggccgctgccgggcacgctggtggnatcaccaccaccatag

SEQ ID NO: 14564 - DNA, 341 bp, Zea mays
  unsure (1)..(341): unsure at all n locations
cgatcctctgagtcacctgcngctgcagcttcgcatgaaacagtttttagtattctcgaagatgtctgaatataagaacgctgctactgagatgaagctgagtctcgatgaagagaagaatctggggtttcttatagcaatgtcgaagaccaatacagaagaaatcaccaaggagattctggaagggttgtctgaagatactggtgacagcgacagttatgatgcggacagtggtggtgaagactccaaagatcgcccttggcgaccaagccatgcggttttcggcaaatcaactatcanagaaaatcatcttgtcaacatgagaggaaggtatttccggg

SEQ ID NO: 14565 - DNA, 430 bp, Zea mays
  unsure (1)..(430): unsure at all n locations
agctntaccanatggacgtgaaaagtgtctttctcaatggaccaatcatggaagatgtttatgttgagcaacctcccggctctgaagatagtgagtaccctaaccatgtgtataaactctctaaggcgctttatgggctcaagcaagccccaagagcatggtatgaatgtctaagagatgttcttattgctaacgacttcaaagtcagaaaagccaatcctactctgtgtactataacacatgcaaatgatntgttcggatgccaaatntatgttgatgatatcatatttgggtctactaacacatctacatgtgaagagttcagtacgatcatggtacanaaatccnagatgtctatgatgggggagtaaagtatttctatgattcaagtcagcaactccagagggcccttcatcagcaaactaagaca

SEQ ID NO: 14566 - DNA, 367 bp, Zea mays
  unsure (1)..(367): unsure at all n locations
agcttagagannaatgaagacgcgtggtggaccagaagaatgtatcatacgtaaataatacgattattcgcaacagagaacaaatgactatctcgatcaatccgcttcagtaagcaagttcgtaatgaatttagtggaacaccatggcttggtaggggagtaagtagagcagagcaggtacctgtacctcatgtcccatggccactgatgtcgatgagttgttgctgccggtggccatctcttctcgaaagggagttgataaacagagctgaaccacaatcgttgggcctgaaagatnaaacaatagataagtaataaatatcttcagcacanatcatatttcaaatatacttacagcataaacata

SEQ ID NO: 14567 - DNA, 433 bp, Zea mays
  unsure (1)..(433): unsure at all n locations
acctcagagtcgcctgcggcttcaatctatgcctgatggacaattgttatgtacttgcaatgcttgtggttttatgatatacccanaaggaaggtgaggagttctttgacacctactcgccagtggctcgagtgactacaattcgcacattaataggtgtggcagcctcttatggtcttatcattcatcacatggatgttaagacagctatcctaaatggagaagtggatgacgagatctatatggatcagccataggggttcattgcggatggtcaagagaacaaggtgtgcaggttgataaaatcattgtatggcctataagaagcacctatgcaatggcatgaaaaatttgatatactctacagcacttgctgtgttgnaatgaatctgacacgtggtatactatcggtatgagtggggtgagtctgtta

SEQ ID NO: 14568 - DNA, 317 bp, Zea mays
  unsure (1)..(317): unsure at all n locations
gcttcggctatgatggannaattcggcagcanaacagtgcanatagcaatgaatgctgtggtaacttcacaactacttgtcagtttatatagtgctgcaggtaagaaggcgaagcggcggaattngtacaccaggcgcgcagtaacttgtacccgctgcgcagtggaccgcaaggatcaaacagtaactctgcaaggtgggaccgacacgcgctcggaagtcggatcgtttctccgcaacgagctcagggaaggtgttttttggaccttcggcttcccgaagctgaagagggtnnnttttcacgggtcaagctcgta

SEQ ID NO: 14569 - DNA, 282 bp, Zea mays
  unsure (1)..(282): unsure at all n locations
cctaactctctttngctgtccacatttattatcattgttcaatntaatgaaacannaaanaaatcatggagtagtctggtattatggttgatcataatcataattatgcctgngactccattgtcattntagtatgaacagagcattcacgtgcggttggngattatgcctgggactccattcatcgagttccgttggttggggaagcttctccttccanagcatgacgcaagtgctcatcatgtngcggtgctggaggtgccatttctgttcttggattca

SEQ ID NO: 14570 - DNA, 202 bp, Zea mays
gcttctaaagggagaacatgtgatagggttaactaacgtgcaattcgaataagatagaccttgtgcagcttgtcaagcaggtaaacaagtgggaggagcgcatcacggcaagaatgtgatgaccacttcaagacccctggagctgctgcatatggacctcttcggacctgtcgcctatctgagcataggagggagtaagtat

SEQ ID NO: 14571 - DNA, 297 bp, Zea mays
  unsure (1)..(297): unsure at all n locations
agcttncanatcatanagcagaatttcattatcgcaccagtttttgactctgtcagatatccaccagaagtgtgtcatcattctgtgatgcttcaaggcaaagtttatngttgtgtacttatgcaaaatgagaaagtcattgcctatgcatcacgcctactcaagccgcaggagcnagaatatccaacacatgattnggaattggcagccatagtgcatgcnctaaaaatatggagaacactaccggattgngaacatatgtcacatcttcacagatcacaagagcctgaagtacat

SEQ ID NO: 14572 - DNA, 365 bp, Zea mays
  unsure (1)..(365): unsure at all n locations
gcttagaaacatacctttactngngattngcactntgntcatccatggtcatagatttacatttaagcacttgtattggcactcaatcaccaaaatacttagaaatggcccacaggcacatttccctttcaatgatgaagtcgtccttcagagtggagaccctcggaccgtgtcgcccgtggaggctaggtcggacctcgccgaaggtgtagttgacgtcgagggtgctgctgctcccttcaaccgtcaagatccgagcctgcaggatcggattatcttgtagcgtgtgctttctgcggccgtcgaggcccanacacacncttcgccgtgtgtaaagctgcgttcttttctcttgttcagtatct

SEQ ID NO: 14573 - DNA, 384 bp, Zea mays
  unsure (1)..(384): unsure at all n locations
ctctttctcttcgagaagctcgaagctagaagaggaaatccaccagtccaacactccaagaggaggagttggaccaagaaatctgggacatggaaatcatccatcaacaagtacaaaggaagaaggagaagatggtgcaactagctgatcttcanaagaagatcgacgaagcttctgaagaggtgcgtcatcttgctcaagatgaacaagatcgaaggccccaacacatggagcttcgtcaagaaggcttattcaacgaagatggatggtatgatgaacttaatcatgatgcctttactttcgatgatagttctccctttggagcagaactgcangctaccccatggccaccgcatacaagccacctcagcttccatgtatgat

SEQ ID NO: 14574 - DNA, 398 bp, Zea mays
  unsure (1)..(398): unsure at all n locations
ctcaagtatgttaattgtactagagttagtttacttcaagttactaacttcatgcatagggacttgatcatcaatccgttcttgtgatgagctatgnatgagaaggcctatcaactcctaataaaaaccatttctcccatattagaaacttaaaactccccttcccaagagatctattgagtcacctaagactaatcaactaaagaatcaaaggtgtgatattgaaataggatcagctagagcatcaattaagagagtgacctagagcccattcctgttgtagcagcagaatcatcaaatgagacatcaaaagtggaaagtggggtntagcatattctcctctagtatagtgaatttgttttggatgatcaaaaataataaagtnttgtcattataaa

SEQ ID NO: 14575 - DNA, 449 bp, Zea mays
  unsure (1)..(449): unsure at all n locations
agctccatgacgacacatncaatgttcgtgagcaaaaacattgcctagtcttatatgagcataatactntggctatgaaagatgatgagctctgtagagacatgtactctctgttaaatctaattatcaatgagctcaattctattggcattaataagctaggtgatgcggacattgtaaggaagattatctccctgctaccacaacaaagatatgtgagcatcatcaccatccttcacaacatggaggacttgagtaccataaccccgaccattgtgattgggaaaatcgcggcctttgagatgtcgcgaaaaatgtgtcggggagaagagccnacttnctcanggccatattctttngcatgtgatgaaaggaagggtaaaaagaaggctcccactccaagttcctcaagtgaagaagaggaagaagaagaaagtgatgatgatgat

SEQ ID NO: 14576 - DNA, 210 bp, Zea mays
acataatctcttaagtatccttttcagccctagataactcctaaccaatcatgtttcgaaaattgaagttcccttcctccgaaatatcttcggtaatcttcttctctttgttaaacaccttctccccttttcaggcactgtggcaagggttgcctcagcagttgcaacagtttcttctgtggccatatccaaaatcatcttatcaatatc

SEQ ID NO: 14577 - DNA, 430 bp, Zea mays
  unsure (1)..(430): unsure at all n locations
tcccactatagagcatactacgagaaaatttaaaattttcattttctaactaatgctcggcaatcttagcatctaattttgctatatgatcattctnngtgttaatcatagcaatgtgatcatgaatagcatcaatgttaacatctctacatctagtgcaaatagtgacatgctcaacagtagatgtagatggtttgcaagaatctagttcaacaatcttagcatgtaaaatagcattctcatctctaagactggaaatagaagcattgcaaacatctaagtctttagccttagcaattaattgttcatttctcattctaaggctagcaagagaggcattcaattnttcaatcttagcaattgaattagcattatcatttctaagattgcaatngaatcacacaaatatttacttctcaacttacaatta

SEQ ID NO: 14578 - DNA, 402 bp, Zea mays
  unsure (1)..(402): unsure at all n locations
acatgctccacacaaggttacaaaccagccactcttttcaataagagaagatgcactagaaagtgttatcaatgtcatgagaagggacatgagattaagtcattgtcctacantaaagatagtggcttaaatttggaaagaaagaggctcactaaccatgtagcaaacaagaagcaaggcaagaaggagtcttgcataattaanaatcatatttgctacacttgccgaagaaagggacacctttgcaaggattgtcccatgagtaagtatcctaagcctaccatgtcaattcattcatactcgcttaggagacccanaaatgacacttgtgctagaaaggtaattagctcacctaatactagcacaaaggccatttgggtgcctaagtacttattagctaac

SEQ ID NO: 14579 - DNA, 502 bp, Zea mays
  unsure (1)..(502): unsure at all n locations
gatcctcatagtcacctgccgcatgcaagcttccaaccttcgaatagatgcaaatatctttcatgtttcggatctcgngccttattacatttgtccacgtggccagcaataacttgagaatcagtctttaggatggcccttcttattcccattgcccttagtttctgaagccccaatagaagtgcttcgtactcagcaattttatttgtacaactgaaatccagtttgactgcataacatgttttgacttttgaaggtgctactangaccgcagttgctgctgcaccgaaggctccccaagaaccatcacaaaacactgtccaagcttcgacatctttgcttggtccctcttcgtgagcccctggcgtccaatcagcgatgaaatctgctagcgctngagatngaatngaagatctgtgcacgtagtcaatagtgaattcattaagcttcgcgacccattnttcaatccttccagtagcttctctattcctcatgatatcct

SEQ ID NO: 14580 - DNA, 301 bp, Zea mays
  unsure (1)..(301): unsure at all n locations
agcttatctgagatgttatgngcagtcctgttctatacatanggtcttctggcaatcccttactgaattgtggtataatacctattatcatacggctctaggaaattctccttttgaagtcttatatggtcatgccccttctcagtttgggttggtttcaagagagcaatgcttattaccagagttacaagacttgttgtctatccgccaacatatgctacaacaagtgaagatgcatctacaaagggcccatgatcgtatgaataagcangctgataagggtcctatggaaagaacattc

SEQ ID NO: 14581 - DNA, 375 bp, Zea mays
  unsure (1)..(375): unsure at all n locations
agcttctccaccatgtcgttgctagccaagtttgtgcagttacctncatcaatgatcaaacgacatgaacgctccttaatgacacancttgtttgaaacaacgtatgtcgctgattctgctcttgcttcttcatttgtgcactaagcacacgctgtacaatgaggctctcataatgctctgcatcatctgcaccaatctattcttcgggtggttccatagtgcctgcatcatctgccgcaagcaaagcaagtgtagcttcatccaaatcactagcagaggaatacccaccatcgtcttttaccaccaaaacacgctgattaggacaatcacgctgcacgtgtccatagccctngcatcgataacacagaacatct

SEQ ID NO: 14582 - DNA, 400 bp, Zea mays
  unsure (1)..(400): unsure at all n locations
gttctttgtttagcactatgtaaactcattacctttctagcacaagttgcaattttgggttgcctagttacatgagaattaattgataagctacgagtgggatggttaccaatgggacaatccttgcattgatggtgcctttttcggcatangtagcataggcgatcttcaaggcttgaagatttcttgcttccttgnttcttgctcgctacatgagtagtgaatattttcttttctaacattatgcctttttgctttaaatggngacaagacctaactaagtgtcccttcttcgagcattgaaaacagagtttatcatccttgctactaatcagtcatgtttaatatanggacatgacctaatcgagcgtccctgttaaagcatcactacacttttact

SEQ ID NO: 14583 - DNA, 437 bp, Zea mays
  unsure (1)..(437): unsure at all n locations
agcttggaaggggaagcacataaccaatataatgcaatttttatcttttgcttaaatggatggagatataaactcccattgacacgnntaatattttaatgaggtatcaagaagtgcacctcattgtagctccacataagaaaatgttcacgcgaggaccaatatcttgatcaggtaactttgtgaatagtctcggaccttcttcacatgcaagtaatgctccgattttgacctttntcagatcctctncactgtctccactatcgagtttttgactgaaacactgcggtcctcgctcacttcagtacacgatgataaccacaccataaacacagttgatgtgattagcaagacttacaaaccccacttcagtgcaactataatggtgcactcaagcaaaaaaagggtttagatgtctatccttacatctaatcact

SEQ ID NO: 14584 - DNA, 437 bp, Zea mays
  unsure (1)..(437): unsure at all n locations
agtcacctgccgcatgcaagcttgtgaagggtcttcatcaccacatgtgctaagcgtttatgccacagccaacccatgctagtcttagcaattaagcatgcatctagaccaacctcttcttttggcaaatcaactaaggnaaggttgccgtctagtacacccttaaaagctagtgaaccatcacatcttctaaagacagacacatctatattagtgaatagacagttatatcccatattgcataattgactaacagatagtaaagtatatcccagagactcaactaataacacattagagatagagtgctcattcgaaatggcaatcttgcctaaacctttcaccttgccttggttcccatcaccaaatatgattgaatcttgggaatccttattcttgacgtaggaggtgaacatcttcttctccnccgtcatatg

SEQ ID NO: 14585 - DNA, 323 bp, Zea mays
  unsure (1)..(323): unsure at all n locations
agacggncagactgaaagaacttatcagatcctagaagatatgtcgagagcctgtgcgttgctagacaagtcaagatgggacaaaagattaccttatgcagagatctcctacaacaatagttatcatgccagcttgaggatgtcgccgtgtcacgcactctacggacggagttgcacgactccgctgcattgggaccagcctggagagagacaggtgtttggtcccacatattgcttgaagccgaagagatatcacatggttcgggagaattgaaatagcccagcagaagcgaactatgcgaccgaagagagaaactgagttt

SEQ ID NO: 14586 - DNA, 341 bp, Zea mays
  unsure (1)..(341): unsure at all n locations
agctngcacacatagctcacttgaatacctttgatcatatctcttcnatacgctatgactaatgtgttttcaagtctacttcaaaccacgtcataggtatattgaaagggaattggagtcttcggcgcaaaataaagcttccactcagtaactcatactattgcatcactccgagcaactctgtattacttggggagaaataagcatcagagaacacgacttcatcctctcaggagagagtaaaagctcaaaagcaataggaccggatttcgggtttggtgtaatcttacctcatctacttatgaccaacggngaggaacttacttcaacggctctaatga

SEQ ID NO: 14587 - DNA, 348 bp, Zea mays
  unsure (1)..(348): unsure at all n locations
agtcacctgccgcatgcaagcttccttcttncgagaactgtgagtagntgagcctttttcggncatcgnngaagtccctcctgtgagacgggtgttatcctatccagttgagttgcggctctcggaggatcacgcttctgctgcgcctagtcctcccgtgtctgatggcagggatgaggacgatggtggtgactcctccaggggtcgtcggcgtcggtcccgctctccttcgcagtcgacagtctgatccgctggcgggtacgacttccggcgtgggtggaacgcttcgggaaccgggccctggccgggctggttcctcttccttgcggcgtgctcggcgttgttgtc

SEQ ID NO: 14588 - DNA, 400 bp, Zea mays
  unsure (1)..(400): unsure at all n locations
tatacttcactctggtgtaggcacaattattactagaaaatgaaattatgttcttcattaattttttctcacatagaanaataaaatgtcataaaagataacagtacatcaaaagtaggatattcctcagtatatatgttttgactctggtatagtgctgttgactgtacgagcttcggacttctccctgaagtcgcgctgctgttgggcgtgctggtgcccttctggctgctggcttcgggtatgagtaggtggcaatggtggtggtagtaggagctggngccaggaagcttgtgaatgacttgcagaagcaacagaagttgtagggtgattacccacgtattctggtatatacagagagtagcacgaagcagtatgtaaaacctgcttcggcaatctc

SEQ ID NO: 14589 - DNA, 489 bp, Zea mays
  unsure (1)..(489): unsure at all n locations
agcttggatgcacgagcccatgcatcatatatgtgagattcataccattcggagccattattacttgtgtggtnattatctacagctggaggatgttctgtatctgtagtcatatccagaccaccatttgaaattcctacacggaatgcaagattgatgctactgtcaacaatacactccagaaatctagcaaagctggaataaacatagttaacaaatagcacatcacaatcaattcaataaagttgtgccaaanaggcatcattagttcaatggcataactaaccatgactaaacccaatgtggtatgcccttgngaatgtcaccacaaactctccaggatactgtagtaacctgaaatagtacatatcagcaaagaattcataagatctgatgtctgaataatatcatgaacattngacccaatggaaaccttggccatttcagagcttgtacctacagcanggcacaccacgggctacaagaaca

SEQ ID NO: 14590 - DNA, 460 bp, Zea mays
  unsure (1)..(460): unsure at all n locations
agcttgttatgctcaaacttaggagaattaagaanagggattgtaaatataaaccagagggcaaccatatgtttcctagcatgcctaagttgtntagttcacaagaaaaatccgttgaaccatagtccattgaaaagaaatggcactcacaattattcatgaagaacagagaaaactttgaaaggtcataagaaaataatcctaaggagaaaacacccctaccttagaaatgactggtcatgtgctaagaagaacctagaaaaaatacaagttctgttgtttgatatttttcaaatagcaagttagttataagtgtcttgtttgcattanactttagaaaatcataactacataaccactaagtaaccctctgtgatttttggcacagaagcatgttattacccatagatgccagcanaaataactcttagtacagaacccacacctagatgagaagtga

SEQ ID NO: 14591 - DNA, 449 bp, Zea mays
  unsure (1)..(449): unsure at all n locations
gcttgagaactatgcccgtatccgatctgcctgattttttctataagagctngccaggtgcccccgttcctgtcgaccacgaccagcacccaacataagacttccctagttatttagccaagaccagagccatgatagttctcatggtagcactgttttcccgggtggtcactccatgttccaattaatatgcaataatctttgttaaccatcgggttaacaacaataatgtaaacttaccatttggaacattaatatcataagcgagagtgactgcataaagttaagttgtagcaatagcatagctacaaaggtaaagtataattcccaggtttgatcaaggaataagggtagaaaggttatctaaataggtaacccgtcaaataatgcatatatatccaaaagaataaactntattaaatgtatttgttgggatcaaacagagtatg

SEQ ID NO: 14592 - DNA, 429 bp, Zea mays
  unsure (1)..(429): unsure at all n locations
gctgcagcttccatcttgactactcgctgctcatcttgtcgccgccatagatctgactgaaacttccgctatgtctggatgcgatgactcacactgcctgctggacttnctcagaagttgcttccggtggacgggagaacgcacttcatgaggacgcctgacgcgcncctcctgtataatacctccccaatgagtgtatagtgagctgattgtctggcaatgcgctctgccgagttcttgtcatctggntcttcttcattctttatatacttaataatcggntgcctccagtcattagagtctgactcgggttgatctatgatgttgcactcttctatttgatccgtcgagacgctcggctggagaatttcttgcacgaagaccccgggtgggacctgagtccgaccggatccgagctttgacagtaca

SEQ ID NO: 14593 - DNA, 461 bp, Zea mays
  unsure (1)..(461): unsure at all n locations
gcttacccccgacatctgatgcccgtcggcttatggctctctagacttaaccatataccgacgggaattagtaatccccgtcggtttagagcttattcccgtcagntctaagccaacgggaattaattggattcctgttgtgttgggcaagaggtaacccggacagtctctcgcgctttgtcgaccttagagggcagtctagctcgtgaggacacgctggccctcgacgccgctgatcagagtcactctgctcctttgggcacggctgagggtgcttcagccttggaattgccgctaggaagacccacccccgagggtgtgctgaggcgaccatccctgaggtgttggccngctcctcttcgagctctatggatgtacgtggactcactggtcatataagaactcggggacaattatttgtgctcttatcgccgtcacctagtgccatgacccgacgtaga

SEQ ID NO: 14594 - DNA, 435 bp, Zea mays
  unsure (1)..(435): unsure at all n locations
atggaactaattgcttcaattggtcattgatcaatagtcgttcctttcaagtggcatactttcaattagtaataatctattttatgaaaagaaatgtcaatatgaagtttacattcctcttggattaaatttgtaaattggtgcatattggtaattcactcatacatgtgcattgacttaaaaggaatnctaattatgcctttatgcctcataaatgatgatttatttgacattcatatataaatatcatcattcattaaatacttcattgtactactaatacctcttttcatagtgctttgttactacgtttaaaaggagaagagataacaagctaaagaaggaagtctccacaattgaagagaagaagaatacttagatgacaccatatcatatagtacgatcttctcgtcgatataacanatggtatattct

SEQ ID NO: 14595 - DNA, 346 bp, Zea mays
  unsure (1)..(346): unsure at all n locations
ttacatagccttctaagggagtgggccgtgggtgtttagttccttcaactcggatgtttgaatatcaattatgaatactaaatatagtctaaatacgactaatttacatagatgaatactaaatatgagacnggattattaagtctaattaatccatgattaacacatgtttgttgtaacatcacattaatgaatcatgaactagttatgactaatagactcgtcttaacatttagtccttatgtgtgtttagtccttatgtgtgtaattaagttcataactagactatatttaatacttctaactattattcaaatatgcgatacgatgggaccaaaattggtcc

SEQ ID NO: 14596 - DNA, 341 bp, Zea mays
caccgaaatctaaaccttcgacttgcgagtatcccttggccacaagtcgagctttgttccttgtcaccacaccatgctcggcttgcttggtgcggaaaacccacttggttcctaccacattttgattaggacgtggaactaaatgccatacctcattcctagtgaagttgttgagcttctctcgcatcgccatcacccaatccgaatcttgaagtgctttctctaccctatgaggctcaatagaggaaacaacagagtaatgctcacaaaaatgtgcaacacgagatcgagtggttaccctcttatgaatgtcgccgaggatggtgtcgacggggtgatct

SEQ ID NO: 14597 - DNA, 418 bp, Zea mays
  unsure (1)..(418): unsure at all n locations
gcttgtcgnctagtacacctttaaaagctagtgaaccttctcatcttctaaagacagacacatctatatttgtaaacaaacagttatatcccatattgcataggtgactaacagatagcaaattatatccaagagactctactaaaaacacattatagatagagtgctcatttgagattgcaattttacctaacccttttaccttgccttgattcccatcaccgaatattattgaatcttgggaatctttggttttgacgtaggaggtgaacatcttcttctccccctcatatggtttgtgcatncgctgtcgataatccagcttgaacccncggatgcataaacctgcaagggcaaattaggcttgggtcttaagtacccaactcatgtngggtcctacaaggttagtgcanatatc

SEQ ID NO: 14598 - DNA, 395 bp, Zea mays
  unsure (1)..(395): unsure at all n locations
agctngccaattcttgtcanagcaacaacaattaacggtttctcagctgcagaccatccctataacatggccatttgcatgctgggggttggacatgattggacccttcaagaaagctcaggggggttatactcatgtgctagntgccattggcaaattcacaaaatggatagagtataagcctattgcctctttaacctcagccaaggcagtggagttcatacaagacataatattcaggttttgggataccaaatagcattataactgatctgggatccaacttcaccagctctgaattcttcgatttctatgaacaatgaagcatccagattaagtatgcatcagtagcgcatccgagagccaatggccaagtggaaaggacaacagaatga

SEQ ID NO: 14599 - DNA, 482 bp, Zea mays
  unsure (1)..(482): unsure at all n locations
agcttgtcataagatntttcagtggtacatctactggggtcttcaaacgggctatgtagactttttcttgctttgctgtgcacttgtgttcctgttagctttggccaaagctagtcatcgattcagctcggagctcgagaattaaggaactttttcacaggcaatgctgatggaggtcacttttggttcacggaataatatggctgtgtacatggntttggtagctaacaggatccaaacaaacttgaagtagacgccttacctgccacagttctttntctttattttggtagctaacaaagcccncgacgagatgcagtgatagcgtctattannaggaatttcacgcgcanatattagaggccacatatgaggggcggngccacacacganggatgcgaagcttttagtgaaaggaagagggannttgtagagtgccanaaatataatatttggatttaatattgatttagaaagtagtt

SEQ ID NO: 14600 - DNA, 310 bp, Zea mays
tcactgacgattttctcgtgatgctggtgacttcaatcacagattgatacctttctatgaccaaattacatctttgtcaacaaatacaagtgacaaagattagacttgaatattaatgatgaaaatgaaaggaacgtcatatacacaacatttggacgcaacaatttcgtcacagattagatttgatatcgtcatcgctaatttgccttgtttggctgacgtaatgatgaaataaattgggcacagatgagttgtagtagaaactggccacgtgtacaccactagacgacgtgggatccttggcctacat

SEQ ID NO: 14601 - DNA, 463 bp, Zea mays
  unsure (1)..(463): unsure at all n locations
agctntgaggatgcagcaagatctagaagataagaagctctaagctataattggaaatttagagaacagaataaaggagcaatcagatgcctttgagaaaaagaactttgagctccaggcagccgaaagcttactggcggaagcttgaggcaaaatatcagaactaaactcgaagcttctccgccagtccgagcagttcgaacgagaaaaacaagatctcaatgaaaaacctgaagccgaagctcagcagaattcagatttgagaaaactactgacaaatcttcaagaaaaatgcctgggaattagcaacaagtgcattcaacgattaagaaagatttttactcggttggagctagcagcgaannaattacccnctcagctgaagatctaccanaaacctctgaacacattaagggggagaatgacgagctcgacgaagtcatagctgggcatggtgacttct

SEQ ID NO: 14602 - DNA, 282 bp, Zea mays
  unsure (1)..(282): unsure at all n locations
gggcatgtgtggatgtgccgcaccatataaccaaaaccttctctctcatgcatgcatcatcgatcatccangttcgtggccgtggtcgacatggacagactcagacaggcttgctcgattagctttggaggaatctaactcactgctgatatatgtgatcgtcaccacgcaccgcggcgtgtgacgggacgggacgggaatccaaattagccgccgaaattatgcgtgaggggggcgatgcatgcgtctcgagtcttgtggatgactggangtggacccacg

SEQ ID NO: 14603 - DNA, 438 bp, Zea mays
  unsure (1)..(438): unsure at all n locations
agcttctanagggagaacacattctaggattaacaaatgttctatttgagaaagacagggtttgtagcgcatgccacgcgggaaagcaagttggagcccatcatccacacaagaacatcatgacgaccgacaggccgcttgagctactccacatggatctattcggcccgattgcctacataagcatcggcgggagtaagtattgtcttggaatagtggatgattattctcgcttcacttgngtattcttcttacaggaaaaatctcacacccaagagaccttatagggattcttgagacgggctcaaaatgagttcggcttaaggatcaagaaaataagaagcgacaacgggacagagttcaagaactctcanattgaaggcttccttgaggaggagggcatcaagcatgaagttctcttctcctacactccacaac

SEQ ID NO: 14604 - DNA, 411 bp, Zea mays
  unsure (1)..(411): unsure at all n locations
agcttgggaagattcttcatcccaacatgggctanncggcgatgccagagccaacccatattagtcttagcaattaagtaagtatcgagttcagctctattaagagtcaactaagtataactgaccctctaatacttccttaaatgctactgaatcatcacttcttctaaagacagtaacacctatatccgtaaaaagacagntgtagcccattttacataattgagaaacagaaaacaagttgtaatctaaagaatttagaagaagcaatatggaaatagaatggtcaggtgatatagcaaatttaccaagtcctttgaccaaaccttgatttctatccccgaatgtgatagctctttggggatcttcgtttttctcataggaagagaacattcnntttctcccgggcat

SEQ ID NO: 14605 - DNA, 298 bp, Zea mays
  unsure (1)..(298): unsure at all n locations
ctctattcaaatctaccaagcatagctgacactctaacacacccttaaatgctattgaatcatcacttcttctaaagacagtgacacctacatcagttaagagacagttgtagcccatttgacataattgagatacagacagctaacttgtatctaaagaatatccagaaaaaaactgaaatagtatggtcagtgatatagcaatttacccaatcggttgaccaaacttgatttcatccccgatgtgaagctcgtgggatctggtnttctatatgggagacattttttctcctgcatg

SEQ ID NO: 14606 - DNA, 252 bp, Zea mays
  unsure (1)..(252): unsure at all n locations
agaaatgggaatgccacagaaaccattaaagaggccgacgaaggtggacttatcangttaagtacacttttaacttgagatagattattgagccagatgatgactggttgaanagcattgactatttaagtgatgagctgctcgggacctactcgaaggccgaagataatgcaatgtcagcagccttcggaggccgaaaaaagaagagactgaatcgggtgtttgatgccatcgggtttgtctaccctgact

SEQ ID NO: 14607 - DNA, 487 bp, Zea mays
  unsure (1)..(487): unsure at all n locations
agtcacctgccgcatgcaagctataggnntattatatactaagaatcatgttctttattaacctatannacttccagggttgtggacggcgattaatgacatttgaaaacccatggcccttctattaaaagaggacctgaggcgataatttcatatctggatggggggtgattcacgatttcctgggactctttaaaaaaatgtcccgccccgagtgagtgaaggtgtgatggtcgttacaatctaattggatagctcagatcttatgaaacgaaggggtatccacgatctaatcatggtcgtnctatataaatcgacactcatgatttaaaaacgccaatatctaatctccgtcattgtccattggatcaatggctaagagggcttcatctagttctgaccatagcggtggtgccatttttacctagggcggatattcgcccttgccccagagcttcatacctcaaaccaaaaggtgctaaaccat

SEQ ID NO: 14608 - DNA, 130 bp, Zea mays
gacgtggagacactgctgtggggccggcgcgcatgcgcttgctgctctacgagggcgtcctcgacacgtgggatgggatggtgtctaccgatgtgtggctgcgggagatgcactatgacgggctcaccgc

SEQ ID NO: 14609 - DNA, 391 bp, Zea mays
  unsure (1)..(391): unsure at all n locations
agctntgganagtgagcttgcaagatattgatggacattggtgantcnctccaatcactctntgatcgattgatggtattggtcaacaaaataagagttcttgggagtgaagaatggagtgacctccaggtcacaagaatgttcatgagagcttataaagagaaggataaaagtctcgcaaggatgataagggatcgtgatgattatgaggacatgacgcctcatcaattattcgcaaaaattcaacaacacgagtccgaagatgcccccatcaagacaagagactctcatgccttgatcacaaatgaacaagacaatctctagaagagcatagaccacacagcatagaaagtggtcgagacctcaagtgatgaagatagctcacgtgatg

SEQ ID NO: 14610 - DNA, 174 bp, Zea mays
  unsure (1)..(174): unsure at all n locations
actactttaggtacagaactcatgtttggggtggttttgcgcaatttcgctgtcacacgtcaccctttctgaaaacgggtgtcggggtgcatacaaagcacgaggttttgccaccggaaccatttcttcgtttntcgcaacgaacatgcccaatccactaatttatgttcaaaa

SEQ ID NO: 14611 - DNA, 494 bp, Zea mays
  unsure (1)..(494): unsure at all n locations
gatcctaagcacctgggctgcagcttacactgaggtgtgtgaacataaaataagagaggttggccggatggtcctcatcttatttataactattacatattnctaatatgcccttagatattttggttcaaccatttaacctatggagaaaatggtcccacttcaaatatgtgcatctaatagccacgggatcatcatgactctactttgtcttgacataaatttaagtatgatgccacgtgcctcctcctatttctgccaaaactccaaccgagttttcaggtcccaaactcgagaaaactatcttgcatagctggttctgagacacaaactactanacctctcgtgagtagagtatctgatacactttctccataatttcgacatgtgtcaccaccaaccctcgattgttcaatcatcaactccttcaacgccttcgcttgaattagtcaacatagtctactcttccatatactctngcacctacatatgtc

SEQ ID NO: 14612 - DNA, 432 bp, Zea mays
  unsure (1)..(432): unsure at all n locations
tatccatgccaggttgttacccacaacagttaaaaatgtcaacccacaggtacctttttgccccaaaaacaatttgtaagaaaaaaggcactccaacaacccccattccaggtcacctctttgcagcagggttacacattttctcacaacttgtgttccggggagtcaaacccacgatgggtaaccttctttgcattcaactaacattgatcattcatagcaatagaatcttttcccttcgacctagttctttaaatctttaataaaatatttggccatctaaatggctagaaattaatatatatcgtcagaacctaanaaatcatataaagcttggctncatcagagtctattaagaagttatgaatttctgaaacaggaaactatcggtgtggaatggaatatcaccaacagggacgctatgggtcatgg

SEQ ID NO: 14613 - DNA, 309 bp, Zea mays
acagtccgaagctcgcacagtcaataacactgtgccagagtcgaagcacatttaattgaccaatatctaccatgatagtagtctttccattcagtttattttctgtgtaataaaggacactttttaaatctcacgtaaatggtttcgttgtctgccacaaagaatatatatctcctctacaggcttaagctgttgaagcttaaagaattgcgacaacaagaaggaccttcgaattatcaagagttcattttacaaggcacggcatgaattcttcgaagcaacacaaagtcgttccaaggaacgcatagt

SEQ ID NO: 14614 - DNA, 464 bp, Zea mays
  unsure (1)..(464): unsure at all n locations
gcttcatcttcggtcgagcatgtggaggtctcatgactggtcgacgacagctgcgagtcgcacgagcgtcaagcgccggacccctatctcgaaggcgatgcgcaacccattaactagagccttgtactcggcccacgtgntggacgcccggaaatggaggcgaacacgtagcggaggtgcttcccgaggggtgagatgaagagcaggcccgcgcccgcttctgtttcatcagcgacccgtcgaaaacatggtccagagttccggttggatcggagctgcttgaagctgggtgtcaacccattcagccacaaagtccgccaaaacatgggacttgatggccttccgaggggcgaacgagattgtctcgcccatgatctccaccgccaactttgcaatcctacctgaggcctctcggcactggatgatcttccccagggggaataatgacaccacagtcaccagat

SEQ ID NO: 14615 - DNA, 439 bp, Zea mays
  unsure (1)..(439): unsure at all n locations
agctttgagcatatcttcaagaagttgggtttccctttctgtcngaccatcagtctgtgggtggtaagctaaacatctgattagcttggttcccaaagactcctgcagttgttcccaaaatctggtaacaaattggctcctcggtcagaaataatggttcgaggcaatccatgcaaacacacgatccggtcaatgtacaactctgcatacttttgagccttatcagtggtgtgcacagggagataatgtgccactttcgtcagccggtccacaataactcaaatcgaatcatgatgactgaaagttgcctagaggggggnggtgaataagcaaatctgaaattataaacttagtgcacaactacaagccggtgttagcgtatgattaactttgatccaaaagagagggaaacacatcacaacaaataagtggatgacac

SEQ ID NO: 14616 - DNA, 467 bp, Zea mays
  unsure (1)..(467): unsure at all n locations
agcctgtggaggttcttcatccccacatgtgctaancggcgatgccacagccagcccatgcaagtcttagccattaagcatgcatctagaccggcctcttcttttgcaaaatcaaccaaataaaggttggcgtctagtacacccttaaaagctagtgaaccatcacaccttctaaagatagacacatctacatttgtgaatagacaattatatcccatattgcataattaactaacagataacanattatatcccagcgactcaactaanaacacattagaaatagagtgctcgaatgaaatagcaattttacctaacccttttaccttgccttgggtcccatcaccgaatatgattgaatctttgggatccttgntcttgacatangaagagaacatcctctcttccccgtcatgtggtttgtgcatcgtatcgatatccagcttgaaccccggatgataaacctg

SEQ ID NO: 14617 - DNA, 348 bp, Zea mays
tggagatggaataagacatgttgacgcaaagaagaatgatgttcatgctcattgagcaatatatttattctgcattggttcacatgcattttcttctaaagaccttcgtcttcacattagctaaggacgaaggtcacacttcgcacttgtgttgccttgattttcaacgccttcagaggattgaaatcaagtttcaatagctgacttgatgatgttggtggtggagatgttggtgtgatccttggaactggccatctaggaggcgatttagtatatctagacacccttgttcctagctgagtcgccaacaagtatgttggcactgatctaggtgccaacacgcaatga

SEQ ID NO: 14618 - DNA, 296 bp, Zea mays
  unsure (1)..(296): unsure at all n locations
aaggactagggcggagatgacttattattcgggcttgtaaggaggagcttgacttgacattggatcgatattacttgataccccagcaattgatgatgcaacagataacgtcagatgtactgcaactaattgaatatcatttttacaccaaagtaaactagaattgcaaggataccatatacggtttcttttgtgataaaagctgtggttactttttttttgaaggaacttnaacattaacagcatctattggactcgaaattgaggatgacttatctggttaaccaaggctaaat

SEQ ID NO: 14619 - DNA, 391 bp, Zea mays
  unsure (1)..(391): unsure at all n locations
gcaagcttctcattgcattctcaagcaaagcatcgttttgatctancttccctataagagagagcttcgtcacaaccataanaatcaccaacattcgtcagaactgcaaagatttaacacctgatggccagagttcgttcaactgctanggtgactcgtgacgaagaggaggcccgagccacagagactgtcccgtctctgaatgatgaacgatcggaatggtgtgacagaggtgctgctgacaggtgtgctgctgcgaactgatatgctacttgaaaagatgtgtgataagaaaagagatatatactctatgcagcaacccatccttgacttggaaattacgttctgagtgattcctagatgataagtagctattcgaaactgaaaaact

SEQ ID NO: 14620 - DNA, 376 bp, Zea mays
  unsure (1)..(376): unsure at all n locations
acttttattaacaacatctatttacgtaagtgcatgtatttaccaaaacccaattaatcaatagtattattcatcaccacgaagccacttaagcaaaacgcttaagtgaaccacttgaataaaaggattcacgatttaatctccatctttaaatttgattatcatgtgagggtgcaggcttctcttaaccgtgagcacgactaatatatccgctttaacatccagtagagggtgtacactntactcacaagtcgtgtatctcctctagtctaagttcgcgcctgccgtatttacttctgaggtgaatggctagggatctactacgaggctttcacaaaacacgcttaatacgaagcaacctgcaaggattctaagt

SEQ ID NO: 14621 - DNA, 450 bp, Zea mays
  unsure (1)..(450): unsure at all n locations
gcaagctgaagattcaacctgaagatnagctttatgtgctattcattgccaagtcgatatccaatttgataggaaatctttctggtgatgaggtattctgcatctgttcgcattacatatttngtttttagtgctttgagttagaattcagctattacgtttttctatattatcttttgggggagcttggtcttttgattttttagaacgaaaatggtaagccagttttcagcgtaatggcattatgactttgggactttagcaacaccttaatttcagctgccctggtaaatcgtgctagcaatgggatactttgctctgcattatgcagttctttgatcgctcaaagcatgattattcagatttctgctnttatcttgctgcaaatatcagatgatgtaatgccacttcttttcaataatgtccatgtgcagttactcaaatcgaaat

SEQ ID NO: 14622 - DNA, 99 bp, Zea mays
  unsure (1)..(99): unsure at all n locations
gcttggtgagtgggaagattgatctctttggggctntttattaatgctatctctcgtatagtggttggaagctatgaaacttggatgcaatgaatggtg

SEQ ID NO: 14623 - DNA, 146 bp, Zea mays
tgcttactctacacattatgattattagcgctttctgcatcagctttacagtgccttaggatcgccatggcgtggtctgttgtcttagttgctcttctggttggcagtgttcgaaatcttaattccgctttgactcagttgacttt

SEQ ID NO: 14624 - DNA, 270 bp, Zea mays
  unsure (1)..(270): unsure at all n locations
tagaatgacatgtgcgagcgaactaaattttttttggtgattntaaaaggaaaatgtaatagtaacttttttgtggttaagacatgtatggtttcttctactaaatggtagtcgatgtcacattaaatatttgacgctagttaaaagtattaaatataattcaattgcaaaactaactatacaaataanaactgaacgacaggtaaatctaccaatcctaattaatcaatgatttcccctttaatgatacaataaatatttgctaatcat

SEQ ID NO: 14625 - DNA, 241 bp, Zea mays
  unsure (1)..(241): unsure at all n locations
cccacagactgtttgtctnactgaaagaacttaccagatccttgaatatatgttgagagcctgtgcgctgcacgacaagtgatgatgtgacaaaagggtaccttatgcacaaatctcctactacaatatttaccaagccagcttgaagatgtcaccgtttcaggcgctctatggacggaagtgtaagacttcgctgcatttggaccagcctggagagagacaggtgtatggccccgacatc

SEQ ID NO: 14626 - DNA, 195 bp, Zea mays
  unsure (1)..(195): unsure at all n locations
aatcaacagatattcggttaatgtggaacatatattgattcttactataaacctcanatgataagctaatcatatatttgatactaacattatataccaattagaattntatgtaatatactattattggaccaagccacgagtcagcttgtgagccacaatgaaccgatttgtcttgctcttttctggagccac

SEQ ID NO: 14627 - DNA, 396 bp, Zea mays
  unsure (1)..(396): unsure at all n locations
gcttggttgtcttatgcgggtagcacatctaaatctaattcctatatttatcttggtcaanaagactaagtgccatgtgtgtgttgaatcaaaacaacctcgcaagcctcacaaggctgctgaggcgaggagattggcacctctagaacttgttcattctgatctgtgcgagatgaatgggattttgaccaaatgtggtaaaagatactntctcacttttatagatgactccactagagtttgctatgtgtatctcttaaaaacaaaagatgaagcgttaattaatttagacctataaagatgaagttgagaaccaacttgagaggaaaataaaccggtaaggtccatcgaggtgggaatatttctctatgtgttcgatgaagtctgcgtggacat

SEQ ID NO: 14628 - DNA, 198 bp, Zea mays
atccagcagactcataagctctgatgaagctgctgcatcaactatggaatctatccttggcaatggaaactcgtccttcggacaggccttattgagatcagtagaatcgatacacattctccatttaccattggccttctttaccataatagtggtagccaaccattctgggtattgtacctctctgataacttccga

SEQ ID NO: 14629 - DNA, 259 bp, Zea mays
  unsure (1)..(259): unsure at all n locations
gagctgaagtagttctgatgagtacttctgtgttggatctgcgcaactacttacagaacaggcttgctcagctactccgggaggaggaaataaagtggtatcaatagagcgaaggtcaagggagctcctggagggggatagtaatactaaatattttcacatgatagccaatggaaaattcangaagaatcgcatcttccagatgaccgatggagctcgtatggtataccaccagaaagaattaaagagtcatataact

SEQ ID NO: 14630 - DNA, 247 bp, Zea mays
  unsure (1)..(247): unsure at all n locations
gcagcttatactcggctagcattgtagaaggccggaacattaactggagggtgtacttgaggtgttcgcctccaggtgcggtgaagagaatccctgctcctgctccctgcagcttcaacgagccatccaaatacattcgccatacttctgcagtttctggaatatctgagacttngctgtctgtccactctgatancgaaatcaccagtgcttagagtttgatggcagtgcgaggtcggaactcgat

SEQ ID NO: 14631 - DNA, 257 bp, Zea mays
  unsure (1)..(257): unsure at all n locations
gatcaccaaaccttataacaccccctggcctatgaacttctttaccgactccggaaaccctaagntcccggaacttcgtgaaggaaaggtgtattcaagacataaataataagtttatgttatctttgcatactcatgagcatcccatggcatccattcttatacttatgtatgggtatgattagaacgtgaagaagaggtagaagtccccgaagacaggacaccaccaccttcggaatcccaggacaggaatattt

SEQ ID NO: 14632 - DNA, 235 bp, Zea mays
cctgacacccctccaccgtataactcgccaagctcgtgtttccgtgctctcgactgcgataccagcgctagtgggatccgacgcggcgccaacaccgggcgccttcgctctgtgacactaatgtcgggagcggagtaccagtgacagacggacgaagcactgtccgattaaacgcggtggacggagctgacattcatatgcctgctaatacatagtctggctatgaatccggtgc

SEQ ID NO: 14633 - DNA, 511 bp, Zea mays
  unsure (1)..(511): unsure at all n locations
gctttttattaaactaaaattctgcttcacagtggatctcccacattcaacatgactaggcttgctcggactcaagatgccatcatgctcttcatcatcactaccagcttcggcaataacatgttcaacttcaataataacattattcttctcgggaatagatcctctctccttttgaacaaccaacccagagcgcctcattacttctgagattgtaaatgtctaagatgtctcggactcttcaccttacgttgtcagcctagcagtagacctgattctagccatttcagttcttaagacgaaggtgactttcaactaacttgatgatgtgtcgaaagactagacacaagtgcacagaccacagaaagcttcggcttagtacatatttcaacagcacaacaatgcaataacaatgaatgatgcggaacttctaccaactcattattatgagtctgcaggaagacgtaatgaccattgtatactgctgatcgtgaccgatangcataacttt

SEQ ID NO: 14634 - DNA, 471 bp, Zea mays
  unsure (1)..(471): unsure at all n locations
gaacatggctntcactagaagagtatgggtatgatactaagtgtcacacttcgctgaagaggacaccttgtaaagtgctatatggctaccctcccaaccatccgggtctgaatttcagtgaccagggtacagttgcatcgctgcaaacatggctggccgatcgcaaattgacgattccagggacggagccctaaaaaagtttaagagggactgccgtttggttcatatatntgtaatgtaatgggtaacagataacgttaaatcatgtttgtttagtccaacccgtatcagatccacactataattgataccagccattcaatttgtaccgcagtaatgaccgaaccataccataccattgcgtacatttttgaacaacagacctaaatgtacagataaaaggatctacatgatgatatattaaataggagctgataggtcataatcaagagagggatcacccgcaccacg

SEQ ID NO: 14635 - DNA, 148 bp, Zea mays
  unsure (1)..(148): unsure at all n locations
ccttaatcatggcttcaataacaatttcattgggcaaccgtggcgcctgtgccctcaatcgtaagaaccttcggacatacgcctgaaggtattcttcgtgatcctgagtgcgctagaacanagcttgagcagtgaccggcttcgtctg

SEQ ID NO: 14636 - DNA, 284 bp, Zea mays
  unsure (1)..(284): unsure at all n locations
gaaactgcgcactggcgtggagatggtttattagcgtgtaccctcctggttagaggctggacggaggagtactgtgctctcgggtagcgcggaccggttcacattgtggaggatctgtgggaatggttgacatatgcaagggttaagtgctacatatgtcatgtggttagagatcctcagctgagtaaatcgattcggatcgccgttatatcctcggacagtggagacttgatctctgacctgcaacctaggtcaggatgtanacattatannataaaatgatg

SEQ ID NO: 14637 - DNA, 312 bp, Zea mays
gcttgagctacatcaccatcaacttgtgtggaaatagcagaatatactcatgatcgatgtatcacataagcatgatgacatactcatgatcgacgtaggtgcatcaccatcaccttgtgtcatgtccatgctctggcctttataaaaaagataaataaaaacttattcccacccttgtgatcttctgaaaaatctactgagcatctactgagcatctacgattaatacataccaagaacagttgaacactacacaggtgacatgcccaactctagttgttgagaggataactgagaatcttaaactatctta

SEQ ID NO: 14638 - DNA, 128 bp, Zea mays
aactaaactactttgcacctggtaaggaatgtactgtataagctgtggtttctgagaacgcattcaaatcatggatgacgcttaggttggccaatttgcttactcctggccctcagacgaacggtgat

SEQ ID NO: 14639 - DNA, 164 bp, Zea mays
tgcgtgtaggcggtggaactgaggacacaaatactgacggcgacatccatctttctgacgaggtatgtgtgccttacagtgggagtgacaacgatcttgacaacctaatagactctcgtttcccaaatctcaacaaaaatatgtctgattcgaactacatcact

SEQ ID NO: 14640 - DNA, 270 bp, Zea mays
  unsure (1)..(270): unsure at all n locations
acatgtgctaagcggttatgccacattcagcccatgctagncttagctattaagcatgcatctagaccggcctcttcttttgaaaatcaactaaataaagtttgccgtctaatacacccttaaaagctagtgaaccatcacttcttctaaagacagacacatctacatttgtaaaaagacaattatatcccatattgcataattgacttacagataataaattatatcccaaagactcaactaanaacacattagaaattgagtgctcat

SEQ ID NO: 14641 - DNA, 206 bp, Zea mays
  unsure (1)..(206): unsure at all n locations
gagaaagagataggagagcgagacgcgctgggccgggtcaaaagtcatagagcattagcggtggaaanaactgtgttaagtccgtgcacacataaagggagctgtaaagatgtaaaatcaccactgcgagctctgcttttccacacgcgcacacgtagtagcttcctctcggccgccttccctctatcactcatgctcttaattaa

SEQ ID NO: 14642 - DNA, 255 bp, Zea mays
  unsure (1)..(255): unsure at all n locations
ctacatgtgctaagcggcgatgccacagtcagcccatgctagtcttagctattaagcatgcatctagaccggcctcttcttttgcaaaatcaactaaataaagtttgccgtctaatacacccttaaaagctagtgaactatcacttcttctaaagacagacacatctacattcgtaaatagacaggtataccccatgtggcataattgactaacagatagaanattatatccaagagactctactaaaaacacat

SEQ ID NO: 14643 - DNA, 234 bp, Zea mays
cttagcaattaagcatgtgtcgagctcagctctatcataatctacacagtgtagctgagcctctaacacacccttaaatgctattgaatcatcacttcttctaaagacagtgacacctacatcagtgaatagacagttggagcccattcgacataattgcgaaacagaacgcacgttgtgatctaaggaatcaacaagaaaaacattggatatagaatggtcaggagttatagc

SEQ ID NO: 14644 - DNA, 198 bp, Zea mays
gtatccacaatgcctgcacatgaagctgactactatctgtttatatctctacattaagttcgtcagctaatacacccttattagctagagaaccatgacttgatcataagacactcgcagagcatatcagtcctcttacagtctataccatatagcactgtgactctacagatttatcatgctctccatacgacacta

SEQ ID NO: 14645 - DNA, 433 bp, Zea mays
  unsure (1)..(433): unsure at all n locations
cgttgtagtggaacacgcctgtgacatcatatgctgcatggctattgatcagcctacgcctacacctgcacctacgtcgtagcagcaagtggaggcgataaatgagtgccgtcactanncattgatgccttatcctgttcatgccgtcgtccctttttggtcgtgaaatttccttggcttcaagaacggaatcaccatgatgatgcgacatattgtataattaatggagtcagatcgatcagaacgcacactattgtatcanaatgtaaaaattgtcgtcgcgacttgcangagtaataagcgacgaagtaacaagctcattcgaagagtacaattagggcaggtacagtcgtagccaccatgctcatgcatgcatanggttnntcgtcattctagagtctacagtgagtagcgaatgcttctaccactttca

SEQ ID NO: 14646 - DNA, 418 bp, Zea mays
  unsure (1)..(418): unsure at all n locations
gctatcaagattcanagactctttttgtagaannagctactatgagtttgtccttaagaattatttactgggcagaataagtagttacctgcatctagaattctttctattctagatcaagcacttggcctatactagcttgcttttatcaccccttcagttcacttcgtgctatgtgtagggtagtgaccaagtcttcatgtccgagaagtaacggcgatccgaatcgattaatacccagctggggatctccaaccacatgacatatgtagcacttaaaccttgaatatgtcaactcgcacccttgtttctcaagaccagaatggggtcacgcccaccgagaacatagatactccaccatctnagcctcttgcacggagggtacatgctactcttgcccatctctcactcccattat

SEQ ID NO: 14647 - DNA, 268 bp, Zea mays
  unsure (1)..(268): unsure at all n locations
aattcagaagagagaaagcagcttcagcagacctttcgaagcctatgctcttatgtgaggacatcgcatagcagaaggtgctgntaggctctcangtatccgaagagcangagaaaaccttgataaggttntgctcaataacaaggatgtttctgcatggtcagccaatgatctctgcggagttaatagagatgttatcgagcactcactcaatgtcgatccatccttcacacccagaaagcaaaggcttcggaanatgtcagatgat

SEQ ID NO: 14648 - DNA, 435 bp, Zea mays
  unsure (1)..(435): unsure at all n locations
ctatattatggattagctcttcgaatctggcccaatctccttcggcccttctggcagcttcctgacttccatgaatagcnagtgggccctctggtccgaaggtatcttcatgcacagataagctggatgaagaaatgcttcnaaggcattgagagtaccacgaccaatgattgcattgtaagggtattccatgtcaacaatatcaaatacaatttgctcagtccttgggttgctaatgaatccgaaggttactggcattgtgaattttccaagtgctacgatatgtcttcctccgaagccacaaaggggatgtgtggcatcatggattttgtctcgggctcttgcatctgtctgaaggcctagcaaatatgatatcagttgcactgcctgtatcaaccaaaacattatggaccaggaatccttngatcacacaag

SEQ ID NO: 14649 - DNA, 214 bp, Zea mays
cgatcttacttgcttttttcttgagccctggcgccagtcagcgatgaaatctgctagcgcctatgactgaatcgagatctatgcacataatcaatgcagaactcattgagttccgcagcccactttccaatccttccagtagcttctctggttctcataatatccttcaaaggctgtgatgaaagaacaattatatggtatgcttgaaaataat

SEQ ID NO: 14650 - DNA, 326 bp, Zea mays
  unsure (1)..(326): unsure at all n locations
tcacttatatgtggacagcagngtccatgatgattctgatataaacaatgatcatgacttcctggatgtcatgaatttaagaanaggaaggaaaatatagcattggaaaaaacaacaaaataacgctctcccatataataggtacacacctaacaaaaattgggtatctgacctttctgacctctccccagatccgttttaatgataggccttatctagaattgtcacggggtgggtcggagtgctaagttngatttcttgagagaaatcattacggatgaaaacgttgatttaatgggttacaggaaactaaaaaaatcaattca

SEQ ID NO: 14651 - DNA, 292 bp, Zea mays
  unsure (1)..(292): unsure at all n locations
gcttgagcttattttctctttgcacattatctagacttcggntcgactgttaataaaatatttacaggaatttgaagaatgtttccttttcatcgcaatcaaatcgaagcccgaacgcttcggagctaaagttcattatntctttctgggcggctntgccctcaacattcctcttgtcccttagggccttgcttaggaacaaaccctgcanagatataaaaagagaaaagtaagtcattccatcaaagcaacccgaagctaanaaaatcgatagaaataccttaagatgagt

SEQ ID NO: 14652 - DNA, 251 bp, Zea mays
  unsure (1)..(251): unsure at all n locations
agctggctatccaacttcggcactcacgccctgtgaattgtttatataatacatcttgacgcccaactataatgccccataataagccgctatagatggcaaattataaattttgaatatctagctgatatggtaatcatatatagatgttgtnacggaatcaagcgatactggcttttcctatatcgctgaaggccgcgaagcatgcacgttcagaagttcagtcaaagcaccatgacngcttggggttt

SEQ ID NO: 14653 - DNA, 282 bp, Zea mays
agagatgatctcatttcttcagtcttcactataaacaggagatatattgaggactgctctttcaagaagttcaaccgaaggtgcttttattgtttcaaaaaatacttccgaaggtaagggcagctcctgtgctgctgacttggctagcaaatcagcatgttcattctctcttcgaggaatatttttgacagaagacccttcaaaggaagcttcaatccttcggaccgtgtctaaatatttctcaagcttcgggtctcttgctttacaactctttgtcatatg

SEQ ID NO: 14654 - DNA, 336 bp, Zea mays
  unsure (1)..(336): unsure at all n locations
gctttgacaataatattatctactggtggcaacaagtcgttntacaatatatgtaaaacgatacataatatgctaacagaaaagtagataggcccacacagcatacaattggttgtgcgtaacacatccaggttagccaggacacaacttggggatgtcatagtgctcgctaaggttagccaggtactggtngaagtcctgcatgcggtccttgtacgaacttgttgcgaccttgcccatcttcttcatgccgatcttctgcttctgttccatgtagcggcgctctgctggtgtgagatggtcatagtcagaatgtgggttcctttcgtcttcatt

SEQ ID NO: 14655 - DNA, 189 bp, Zea mays
  unsure (1)..(189): unsure at all n locations
ctgcagcttcgcagcaacacctttcgtgtaaaacaatgaaaaagccgaagaatatgtttacctttganatagaatacaataaactaccaacgatatgctgtcgtcggtagcggctgatatcggcctcaagcttcgggaaaccaatactcttcgacagagtactgataacctttgctctagttcagtctc

SEQ ID NO: 14656 - DNA, 248 bp, Zea mays
tactcaccggaagcgggagtcatcgtggcgcccgctgtattcgctgactggcgccacagtgtcgtcctaacctatgtatgacctactcagaccttcgccctcgaattcgtatcgagtagcaccgatccatgtaggataatagtctctggtatgccgcgaattgatcaccggcgttacgcttggaggtggacctgtgcctcccaaatagctcgatgtggaggtgtgctcttctcgagtatgagtctctg

SEQ ID NO: 14657 - DNA, 235 bp, Zea mays
  unsure (1)..(235): unsure at all n locations
cccacgatggggtgtaccaaattgcgcgaagtgtatgaaatgcaattttaaaagctgaggactgggattaaaagttcttctaattgttggtagttgagttctttgagtgctttcgaataggaataactattccagaaatatgtactttaccanaacactgacatgttgcagactatatactaaattctgaacagcatactatgttattagtgtattttactaaaacttttctaca

SEQ ID NO: 14658 - DNA, 195 bp, Zea mays
ctgaagtatgcaacttctgagccataaacgatacatccttctcactctgataattttttgcaactaaaactcgatacaaaatattgggcctgctcttacttgccataagctttctgacaacctgactacgtgggcaactgccattatataagaccctggatggggagcatgtgcaaatataaaactgttcactct

SEQ ID NO: 14659 - DNA, 252 bp, Zea mays
  unsure (1)..(252): unsure at all n locations
actccaaaatgtgcttgactttgctgggatctaccgcaatccctctggcagatagaacatgtcccagaaattgaatttccttcagccagaacgcgcatttgctgaacttggcatacaactgatggtccctcaggcgcgttaacacgatccgtanatggtgggtgtgctcctcttcattcttggaatatatcanaatatcgtctatgaagaccactacgaacttatcccaactcggcatgaatacccgagtca

SEQ ID NO: 14660 - DNA, 228 bp, Zea mays
  unsure (1)..(228): unsure at all n locations
acttgattcgncgcacttgttgcgctatccctgctgcacccttaggcgacttctgcgcggatagtctttgcggaagactacgattnttcgcacttattgtgctagtccggctgcacccttaggcgacttctgcacggatagtcttcgcggaagactacgattnttcgcacttattgtgctagtccggctgcacccttaggcgacttctgcacggatagtcttcgcgga

SEQ ID NO: 14661 - DNA, 411 bp, Zea mays
  unsure (1)..(411): unsure at all n locations
gcttctcaccatgtcgctgctagccaagatggtgcagctacctccatctatgatcaaacgacatgaacgctccttaatgacacactntgtttgaaacaacgtatgtcgctgattctgctctgccttctccatttgtgcactaagcacacgctgtacaatgaggctctcataatgctctgcatcatctgcaccaatctgttcttcgggaggntccttattgcctgcatcatcagccgcaagcaaagcaagtgtagcttcatccanatcactagcagaggaatacccaccatcgtcttttaccaccaaaacacgctgattaggacaatcacgctgcacgtgtccatagcctttgcatcataatacagaacatctcttgttctacctgtggaagctactgaagaggcactacct

SEQ ID NO: 14662 - DNA, 357 bp, Zea mays
  unsure (1)..(357): unsure at all n locations
tcgctggagtatgcgccaacattggcgaagctagtttctattctccccacacattctatggcattttcataacatttttctcttgaagagcanagttctacaaccggttttctcccaatagttttccagtaatcactggcgtctcggtcagcttcgacaatagcacattctaattntgcctcagccagctggttccgaagatccctcaatttggcattttgggcttcagcctggggctttggcttctttattttgttcaacaatgagtttaaaatcttatctttttcaatacccttcgtcttangtcaatcacttcagaatgaaggtnttcagagctatagtacatccttcgtcttc

SEQ ID NO: 14663 - DNA, 449 bp, Zea mays
  unsure (1)..(449): unsure at all n locations
angctgcagcttgatcgtgtcttgaatggatgctagctcttgtatcgaatgtgattgattggagtgctcgngtgaagtgaatggaggtggttggggttgtatttatagcctccaaccacttcctagccgttggtcctttcctgtcgaccgcagacggtctgcgcccttggtccggacggtccgcccctgcacatcaatggctaanatcgcaacagtcagcagtaatggctatactaacggctatagagcatttaatgcgtcgttagatgtcagataaagtagtcgcggacggtccgatcgtgcaccccagacggtccgcgaggacgctaanaatatnatttaccgaacccgtcaccttccggtttttctggggtttcaccggccagacggtccgcgcttggtctcggacggtngctcgcttctcatcggacggntcgtagtgtaacctt

SEQ ID NO: 14664 - DNA, 338 bp, Zea mays
  unsure (1)..(338): unsure at all n locations
agctntaccagatggatgtgaggagtgccttcctcaatggaccaatcaatgaataggtctatgtttagcaacctccctgctgtgaagacagtgagtatcctaaccatgtctataagctctctaaggcgctctatgggctcaagcaagccccaagagcatggtatgaatgccttatagatttccttatcgctaatggcttcaaagtcggaaagggcgatcctacactctttactaaaactcttggaaatgacttgttcgtatgccaaatttatgtngatgatattatatttgggtctactaacgagtctacatgtgaagaatttagtaggatcatgaca

SEQ ID NO: 14665 - DNA, 403 bp, Zea mays
  unsure (1)..(403): unsure at all n locations
tgatgatgatgagntatcaatgagatgttnttttctgatattattcaatcgacttattntcccatctgcttcatggggcattacgaacaatgaggtactaatgacatcaaacatggcccggatggctgatattgattggtgtcaactaatttatactgatttgtgtgatgctgccagtcattggcacaagaggaacaaaacaaacattacaacaacaatatatggatgttcactcatttgtcttgtaagtaattctctgttaccaagcatatatatgataagcanatattttgtttgactaantatatatgaattngtttaattttttgtcagatatactatcttgatcacttacaccaccctgcatcacctgacaacaaatatggtactccccgcattaagt

SEQ ID NO: 14666 - DNA, 244 bp, Zea mays
gagcacagatatggattgacctaacacgccttgtgtgaaatcttcctccgaagaccctgtgcatttcagagaacctgaatgagtcctcccttctttggcggaagtcattggcagctctaaagtattcgtccatcttctggagcaccttctccaaagtgtgtgggggcttcctggcgaagtactgcgctgatgagtcccgccgaaaccccttaatcatgggctcaatgacaatctcattgggcac

SEQ ID NO: 14667 - DNA, 419 bp, Zea mays
  unsure (1)..(419): unsure at all n locations
agcttaggcctgatggtacaatngagaggtacaaggcatggctcgtggtcttatgatatacccacaaggagggtgaagatttctttgatacctactcaccagtggctcgattgactacaattcgcacattaatanccggggcaacctcttatggtcttatcattcatcagatggatgttaagacagctttcctaaatggagagttggatgaggagatctatatggatcagccggaagggtttattgcggatggtcaagagaacaaggtgtgcacgttgataaaatcattgcatggccctaaacaagcacctaagcaatggcatgaanagtttgataatactcttacaccaactggcttttgtgtaatgaatctgacacgtgtgtatactatcggtatggtggcgggtgagtctgtatgc

SEQ ID NO: 14668 - DNA, 176 bp, Zea mays
  unsure (1)..(176): unsure at all n locations
tcatatcatctctgggtacctgcaaaacttattaagtacantttggtacccatctcatgatangtccatcaagggtagccaataaggacttangcacccaaatagccttggtcctagaatgtggtgaactcatcacctttctagcacaagagtcaaatttgggtctnctaagcata

SEQ ID NO: 14669 - DNA, 400 bp, Zea mays
  unsure (1)..(400): unsure at all n locations
atcttaagcgactgngctgcagctgctgcagggggctgctcggccatggagatgtggtcggggcgagcatcacggcgagggcattagcttcctgttctagcgcccaggatagggggttcatcggtctgcattgggctaaaagggcggatggngtagaccgagaccgactgctggcccgacatgggatgagaacagggcccatggaaggagagggacaactgtgtcccgtgacagggaagcctttgtgtgtaactgactggaaggaacaagcctgccggaaaggacatgtggcgggctatctgacgggtggccaggacactctgcctgtgtcctgagaaaaaaagctgtgngagatactgcgtcgtgtggacatgagaagaccactctcctcctgacaaag

SEQ ID NO: 14670 - DNA, 144 bp, Zea mays
  unsure (1)..(144): unsure at all n locations
accacaccatgctcatcttgcttggtgcggaaaacccacttggttcctacaacattntgattangacgtggaactaaatgccatagcttattcctttgaaaaattgtgagctcctcttgcatcgccaccacccaatccgaatct

SEQ ID NO: 14671 - DNA, 221 bp, Zea mays
  unsure (1)..(221): unsure at all n locations
caccattggcgcctgngctcttagtcacaagaaccttcggacatatgcttgcaagtacttctcatggtcttgcgtgcactggaacagagcttgagcggtcactggcttcatttggaagccctggaagcttgtgactagcatatccttcaacttctaccacgatttagttgttctcggccgaagagaagaataccaagtctgagcaacactctttgactgca

SEQ ID NO: 14672 - DNA, 299 bp, Zea mays
  unsure (1)..(299): unsure at all n locations
gcttatgactgcttcaagaagcagaaattcaatcttcgnggtgcatatctgttctcggttcatgattntatggccgatggtattttctctggatggagcgtgcatggtaaatgacgtgccttattgtgctaaagatacagattggtttcgtcttagtgctggtggcaagatatgttactttgatggccatagatgtnttctacccttcaatcaccccttcagaaggcagagaaaggaatttatgaagggcaccattgtcacgaagggaccgcccaagcgacgtagtgggatagaaatta

SEQ ID NO: 14673 - DNA, 433 bp, Zea mays
  unsure (1)..(433): unsure at all n locations
tggcgccctcgaaccttcatatgcagaggacatggtcgagcggaccttggtgagccatgactcgagggccatggaccacgatggagagggaaagccaagggccaacaacgattntatactactgcgcagctgcgaattaatattaagctccgagctagctaccaagacaccacatatataatcggacatatagagatatgagatgagattgagagacatagcatatgtaacagaaccgctgccatgcagtgcacgtcgaaagtacagaaccgtccactgtaatcttaaatcaacgtacttggtagccattactagtcagctgcccctgctgcggagacattggtacatgcgtacactttattntaatanaacanaatatatgtatgttctattgtgtgagtgggaacattacagaaccgtcactttatcttaa

SEQ ID NO: 14674 - DNA, 487 bp, Zea mays
  unsure (1)..(487): unsure at all n locations
agctntgnngccttacgttatttatattatctttgtgagttcaattatgatagcataaccttcgtagttctcccattataaccttcgtccggagtacatccctgnggaaataatgcttcagcggacgaagggcattgatatttaacattgtatgttgccttgntcttaattcatagcatttgagaacaagtccccaacattggcgcccacctgcggtgaattcacttccacttttatgagctgatggcttcgttcaacgatcaagctggagctgcttcngctccgaagctggtacttncgataacaggcggntcatgctcagagccagccaacangaatcagatgaaggaagcacagagaagggtacaacacgttggggtgcaaggacccttcatcaagtcaagatggtctcacattccaattaccttctctcaagaggatctncaactcaaggattacncacacatttgatgctatggtatctctt

SEQ ID NO: 14675 - DNA, 273 bp, Zea mays
  unsure (1)..(273): unsure at all n locations
aatctgctcatatgcgacatccaattaacgtataacctggttatttcgtgtgagctggcccaaacagcaataggttntatggcataatgtgttgatgtatggatcatacttctgtcaacaaatcagcataaacaaagtattgtaactgcataaaggtgtgatagattgcatagtatacatttgtgtctccatttaactataaatttataatgaatcggtatttgataaatcaagcaattggcaaaataataatgtgaactctatctacgattc

SEQ ID NO: 14676 - DNA, 299 bp, Zea mays
  unsure (1)..(299): unsure at all n locations
agcttgagacattcagtaattntgcaatgctggtggaaagtggaatatgtacaagtcagcgtatcaccatatcatcaaatacgcgcattgatttcgctntgtatcaatntgccattggcccattgcatcatattaatacataaaatctggtacttttgntaacttattaaatgtgctgaatatttatcactaacatagtaacattgacaaacttagtcaagaccacccttcatattactccaaggtaatgctttgctaannaaaacttcccattcatacatttcagngtactggtcatg

SEQ ID NO: 14677 - DNA, 300 bp, Zea mays
  unsure (1)..(300): unsure at all n locations
agctngcacacatagctctnttgaataaccttgatcatatctcntttatatgctatgactaatgtgttttcaagtttatttcacaccaagtcataggtatattgaaagggaattanggtcttcggcgaagacaaaggcttccactccgtaactcatacttcgccaccactccgagcaactctctcttctttgggggagaaatgagcatcaaggaaaaggacttcatccttgggggagagagtaaaagctcanacgcanaaggacttcgtctttggtataatcttaactcacttatttatg

SEQ ID NO: 14678 - DNA, 360 bp, Zea mays
  unsure (1)..(360): unsure at all n locations
aacacaagttgcaattttgggttgcctagttatatgagaattaattgacaagctcgaagtgggattattaccaatgggacaatccttgcattgatgtcccttttttcggcatatgtagcataggcgatcctcaagacttgaagagatcttctttccttgagtctttcttgctacaagggtagagaatattatcttttctaacactatgcctttgtgntttaaatagggacaagaattaanttgtcccttctttgagcatttaaaacanagattatcactcttcgtactatatcaagcattttaatatagggacatgacctaatcgagtgtcccttttanaagcatcactacacttcttac

SEQ ID NO: 14679 - DNA, 484 bp, Zea mays
  unsure (1)..(484): unsure at all n locations
atgcaagcttgntaaagacatgtattcccgcttaaatcttgtgagtaatgagctctactctattgaanataataagctaggtgatgtgtacattgtgagaaatatcctcccttctaccacaacaaagatatgagagcattatcaccatccttttcaatcaatacttgcctttccctttcttcaagtgactataaacacaaatattgacaaagtgagatcacacttctgatctaggcacaatctccttgcttttcttcacgttatcttctgtctttatcttagaaagcgttgtggtccgtgtcgattccttggctggcattacgacctacattgcagtgggcacacatcataacattaaattcaaaatcacaaaanaagaagagacatacatgcaaatcaatatacttcgtagaggactgttgtggtgtgcatatgactgtggtaagaatgatcatgctaataanattctctctagatgtcatat

SEQ ID NO: 14680 - DNA, 272 bp, Zea mays
  unsure (1)..(272): unsure at all n locations
agaactacgggtttatgcaatatgtactaagtgaatgtatatattaaccaggtttctatttcatgaacagaactaattattgngcttcctagangtgattctgtagatgaaacccnccatatctgtattgttaactntntaaaagttgtatcgngggagattgatagtgaccctaaagcttgcggtctcatccttcaaattgtggtcataaggacatcatcgatttttaaacttatcaagaacatatgaattcagaatggggcagttctcag

SEQ ID NO: 14681 - DNA, 243 bp, Zea mays
  unsure (1)..(243): unsure at all n locations
tgctactcgtatacccgntttattcaactagactgccctggatcgccaagaacacgtcggattgttctcgngtttcgctgtcgtcgtggacagagagattccgacccagattagtgcaattagttganggattaaggtcgccagngtggaattaggtgtcagccaagctagagcgccggtcatttcgtatcttggccggtacaggctcgccagaggtatgctcgtcgcttccaccgtcgtgga

SEQ ID NO: 14682 - DNA, 218 bp, Zea mays
  unsure (1)..(218): unsure at all n locations
cgagatcactggagtttatcccaggctacgggagccatcaccatgtagttaccacacatgcttgacggctttttagaaacactagaagctgcgtgaaacaccttatagctagtgaccatcacttcttctaaagacagacacatctacattgtgaaatagacatgtatatccatatgacatatntgactaacagattgcaactatgtgcaagactctcc

SEQ ID NO: 14683 - DNA, 238 bp, Zea mays
cagtgactatatcaccaaactatacacgatggcgttgatactccatgactatcccccaatgttcattccacactagcagatcgctgattgggagctatttacgcattgacattttgatgaaactctacacaacttaaagattaaacggccaaagactgatggataaaatccaccgtttgaggatcaaaattaatgatgatctgcataagacataagactttctaaccaccaaaaatgg

SEQ ID NO: 14684 - DNA, 470 bp, Zea mays
  unsure (1)..(470): unsure at all n locations
cattatagagcatgcttctagcaaaattaaagttttcattgtctagctcatgcctcggaattgtagcatttaatgtagctatgtgaacattttggntgttaatcataacaaggtgatcatcaataacttcaacatttatatctctacatctagtgcaaatggagacatgctcaacggtagatgtatggggtttacaaacagtcaattcttctatcttagctaatacactagcattctgtgtctaagacaagaaatngaaccatngcagatgctaagctctctagacaagntttcactattttctacttcaaagcataagcattttcaattaacanattttatttcttaacgacaagtctctgacattcaagaatcatcttctcgtaatggttcaataatcatcaattttcttcggccatgtaaggtggaaagaagaaataaacatctcatatactaactacctatatcga

SEQ ID NO: 14685 - DNA, 270 bp, Zea mays
  unsure (1)..(270): unsure at all n locations
atccactactggatgcttcttccctactcttatcaataanggtgctcacctaaagccactctggcgtcagtatttagtacaacaaatatccaacaactgaagcttcattgntcaaagatctgattgttctgttctcgatttaatttaaccagtcatgggaacatattcttggaaacagacgttttttttacaaaaatacaaggtattagttggggacttacaactttgtgcaaatgctcatgaatggatgcttcatcaccaggatcaaca

SEQ ID NO: 14686 - DNA, 310 bp, Zea mays
  unsure (1)..(310): unsure at all n locations
agcttgagaattcaccatggtttgcatcctagagcaatatatacacnatcttgtttttcattaacatatactattacttctgctccttgtggtcataacgtgccacttactaaatttgcttttgcttgatntatgttgngaatgtttctagtctcttcgaacacggcaaggcagtcagtgtcagttagctactacttaagttagtagccttatctgagttctaaccacattttcatcatgggggagcgaacgctggacataccatctacaactcagaaggcangaagtttgctctgcatcttggttcatc

SEQ ID NO: 14687 - DNA, 437 bp, Zea mays
  unsure (1)..(437): unsure at all n locations
ctgcagcttanacatntatgagggatcgtcctacttataacatcgcacgcaatgtcatatatgcaatatatacaagtagaacaataagaatggcattcacacaacagttgtgattcggtatggcttggtttcacatggtgatctccatctccaataatctgtccatcacgatgatctccatctccatgatataggtatgccatcctccaggtgatgagtccttcaagacctatctaacgtatgctggtaaacaaattacatatacgctntggatcatcacatgttgacactcaggtcattacattataattggacaatacatgtggctccaggcgtattgcccctgtcacgacacgccggtgatcaaatcaacccaaatccgagactttcgacccgaagaagaatacanctcatgacatcgatctgtgcgtcaatct

SEQ ID NO: 14688 - DNA, 528 bp, Zea mays
  unsure (1)..(528): unsure at all n locations
agcttcatgcaactgctgccaaaatgagaggcgaactgagtgcctctatctgatactatcttctttggaacaccatgcaatcacacaatctgagacatgtatagntcgaccaacactgcactcgtgtacgtggtcttgactggtatgaaatgggctgcctttgtcaaatggtccactactacccagatggagtcataaccagtacgagtgagaggcaaaccgactataaagtccattccgatctcatcccatttccactgaggagatatgcaacggtgcagcanacctgcaggtctctgatgttctgctatatatctctgacaactggtcgatacaagccacgtactcttgtatctcccttttcataccgtaccaccagaatcttttcttaggtcttggacatcttctactaccagggtgatagagatgatgctcatgagcttctgagatcagtcccgatcgattgtatcggaacccagctgtcttgacatacactcttcgatctcacgaatcttgctttcattatat

SEQ ID NO: 14689 - DNA, 310 bp, Zea mays
  unsure (1)..(310): unsure at all n locations
gcttgtacatgatatatatatgcgacagagtacgcantaatccaggtatttcttgngatcttctgccgaatgacatgtggttctttagatacattctcccataatagaagaaataaatccatctatattttgtgtttctgatcaagtgactgaaattntgccagactgcatagactaacctttccgcagatttttctaccagtgtactatttcaagcagtgacaattattgaatcaagaatgctaacatatactttagataagtgtctgccaagaaagtcgtggttctgacaaaaaatagacttcccagc

SEQ ID NO: 14690 - DNA, 394 bp, Zea mays
  unsure (1)..(394): unsure at all n locations
actcaagctatcaatcttcaatgatctatatatccaagattgacccanagttatttctgaattgttatgtctaaaactcatatcatctcaaggaagatattgatgttgtaggaaataaagaattgtcctgtgcggaaaaatcaaagcctacaacatggaggaaagccaaaggatggtaacatttatgcttntaagtgcaaatatcttaaattaccatgtcttgtgtgcttgtgtagcacatagaaaaaggancacttcacatgtttgtaattatgtcaccatttcttaagaaatcctcttatatggagattgctatcatcattttatctatgcaatcacatgctaaaatattgtaaaactatggatgtttaactatcatctatatgcatgtcta

SEQ ID NO: 14691 - DNA, 349 bp, Zea mays
  unsure (1)..(349): unsure at all n locations
agcttctggacgtccttgatacgggctangggcctcattgcttcaatcgtcttgattttctccgagattgcctcaatgccccggtacgaaaccaggaaccccagcaacttccctgcggagacatcgaagacgcacttgtctgggttcagctctgtgtgggctgctcgcagcctgtcgaanaccagggtcaagtcttccactatggtcgaccctctcttggtcttgacaacgatatcattgatgtatacttccaccttgaccctgatcaggtccccgaaagtcttactcatcgcccgcataaatgtnggcatggcgttntttatggccgtatggcatcacaacatagcag

SEQ ID NO: 14692 - DNA, 202 bp, Zea mays
  unsure (1)..(202): unsure at all n locations
cacttgtgcactgactctgatgtttgcgtgcgctgaggagagacgccaataacgggggttcacacacaaatatacgtgctgcnggtcctggcggatgactgacagtaccggcacactcaactgattggacgatgtgtgactggagaacgcttgtgggaccaggacaactgtaatgcacacgagcgcgcatttctgtatacga

SEQ ID NO: 14693 - DNA, 203 bp, Zea mays
  unsure (1)..(203): unsure at all n locations
tcaaaggatataagaggattatgaaatcatgtattttttgtacgattaataacttattggatngaacacaaggagcttatagtttcattgagattgatccttcattcgagatatcattacntgggtcttcaatctttagtgtgcccagtcaagcttttgttttttgatgtctaatggtataccctctctgatctaatatggat

SEQ ID NO: 14694 - DNA, 352 bp, Zea mays
  unsure (1)..(352): unsure at all n locations
acaagtgggaggagcacatcacagcaagaatgtgngaccacttcaagacccctggagctgctgcatatggacctcttcggacccgtcgcctatctgagcataggagggagtaagtatgggttagttattggtgatgacttttcccgcttcacttgggtgttctttttgcaggataagtctgaaacccaagggaccctcaagcgctctctcaggagagctcanaatgagnnttgagctcaggtgaagaagataagaagcgacaacgggtcccgagtcaagaacctttcagtggaggagttccttgaggaggaanggatcaagcatgagttctctggctcctacacaccacagc

SEQ ID NO: 14695 - DNA, 376 bp, Zea mays
  unsure (1)..(376): unsure at all n locations
gaaactatgtgttcactacaagctttaatgtctttttctttcacctagtacaaatntcaacatgttctacacaagaattggatttgttgctacttctaatttagcatttaaatcattggtgacacctttcaaagtagaaatggnttcatgacaagtagatagttcanaagaaagcatttcatttctcttaacttctaaagcataggatttttgtgcctcaacaaatttatcatgctcttcatacaacaaatcctcttgcttttctaaaagtatattcttttcattaaggcatcaattaattcatttaatttggctatcttagatctatctaagccctttgacaaacatgaatatctacttcatctcatactagatc

SEQ ID NO: 14696 - DNA, 454 bp, Zea mays
  unsure (1)..(454): unsure at all n locations
gcagcttagcctatgattttggataattttctcatgtttttctcctgaataaatagagggctttgctcctctaacttgtccaaaattaagataacatcgctgcaatttgctataagataagcaaggttggaagaccctaagaccatattgttactcaactagcaaaattttggttttttcataaaaatgtattccaatacattgaatcatgcaatggtaatggattagaggttctacacttaaagaaagatgtcttgaacaagtgattntgaattacataaacatatgaatgtctctgacccatcgcatgtgtattacccgtagctgattaagccanaggatatgggtngagcatactttattttcttaacntaatatnagtgaaaaatacaactatttgggtcatcttacggaccttatgagattcatcatanagtaaaattgatatatttta

SEQ ID NO: 14697 - DNA, 169 bp, Zea mays
  unsure (1)..(169): unsure at all n locations
ggaatatataagaatatcatcaatgaacaccactacaaacttggtgaggtagtccatgaacacactattcatcaagtacatgaaatangctgacgcattcgtcnaaacgaatggcatgactatgaactcatatagtccatacttggtgatgaaatgtgtcttcagtata

SEQ ID NO: 14698 - DNA, 275 bp, Zea mays
  unsure (1)..(275): unsure at all n locations
tgaagcanggataaatgcaaaggacatgctttctcttccttatgtataagatatgccaagaatgcttattagaggaagatttangtacaagtttaaatgaaaggaagtgggtttacccttttgtaccttctcataaagacgttctcttcattgtgcttatgtccttggtctccgttgcttaagacctatgcttaataaaagtgtgtgaaatattttgacaagagagagtcttaactagtgatcttttcaagtattgtagcataatcaaatggata

SEQ ID NO: 14699 - DNA, 266 bp, Zea mays
  unsure (1)..(266): unsure at all n locations
tggagactacctcatgggagtagatatgggaaaactctttcggaccttgtgaggtcggaaactaaagctncacccagccccatggtatttcttttctttnttctctaggatgattcggtccatggtgtttccaccaggaatgggctgggatcctctcggatcgtgagctacccacaaaccctannatatacacgacacgtacatggaatcactaatggcaatattaaatcttccaatatttaatggtntattacagtgcgcacata

SEQ ID NO: 14700 - DNA, 309 bp, Zea mays
tcatgtagcctcaagaattctctgacaaacaaattgacaacatgctgaagatcatcgctcttgctgcatgggataaatgagcccttttggagattatctccaccacaaaaaagaatctcttttttgagtattggagtcctaaacaaatcatgcttgtttccaggaatgtcgaatagaatgatattaacatgaggtcaattgactactttggaaaggaccacgtcccaattgtgagtcttctatctggccatgaatgacatgacttcatagctctttgtcaaagactgtaacactctgtactccgataaa

SEQ ID NO: 14701 - DNA, 252 bp, Zea mays
actccagaatatctttgaccttgctaggatctaccgcaattcctttaaccgataacacgtgccccaaaaattgaatttctttcagccagaacgtgcacttactgaacttggcatatagctgatgttccctgaggcgcgtcaatacaatccgtagatgctgagcatggtcctcttcattcttagaatatatcaagatatcgtcgatgaagactaccacgaatttgtccaacttcggcatgaacaccgagttca

SEQ ID NO: 14702 - DNA, 321 bp, Zea mays
  unsure (1)..(321): unsure at all n locations
tatgttgagcaacctnccggctntgaagatagtgagtaccctaaccatgtttataaactctctaaggcgctntatgggctcaagcaagccccaagagcatggtatgaatgccttatggattntcttatcactaatggattcaaagtcggaaaggccgatcctactttatttactaaaactcttgagaatgatttgttcgtatgccaaaattatgttgatgatattatatttgggtctactaacgagtctacatgtgaagaatttagtaggatcatgacacanaaattcgagatgtctatgatggggaagtgaagtattttc

SEQ ID NO: 14703 - DNA, 154 bp, Zea mays
cagcttcaccctggtaacagggcatgtacacaccttacaccgtaaccttacaccggtgcacgatattagacataactaaatcataatataatacggggggtgtggctaaacctgtgtcttactatatctattgcactaattagagattcaataa

SEQ ID NO: 14704 - DNA, 281 bp, Zea mays
actactctttgatgtgttgatcaccgttttttttttttgtgctcgattatgaaacatgggctgaccaagatttatcaaataccgagaaaatgctccaagcttagggcccacataatgcttgaggattcctgaacatgcaacaaactgtattctatgtgtgaaacccaagcatgcagggactgccaggctcattgcttctcgaccacaaaggggagacataactattttgtctgcttgctgagctacaaataatcacgcttctgtaacaactggacaaatct

SEQ ID NO: 14705 - DNA, 253 bp, Zea mays
agcgtgtgatcgagaggttcgagaaggatgcttctgatatgaacaagcggtccttcaagtacgcgtgggtgctcgacaagctcaaggctgagcgtgagagaggatcaccattgatatcgctctgtggaagtttgagaccaccaagtactactgcacggtcattgatgcccctggacaccgtgacttcatcaagaacatgatcactggtaccttccaggctgactgtgctgtccttatcattgactccaccact

SEQ ID NO: 14706 - DNA, 329 bp, Zea mays
  unsure (1)..(329): unsure at all n locations
tgtaagaagaaacaccttctgaagatcagcacgganataacgccgaaccaccttacagggaacttctgcataacgacatgcctaagacgaaaggttgcaccgacttaaagatgaaaagagagattgacccatgacttgttgtgtcatgaatgtaatncaattgtaagggtataaatgtaatttcacaccagatgtgccctgtgcctatatatagatgaacagtacctccgtactgctcacgctgatttgtactcgctcgtgaatcacgcttgactatcntctgtcaagcgaagtaccaatgtattctgaatattttgttattatgatat

SEQ ID NO: 14707 - DNA, 187 bp, Zea mays
  unsure (1)..(187): unsure at all n locations
attcatatgctctctgcagtattatatgtgtggcatcatatggactagtgcttccgntgctatgaattaattggcatctattgtgttcattctgaaatagacagtcatgtggataatgatgcatgtggttaatggtgctttaagactgctnntaaatggtatcttagtttaaatcagtatcttaatg

SEQ ID NO: 14708 - DNA, 428 bp, Zea mays
  unsure (1)..(428): unsure at all n locations
ctgcagctttcctgatcnaaggatttcatgcttactgaatttattctttgctatgaagaagggtacattattaatatgcncaaatgagatcaccagtcaccagacatggtactctggattaatatgcatcttacactagtacttaatagctctgccccatgaagtccaactatatgccagtcatcccactacttaacacttgtaagtcatatagttctagtagaatccaagccagcgccacctttctttggatccaaattcccatcggagctcaatttcataggtcgattcatcttttgtactgatttattattngcaataagttggctgctttccttagcccttngtgcattcagctcatattctttggtcctatttgctatatgtggatctctaatttatctagggtgcggcatctaacataatga

SEQ ID NO: 14709 - DNA, 345 bp, Zea mays
  unsure (1)..(345): unsure at all n locations
tagaggtcttcaccgtaagacagtgacaggaaaccttacggcttagtgcatctgccacaacattgggcttgcctgggtgataaatgaattctagttcatagtccttaataagctcaagccatcgcctcttgctcatattcaattctgactgggtgaagatgtattcaagctntatggtctgataaatatgaagacatttccagcgatagtgacgccaatttcaggcatgaaccacacactagctcagacatgagttggtatgctctatatcgcgcactgcttgagcatatcattactcgcctcttgcatagccacagcgagtcactgctgatgctacatatacat

SEQ ID NO: 14710 - DNA, 174 bp, Zea mays
ggcactcatcattcacacaagaacatcatgacgaccgacaggccactggaacttctacacatggacctattcggcccgattgcttacataagcatcggcgggagtaagtactgtctagttattgtggatgattattctcgcttcacttgggtattctttttacaggaaaaatct

SEQ ID NO: 14711 - DNA, 426 bp, Zea mays
  unsure (1)..(426): unsure at all n locations
gacgaggcctgacaactgagccagaactcggctgatcctggtggtgattcagatggaggctaagtgatgtatcagatggtggtatacccgcgggtgtagaaactgacagttcagcgaacaacgttgtggaccaagaacaagacanaacatgcacagctggaaaagaagcggtgtgagtattaccagttctctatgatcttagagctaataatantttctctcatttgacattnagctctcgcaaattctgcggaatggtttttggcctggctgtcgtctgtacttcttcattcttttcatgcagagcaaagtagtaagtcagtcagaactaacagaccccaagtcgcagcataagctgcggctaaccaaaatctttgtctaatctcagtagatactttgactctgtacattaattatggatgtatc

SEQ ID NO: 14712 - DNA, 134 bp, Zea mays
  unsure (1)..(134): unsure at all n locations
gcatgtcaggcaggaaagcaagttggagcccatcatncacacaagaacatcatgatgaccgacaggccactagagctcctacacatggatctattcggcccgatcgcctacattagcatcggcgggagaaagac

SEQ ID NO: 14713 - DNA, 203 bp, Zea mays
tctacggaggctagacgtctaagtggcgcggaggtagacatgatggcgccaagaccccacgctcgcccatgccgtgcaccaaatgaattcgaatagagatgacacggcgcatacggacaagtagccttgccatgggaagacactcggtttttacacggtataacaacttcttctcagagaggccaccgacgaccgacctctca

SEQ ID NO: 14714 - DNA, 252 bp, Zea mays
  unsure (1)..(252): unsure at all n locations
gactgtacaactgaaagtagagataagattccaactactaaagtagagatcaggtagaatacaagatgcccaagttatagatcaggcatcattctccctctaagtcgtgttgcgccgctggaggaattaaaccatcccaattctgacacaaagctcctgaaatttggcccttccaagtgacttagtgaggaaattagcgagctggtctggagtgttgatgtanntgacctcaacactcccctcatccaagca

SEQ ID NO: 14715 - DNA, 188 bp, Zea mays
  unsure (1)..(188): unsure at all n locations
cagcttgtcaagcacggaaacaggtangaagctctcatcatgcccaaaatgtgatgacaacatcaagacccctggagttactccatatggacctcttcggactcatcgcctatctaagcataggaggaagtaagtatgggcttggtataagtgatgaattttcccacttcacttgggtattctttttg

SEQ ID NO: 14716 - DNA, 388 bp, Zea mays
  unsure (1)..(388): unsure at all n locations
atctactacagtatatgcatctcctcctgcaagtccaatgtgattgatgtggcatggaccttgctttctttatttgccgtcttttcagctggatagatggcatatatataatattctcttgctctttttcatatgtgaatgattcaaaggtgtagtaggcgtacgtgtagtccagcaagcaaagcanaggtcgcacacaagacacaacaacggagtctggccatggngatgaatgatataataataatacgcanagatcatcatatatgagtccatcgacttctnccttcaacttagctttctcacggatatactatctntctactacgtaagaaagacatgggcacggagaataaataaagtggcatgcctctgcctgcattatact

SEQ ID NO: 14717 - DNA, 296 bp, Zea mays
  unsure (1)..(296): unsure at all n locations
gcaagctttgagaaccatntgtactggaatctntcgatcatatcatttacctttggttttttttgctgctcctcctcacaccgncgtcttctccaactcctcacactaagaacaagaccaccaccaccagcaacatcatcataaagaggaacattgcaagggaacttcttcctgtactcatcanaagaagcccgggtctgctctaaagctcttttgtaggtagctaccaaatgggccataacattcagatcatgctcgaagcgtctaagctccacttgatactctgtctggtgctc

SEQ ID NO: 14718 - DNA, 220 bp, Zea mays
ctgcagctttagctttaagcttggctttgaaacagtttttagtgttttcaagagtctgaactgctaagaagctgctgctgaaatgaactgagcttgatgaaaagaaaacttatggtttcttatagcaatgtcgaagaccaacacagaaaagatcaccacggaaattctggaagggctgtctgaagatactggtgacagtgaaagttatgatgtggacagc

SEQ ID NO: 14719 - DNA, 303 bp, Zea mays
  unsure (1)..(303): unsure at all n locations
gcttggaggcgtctattggttgtcggctcggtgtacactcctncttctttcttccgtcttcttgaatgcaacgggttgagcttcggatggctcgccaaagctcgtgattnttctcgagccttctatcatgcactcaaaacttacaaaatgcccgataacttccttcggggtcattntagtatatctaggattaccacgaatcaattgaacttgagtgggatttagaaaaatgagagatcttaaaataacatntaccacttcgtggcatgccacttcttgctcacgaggttgcgcacttggttc

SEQ ID NO: 14720 - DNA, 262 bp, Zea mays
  unsure (1)..(262): unsure at all n locations
catgggctctacctctgcatgagaagcctagatcccatttgtttatcactgncnacgncgaacaggagacaacgcgcaatatcgaaagagacttcatgccacggcaacgtatatctacactgtctcacgttagagcacaaaggcttctagagcaagcgcctactcaaataaaaaaaagtaacacccaactccccagtaaccacacgacgaaataggtacccctcgacccagctacgctgaagccaacagtcataatcagcga

SEQ ID NO: 14721 - DNA, 262 bp, Zea mays
tcgggaatctcctccaactccggcattcaaaacctgatgcttctccttttggcgagtatttcactgatgatcatctttctgagcgctttccaccgttgggcggttgctggcaaaactgcctgatgcccgccaagccctaatgaggcctatgcaactattggcactgcgcgctggccctaggcaaaaccatggccacccgaagtctccatgcctggacacgaaaacctgacatacggttcccgacctgaataaatccattctt

SEQ ID NO: 14722 - DNA, 341 bp, Zea mays
  unsure (1)..(341): unsure at all n locations
gcttgtaagggtcttcatccccacatgtgctaagcggcgatgtctctccagtccatgctagtcttagctattaagcatgcatctagaccggcctcttctttggcaaaatctactaaataaagnttgccgtctagtacacccttaanagctagtgaaccatcacatcttctaaagacagacacatctacatttgtaaataaacaattatatcccattngacataatngactgacagatagcanattatatccaagactctncactaagaatacattngatatagaatgctcattagaagatgcaattttacctaagccctttaccttgccttgatcccatca

SEQ ID NO: 14723 - DNA, 129 bp, Zea mays
  unsure (1)..(129): unsure at all n locations
atgttagccttagcaattaagcatgtgtcgagttcagctctatcanaatctactaagtacagctgaccctctaacacacccttaaatgctatggaatcatcacttcttctaaagacagtgacacctata

SEQ ID NO: 14724 - DNA, 237 bp, Zea mays
  unsure (1)..(237): unsure at all n locations
ccactatgcttctccatctctcgacataaagtgttgtcagaggtcttcattgtaagacaatgacaggaaaccttaccgcttaatgcatcagccacaacattggctntgcctgngtgataatggatttccagttcatagtccttaataagctcaagccatcgtctctgcctcatatntaattctgactgggtgaagatgtacttcaagctcttatgatctgtatagatatgacagaca

SEQ ID NO: 14725 - DNA, 188 bp, Zea mays
  unsure (1)..(188): unsure at all n locations
ctcttttgcagaatcagctaaataaagnttggcttctagtacaccctctaaagctaatgaaccatcacttcttctaaagacagacacatctacatttgtgaataagcaagtatatcccatgttacaaagttgactcacagacaacatggtatattcaagcgactcaccaagaatacattagaaataga

SEQ ID NO: 14726 - DNA, 267 bp, Zea mays
  unsure (1)..(267): unsure at all n locations
ttcttcatcccaacatgggctagtcggcgatgccagagccaacccatgttagtcttagcaattaagcatgtgtcgagttcagctctattaaaatccactaagtatagctgaccctctaacacacncttaaatgctattgaatcatcacttcttctaaagacagtgacacctatatcagtaaaaagacagttgtagcccatttgacataactgggaaacagaaagcaagttgtaatctaatgaatcaacaagaaaaacattggaaatg

SEQ ID NO: 14727 - DNA, 361 bp, Zea mays
  unsure (1)..(361): unsure at all n locations
catgcaagctcgggaaggttcttatccncacatgtgctatacggtgatgccacatccagcccttagctttcttagcaactaagcatgcatctagaccgacctcctcttttgcacaatcaactaaataaagtttgccgtctagtacacccttaaaagataataaccatcacttcttctaaagacagacacacatctacatttgtgaataaacagttatatcccatattacaaagttgactcacagacaacaagttatatccaagcgactcaactaagaacacattagaaatagagtgttcggatgagatagcaattnttcctaaccctttcaccttgcctttggtcccatcaccgaatatga

SEQ ID NO: 14728 - DNA, 368 bp, Zea mays
  unsure (1)..(368): unsure at all n locations
aaaatatattctacacctagcccggacacattaaaatggcagaaaaagacacaaacaattagcacattggcatctcccttacttatatttaaataacaataatctaccaagtntagtaccaaaatttcagtctgagtacatgaagcattcagctctagctaaattccagagctgaaactatcacctgcagatgacaacaactcgactgcaactaccaagntagcaccacttcgactcttgacagacctaacaaaacanaatgattatgtttgacctatgtgcagccaatgtgaaagcatatagtagcactgacaatatgactataacagtccataataatgtgagtaattgagacattatagtgctat

SEQ ID NO: 14729 - DNA, 270 bp, Zea mays
  unsure (1)..(270): unsure at all n locations
atgctagtcttagcaattaagcatgcatctagaccggcctcctcttttgcaaaatcaactaaataaagttggccgtctaatacacccttaaaggctagtgaaccatcacatcttctaaagacagacacatctacattngtaaatagacaattatatcccattttgcataattgactaacagataacaaattatatccaagcgactcaactaanaacacattagaaatagagtgctcagatgaaatagcaattttacctaacccttttacc

SEQ ID NO: 14730 - DNA, 191 bp, Zea mays
ctattataaatactttataattccctatgtggactacaaatcatgaaactatttttattaacaactatagaaaatcacgagcctagcagaattggtctgggcattttaacatctttctataagttcttatggatttctaaagctcctcacaaaaagaaaacgcacaacttctaaccagtgtgggtcaaaac

SEQ ID NO: 14731 - DNA, 295 bp, Zea mays
  unsure (1)..(295): unsure at all n locations
aaacttcaagaaattcataatcaaatggccagagtgcgctccactgccagggttgatcgtgaaggagatgagaccgaagccactgaaactgttccaatttccgaagcaatgaggcgatctgggcttgcaacatcagaggatacaccttgcgncggagcagaacaagctgatgttgaagaaattggntccgaagatgattacagctgcgggatgccaagtaaacctagtcatctggactttggaaagccaccctctcttgagctgatcttnctaaaatgatgnnnagtgggtattt

SEQ ID NO: 14732 - DNA, 377 bp, Zea mays
  unsure (1)..(377): unsure at all n locations
agcttctatagggagaacacattntaggattaaccaatgttcactttgagaaatacagggtttgtagcgcatgccaagcacgaaagcaagttggtgcccatcattcacacaagaacattatgacgaccgacaggccactggagctcctacacatggacctattcggcccgatcacttacataagcatcggcgggagtaagtactgtctagntattgtggatgattattctcgcttcacttgggtgttctttntgcaggagaaatctcacacccaagagactctaaagggattcttgagacgggctcanaatgagttcggcttgaggattaagaannatagaagcgacaacgggacggagttcaagaactcacaaatc

SEQ ID NO: 14733 - DNA, 375 bp, Zea mays
  unsure (1)..(375): unsure at all n locations
atctggtacgggaacatgctctatatcctcctcgatctgcccctgatgtcgacgagcaggcagcggagcctgaacacctttgcctcaagtgctgtgtggctatggagcttcttcatgagctactggttgagcgttctgagatgtaccacatgcttcttcagggacaaaacgggggccttctgctgatacttcctaagtatggagtggntccccaagggacacttctttagaggtgtgcgtagtgtcgttgcctggcgctcgtgaccgacccgccaagacctgctcatggacggctcttcgacgagatctaaggacacggacaccacacctgacgcacaccacacttgcacccacagtgacaaccttcacaccaca

SEQ ID NO: 14734 - DNA, 246 bp, Zea mays
caactaagcatgcatctagaccgacctcctcttttgaaaatcaactatataaagtgtgccggctagtacacccttaaaagataataaccatcacttcttctaaagacagacacacatctacatttgtgaataaacagttatattccatattacaaagttgactcacagacaacaagttatattcaagcgactcaactaagaacacattagaaatagagtgttcggatgaaatagcaatttttccta

SEQ ID NO: 14735 - DNA, 222 bp, Zea mays
  unsure (1)..(222): unsure at all n locations
attaagcatgcatctagaccggcctcttcttttgcanaatcaactaagtaaagctggccgtctaatacacccttaaaggctagtgaaccatcacttcttctaaagacagacacatctacatttgtaaatagacaggtatatcccatattgcataattgactaacagataacacantatatccaagagactctacttanaacacattagagatagagtgctca

SEQ ID NO: 14736 - DNA, 450 bp, Zea mays
  unsure (1)..(450): unsure at all n locations
agcttgtgcaggttcttcatccctacatgtgctaagcggcgatgtctcttttcttccatgctaggnctagctattaagcatgcatctagatcgaacctctcttatgcaaaccaacaaataaagcttgtcgtctaatacacccttaaaagctaatgaaccatcacttcttctaatgacagacacatctacatttgtaatagacaattatatcccatattacataattgactgacagatagcacantatatccaagggactcaactaacaacacattagagatagagtgctcatttgagattgcaatcttgcctaagcctttcaccttgccttggtcccatcaccaatatgattgatcttgggaatcctgttttgacgangaggtgacattttctctcccccgcatatggatgtgcatcagtgtcataatcagattgacccccgatgataac

SEQ ID NO: 14737 - DNA, 212 bp, Zea mays
  unsure (1)..(212): unsure at all n locations
gtattttcaattaactggaaagatatgccgctntgcgctcggctcccttggnttcttttccctgccgccttacanaagagcccctggtctactggttctatgggtcactgacatagcagaaagaccctcangtttttgaggtcttcaacccacgctcctctctcctcgccggaacagtaaacgaaccacggcgagaaatcgcggcgtacctg

SEQ ID NO: 14738 - DNA, 217 bp, Zea mays
  unsure (1)..(217): unsure at all n locations
agcttaagaaggagcacctcacttgcttagaaaagtatctgcttattnctcgccgtcaaggacgccatgacgaggtcgagatccgggacgagcgggcagcacgccacgaccttctncagcaactccaaatcgtcgncgaggacgaaggccagggcgagcagtgcgcaccacgacctttgtcatctaccccacctctgccgggaggatactatggcga

SEQ ID NO: 14739 - DNA, 331 bp, Zea mays
  unsure (1)..(331): unsure at all n locations
tatctgaggggctaaagggcatgtacaacccacataaatgctccgtattttaaggggatcaatggggtaagtgcaaaaaatataagagacagtatcttggtgaagtaacgtctctagcataggtctctaagtctagatatggttctacccatataactcacataaatgagtcgtatcttaagaggttctaatgaataagatatcagacttaaatacattgagttgtatgaaggagttgcttagatgtatctagtgcttggacagccaaaacgtagtatctagaatttacatgccctaatantgtatataaaactcaatcatatgttataat

SEQ ID NO: 14740 - DNA, 231 bp, Zea mays
tattgagcttcttatgcgacagccgactcctcatctttgtgtgctccacagcaaatgtgctcccattgcgctcacaaccactataggaacaacactgtgaaccaatctcaagcaacttttgaacgccagagtgtctgaaccaaacatgtgccaccatgatgctcgcaaacgtagcacattcacatgacgtacacaagccttaatgtacttgcgacaaccggtaattactta

SEQ ID NO: 14741 - DNA, 456 bp, Zea mays
  unsure (1)..(456): unsure at all n locations
agctntagcatcttccctacttgctgagctcccatcgtatgtgtgcttcacccttataatattntgatcgagaaggtaggaagaagaatgtcttgaacaacgcatcaaaaattctagatctagcgatgtgtcgatcatctttctgtgggagatcacccatgagaactaatgcgttgggatggaataatgcttaaggcaattatgtcgttgagttgtaataagtactctactcttatttatgtctcgagcattgtctcttgatattntatacttgtgatggcaaatgtgtggaaatagattctgacacacatattctatgcattcggatttgcctctaaaattctgggtgtggaacaggagggcactccaatccatactttaaataaagtggcttttcaagttggcggaaatttttttctttttttgtccctcccccgcggggggctcctctttttc

SEQ ID NO: 14742 - DNA, 311 bp, Zea mays
ctttgaataatgtaagaatcactcaaaattgattgtttatctgtatagttaatcactttgagccactcacatgttgtcatacagaggaacaaacggtgtaaactgttgagagggcactccttggtcttcaaagaaaattctaccacaactatctttcttaaagcacatcgacaaatcttgctctataaaatgttgatacacaactcacataaataaagcactatgaaatggtccttgctcccactactatcatttccaatgaacatagatcttgaccaaccaaatttgaaatgccaatgtaaatgatgtga

SEQ ID NO: 14743 - DNA, 373 bp, Zea mays
cagcatgcaagcttcatgaagaggaacctctggtcatctcatgccgaacagctctatctctaaactgcttcttcctaccagaccttctacgacgaagcatattcccaacagtagcccctttctctgcgctagatcgtttctcgtaaccagcttgaaccgcgaaaaaagtctcttaaacttcgggaagcccaaggttcgaaaaacacctctcctgagctcgttgtcgaaaaacgagttcagttccaagcgcgtagcggtcccaccttgcagagttactgtttggtctctgtggtccaccacgcaacgagagcaaacggcttgccgcctggtgtaaaaatcctggcgcttcgcctttcttaacctgcagcaccta

SEQ ID NO: 14744 - DNA, 343 bp, Zea mays
  unsure (1)..(343): unsure at all n locations
aagtcacctgaagatgcagctatctcgcgtgctgcgatttggcttatggaatatctgttcactgtccgcctgggatggccgcggggcaacatcagttggtctgaggtgcagnttggagatgccccgtgggcggaagaccgagtatctcgagatacctctcaaggacatcattaaagggtggcgtctggagtggcttataattgataattatggaaattctctcccttccccgtcaggaagacagccagacgttcgtactccgagctggactgagtctcccacggatcaagaagtggccgaggcacgcgtgttgcttatcgaagtctgattacttgaagagaga

SEQ ID NO: 14745 - DNA, 322 bp, Zea mays
tggtgatagcctgagtagcaatctaataagctcatgaggtgcgaagggctactgcatctacaggagaatctattcttggcaatgggaattcatccttcggacatgccttgttgagatctgtaaagttaatacacatcctccattttccgttggctttctttaccatgacttgtgtggccagccactctgggtatgttacctccctaataacagccgcacttagaagtcttttcacttcatttcgtgcaccttcggctttgtcatcggacatttttcgaagtctctgcttccttggtctgaagggacgaagtctacatttgag

SEQ ID NO: 14746 - DNA, 338 bp, Zea mays
  unsure (1)..(338): unsure at all n locations
agcttatgaagattcttcatcccaacatgggctattctgcgatgccagagccaacccatgttaggcttagcaattaagcaagtgtcgagttcagctctatcaaaatctaccaagtatagctgaccctctaacactcccttaaatgctattgaatcatcacttcttctaaagacagtgacaccaatatcagtaaaaagacagttatagcccatatgacacaattgagatacagaaagcaaattgtaatctaatgaatctacaagacaaacattggaaatagaatggtcatgagatatagcaattntaccaagaacctttgaccaaaaccttgatttcca

SEQ ID NO: 14747 - DNA, 368 bp, Zea mays
atttgggtaccctttttggtgacctataaataagctaccactggtctaagtggaatctttgaatctattcaaaattggaccacaaagcctttcttatgtcttttgatcttgatatgccttgaattaacctaatatgtttataaatgaaatatatacaattttactagcttcctaaaaaggctatgagcgcctcaattggatgactgagacttcaactatggatttttgaagtgagtagttgaattctgtccaagtctggacaaaattaacgtttgcattgtttggccttctaagtgcaaaacttgtggtgatgataatacccaaaggtatagtggaactttttggtaaaggcttttttccaattaaaa

SEQ ID NO: 14748 - DNA, 460 bp, Zea mays
ctctaaatggagctgcagcatgaagcatgaggcccaatacgtgtcaacacgccactcttctatcttgacaagctcccctcataccaagccataggggctcaacccactagccagcgtccaaaactcttcataacttaacaagcgtttgctaagcattaaaacccagttatagcatataagcagctcagaaactgtatacaagctatttcttctaaagaggcaacggctaacacaactactaaatgctcaatcggctcgaatctcctacccctgtgtcaataatgcctaacatctctcttagagaccaatagcatcaaataacacatatcttcaccttgaatgagagtgaaaaacggaaagaccaaagttttttttcccctctttggaaccaggagggtgaaaccccccgtaatataaaaaaaaaatgggccgttttcttctcaaaaaccccccccccccg

SEQ ID NO: 14749 - DNA, 135 bp, Zea mays
acatttcatggcagaaaatcctcttttctgatatactgagtacacacgcagggacatatgagcacttgcattgcaagagactatatatatatatatatatatatatacacatatatatatatacatatatatata

SEQ ID NO: 14750 - DNA, 430 bp, Zea mays
  unsure (1)..(430): unsure at all n locations
ttaagncacctgcggcatgcaagcttctattctagtgattaccaaaagataccaattgaagcacactaccaaggctaccaattgaagaatcatcactgtcatagctctatgatatttaaagataagcatctaggatcaccaactattatagagcatgagcaatctttaaatacgtaattactcacaactttagataccaattactcgacttgtggagggacccaaggcctaattgctccatttcttgctcatcttcccttttccaccttgagactatgcaggatcactcaagaaacaattagtctcaaagacacagtatgtggctcccctaaagtggcataagtatttgaatgacttgcacttttgcacaatttcctaagactttccctttcaggaaaaacctttaagtaaagnggggggggggggaaaa

SEQ ID NO: 14751 - DNA, 365 bp, Zea mays
  unsure (1)..(365): unsure at all n locations
cagcttgtgaagattcttcattccaacatgtgctagtcggcgatgccagagccagcccatgttagtcttagcaattaaacaagtgtcgaggtcagctctatcaaaatctactaagtatagctgaccctgtaacactcccttaaaagctactgaatcatcacttcttctaaagacagtaacacctatattcgtaaaaagacagttgtaacccatttgacataattgagaaactgaaagcaagttgtaatctaaagaatctacaagaaaaacattntgaatggaatggtcaggagatatagcaattntacccaatcctttgaccaaaccttgatttccatccccgaatgtgataacttcgttgggga

SEQ ID NO: 14752 - DNA, 342 bp, Zea mays
cttcatccccacatgtgctaagcggcgatgccacattcagcccatgctagtcttagctattaagcatgcatctagaccggcctcttcttttgcaaaatcaactaaataaagtttgccgtctaatacacccttacaagctagtgaaccatcacttcttctaaagacagacacatctacatttgtaaatagacaattataccccatatgacataattgactaacagatagcaaattatatccaagactctctactagaaatacattagagatagaatgctcattagaaatcgcaattttacctaaccctcttaccttgccttgattcccattcaccgaatataa

SEQ ID NO: 14753 - DNA, 350 bp, Zea mays
  unsure (1)..(350): unsure at all n locations
gcttccacgtgttcgacgcgagctggcatccgggggcgcgctcatagcacgcccgtgcgcgaaccctcgcgcacccgcggtcgcccgtgaccacgcccgcgccacggctataaagcccgccccagtgcttggctgccttccccgttacctcctccgtacctcggcggactcgcccgagccagccattaactccggcgacctccccgcgacccgccagtgccgcccgagagcaaccaccgtggccagcccctctcccgtcctcctncgttcgatccaagcccttagagagcttcctggtgaagccgtgagtcttgctcaagcttgacccagggacccgcgtcacccggaat

SEQ ID NO: 14754 - DNA, 361 bp, Zea mays
  unsure (1)..(361): unsure at all n locations
agcttgtggcgccctctggcgtcttgtcgcaaccaaagtacttagtcttccacttggaagccttgnggccaaacccttcgggcgtggtagcgtcgcagagactgctgataccgcgtcgagtgtagtaaggccacatcccgagcctcttccagctggtccaatgaatcctcttggctggtctggttgctttggtcgtcgtaagcctttgtcctcggcgaccgtattccaagtccgtgggtaagatggcctcggcctcatagactaggaaaaacgacgagaagcccgtggcccggctcggcgtcgtcctcagactccaaaccaccgagggtagttcttttatccattcgcttgccaaaacgga

SEQ ID NO: 14755 - DNA, 348 bp, Zea mays
agcttggatgtggcggactttgaccctgaatctcttgctcatctttcttgtattcattggcttgatctcccccttgatcatgtcctcctcttgaggagactcaacctcttgaacttcatcatcttgagcctgaacctcatcttgagtttggtggagatccttgcatggaagatgatggttgatcttggcttgagtaggctctttggattccttaagacacacatccccaatggacatgttccttaatgcgacgcacataacctcctcatcatctaattcatcaagatcaacttgctcaactgtgagccattagtctcatcaaacacattggtcacaagaaaacctcaa

SEQ ID NO: 14756 - DNA, 335 bp, Zea mays
  unsure (1)..(335): unsure at all n locations
gttggatgatttaagtcagaaatgggcaaacttatatgctcttattntcaactcaggtcattggtggactgacaacaaattatttgacatgtgactatgtgagtgcacaatttgttcttttctaattcttattgaaagggaaatgtgcccttgggccatttctataatgttttggtgatttagtgtccaacacaaagtgagtgaaatattatgtgccaaacaagcaaaagatgcaaataatgtaacaaggtacgtttctagacttagtacattggtttgagtactaacatatgttgtctaagtgctggaaatagataaaagaaaagaaccaaaag

SEQ ID NO: 14757 - DNA, 308 bp, Zea mays
agacttgtgattggcttcaccagtttagaaaaatctggaatgaatcggtggtaataaccagccagtccaaggaaacttctaacttgatgtacagtggttgggggtttccactccaaaatatccttgactttgctaggatccaccgcaatcctcttggcagataacacatgttccagaaattagatcttctccagccagaatgcgcacttactaaacttggcatataactgatgttctcttaagcgcgtcaacacgattcgtaaacatgtcccagaaattggatctccttcccagccagaatgccgcac

SEQ ID NO: 14758 - DNA, 446 bp, Zea mays
cttatattattgtattgtggtactatgcgctaatcttgttttcatgaatctggtagaaataatgcattctcattgtattactaattattgggctatgagaaaagtgatggtaatacatcaactttttctattccacaaaccacatataaagcgaggaactaaaagatgatgatctatcttattcctcaaacaaaacacaaaacacggagcaaacacgctattaaagagcacccgcgcttcaaggaattaaaacatgatgaactacgactggaggttctaacagtaaacacgaggagctcacagttaacatattagatagaggttatgaaaaattacaaaggatacagtgggccattgtcagaaagcccatttgggaaattggaaaatatttaccttgggaaaaaaatttaaacccccccaccgggggaaacaaaaaaaaccccccc

SEQ ID NO: 14759 - DNA, 331 bp, Zea mays
  unsure (1)..(331): unsure at all n locations
agcttggtgccgatggagaaacacaaatccttgatatcttggctatcaaactgcttgccgctgtcaactgttagctcggacggtactccgaagcggcaaacaatgttttgccagaagaatttctgggcagtctttgatgttattgtagaaacagccctcgcttcgatccatttggtgaagtattcgacggctaccaaggcgaacttgaggttcccctgagcggtgggcaggggcccgaccatgtccaggccccagcgctggagaagccatgtatgggcaatcagctttgtatactgcgaggngctgcctgaccgaggagaaaacttttggc

SEQ ID NO: 14760 - DNA, 435 bp, Zea mays
  unsure (1)..(435): unsure at all n locations
agcttactcctccctgggaagggccgttcatcttctccatgtatttgaagcccgggacatacaagctggccaacgatcaaggtgaggtctacaacaatgcttggaacatcgaacagctacgtcgcttctacccttaaaatgtttcaagtcgttcatgtatctcactttctttacgtgcataaataaagtctaaccatcaaggaaggatcagccttgcctcggcaaagcccgaccctccctcggnggctagaaggagacaaccccctctgcgtcaaaattttcctcgggaaagttttctaccanaacgactttcatgcttttcgactatantcgataacgggaactcctataaaatggaatgtaggaagnaaanaccacccgttaaataaccgggggctttatagggcggccccccgggggaaaaacccccccccc

SEQ ID NO: 14761 - DNA, 430 bp, Zea mays
  unsure (1)..(430): unsure at all n locations
acctgcagcatgcaagcttgaagtantgatgagtttctcctgtcaaccacttgggaataagatcctggagcatcaatatctttggcttgtacccttgcttgttcatgagagacaaatgtatcttcatttgcatgcctctcatctttttcatcatcttgtggtacatttgatgaagaaggtctgtcaatgatctgcacctcttcttcatcttcttttgggttgatagctccaattggcatgttcttcattgcttccctaagtggctcatcacctacatcatctagatgttcaagtgctccttgggagccattagtctcatcaaattccacatcatatgtttcttctaccacgccagtgggcatggtttganatacttcgaatattgcttttttgggaacttttttaaattggaaaatttaaaaaccccccc

SEQ ID NO: 14762 - DNA, 342 bp, Zea mays
  unsure (1)..(342): unsure at all n locations
agcttgttccctctcctgaagcgggctcggngccacagtcggtaccctaaattatgggtaccccttactacaatatgaagacacggtgcacgtgcagctatctctatccgcgcggtgaacagcacccgaccccaacacgtgggcagtcccaagggcgccatgtggacagaataggtggtatactctatgataccatcagtaggtccgtacctcctcaagaaagcgccggattcctacacacatagcccggaccttcgagtacggtccaagactcgcaagttagcaagccggaccccttggatgaagtctggacccctctgagtgaggtctatgccacccaca

SEQ ID NO: 14763 - DNA, 442 bp, Zea mays
  unsure (1)..(442): unsure at all n locations
gcttgtgaaggttcttcatcctcacatgtgctaaacggcgatgcctcagtcagcccatgctagtcttagctattaagcatgcatctagaccggcctcttcttttgcaaaatcaactaagtaaagcttggcgtctaatacaccctctaaagctagggaaccatcacttcttctaaagacagacacatctacatgttgaaatagacagttataccccatgttgcataatcgactaacaaatagcaaactatattctaaagactctacttaaaacacattagagatagagtgctcattagaaatcgcaattttacctaacccttttaccttgccttgattncccatcaccgaatatgaattgagtctttggnggaaaattcccttttaatatcctcttgaaaccggttaaacagggaaaaaggggggttgtgggataaaaaaaaa

SEQ ID NO: 14764 - DNA, 329 bp, Zea mays
  unsure (1)..(329): unsure at all n locations
agcttcacatctttggactagctcggntgcgtcactctttgtcgttggccagtagaaaccagacctgaagaccttcccaactagagtcctagatgttgcgtgtatcccgcattgcctagcgtggacctcttctagcagttgcttcccagtagccgaaagaatgcatttcatgaggactcctgttgcgccccttctgtatagtgtttccccaatgagagtatagtgagctgactgccttgcaatgcgctctactgcatttagtcatccggctcctcctcattctttatatatctgatgattggntccctccagtcatcggaatctgactc

SEQ ID NO: 14765 - DNA, 443 bp, Zea mays
catagatcggaccttgactactaattgaggtgatatcaggacctgtcacatcaatgcgctcgtcacttataaatgtaatacctgatgactcaacagcgaatggaaatgctactgtcggagacatatgtgtattttccaccttaatgaacctgtggcctatggagaatgcgacttataattctttcctcttaaataatacaacggataaatgtgaaattgttatattggttgtaaaatagcaagtgactaaacatgatattaagaacggagtattttaataagccaaaatgcacatcttcagcaactcatataaaaatatttactcggcagagcaaagcgcttaactgagagaggggccttaaggttttttggggggaaaaacaaccgcccccacacattttttttttttatttattttttcccccccccccccccagatttat

SEQ ID NO: 14766 - DNA, 351 bp, Zea mays
  unsure (1)..(351): unsure at all n locations
gattcttcattccaacatgggctagtcgactatgccagagccaacccatattagtcttagcaattaagcaagtatcgagttcagctctattaaaatcaactaagtatagctgaccctcgagtactcccttaaatgctattgaatcatcacttcttctaaagacagtaacacttatatccgtaaaaagacagttgtaaccattttgcataattgagaaactgaaagcaagttataatctaaagaatctacaagagaaacattggaaatggaatggaacgtgatatagcaattttaccaagtcctttgacaaaaccttgatttccatccnccgaatggtgataaggctcttta

SEQ ID NO: 14767 - DNA, 224 bp, Zea mays
  unsure (1)..(224): unsure at all n locations
cgcatgccagctttacacctgaccccacatatagttncttgtcttatatcacattcttggatatctggtggagaccatttcttgctcaacaatacatacgtgttatcccttcgtattattgaaaatgggcgctcaatggtattctctaacaaaatggtgggtgtgtggccattgatcatctaacagaggcttatacacctttccccacatatatttcctggcaa

SEQ ID NO: 14768 - DNA, 324 bp, Zea mays
  unsure (1)..(324): unsure at all n locations
gagatgagcttttttgtgtgcggtcacggtctgatctatgctttttcagcaaaaggaggaatgggacattccaagttagtctttgagcacacaagggtgtgatatttntactggtgtgggtatttcgttttgagaacaacactgtcaaaaggggcgtctctttccccatgttagcgtgactgaacaagcataatttaagtttcatgcttccaatgcggttctgggaaacggagttggcaaaagaagagtgaaataactggggggctgtaatattgggccttttaaatttcttaagggggggcttttttttttcgaaaaattttt

SEQ ID NO: 14769 - DNA, 346 bp, Zea mays
  unsure (1)..(346): unsure at all n locations
agcttgtcatgggtgatatggtcttgaacataattagcgtgtatgcctcccaagtggccacgatgagagtgcttaaagacttttctagaaagacttatatggcctggttagaactatacatattatggagaagttttttagaggaaatcacaatgggtatgtaggtacaacaaatgcaggttttgagacggttcatggaggttntgggtatggtagtatggatcaagatgcacgaanaatctcagactctgtggtagcttttgacctggtgatagccaacactttctttagaaagagaatctcatttagtgacctatagcagtgggcaaccactctaagttaaatt

SEQ ID NO: 14770 - DNA, 434 bp, Zea mays
  unsure (1)..(434): unsure at all n locations
agcttctaaagggagagcacattntcctactaaccactgtttattttgagaaagacagggtttgtagcgcatgccaagcaggaaagcaaagtggtgctcatcatccacacaagaacatcatgacgaccgacaggccactggagcttctacacatggatctattcggcccgatagcttacataccgattggcgagagtaagtactatctagtaattgtggatgattattctcgcttcacttgggtgttctntttgcaggaaaaatctcatacccaagagaccttaaagggattcttgagatgggctcaaaacgagttcgggttaaggatcaagaaaattagaagcgacaacggggaccgggaggttttcataggaaaactttcacacaaaaaaaattttgggggaaaaaagggccggggggaaaaaatatgtttt

SEQ ID NO: 14771 - DNA, 400 bp, Zea mays
tcctaactaccggtgcatagggttcaccgaaatccaaaccttcgacttgtgaatatcccttggccacaagtcgggctttgttccttgtcaacacaccatgctcatcttgcttggtgcggaagacccacttgggtcctacaacatttttgttaggaccgggaactaatgttgagctcctcttgcatcgccactacccaatctgaatccttgagtgcttcctctaccctgcgtggctcaataaaagaaacaaaagagtaatgtccaccataatgagcaacacaagatcgagtagcttaccctcctttgagatattgtccccgaagggaattggggtggttatcaaccgggggggggtttggaaaatatcctttcccgcgcttttttttgtgaggggggggga

SEQ ID NO: 14772 - DNA, 396 bp, Zea mays
  unsure (1)..(396): unsure at all n locations
agctttatcaaatggacgtgaaaagtgccttcctcaatggacttatctatgaagaggtctatgntgaacaacctcccggctttgaagatagtgagtaccctaaccatgtctataaactctcaaaggcgctttatgggctcaagcaagccccaagagcatggtatgaatgcctaagagaattccttatcactaatggcttcaaagtcggcaaagccgatcctacgctctttactaaaaccattgcgaatgatttgttcggatgccaaatttatgttgatgatatcatatttgggtctactaacaaatctacttgtgaagagtttagtaggataatgattcaaaaattccgagatgtcagtttatctaaaaaaccacatttgcaaaaatggaattttt

SEQ ID NO: 14773 - DNA, 250 bp, Zea mays
gcaagcttgaatggtcaatatcaagaacttcaagtgcaacttgattattgtctgaacatcaatgcctcatctttagtgcttgaatctaagtctagcttaaatgataattcttgcaaacattgtgccaaatatcatgcttcttgttgtctaactaaccatgcaaggaagaatagcccacaggtgaaggtcaaagaaagtttgaaaagctgctctagcaatgatcctgttaaagaaagttgaaccccaatac

SEQ ID NO: 14774 - DNA, 447 bp, Zea mays
  unsure (1)..(447): unsure at all n locations
agcttcaacattattntcagtcttaccatataatagtaccttctgttcaacctctaaaggacatcataagaaacagagaagctacaggaaagggtggcaagtgggctgcagagttgaacgacttcaccaatgactttgtttatagatcttcgattcaatatcaagcactagcagacttcattgtcgattggacgccagggctcatgaagaagtacacctggtagatgttgaagcttggacattattctgtgatggctcgtggggaaccttcaacgcacgctgcagaactattctaattcaccatannaaaatcaaaacctgctatgtagctaggctagaattccaattgcacaaaccaactattggcaggatattaacaaanaaggcaagttcccctttttttttggggggggggccctttttttttttgggggaaaaaaaaaaaaa

SEQ ID NO: 14775 - DNA, 412 bp, Zea mays
agcttgatgcaaaacttgaggccgaagtccaaaaaagttcttagctgaaagaatctttgactagccttccgaataaatgtctggagtccacaatcgatgcgttcaacggctgaagcaagtgttctattttgttggagccacgatcgagaagattacttcttctgctgaaaacctgtctggtgccttcgagcataatgaaggtgagaattatgatcctgacgaagttatacctgggcatggggacttttgtgcctggtagcttcttcgggcacaactggtggccttctgaatcttgcgtgaacacggagaattataattaacccacttaagttgtcacccacaggacttagataaacaattttcccaaaacctctttgcccccaacaaaggttatttttttgggcggggaaaa

SEQ ID NO: 14776 - DNA, 444 bp, Zea mays
agcttgcaacctaagtgctgatgagataggatccgggtttgtactgtttctacaatattttccgctttatagattatagctgcaacagtctaaacaaccgactttaatatgaagcgaacagctaggattctagctccctcaaacttttaaaatactcttgctttcaaacaaacccttagtgtgatagatgcaggatccttgtgaatcttgaacttctttacgctcttatgaaatcaagcagtcttcctggtttttttccgatatagcttaaagaaaaacaaaagaaggatatctaacttttgaccagcaatctgctgcaatccaaacgcgagcgtcaagtattccaaaagaacttgtgaatgtgtacttctcccccggttttccccaaaaaatttaatggaaagggaaaagaggaaaaccccttttttttttttttttttttta

SEQ ID NO: 14777 - DNA, 434 bp, Zea mays
  unsure (1)..(434): unsure at all n locations
tttgcttacaatactctaatacatatttgatgttgaagccgacgcccaagctgaggagtaagaagacgaagccgaagcttaacggatgacgatgcctaagccgaagctccgtggatattgatgaagcttggatagatgtctgtataaaaagctctaaaaactcttgtaataacttgtgtaaagaataactgaattaaattntgctttgtggactttgtccataccttggaatacattcttacctttccatcacatgataaagtgctttggtgtgacacgaaatagcaattttgagccgaaggcgaaaaacaccttcccttcttttcgtacacaagcgagagcataaaaacctgcgcttcttttttttccttttttnttggtgccgcaaaaaaaacccccctttttggggggggccccccttttttttttttttt

SEQ ID NO: 14778 - DNA, 357 bp, Zea mays
agctttgtgggctcacagaatatctaaacgccgtgctactatagtttcttcatttgagcttgtctatgggcaggaagcagttttacctgtggagattagtttatatgctgtcacgatcgccaaacaaaatgacttaactgtcgctgattattataatttgatgatggacaatattgatgaggtgaccgataaaagagtgtgagccccaggagaaatagaaaaggacaagatcatgatatccaaggcctacaacaagaaggtcatagctaaatccgttgaggtatgggacctcgtgtggacgaccatcttgcctctataaaacaaagaccaaagtttgggaagtggtcaccaagctgg

SEQ ID NO: 14779 - DNA, 226 bp, Zea mays
gagcttaatctcagaagactccttaccatagtgatgagcttcttcctcttcttctcatcagccttcacataaaaccattcattattgttgggggccttcgtctttcgaagagtctcaaaaacatgatttaacaatgttttccaagtgtaacacatgaacaggtaccttcagactcgggtcaaaaccatataccatgtgaaaagtgtggccgagaccatgactgatg

SEQ ID NO: 14780 - DNA, 417 bp, Zea mays
  unsure (1)..(417): unsure at all n locations
accgcactcgcattcatatcacattcaatggcttaacaatagtggtaagggcaatgtaaccaagctggtacgaattaattttgctattggttcatatcgcgatagtgntgactgtgatgttgtgcctatggatgcttgtaatattctgctaggtagaccatggcaatttgattcagattgtatgcatcatggtagaacaaatcaatattctctcatacaccatgataagaaaattattttgctttccatgtcccctgaggctattgtgcgtgatgatgttgctaaagctaccaaagcttaaactgagaacaacacagaatattaaaagctgttgggtaaataaaccaaacaggatgtgggggattataaaaaaaatttttggggaaaaanaaaggagggggggggaaaaacaccccc

SEQ ID NO: 14781 - DNA, 207 bp, Zea mays
  unsure (1)..(207): unsure at all n locations
atattctaaacgaaacaatatatntctcacataattatacccaaattctattaatgagaatggaaaagataaattatataggtgagaaaagtagttatacctgaattttatagatattagagaataaattttatacccccaaattcagggtgttacactcgtgcaccatagcccccagtcaccggaatttccaaaaactagtcacca

SEQ ID NO: 14782 - DNA, 317 bp, Zea mays
  unsure (1)..(317): unsure at all n locations
ttgcgccaagccatgattttatattcttcatacccttttgcccttttttgcacagagatggattctctagaattctgttaatagggctcaatcagggttgttattggggctgcacattantgcctttatgaaaaacccatttgttttgaacatgatacttataagcatttccttagtggatcctttattcttaagtcaattttgatgcctatgctcacattgcgttacataagatgatggttcttgggttagcacttgagagaaaccctacgtgacactggngtgttagacaaagcccattagtacaatacaataac

SEQ ID NO: 14783 - DNA, 420 bp, Zea mays
atgcagcttcccactaacccatacttctaccctatggccgcgagctctcttcttctaccatggcgagcgacctctgggcaagccactgctcccctgctacatgccgacaccccctgtcccttccctctctaccgccgccctccccaaaacagcacgatccagcaccccctacatctgccatggaaaacagcaagcccccaccgcgtcctggtgttctcgctgctcacattggcctcgcgagctcactgtcgagacaccctaaccgctgctccaccgcgcgtactacctgctcgaagatatgcgcaaccggctgcgtgtggtcatgcttgtggtctgcgcaatgcttgcagcgacacacattagattctggtgcgaagacggccgcttacaaaaaattcgggttcgcgattctgaaaaaaa

SEQ ID NO: 14784 - DNA, 353 bp, Zea mays
  unsure (1)..(353): unsure at all n locations
agcttgacaatgatgagatcgcgctcgtcattaagagcttctgctcaatcctcaaactaaggagggggaaagactacaagtcccgctccaagaaggtttgctacaaatgtggtcagccccgtcattntattgctaaatgtccaatatctagtgacagtgaccgaggcgacgacacgaaggggagaagaaaggagaagaagacgtattacaagaagaagggcggcgatgcccatgtttgtcgcaaatgggactccgacgagagctcaagcgactcctccgacgactaggatgccgccaacatctgcgtaccaagggacttctcttccccaacgtctgccacaacgtgcctcatg

SEQ ID NO: 14785 - DNA, 266 bp, Zea mays
  unsure (1)..(266): unsure at all n locations
tgatgctagaagatcttcaaaaacttgggttnggacagaattggagagatattatcagtggtctattggcaactttctccacacaggtgctgttgaatggaatccccgggaaaatcattcgtcttataagagggctaaggtagggcgatccactatctcccatgctctttatcttggctatggatgtgcttgggaagttggtttccaaaactgaacaggaaggacttctccaacctttatccttaagaccttacaacatagaatat

SEQ ID NO: 14786 - DNA, 436 bp, Zea mays
  unsure (1)..(436): unsure at all n locations
gcttctaaagggagaacacgtgatatgattgactaatgttctattcttttatgatagaccttgtgcagcttgtcgagcaggtaaacatgtgggaggagcgcatcacagcaagaatgtgatgaccacttccagacccctggagctgctgcatatggacctctatcgacccgtctcctatctgagcatagggggaagtaagtatggtctagttattgttgatgacttnttccgcttcacttgggtgttctttatgcaggatataccctgacaccccaagggaccctcaagcgcttcctaacgagagctcacaatgagtttgagctcaaggtgaagaagataatggagcgacaacggtgtctcgagtgtcaaagtaaacccctttcaaaatttggggagcggaaagatttttccccctctttgtgtaaaaggggggggg

SEQ ID NO: 14787 - DNA, 249 bp, Zea mays
  unsure (1)..(249): unsure at all n locations
agcacgctgatccgctagccaagccaacggcacaggggctgactttaccttctaaagtattctttgagacaataataacaccttccggtgaacttcttgaaagagcagngcccaatatatgctctgttcatagtgaagataggagaactgtgattatatcctctttatagggcaattacctctcagatgacgaatcttataatataataatagaggccagagcccgtccatatgtaataatagaagggg

SEQ ID NO: 14788 - DNA, 326 bp, Zea mays
  unsure (1)..(326): unsure at all n locations
acctgacgcatgcagcttgatgaccatnntttttttgaattgcggcagcattatctttatttgctatgcaaaaatataaagcaaggtttcaattctctggtggttttaggggcctggattatttggaagataaggaatgacaatagtgttctgtgttcaaaccggcttcgcccagaatggacctggctctctgcctggcgcaagatgaatcggccttctggatgctggcaggagcaaaagggttagggtacttataggcgattatgcctgagggttaactatgggcccctgtttttgtggtcaggtctttagtctgttttcaaggg

SEQ ID NO: 14789 - DNA, 317 bp, Zea mays
  unsure (1)..(317): unsure at all n locations
agcttcggccttttgaggccgaaaggtgaaatgaatgaatctgtcgaataatgccacaaggccttcggcgcagtctgctctctcattggaacgagagacttattacaagagcatattgccctcacggtatggccgctcgcagagaaatgggaaatgccacaagaaaccgtaaaagaagccgacgaaggtggacttatcangttgaagaacacttttaaatttggagatagattctgtgagccagatgatgactggctaataagcattgaaaattaagtgatgaactcgttggggcttattcgaaggccgaagacact

SEQ ID NO: 14790 - DNA, 262 bp, Zea mays
ccccgaaacaagaaccgggcagtaggtgtgcgatcacttgaactactttgagagactcacttttgcacaagaacccaaaggcgggcgaagcgttgagaaattcaaatttgttagctatatctcacaagaactcggttaagagattttgggttttacgagtttttttaaattaaaagaaagggagatgccctaactatagggggagaaaaaatgaggagaacttgtgcgcggtccctattattttaaagtataaaatatatta

SEQ ID NO: 14791 - DNA, 407 bp, Zea mays
ctttattccaacatgtgctttactgtggtgccaaagccagcccatattagtcttagcgattaagcatgcatctatatcggcattctcttttgaggaatcaactaaatagagcttgtcgtctaatacacccttaaaatctaatgaaccatcacttcttctaaagacagatacatcaatattcgtaaataaacaattatagcccatatgacataattgacttacagacaataaattatacctgagcgattctactagaaacacatttgaaattgaatgctcggtcgtgatggcttatttgcctaatcctttaaccttggccttggttcccaacccttcaaaaaaatgtataaggttaattcttttggggggaaaaataccccccttgggggttatcccctttttttggg

SEQ ID NO: 14792 - DNA, 388 bp, Zea mays
  unsure (1)..(388): unsure at all n locations
accagnantgagctgcactgaggnaaatgaaaacctttccaacttatctgaaagccgaagaagatttacatctcatccattggattgacccagacaaagtctaactaagaacgctacagactcaccccaccataccgatgtgtaccacgtggaaattatttcaaaaagccagctgtgaaaggaatacaacttttatgccatcttaaggcttgtttaggcctacatgatttatcaccgcgcccttggttcttggcatccgcataaagccttttgtgtgatccaatattagatagtagtgataacaagttcttttcctttttaagggaaaaaagggcttgtgcgttttttataaaaaaaatataattttgtcccccccaaatctcccccc

SEQ ID NO: 14793 - DNA, 301 bp, Zea mays
  unsure (1)..(301): unsure at all n locations
gaagacacgcgagtatacctaaccactgtctatagagctctctaaggcgctttatgggctcaagcaagccccaagagcatggtatgaatgccttataaaattccttattgcaaatggcttcaaagtcggcaaggccgatcctactttatttactaaaactcttgacnatgattatgttgtatgccaaatttatgttgatgatattattattgcgtctactaacgaatctacatgtgaagaatttagtaggatcatgacacaaaaatatcagaatgtctattgatgtgggggagatttggaa

SEQ ID NO: 14794 - DNA, 331 bp, Zea mays
ggtcttgtcatgccgaagctcaccttttatagactcatcaccatactcatgaggtgttcccttttctttcatcagccttcacatagaaccactcgttggtccagccagtaggccacttggtacgatacccaaccactggagccttcttgtcttttctataggcaaagttgtagcatctgaagctgttatgaaggctgcctgctcttgctttggtctgatagtggaggtcgtacactctgcagaacccttctgcattagcactcattccctgacttcatagagcccaaatgtatacattgagtctaactatggcatttggagtgagtttgat

SEQ ID NO: 14795 - DNA, 379 bp, Zea mays
cattaatcacttaagaacgtttttatagcaactactggtctctcctcagaactttctctgcaacttcgttaagcagattgttgatgacattccccaccatagattcagctatggtgataatttctattgcgtttctttggcttccgggcggccaaggggtccaacggctccggtggaggagatagctcaactgccatagaaaatatcaattaattccgagccacgaagactaatgacgaaacttaaagcatttaaacgatacctattcgtctctcaggtctacagtgttctcagcctcttgtgctgcttctcgagcgtcatgaaataattttctcgcttttttcttttcattttaatttttcattggaagcccttaatt

SEQ ID NO: 14796 - DNA, 112 bp, Zea mays
  unsure (1)..(112): unsure at all n locations
ttacgcgatacaattacttcaccatgacgaacacaatntttccatatatatatatatatatatatatatatatggatatggagagatatacatatctatatatatatacata

SEQ ID NO: 14797 - DNA, 255 bp, Zea mays
gaagaatgtattttctctactaaagagctaatacaaccaatgattcaatttcttgtctcaaaactgaaaatgctattttaattgctaagattgaggaattgaatgcttgccatgttcctacatctaccgttgagcatgttactatttgcactaaatgtagagatgttgatgttgatgctgtgaatgatcatcttgctttgattaaagaacaaaatgatcacatagctaatgtgaatgccaaaattgctgagcatg

SEQ ID NO: 14798 - DNA, 329 bp, Zea mays
  unsure (1)..(329): unsure at all n locations
agcnttccctgcgaccctatctgtctccncgcgagatctttcaactccccgtgaatatccacagcgcgcctgacacgaattccggcgaccggcgcaaatccggacgcgtggatcaccggcggcgagggggactgaaccctgngatatttcagtggcactgtaccacggaaaatctgattcaaagcgcctgatcgaggaacttgtgacgccaagatcttggatttttgcgtgagaatgtattaatctctctgtaacaaagntctagccctataatccaggtacaatcttgctatggtaaccatgctcaaacacccactggattatctttg

SEQ ID NO: 14799 - DNA, 344 bp, Zea mays
taacctatatgagataaccggctacaaagcgagtgaaaaagcctactcggatcaacttgaaagtttagttaagctttagccttaaatcctacttttatgcactgtgaatttgaatatcatggggactgacttagggggtttcaaactcaacactctgaaaccctattgaagcccaaggcaattcactttgccatttctctaagatattaaccatggaaatatttgaaattagaaaaattttaaggtggcaattactggtccaaaccaaagggggtaattttttggggggtggaaattttaatttaaaaaaaggccttttttttgggggggcgccccccctgttg

SEQ ID NO: 14800 - DNA, 359 bp, Zea mays
tgaacgtactaagcacatgtcgagaaatatggttaccggttaaactagtacccgagtgaagccgggcgcggactttatacctcatgcgacctgatactgggtctcccatgctatctatggtggatacaagcgcggtcactgcacggcggcagccggggtcagtggagcattgtatgccaaggcggtgaggcctggacgcgaacggagaatctatggggactgttgacatgtgtggagacggagcgccctgacatgtcgtgtgttaggtttaccttgcaaggttagaactcgattcgaatcgtctgcttctcgcagctaatgagactggcttggattccttgtacctgcattttgaagtt

SEQ ID NO: 14801 - DNA, 420 bp, Zea mays
  unsure (1)..(420): unsure at all n locations
aatatgatactgttgcatgtcaccatgggaggagtaatacatacactcttaggcgtaaagataaaaacattactttgctaccttngactcttactgaaaatgtacaagctgataaagatagagctgccagtacccataaagaaccaactaatgagacagagattcagcaacaaattaaattgagagggcctgtcatgcttgctactaaaactgatcttttaaaactatgctactaatgctggtgtatgccttgggttgaaagatgctttctttctattgatgatattgctagcacttttcaatgcattttgtgactaaacccttttggcgaaggcaagtttttccggaaaaaatggggtgttttttttttatcccccccttctttttctttttttgggggagaaaaccccccactcagat

SEQ ID NO: 14802 - DNA, 397 bp, Zea mays
  unsure (1)..(397): unsure at all n locations
tcaactcttataggagaacacgtgatatgtctaaccaatgtttctttctacaaagagagaccttgtgcaccttgtctagcagggaaacacgtgggaggagcgcctcacaacaagaatgtgatgaccactttaagacccctggagctgctgcatatggatctcttccgacccgtcgcctatctatacataaggggaagaaagtatgggctaattattgttgaagaccttttccgcttcacttgggtgttctttttgcaagattagtctgaaacccaaaggacccttaagcgctttcttaagaaggctcanaatgagtttgagcttcaagtgaaataagataattgaggcgatcaacgtgggtttctcgtaggtttctcaaagaaaaaccacctttttc

SEQ ID NO: 14803 - DNA, 355 bp, Zea mays
tgcaagctttcaccctttttgtgtgccatccgcccgtgactgatatcaatatgggtcttatagtgcgaccctctgctgaagaggtccgttctttatttgcctcgctcggggagatacctgatgatgaacggcagatttattttgaagtgcccctgaaccctagtgatgcagacataaatgacatgcttgatctgctagctgaggattcatctgatgctgctcctgatggacattggcagtggtgccccttccagaagttgatgcgaccttggatgtcccgaaacctgtcagtactctgccgaggcgccctatgcgaaccagtcagtccgagttcttttgtgtgatgagcttgaag

SEQ ID NO: 14804 - DNA, 396 bp, Zea mays
  unsure (1)..(396): unsure at all n locations
tattctatgttctatgtcacctattgcanagcggcggaggaggcatacttagagtataggaccatgctaagccgttacatgacttatgaccaccctatgaaatatgtaccttttatccggacctatgtcccacgatccgaatttcttttactagtaaaggggccccaaactaagcaacaagctagctatcttaattcagatctcatacatagcaacaagagtagggaaccgtattgggggttagaataaataatgctggtaagtcaatataggaaagaagcttattgaaaatacacaacaaggagtagatactttcctttataacttngaaaacaacaacgtaatccttgtttggcggaatggaaaaacaacccccaaaggtgtccacatcccctc

SEQ ID NO: 14805 - DNA, 357 bp, Zea mays
cttcatcccaacatgagctagtcggcggtgtctttatccacccatgttattcttaggcgggatactagtgtcgagttcagctctatcacaatctaccaaggatagctgaccctctaacactcccttaaatgctattgaatatcacttcttctaaagaacaggacacctacatcagtgaatagacaggtggaggccatttgacataattgagatacggaaagcacattgtaatctaataatctacaagaaacacattggagatggaatggtcaggagatataacaaattttcccaaccttctacacaaccttgaattccatcccccgaaatgtgatcagctctggtggggaatatttt

SEQ ID NO: 14806 - DNA, 352 bp, Zea mays
aagacaccgcagctgcagctactgcataaaagtcactgtttcacaaaacactctagttctcaccctacccgggcaccataacgttaagagtttttgcttgtaaaatagctttgaaaagaggtgagcttggaacacaacctttttgaccacttatgacccgtcctaaccagtaataatagatgagaactctgataatgtgccatgggaatctctggcttgttataagatacaacatttgtctactttgaacaaacttatataaaccctggaattgtaccatatcaccttatatgaagttttaaaaattcaatgggggtttttaaaaggtttccaaacacccctttttttaaac

SEQ ID NO: 14807 - DNA, 369 bp, Zea mays
gcgcatgaatatacccttgatatcttctcgtattggcagaacattcttcacatagaaccatgctgtcatccagtctccacgccatctctttcgaaaggttggcacggggcaacttgacccggaccgagaaacaaaactgtagcagccaaaattgttgtgatactgttccttaccccaaggttttgtttatatgatattatgtatattgagagcttttgtgtagttaaacctggttctacggcccacaaatattacctataatgcctcggggtaagttgatgggatagacttcaatattttcagtaccttcacaacgaagcttgctttaaaagggaaaattccgcaaggtttccccaagtcctttttttt

SEQ ID NO: 14808 - DNA, 294 bp, Zea mays
atttacaacacttcggagaataccccgtatgtactatttggcgctactaattttaaactgatctctagcaaaattgttaatctgttaacatgtagtcatataattgctccagcaaacatgtttatatgccaggttaaaataatatatttgtaataagtaacactaacactactaactattaagtgtaccatgctatttaatatttttaattgataatataactcaggatattttttaaacctttaaataacaaattggcccttttataaacttttttttttaaaaaaaaaaaaa

SEQ ID NO: 14809 - DNA, 280 bp, Zea mays
tgcaagcttctggacctcggcaaggcagcccatctttttctgtatacagtacccctcgctgaggcgactcaaacacgtcgtagggaactagcccacaatgcccgctaacccgtgagcctgcccacgagttgtgcgcacatggcgccaagctacacgcgaattgggggagcccccgagggacgtcttaggtcaatgcctgcaaaggccagatacctcgacatggcaccggcggctcttctgtaacccctggcaaggcttgcaactgttaagctgctcgact

SEQ ID NO: 14810 - DNA, 306 bp, Zea mays
ggctgaactgcacctaaaagaaagaacaaccattgtatcattctcctggccagcacctcaatattagtccacagaggaatacttttatgaaaaattgcattgtataaaagcacaaagttatattattcctaccatttaagtctgcttggtaggacttctgcagtactcaaaacaccgcttgatgtgagttattgataagtaatactaaaacttacgaaatatgaagtcccttaggggatgaaaagggaaaacctggaaaattttaacaaaaactttttaaaaaaaacataaaccccaaaccccccc

SEQ ID NO: 14811 - DNA, 233 bp, Zea mays
  unsure (1)..(233): unsure at all n locations
agcttgtgagcactacaagtacatataggagaatgttgctttttctgatcatccgaagcccatgctgttatgngaagatatagcagaccacaacgtgctgctgggatctcaatcgtctgaggagcaggagaataccctaatatagtttctgttcaacaacaaagatgtctatgcatgggcagctcatgatctctgtggtgtcaacagggatgttattgaacactcgctcaatg

SEQ ID NO: 14812 - DNA, 365 bp, Zea mays
  unsure (1)..(365): unsure at all n locations
gtgcaagctttattctctgtactcanatataaatttattggatgtgataataatgagttgagatattgtatcgacgtgtagccaaatatagtcattctcgtgttgcattggtgcttagatgtaaactaaaatattttatgcatttattataacactgaccgaatgttatttagtctacaataacatatccactggatacccgatacccggtggatacctgatgggtatgggtacgggtatagtttctcgcccgattggcttggtgggtatggatatttgtagaagtctcgggtacaatttcgggtcgggtattattatatcccgaacaaaacccgaacccgcttgccatctcctaaccaagccgg

SEQ ID NO: 14813 - DNA, 439 bp, Zea mays
  unsure (1)..(439): unsure at all n locations
agcttctccaagcttgagccgaggcattgcctcaccggagaagcagtttcaccctgggcggacttcggtcttccgccgccgcgcgtggaccgagctaaccagtgagtcttcgtctaattccttgcacccacatcttccctagcatcccgtgaagctctctgacccgttcaattgaactatcgcgccgtgagtaggccggactcctcgccaccgacgagcatctccgcctgcacacgtggaccggccaactccgaccatccccgacggcgacccgcacatcgctgtgatccccgagacctcccctacgttctcgaccacctcaccgggagcaatctcgcccgccggtaaaggccccttcccggcncccttttttctttcacgggcccgggcgggggggttttaaccctctggggggtgttttttttttaaaaaaaaaaaa

SEQ ID NO: 14814 - DNA, 349 bp, Zea mays
agcttatgaagattcttcatcccaacatgggctattcggcggtgccagagccaaccgaggttagtcttagcaattaagcatgtgtcgagttcaactctatcaaaatctaccaagtatagctgaccctccaacacacccttaaatgctattgaatcatcacttcttctaaagacggtgacacctacatcagtaaatagacagttgtagcccatttgacataattgggatacggaaagcaaattcgtatctaaagaatctacaagaaaaacattggacatagaatggtcaggtgatatagcaattttacccaatcctttgaccaaaccttgatattccaatccccgaaatg

SEQ ID NO: 14815 - DNA, 67 bp, Zea mays
ctatcaaatggacgtgaagagtgccttcctcaatggacctatccaggaagaaatcttttttagccac

SEQ ID NO: 14816 - DNA, 369 bp, Zea mays
  unsure (1)..(369): unsure at all n locations
tcatagtttgcttctttgttatatcttcttagaantattctagggggagattaaatgagaagtatcccattatgattctggctattccttcattgaaaaatatatatataataagtactctccgaaagaatttttataaactatttcttaatgtaccttggtctgatcttgtatgcatgaacggcatatttaaaagactttgcgtaaataagatatagatagataattaatcaataatattgcattcatgctggcttttttaatgagcattgagtcaaagtggtccctcatttaaattcgaattaaaaatctaaattaaaatggaaaaaattttttaaagccaaaaaaaaattatgcccaaaaattttt

SEQ ID NO: 14817 - DNA, 213 bp, Zea mays
ccaccaaacaggggggaatataacctaataactcactttttcctcaaaaacctgggcggattttattcacctctcaacaattatcaaattccataccttaacctcaaacacaattctggactcccaacatatagggacctcagctctaattaatggacccatacaaaaactttaaccaacggtcataaacagatactcttcacactcataccc

SEQ ID NO: 14818 - DNA, 359 bp, Zea mays
  unsure (1)..(359): unsure at all n locations
acccaagtcacctgcgggtggagctgccaatctataaaatagcacattaccancacacaattgcaaccatacctntacatgcggttcttttttggggactgatattatttaccttcaataaatctaggaggatctctcatgtcttggtgctttgacaaattactaatggtagatggcaaccatttttcttcagctaggcagggatcatacacacatatattatggtcgaaactcaatactcatactacctggtccatctactagtcaaatttttattttcaacaataatcttatataaatatttataagtggatatcttaaaaagtcataatgggggtcatgggttattaaaaaaaaaa

SEQ ID NO: 14819 - DNA, 410 bp, Zea mays
  unsure (1)..(410): unsure at all n locations
tacaacttctgagctggttcatccttctttcanatcacgctcttcataccatgcgcggcggctcttaaagccgaagcttcctatgacagtatactatactggaaaacatgttagctgtgtgtttgaggaccttcacaagatgaacgcccccaacaatagcccctcgcactattaatttgttcttacgtctaacaaattcagaatgggacgtgaaccaaggcctttatcccaaagtgcgagaaaacatcttccctttccttaaatagcgaaagtcaacaacaaatggggcccgccaagttgcaatgcgctaggcatataaataggaacctgcagtgatagccattttggttttttgccctctttcacaatttttgggctcttttggggtgggggccccctttttaaacccc

SEQ ID NO: 14820 - DNA, 246 bp, Zea mays
  unsure (1)..(246): unsure at all n locations
taatggctaagtatttatgttatacctcagatctcgcatatggattcttcctcatcatttattntgcttacgaaggttnttccttcacaaccttcgcccagaattcattatattcaaagggaaataatgtctcgaatgacgaaggactttaacatttaacactttgtatgttgccttgntcttaactagaagcattngagaacaagttccaacattgggcgcccacctccgtgaactcactttcac

SEQ ID NO: 14821 - DNA, 91 bp, Zea mays
acagactaccttaaataagatactagaaaagaaaggcataactagggtctaggagaagcattcttacaaagggaaaacgtaatgagcagtg

SEQ ID NO: 14822 - DNA, 298 bp, Zea mays
  unsure (1)..(298): unsure at all n locations
cttatgtgcaaagtgataacctttggactaaatgtaaaactactatngttaagcatctaaagccaattggttcacaaatatgtgaaattacaagccaaaccctaagtctggacttaaatgaaatggacctattgagtctatccaagctgaattagtgtaaggctcacttgggcttgtacttcaatatagggtttgcctagcacacatagatatagcactatgagacacttgctaaggtacacaatgtaaaaattgaatatacctaacagctgagtgatgctattaactcgggcaacag

SEQ ID NO: 14823 - DNA, 240 bp, Zea mays
cctacatcgactctgtccttaatctactcagacggagacactacactgagactctcttctcgtgcaagtcaccggcccggtctcagctttatcacttaaaatcccaaagtttggtacctggcagaggtacatcttgtccgatgttgaacccatcacgggcatgatagatccaccatcaagttttatttttgaaaacatcccattccatatgaagcatcatcttttggtaaaaacaaaaca

SEQ ID NO: 14824 - DNA, 402 bp, Zea mays
  unsure (1)..(402): unsure at all n locations
atcgantacgacccattcataacatgtatgatgaccaagaccgagtcactctctcgatgatgcgttcacacacctgtgtgcatttaaatctcgccaactatacaacatngtgatgaattgcaactgcaacacagtgcctcttgcaactatatgggtcatggcagcaccttccatggccacgacngtggtgactgtggctgtggtggtcgctccgatggtgattatcgtggcaacgacccctcatncttaatgctagatctatgacaagctcgancacactgtcatctagtgatgtaccgaatggcaattatacgaaataaacttggcggncttgtgctacacctctacaggcgatcaatggacatgaatgggcacaatacatatgtcggctgacactactgg

SEQ ID NO: 14825 - DNA, 346 bp, Zea mays
  unsure (1)..(346): unsure at all n locations
tatttcggccagattaattctatattatgacntaattagtctaatagccaataactaatacaaatcatattacaccttttgcatgtattctcatcttaatttctgcactagtctaaacaacttcaaacagccacaaaatctagtgttacttacatatcactctggtgactaaggacatatatctgcacaaattgactaccaagatcaacgaccacgatacctgtctacgacgtcttccgactcttgcactgaccatgatatcaatcctgagaagcttaacatataacctatatgcacagttgatgtacacactatacatattcactcgagtactacaacattttct

SEQ ID NO: 14826 - DNA, 170 bp, Zea mays
ctgcggtcaccggggggtctaccttatgttcgaccaccaagcggaacgccaaggaaccgagaacgtaaggaacggctcgtgccaccagcggcctgataggtcacgcgcgaaacaagtatccctcgctccgcgcacttgaaggcaactctatgcagagacggcagaggaca

SEQ ID NO: 14827 - DNA, 417 bp, Zea mays
  unsure (1)..(417): unsure at all n locations
actatagagcatgcttctagcannatttaaattttcattntctaagncatgctcattaatcttagcactatagtgagctatgtgatcattntggttggttaataaggctaggtgatcatgaatagcatcaacattaatatctctacatctagtacaaatagtaacatgctcaatggtagatgtagaggggttgcanacatttaattcatcaatcttagcatgtaacaacacattntcatttctaagatgganataacatcatggcanacattntaaatcttagccttaggcaataattttcattctcaatttaagactagagagagatcattncannttgcaatcttagtaatcanactagcattatcatttctangactaacanatngatcatcacaaacatctaacttctcacct

SEQ ID NO: 14828 - DNA, 271 bp, Zea mays
  unsure (1)..(271): unsure at all n locations
ctatggaactttgagatggtttagtgtctatggaacttgtatgtgtataatctgtgtatgacgatggaacttgatatgtggatgaatctgtgtatgggacctattatggaacttgatatgtataaatttgtgtatgcaatctgtgtgaatctgtgtgtgaaatctgtgtataatctgtgtattgaatctgtgtttgaaaattctgtatatgaatctgtatattgaannaccgtctgtgattatattgtatgcagtcggacttatattaaaa

SEQ ID NO: 14829 - DNA, 232 bp, Zea mays
  unsure (1)..(232): unsure at all n locations
cttgtgccagtttgaggaaaactttttatttgattgctcactcgctataactcatgctgagtcagcttctctaacacgatgtcttactgttcagtctatatctgtctttatctcagncgtcatttaagctgtcacactcttgaacaaacctgtagaactatgttaaaaataaagtaaaaagtgtactgaatgataataactcgcatggttgccgtacgatatttctcactcg

SEQ ID NO: 14830 - DNA, 238 bp, Zea mays
agtcttagcgattaagcatgtggcgagttcagctctatcaaaatctactaagtatagctgaccctctaacacacccttaaatgctatggaatcatcacttcttctaaagacagtgacacctatatcagtaaaaagacagtggagcccatttgacatatatgggaaacagaaagcaaggtgaatctaatgagtcaacaagaaaaacattggaaatagaatggtcaggagatatagcaat

SEQ ID NO: 14831 - DNA, 150 bp, Zea mays
tatgtgagtatatcatttgcttaccgtatatattatcaggacaaccgcgttatggacaatactgcctaaaaaatacgcccgcctgcactcatgagactgtgaattataagcttctgcgactggagcatacaacggtgatgactgatcgca

SEQ ID NO: 14832 - DNA, 224 bp, Zea mays
  unsure (1)..(224): unsure at all n locations
ttcatgttactatctaaagcatcatttctttacagatgcatttactgactacctagtccagggaggaggaggaagacatttctttagtacaatgaaagtaaataaaattatgtagccaaaaatctgacttattttaaacgtcacaggagaagtgcgtgcttttgtattaaagaaagaanacctggatcagttccaatacctagcattntgcctcacaatctcat

SEQ ID NO: 14833 - DNA, 115 bp, Zea mays
actccgactgctcgcgcgcggacacatcagagtcccatcttattgctttgatccggctctgcataatgaattgcgacactggtctgcgcaacatccgtgccggacacatcgcttc

SEQ ID NO: 14834 - DNA, 300 bp, Zea mays
tgtattgtttatgccatatagaacaacatgatgtgtttgtgatgaggctcaacatgatgggttgatactgtttgtaacagatgaaagatgatgttattgtgcttatgactgatgaacctgatcactgtgaggtgtttatatttgagagaacatatcacatgtgatacattgaatatcaagactgttgtgactaagctgctgtgtgcgtgaagggtgtgtactgtcaatatgtgactatgatgctaatggaaacgtgtgaatgatgtcaacgtgtgactatgtgtgaatgatctgtcaatg

SEQ ID NO: 14835 - DNA, 172 bp, Zea mays
  unsure (1)..(172): unsure at all n locations
gcgcatgtcaagcatgtgagcaagttggtgttcatcatccacataagaacatcatgatgactgacagaccgctcgagcttctacacatggatctattcggcccgaatgcttacataagcatcggcgggagtaagtactggctagntattggggatgattattctcgcttcac

SEQ ID NO: 14836 - DNA, 294 bp, Zea mays
  unsure (1)..(294): unsure at all n locations
ctcgatggtggactctgttgtttatgcaagaccaaacgttgggcctagcaactaatgttgagtatctcgggtagtggtatgtgcgggccaacactgcggaagagagtctctcttgaanacaatcccacttcatcggtgaatacttgcaaggtggtaatgtttactgcatcattaatgttttgaatttaatacatgttcgatctattgcatggctccgtatatggaggctgcttaagagaatcatcttagatgtagccttctgtattgtactactcctgtatgtaacactgtgtt

SEQ ID NO: 14837 - DNA, 270 bp, Zea mays
  unsure (1)..(270): unsure at all n locations
ctggatacacggaatctacttangccatcttctataacactgttggtatatggagtgggatatggagggtgctgaccgaaatggtntatgcaatcaaatgtcctagattangacttcgganggcaactattgtgtcangattcangaattcagtanacccaccagaatgangcaaaaaccagaacaaggaacccttgtgatttccataaacagttctctattatgtatattntcacccaaaacacatgaaaaaaatatgtactttgacaa

SEQ ID NO: 14838 - DNA, 327 bp, Zea mays
  unsure (1)..(327): unsure at all n locations
caagtgacctcacctgaatcaactactgaactcataggtccttgaatatcaaactaggttgctgaatccaattggacaagataatgctaacatatttacctatcaaatcatgtttgctatagcctaggttgattnaggtttccaggtccaataggttggtatccagggataatggattagtcatcttggacatttatactattccctanngtttangttctaattggtatgctacccttatctattaggtagtccatcaggttattgaaagcttacatcaactgtgaatttacatgatgcttagggcaacttcatgcatgtatagct

SEQ ID NO: 14839 - DNA, 294 bp, Zea mays
atgaatagcaataggcccttggtccgaaggtatcttcatgcaaagattagctggatgaagaattgcttcgaaggcattgagagaccacgaccatgatgcttgtaacatgaacatataaacactgtagtctggtgtatgatcaatgtatgcttggatttcagttacactgctctcgagcacaaggatgggatatgattgctcgcttgcttgtgagctagaaatattactgctgctttacacattgcagatctgatccaagaactaatgtggggatctgatgaacttgagagatga

SEQ ID NO: 14840 - DNA, 70 bp, Zea mays
ggatgactatcaaagacagttatagtgaccccatccgaaaagcaaactccgatgtgcacttgacaatcta

SEQ ID NO: 14841 - DNA, 178 bp, Zea mays
caggtgggaagctctcatcatgccaaaatgatgaccacatcaagacccctggagttacttcatatggacctcttcggaccagtcgcctatccaagcataggaggaagtaagtatggtcttgttataattgatgatttttcccgcttcacttgggtattctttttgcaggataaatctg

SEQ ID NO: 14842 - DNA, 341 bp, Zea mays
  unsure (1)..(341): unsure at all n locations
gcttggcatacaactgggcaatctggagcccctatagtaccttcctcttatgttcctcacgcgctngctcattntgggaatatacaagaatatcatcaatgaacaccactacanaatttgtcgaggtagtccatgaacacattgntcatcatgtacatgaagtaagctggcacgttcatcaatccgaatgacataaccatgaactcatatagtccatacttgatgatngaatgtgtcttcggtatatctgtangtcggattctgagcttatggtaacatgacctcagatctatctntgagaatacactggctcctctcaactgattaaataagtcttcaat

SEQ ID NO: 14843 - DNA, 130 bp, Zea mays
agatatgaagaatggagctcgcaaacaagcttcactcgatatacttgcacactcacagtttttttgggaaaagacatagaaagctatctgggaaagaaactaaccaaagactatttggtactactatata

SEQ ID NO: 14844 - DNA, 211 bp, Zea mays
atcgtgttcgaggtaaaggaagcttgcccatgatatattggccttttcttattctggaaagatatgggccagtggcataccgacttcaggtacccgaaacctttgctgctgtgcataatgtgttccacgtgtcacaatttgagaagtgtcttcggattcccgatcgaaccattgaagtgacagatgttgtccttgaccggacttgacatat

SEQ ID NO: 14845 - DNA, 232 bp, Zea mays
  unsure (1)..(232): unsure at all n locations
atagacatgtcgcgagaatatctccctctcatggagtcaatatgactctgttcgatagtcgactttccgaagatagtatggcttggtcgccacggccgatcctcagaatcttcatccccactttccatgtcataactatcactgtcgtcagaatattccgacaaaccctccatgatctctggtggnggccttcgtcctncgaagggtcctcaaaacgtgatttaacaatatc

SEQ ID NO: 14846 - DNA, 211 bp, Zea mays
cgacgctggaactgccgttattgttcagcacgattcagaaggaccatcaagaccgaaacaaatatacagctaacgcgtaataagaacgctatcgcccctggcgcgaaacctctgcgagcacatcgctgaagtccagaccattataattggcagcattcgctgataaagacattgattgggctacacaaacacgtacatacatatctaacgt

SEQ ID NO: 14847 - DNA, 183 bp, Zea mays
  unsure (1)..(183): unsure at all n locations
gcaatcattcgaagatcgatattgtgtccccttctcgtgccatatgcagcatgatgtatgatgcttatgctatgcgaaatgatgtgatgatgttatgctatgtaaaatggtatntattccgaagatacacgcacatccncacaataaaacacataatctgtttaaatcagcgatgacttttcg

SEQ ID NO: 14848 - DNA, 135 bp, Zea mays
actattgagaccgacagttgaccacccatatggggatcggtcatgtcttacctcgccagaccgtgaggtctctcacattgaagaattgcaacggcaatttgtcaacctccaggactgtgccgctttttttgttgg

SEQ ID NO: 14849 - DNA, 295 bp, Zea mays
  unsure (1)..(295): unsure at all n locations
ctgcacttccatttcgttattatgtagttattcgtgatttcaacaagattcttgttttcgtaacacttcgatgatgatgtaataaatttaatactccttaatgggtggtntatgttttattggatttgctctgtgcctcaccatcgagtgagtacgtggtacttgatcctgttagtggcctcgtcggactagatccganggactgacgttttgntcctatttaagtgtggtctagcctttatggcgggacttaagcacttaaagtggaataattcgggcggntcaccacaacacg

SEQ ID NO: 14850 - DNA, 234 bp, Zea mays
  unsure (1)..(234): unsure at all n locations
atcacactgagcaatgaagccctttgaaaatataagattctgctctccttagtagatagactaanagtcagcgaagccaggcttaatacacaagtcaaaactcacaaagccgaaagtgacgatctaaagaanaaactttgctgaagtgaatgaaaattntgatgtggcgaaggcaaagcaagagataagtgaatggacaaagttaaggctagaaaagaatggtgaagagcatcg

SEQ ID NO: 14851 - DNA, 291 bp, Zea mays
agctcactacgctcgggacatcaggtttttgcttgtgtcgaaggtggccgggtgctcgacgttgggtagggagcaccggctggcacttgaggttgccgggcgggagcacggaaatgctgccagggggtttatcgtccggcagacgcgggcacgggggcgaccccggggcccgcgacggctgccctggcggaacagatcacactgacattattgcatttaacggatggcggacttcgattacaatctgataattctctgaatccgtgttagcggtaggattaccgtgagtca

SEQ ID NO: 14852 - DNA, 290 bp, Zea mays
  unsure (1)..(290): unsure at all n locations
tactaaactggacaagtttagaccttctaactangcattctttaactaacganctccactgcaaggcacatattntctctgacgcaaaagtagcagatctttcagcgctccgaccaatcaagaaatcgatcccaacatcaataaactaaataaatacgtcatccctaggcggcttctttgtaaaaagaataaagataacaaattactaaacaatattcctcacacatcgtctcgatccattctgaatcatttcatgcagaactggtgatctagcatgatggcgttaatat

SEQ ID NO: 14853 - DNA, 305 bp, Zea mays
  unsure (1)..(305): unsure at all n locations
gctttataggatcacctattcaccccccccctctaggtgctctcaattggtatcagagccgttctcttcaagaaaggggactagccgccgaagagatggatcctaaggggaagggaatcgtgatccaacgataggagaaggagtccttcgtcaatgagcttaaagatgacaagccaaccgacttcggctcgggtcatagaccaaaggaanggaagaagaagaagacgaggcgcatcaaggagatcgtctactacgacgacagtgatgagtctacttcttttccaaaggacgacgaccacaacgac

SEQ ID NO: 14854 - DNA, 297 bp, Zea mays
tgctgaagggtaccattctcccgaatacattattcctgcttaaaatctgtacagaagtccgtcgcatgtactgccttatagcattcttggaaatggtcctagtaagaattaatcctttgatttggtgatggagtctccaattctgtatgatgttggaacacctatcaaagatactgagatgctgtcacggaacgtaccatcatcccggtctcttcggtgtagggcacttggtgaataacaccacgcttcttgattgtccacacatttcttaggtgactgatctccaatctgcgacat

SEQ ID NO: 14855 - DNA, 415 bp, Zea mays
  unsure (1)..(415): unsure at all n locations
catgctagtattagcaattaagcatgcatctagaccgggctctttcttcgaaaaatcaactataataaaggttgtcgtctagtacacccttaaaagctaatgaaccatcacaccttctaaagacggacacatctacattggtaaataaacaatggaacccatattacaaaagtgactaacggacaacaagttatacctgagcgattcaactaanaacacattagagatggaatgctcggatgaaatagctatctttcttagtccttaaacccctgcntgantcccgtcaccaaatatgattgagtcttgggaatctttgtcttgacgtaggaggtgacatctcttctccncgcatgtggtggtgcatcgtgcgatatcagctgaccctaatgctaacctttctcttgcatagatg

SEQ ID NO: 14856 - DNA, 246 bp, Zea mays
  unsure (1)..(246): unsure at all n locations
cacctgcgaanggtgtcaattctatgcgaagcagacccacctgcccgctcangctctgcatacgaatacccatcacctgcgctttgctgtgtggggtctggacctcgtcngtcccttgcagaaggcgcccggnggctacacgcacctgctggtcgccatcgacaaattctccaagtggatcgaggtccgacccctgaacagcatcatgtccgagcaggcggtggcgttcttcaccaacatcatcca

SEQ ID NO: 14857 - DNA, 334 bp, Zea mays
  unsure (1)..(334): unsure at all n locations
tctctttgcaaacaactaataatgttgcatctaatacctcttanagctaatgaaccatccttttctaagacagaacatctcattagtgatagaaattatatcacatattacataatgactacggatacanatatatcaagcgactactagaaacattaaataagtgtatttgaatgcatctgctaaccttaccttgcttgtcccgcaccaatatgatgaactgngatcttgtcttgcgangagagaacatctcttcccgcatgtgttggatcgtgcatatcagtaagcccgatctaactgaggcatatctggctagaccacttgtggctaagta

SEQ ID NO: 14858 - DNA, 257 bp, Zea mays
gactgtggggacaagtaccctgtagccatgagaattggcgtcactggtgggcaacctttgggcccgaacacacagggttttgcttgttttacccgcttgatagtacttggagggaatcctcctctctggagtgctgtggctttagagaggacgtatgcgctgccatattgatctgatcgagggtatgctggagcatgagtagattcagctatcctgggcggctatccggcacatgcctctccctttcagtgtatggt

SEQ ID NO: 14859 - DNA, 155 bp, Zea mays
ctcacatgtcaacagttcataatgtgttccatgtatctcaactgcggaaatgcgttcgtctcccactgaatactccggaccaatattatatataaccagacttgtcctatcaagagtaccccgtcaaggtgttagatcaaaaagagagatcaact

SEQ ID NO: 14860 - DNA, 233 bp, Zea mays
  unsure (1)..(233): unsure at all n locations
tgctgggactccaccaccgctgtattgtgcgggggaggaatatagcttcactgcaacagcgcgccctacgggccaaccaagatctgagggatgtgtggaggcctcctcatattatgtgcgacactaggaaggtttcgtttngatccaagctaaaacttntcacgataactcgtatanaacactacacgcaaggtctgtgcgatctcgacgaatctagaaaaactcgaatctta

SEQ ID NO: 14861 - DNA, 455 bp, Zea mays
  unsure (1)..(455): unsure at all n locations
actacttctgcactcgctcttagttctggctgaagtaaacaacttgagcttgtttntaatanacgaagtatgtttccttcgcattcttatctcgatgtctgtatgtctgaagacgggtaaacgtcctggaaggaaggaaagataccaacttgtcagtgatatgaacattacagggctgtgctgtaacaggacactgangggcctatacttggagtcgtccatcaattgaccttatagtgctaaatgtgaaataccgctatatacatgtttgtatatgaggtggatggatgcctatctntaatagagaccnaggagagtgaatcaccgaggcgtatcangctgcatatactgcttgcangtggtgtaagtcttgattgttgtagacctacttggaagctggtatattgaactacgcgttacttgaatttgacgttgatgactcgtgactgatatat

SEQ ID NO: 14862 - DNA, 167 bp, Zea mays
  unsure (1)..(167): unsure at all n locations
actatcgtgatgatattattnttggatctactaatgaattattttgtgagggagtcggaacaatgatgtcaaaagaatttgaaatgtctatgataggagaatcgagcttctttcttggccttcacatcaaacaattgaaagatggaattttataagcaatcaaaata

SEQ ID NO: 14863 - DNA, 343 bp, Zea mays
tatatggccaccagatctaatttatcctttccacttgattgtatggtataggttgtgggtgcattgctttaaaaccatgttaactaacttaagatagtggggtcttatttagcattgagtatacttaatggtacataaagaggtatggtacacttgaaaacctaggactggggccaagcacttaggactatggtggatagattatgctgatggcttaccggaccagaaacatttgaaagacatgtaccttaatttgaaagtttatagatatgaccaagtaattattgctactccgatgtgcactgaagctataaataagtctgtgactggcctatatgagagt

SEQ ID NO: 14864 - DNA, 395 bp, Zea mays
  unsure (1)..(395): unsure at all n locations
ctcttggctttttctaacaaatttgactttgcccctgaccgttatggattgcatattactgattcttggcacaaattattatgtgctagttattatgccaactacattgatcgctgcttaatatcccaatcaagtttttgtagaatttatttttcaatgactacgaaaaagcgagaaccgatcataagcttaatgtggggccatagagtaactatgngttattgtggccaacttcatacagacgttcactctcattgttacaatgttaggtggaatgtacttccaatactcacagtcactatatggtatgtcatactaaacttgacttcgattacaatggtcttcgatacaattgtgcttacttcaatttgttccactgcacaaccaattcatgg

SEQ ID NO: 14865 - DNA, 268 bp, Zea mays
  unsure (1)..(268): unsure at all n locations
actgtatatcaatatgtcgtcaanaaaataccaggacacatttcctcagtaatggagccagagtagaattcatagcactttgaaacgtggcaggagcacctgacaatccanaaggcataaccttanattcaaaatgcccatgatgggtttggaaagcagtcttatgttggtcctctggatgcatgcgaatctgatgaaatccagctctcanatctagagtagaaaaccatgctgctccatgtaattcatccaagaactcatcaataat

SEQ ID NO: 14866 - DNA, 268 bp, Zea mays
  unsure (1)..(268): unsure at all n locations
gtcacacatcatatgtttatagctgcaatangggtacaactgtgcttaagggattaagcattgntgttatgcannagtganagaaactgtgcccacagttgggctgtcacgcagcctcaagtctganactctggttaacagtgtgtaggatcaactctggaaccatgtagcgctttgattagtggttggttaactaanacctctgtggaaacttaaagctggtttgataactacaantttgatgcagagtgttggctagtcactacac

SEQ ID NO: 14867 - DNA, 444 bp, Zea mays
  unsure (1)..(444): unsure at all n locations
gagcaaacatggtgaagtgaccatcatacaggccattgcatncagtggtcaatgtgatctggacagaggcatggtccttggcagtgatgatcctcgttgtggccgagctgcaagaacataactcatccttagccacaacnaaccaacatgcaagcagaacattttacagagataggcaacgaccacttctgggacataagcacgttacctctattgtggacatggggactcccagacactgatcgagacacttctgcctaaagaacacctatccttgagactcatcgactgacatcaaatgtgatacaggtattatttgacttactatcaacactgagcatcagtcatgaagctactaactgacttcgactcaagtacatcttgatcataagtgatatactctcctaacataaatcatctgtatacctcctaccatgcaatgat

SEQ ID NO: 14868 - DNA, 153 bp, Zea mays
cttaggcacccaaacagccttggcctagaatgtgtgaactcatcacctttctagcacaagaagtcaaatttgcgtctcctaagcatatttgaatgtattgacaagttaggcttatgagtgttaccatttggacaaaccttgaatagatgaccc

SEQ ID NO: 14869 - DNA, 316 bp, Zea mays
tggggctaaaggactactaataatggtgttatgcccttcagcggagctgcggccctgataatgatcgcaaccaacctgcgcgccggcgcaccaattatgttgaagttatatcgaatttgcattcatcgttatatcactattcgcgataaccagcgtttttgcaccataactgcttaaaaaatacgcccgcctgcactctcgagactgtgaattataacatttgcactggagctccaacggatgtaatgatgcacggtacactggctggtaatgctggaacgggcaatgcttgccttacaactggatccggtgtgaa

SEQ ID NO: 14870 - DNA, 316 bp, Zea mays
  unsure (1)..(316): unsure at all n locations
aatctcgagtctctgaagactntcttatatgtcctcatgctcttgctcatttgggatatataaagatatcatctatgaaccaccactacgaattgtcgaggtaatccatgaacacactcttcatcagatacatgaagtaagctggncattncgcaatccanatgacataaccacgaactcatatagtccgtatttggtgatgaatggtgtcttcggtatgtctgaagggtagattctcagctgatggtaacctgacctcagatctatctttgagaacacactgggctctctcaactgatcaaataactcttcaatt

SEQ ID NO: 14871 - DNA, 175 bp, Zea mays
  unsure (1)..(175): unsure at all n locations
tcatcatccacacaagaacatcatgactagtgacaggccactggagctcctacacatggacctattctgcccgatcgcttatataagcatcggcgggagtaagtactgtctagttattgtggatgattattctcgcttcacttgngtgttctttttgcaggaagaatctcatacc

SEQ ID NO: 14872 - DNA, 284 bp, Zea mays
cggctctttttgagatcataataagatgcgctatacacttaaactaggaactactttttaaacaaccattacttgaataaagttatcctatgaaatgataacgaacaatattctaaacctctaacacataaaaggtattaatgattactacttactgctgtcatacaatatgactggactattgcagagaattttccccatgtggccgtgaatgactgaccgagtaactagaatagtggtagacacttgggctctgtggaactagacagagtgtctgtgctatc

SEQ ID NO: 14873 - DNA, 290 bp, Zea mays
  unsure (1)..(290): unsure at all n locations
atatgtgaatgcttacactagtctatgcaagtctttgngcactcggcacncctccncatgtgggcagataagataacgacgtccctgagaatggngaaccgacccacgcccctctcctcatgctgcacccaccggccaccgacgctggagtgaattcaccgaccgtggctcgtttcgccgcacccagaagagacgtgtactcgtctgaaagattgatgttgtttggttgatggtcgtttggcctgctgcactgagtctgacacaggataatgggttgatggagctattgg

SEQ ID NO: 14874 - DNA, 251 bp, Zea mays
tgcggaaggctctatggcacattggtttgtgcgactcgttgaatggagcctcctgttactttaagcttatggctagcacccaactggtaagctaaatttttgtaggttaagcgaagcactcttttatacatgaagatgtgatgcatattgagattttggtactcaattatgaaagtaatatatataaatcaatgatgaggagtagatttagatagcacactcaaggcctctccacagcataactctacagt

SEQ ID NO: 14875 - DNA, 318 bp, Zea mays
  unsure (1)..(318): unsure at all n locations
gatctctgagtcacctgcngctgcagctctccacaacttcgttgtgagttagctgtgaaggatcttggtcagctcatattatttcttggcattgaggtgcagtacacttcttcggngttgattntaacgcaacgcnatatattcgaacctcctcctgcgcacaaacatggatacttctaaaggggtttctacgcctatgctgcctgctgataagctctcccttcatgatggtgttcctctatctcctgatgatactacgaagtaccgaagtgttgttggtactctacagtatttgtcccttacaaggcctgacatcac

SEQ ID NO: 14876 - DNA, 507 bp, Zea mays
tagcacgagctgcactcctaagatagtatgaagagctgagaatgtattatgtatgggtatacaaggggcattaaacaccctttataaatataaacatgcttacaaccggcataatgtaaagagggggactaggatgacaagttaacaccaaacggtctcaagttaatagacagtaaagactcttcatacatggaggctataaacagctgtataatgcttgaagaactaaaacctttgacaaatgccaccattgattactctaccgactgagagctgcccatctatgcatgacagattgagagacacgactctacagcgaaagctgcagtttgtagacagaccaaacgctccacacacgctgaagattttcaaaccctgaacggtgacctatatggtgcacctatgaccttgaatatacacacctaacatctattaaggcagaactccgtaagaacaccctaagtgatgtcaattgagcatcttcaatagataaggtataggctagta

SEQ ID NO: 14877 - DNA, 223 bp, Zea mays
  unsure (1)..(223): unsure at all n locations
ctctctgcatccggggacaccgcacagaggacngagaactatatcgctacccaccaccagacgttgggggcccacctgggagagcgactaggtgggggtgtcgcggtgtaaagctgtgggacacgacgctaaactgtttccaatgtggtagctcttgcgtgcaacagacgatttagactgtgcgttgctcgacctattctgcaaaccaatactacgcaataat

SEQ ID NO: 14878 - DNA, 390 bp, Zea mays
agcacctgggctgcagctttctgtatataacctgactaaaccttctgattcagtctgtgccacttgttcggagctaatacagggactttgtagttccgatggcaagtatacaccaatatcggcatcatcttttccttgttgtatgactcggacccgaaactgccaaggtcctgttgttaaggcaattacatacctcatcgtaggcactggaaaaccactttacttgatatcggaggattatcacttaacttaaacatatctacgttggactttctcaccatatttgttaaaaccattcttgacaactaaaaatcagcaagggtgtgtgagcaaattgaatctaattctgtacagtgtgtattgacttcaacaccattgtgaggcgtcata

SEQ ID NO: 14879 - DNA, 324 bp, Zea mays
ctactttgctcgaacacaatctatgacctggtttgaacacaaaaatgttttgttaacactataataatatatgtccacttaaaatcgagcgcataccagtgttgactcaaaatgtgcgtttaatttaatacaaatccacgcatatgtatattaaagatggattaactacccgttaatgaagcaacaagatggtgaattttatgctcaattatattaaattcttcttaaagcattcacaagcctagaacaaattcgtttttttatggatatattgaaattgcgtcaaatctgttaggctaaagagacggatcccggaatcctcct

SEQ ID NO: 14880 - DNA, 186 bp, Zea mays
  unsure (1)..(186): unsure at all n locations
gacccattatgtcccacttactntataattcactgtcccgcatactatgaacaacctaaggagtgactagctntctatttacctgttccttgattaccttttgggctactatggttagattcatgctatcgctntactttaatcaatgaacatgatgtgaacacttatgatacgatgntgtcatta

SEQ ID NO: 14881 - DNA, 264 bp, Zea mays
  unsure (1)..(264): unsure at all n locations
gatctctgagtcacctgcngatgcagcttatgcactgctgcagaatgagaaggaactgcgtcctctgtctgcactatcttctttggcacaccatgaagaccaacgatccgagacatatacaattctgccaatactgcacttgtgtagctggtcttgacaggtatgaagtgggctgacttggtcaaacggtccaccactacccaaatagaatcgtagccggctcgagtgcgaggcaatccgactatganatccataccaatctca

SEQ ID NO: 14882 - DNA, 146 bp, Zea mays
  unsure (1)..(146): unsure at all n locations
acaacttctcctgtatcttacatgactgtgaatagtggnggcattgttgcnagtggctgatcanaaacatggatgggatcttgcaatattgtctttactatacgtgcaaggacttccatattgacctatgactaactgcatgttca

SEQ ID NO: 14883 - DNA, 246 bp, Zea mays
  unsure (1)..(246): unsure at all n locations
gacaaaaaggcaacagacaatgtgaacactacaactatctctcanggtggtggtggnagtggtggaatacaaattatgaagcgtcttaccccgctcttacaagggtcttaccagcactgcangtggaaaacggtgaccagtatgactgtccaacgagcgtatgtgtgattgcaaaggagtacatgttctgctcgagacanagctggngctctgggaaggctgactaaatatatatatgtggcacac

SEQ ID NO: 14884 - DNA, 264 bp, Zea mays
actgacccgatcaagactggtcactttacgcctcactgttttctttcaggtcgcgcacatctatcagccaggcaatagaccatgtgtacgggcgtcttggtgaactattgatgtggcaaaaaaacgctactttctaaacaaaaatttgaatgaatcactcaagaaagcactgataatatctacatgtctatacttctcttcctgagcgctcctacaatactaactggactattatgcgtcgttaactatgaaaagggcgttaac

SEQ ID NO: 14885 - DNA, 265 bp, Zea mays
  unsure (1)..(265): unsure at all n locations
caattggtagttgatcaatagtagttcctttcaagtggatactttcaattagtaataatctattttatgaaaagaaatgtcaatatgaagggtaaattcctttcggattaaatntgtaaattggtgcatattgttaattcactcatacatgtgcattgacttanaagggaattaatntatgcctttatgcctcataaatgatgaattatntgacattcatatataaatatcatcattcattanatccttcattngactactaata

SEQ ID NO: 14886 - DNA, 226 bp, Zea mays
  unsure (1)..(226): unsure at all n locations
tgtgtaccagtggcataccgactccaactacccgaaaccttgtctgctatgcataatgtgttccacgtgtacaattaaagaatgtcttctggttcccgatcgaaccattgaagtaacagatgttgtccttgaaccagacttaacatattccgagcatcccattcaagtcttggatcagaaggacagggttacccggagaaaaactctcaagttntacaagatacag

SEQ ID NO: 14887 - DNA, 165 bp, Zea mays
  unsure (1)..(165): unsure at all n locations
accttgtgcagcttgtcaagaaggtgcacaggtgggaggagcacatcacaacaagaatgtgatgacccatgaaggcccctggagctgctacatatggacctcttcggacctgtcgcctatctaaacatatggngaagtaaggatgggttagctattatggatgac

SEQ ID NO: 14888 - DNA, 196 bp, Zea mays
  unsure (1)..(196): unsure at all n locations
taacatgttactatgcataatttatgttacaaatagtataacactaanacatctgcaatattattaccttgtcttcctcattatcactaacatctgttgactcattacatccaatatctggctccaatcggcttagaacgacatcgagctcatccaacacatccatgcccttatcgtaccctgctttagacataca

SEQ ID NO: 14889 - DNA, 245 bp, Zea mays
tataggattctgcacatgaaccattgtagccttgatgtcaattaagatgctgactgcaccttattctctcagccaggcggattattactgttaatgtagctcattagacgctgctggacaaatggcaaacctggaccaatcaaatatgagagctactagctctgaagatgaggacttatgtagctgccctggactttatctttttgtgcactatacacgtgaccattacacatatgtgtaactat

SEQ ID NO: 14890 - DNA, 266 bp, Zea mays
  unsure (1)..(266): unsure at all n locations
tatataagtatcttagccccgctatggcttntcacacatcattgtgttacaaaaccacganacataacaggaaggagtcttccattattatgtggtagtcatgactcttcaacctggagaactagtccgccttcatattcacagaccttctaaagcccgcggcataaccatctgagaactatanattnttcaaccatttcatcaattggttattccttttaggtttaagactgaacagagcatgtggcttcttctcgttctctcct

SEQ ID NO: 14891 - DNA, 230 bp, Zea mays
tataacaggtgagtaagcaatgtcttgtcttggcactcctgacttctgtatcaactcttagctgcgagcttactgtgagttgactatgacctgcgtgaccctaccacctccttaatcaactggacaatcaagttggcatttcttagtactatgggcaggcaagcgctagtaccaacaaatttcgtactatcttgctctactgaataacagttaaaggtagtctgtataac

SEQ ID NO: 14892 - DNA, 93 bp, Zea mays
  unsure (1)..(93): unsure at all n locations
agtgcttacagctcatcgccaccgtccagtgcctcttgttactgtgaaacatancatcgctacctctcaccaacctcgtcaacatcaacgtac

SEQ ID NO: 14893 - DNA, 434 bp, Zea mays
  unsure (1)..(434): unsure at all n locations
tgactgctaggtatttcatacctcaccattgttacaatcaatctgtcatctctatcaaatttccccccttttcaactgaatcttgcaggaaacaatatcgcatgtcatgcactaccaatgtttatacacacattccatggtataccacaacttangcaattgacatagcttgttcacactgcaatgatcttattgaagacccaaaaacaagttcatatggatcatatatattctacatgctagctgctcaatataaatataacatgctgatcaactaggactactatgatattagtatggatcatgtagtgcacgactaatctgatatgacttcatnttatataaaatctcatcaatcatgctaccacatgttactgtanacaaatgtctatatactatgaacacactatgtgagagatcttgtgatatatgac

SEQ ID NO: 14894 - DNA, 159 bp, Zea mays
  unsure (1)..(159): unsure at all n locations
aacagtgtcatgatcctcagagacgagtatgagaacgatcataatgagatattggactgatccacattngatacatgagatcagggtatagcagataaccagataatagggcaggatcaataggggattcagagattcggatgataagccacaatatga

SEQ ID NO: 14895 - DNA, 478 bp, Zea mays
tgtcctgatacacctaaaactccttctttgagcttggtgcggactgtgctcgctttattaatcactatgctgtcttttgcggcgagcaactatgcgactccctccagcccttggatcttcatggtgttgtgcaaaaatcttatgaaccatacactatacttgggcataagatacaactacacagtagagatgcgcatagttgacttagatctctttgaggctaactcctgtaataaccgatctgactgaatgggctcttgccgtcatacaaccggtacactagcgcagaagcacataacttgcgtgctgctgtcgcggtgttacctgtgcggcaaactctatgcataagtcttgcttgcgcatgactgcctctacattggatgagctttcactaatactgtagtctctcgagccgctttatactgctcttataaccatttcgactatctggtaagacacatcttgccaactttgtgtc

SEQ ID NO: 14896 - DNA, 149 bp, Zea mays
  unsure (1)..(149): unsure at all n locations
catttagtttcagtgtaactgtgtaatagagcatcccaaacacatatntaacactgtataatgaagatacacacgtcatatgcaattaagagttcaataactataccaacgtcatttattacctagaatggtaccacctaaggaacaaa

SEQ ID NO: 14897 - DNA, 199 bp, Zea mays
tagccttacatacgaacatcggccattgattacactagactatgacacatcccacatgacacaaactttcccttcgacgcggcgtttccaataccacatgtatgatctataatgacgtcctcactctgttgattaacactacaccactcggtctaatatcaccaacacccattgaatttcccaatcgtccaacaccggt

SEQ ID NO: 14898 - DNA, 342 bp, Zea mays
tccttgctggctgtggtgcctgcacttacgcgctgatcttgtagaagccttttatataatcgagctcatttgccctgctaaagctctgtttgtgctgacagagtgagtatgatgactcatgcggcacgattgttctgtatatcccgtacacttcagattctgcgattgggccagattacaatgtcaagagacagatgaaactactgcgcacgatgcgcatggctctacttattgtgaagctgccgtgcgtggtgtcttcttattacattcagtgctccactcttggactgacgatccttaaactgaggcaattctggttcacgtcttggtatctgcagacta

SEQ ID NO: 14899 - DNA, 338 bp, Zea mays
atcactgaccggacttaagcacgagctgcactgtgcatgaaacaaatcctgaactactgtaactgctgccgtgcaactgtactcggcggactcaagggaacatgttgcaaaaatttggcgcttgtggatgggacagcctcttatcttgggaaatcacgtcaagcactaagtcctgacggggaggccacatgcacccccctgaagcatgtgcatacttgtttgaggtgctacagaaacttgcgcccagactgactatgcgcaaatgagcaaactgaaactgacagctgccctgaccctcatggaccgaatgtcttgtcgacataatgtataccttgtat

SEQ ID NO: 14900 - DNA, 161 bp, Zea mays
gacggcactgaggaggactggaccttttctctagaaggctggggaatacgtatctactaatccatcaatctatctggattaattgaaccatatactatagtagaaaaactaaactacctttgatcattcctcagtgcctgtacagttaccatgctggtggt

SEQ ID NO: 14901 - DNA, 265 bp, Zea mays
  unsure (1)..(265): unsure at all n locations
tataacatggtcattngcatgctgggggctggcatgattggacccttcaagaaagctcanggaggctatactcacgtgctggttgccattgacanattcacanaatggatagagtataagcctattgcttctttaaccacagccaagtcagtggaattcatacaagacataatattccgatttgngataccanatagcattataactgatctaggatccaacttcaccagctctgaattcttcaatttctgcgaacaatgaaaca

SEQ ID NO: 14902 - DNA, 272 bp, Zea mays
  unsure (1)..(272): unsure at all n locations
ctattgaatcttggggattngaactccttgaagtacctcataacaagagtgttacggggccttcttctgctggtgcttcttgacaaggctgcagagaaatgactgtcacagggttgattctgggagaaccttcttcttatcttctcttcactatcttcttttcactgaccctntctttctctttgctcttcccactggaggattctatcanagagtattaccatcatacagaggaggaaaccgaagatgttgaccatgtccatagtcttcac

SEQ ID NO: 14903 - DNA, 209 bp, Zea mays
  unsure (1)..(209): unsure at all n locations
tatcagcttcctcaacgacatcntgctggacgacatantgcactcatcataatcgacatcttgatcacgggnntcaatatcgatnnttattttaccttanagccatcaattntgtcttgagtgataatgacttgctctattaagattatgaccagttgtcatatccagaanantacagttgcaattttgcatctattcccaatatcatg

SEQ ID NO: 14904 - DNA, 236 bp, Zea mays
  unsure (1)..(236): unsure at all n locations
tgatatggcttgtcgagaagccagagttggtggcctcgatctaattaagcaccatatagtnttcgntaaggtgctaactcactctcacccaagtttattnntcccccagntgtctgcttcacttgttaattgcaccccaattcattacctganaggcccttccccaacaaatataattgatgagccatctattatttgataccgttgctaggaagcaggctatcctacacccgggc

SEQ ID NO: 14905 - DNA, 245 bp, Zea mays
cttagtggcagcatttgcttattttttacttgatgtatattgtcgaattataagaatgtgtgtgccacttcctgaataatatgatctgctaggagtgtgattagttttcacttacagtattattacttaatttaacaacattttttgaatattattactttactgctacagattatatatgcatcagaccgtttgtcataaagtatcttgacaacactaacactactcttgtttatactgcacat

SEQ ID NO: 14906 - DNA, 273 bp, Zea mays
  unsure (1)..(273): unsure at all n locations
tttatttctataatcgagtggagttcttctatctgactccaaaccgggtacgccaagctccatacagtagatacgagccggtaactacaatcttggattcttaactccgactntganactgctagctggtaaaaagaatgaaggaccataattaatgctatcgaggccccaagtcaagcaacaaagcttctagccgatagaaagaatgggacgagcctatcttgcaaaacaangaaactctagctgacttactccttggtcagtataactaca

SEQ ID NO: 14907 - DNA, 391 bp, Zea mays
  unsure (1)..(391): unsure at all n locations
acttttatatacaacacctctacagaagacatgagttaattcattgaactagctgcataaccaaaactggtcatacagtcccaaacaacaagcaatagatntattcaggttctatactcttctaagattaagcgttcatcgaaggactaataactntatgttcttcattacgagacacttagatccaacataaggatagaagcaatatgctaactctntaaatcattttaagcctgatctcacatcatgcaagcaagaatcgatttaaccatactatgccntgccatagtatcatcccagcacattctatacgatatatcatccnatcgaagaactctctttttaagtatactatgcatatatatccatccaataactcacacaatctcca

SEQ ID NO: 14908 - DNA, 325 bp, Zea mays
tcaacttatttcagcttcaacggagcgcatatttccattgatacttgacaatccatcttgttattggtatgacacaaagctcatatcctaattttgccccggattgggagtaatcggataagttatctcgtggtgtaagccaaaacactgaacatactaggtgctcagcaggaagatctgtctgtctgagttacgacataatcatccatcttgcgtctgatatcgactgtgttgcattatcaacacatgtgattacgtgcagcgactaattggacaccatgcctgttcgcatctctgtgaatttcatgaacaggctatattggcg

SEQ ID NO: 14909 - DNA, 194 bp, Zea mays
  unsure (1)..(194): unsure at all n locations
gctaactagtgcaagagcctaccataccaacgtctaactctatcctgaacacctagtgagcgaacgaggcaacactctactctggggatggtggtctccctgagccggcagtgtccaactagaggcaggctcatctgctacctcgatgtcggcttcctcgtcagccttctggtgatgcatatncaggtgctcat

SEQ ID NO: 14910 - DNA, 276 bp, Zea mays
  unsure (1)..(276): unsure at all n locations
cacttgtaggttttatacaagtccttcaaggtcttaaatatttctttttcttgtgcatgtagtcatcggcctcacccaacattctaacaagatcatcatatgaatagccatcatcatcaacatcatcatcatcatttatatcatataaatcggtgatgattnttaccttagcatctccctttgccatgagacaatgnggggatgagaagaagcgagggagcttcttgatggcaatttcggcattaagcttggatgaagtgcatcatcatcatcatc

SEQ ID NO: 14911 - DNA, 202 bp, Zea mays
  unsure (1)..(202): unsure at all n locations
gtgccttctcnggtgctatgnggattgccactattttggagagtagaggccgcgatcatgtganatcctctgcacanaccgaggccgcttatcttctgaagatgtaaaagacccctcgngttgaagcaagcttggttggtggtaaattttcaccgacatctggganaatggtggccgggagatgtctcaagaaattataatg

SEQ ID NO: 14912 - DNA, 215 bp, Zea mays
  unsure (1)..(215): unsure at all n locations
aaccatgtgtataaactctctaaggcgcgtctatgggctcaagcacagcccccaagagcatcggtatgaatgcctaagagaattccttatcactaatggcttcaaagntggaaaggccgatcctactntatntactanaactctcgacagtgatntgtttgtatgccaaatttatgttgatgatattatatnntgggctactaatgaatctacat

SEQ ID NO: 14913 - DNA, 173 bp, Zea mays
gatagctctattttatactcaaatgagatgaataaatagaataaagggagtaaatagtacggtttgttcgatagacacgcgtgttaaagctgcctcattatggcccgttcgtttgtccaggattagaccacgattcattccaacttatcaaaacttacataaattagagaaac

SEQ ID NO: 14914 - DNA, 372 bp, Zea mays
  unsure (1)..(372): unsure at all n locations
acgggtgagtatgctaaatgctattgcaggtagttcttgtagaaacaggtgtgtatcctgcgtatccaccaaatagaatcattagagccacttgcttatatgcttatgtaaggggattacttagcataaccagtaatgcagaaaactctatgtaataccaacttattagacttgagattatgctatacaacancaagagtgcaaatgtgagcacacagctaaactggttggaccagtgctgttatgtaagacanacattggacaaacacgcactgttgagtatctcgggtagtgtatgatcgccacaatatgaaagtttctcataaacataccaactcatgggatagtgcagactgatctatcactcatcag

SEQ ID NO: 14915 - DNA, 151 bp, Zea mays
cttagccgaagagaggagtaccaggtttgtcaacattcttgacagccatgacgaaagacttcgccatgactgcagtattgccaccatatgaagatattagtgcttcgtagctcatcagaaactgcttcggatctgagtgttcgtcgtacat

SEQ ID NO: 14916 - DNA, 98 bp, Zea mays
atgtccattatcaagtgacagtgacagggataacgacaagaagggcaagaggagagaaaagaagaggtactacaaaaagaagggcggcgatgcccatg

SEQ ID NO: 14917 - DNA, 428 bp, Zea mays
  unsure (1)..(428): unsure at all n locations
tcactcgtaccgcgatcttaagcacctgcngatgcagctttcatctacttcgactgttatcttctcaatgtctttatcagcccctcttaactgagtctgcacgattatctagagctgtatcggtttgagactaagaaagccacgtctgctaacattgatttggaactttttaaatatggtactgtatgaaggcttgtttacaaaggtggatgatgaagtctctcctctgttgctaaattgattggaactctgaaatatggtctcgatataaggatcggttttaaaagggtgggctgtatacacgtgcactccctttctgctgaattgattgtgacatttgaaacgaggtactgtatgaggatgttaaaagggggctgataagttcacatgctctaattgttggacttgcatcggctgtatagattgtt

SEQ ID NO: 14918 - DNA, 226 bp, Zea mays
  unsure (1)..(226): unsure at all n locations
tgcttggttggtgcagaatgtatttgggctgaaagacatatttgatttggtgatgactcagcacaacctgtaagggcatgtctctaatgtaggacggcaggccttatcctccacaaagactctaaagcctctanattagaggaggctgcggcctattatagaagggttatcactgacatgcggtcaaccttttgatctgatgctcacggggcaggagaaaaatata

SEQ ID NO: 14919 - DNA, 426 bp, Zea mays
ctctaagcacctgcgctgcagcttcgaaaccaacactttaacagtgtgctgattatcttcacccctattcgatctcgaatacatcctaaggcttcttcattaattccgccgaagagcatggctcctggctggtagccacaagatataccatattcctgtagctcctccttcccagccttggataattcttgaccaattatattttgaaagttgcagcccttttcttctgaaatatctttgacaatctccttctctttctcaggcactgcggccaggacttcttctgcagccgcaatagtctcctccgcagccaaatccaagagcactttatcggtagcagataatgtactctccacgttggtaacttccgcagttgcaccttctgcagaagcagcaaccttcgcagctagtggtatttctgatgct

SEQ ID NO: 14920 - DNA, 379 bp, Zea mays
tcttcactatctaatgaaatgaatgtgtttactagcctcctgggactagtaattctatcacatttgagtcctaaaggatcgagatgcttcagatggtatcagagccatatgactggccgtagaccgcaaccctgacctaaaaaggcttccctcaaaagaaaaacatcttaaactcttaaagaatctcttcttttcttttccccaatattaacaactcttcttctctttctacaagatggagagcacctttgtccttaaaatatcctattgctcggaggtggaaggattcccttaccttcttccgagttgtgcgcttcaccttggagttcgcaagaaaccagagtatgtcttgaaggaataccgtgaagatggagttgag

SEQ ID NO: 14921 - DNA, 431 bp, Zea mays
  unsure (1)..(431): unsure at all n locations
tgggctaccaccatgcaactggagcgcggagattattctgcgcgaacatccatggaagtacaagagggagaccccgctccgacaccctcgggggctgggctatagtttgcgctacccacttgagccgaatcatctctggcagtacccttcggggctgggcagtggcttgcgtttcccacccgagccgagtcatccccggcaacatcctcgggggctgggcaagtgccaacaccatccttgaggaccaagttctccgcagtagccgcctctaacgcagagggtccctcaattacttccatgggagcaagacgatacaagtcacgttcttgaccctcaagaccgcgctctaaagtcgacgaagcgtgggacgcttgccaggacgataccaaccctgcgtcgagcacatcagcacaaacgtncatcacaccatc

SEQ ID NO: 14922 - DNA, 426 bp, Zea mays
tgcacaatctacaagaattctcatgtctcacattcctgccatttgttcttaattggtcctccattgactttcaattggtatctttgagactacatttaatatcatttacatgtcttctccaatatttgattagactatatttcataacttatacttctcatgttgctataaatgcatatattgttgactcatattttgttacctatgcataagggaagttagtctattcaaatcatgtcttgcacctctatttctcacatgctttttcctaagtagaagatctctgtcagggggagtatttgttcgtctctaaagggggagaaaattctttctaaaggagaacactcatttatggggagtaacacattagtgcttcaactggtattaattgacaaaacctttatgaggtcagtcttatttgcttct

SEQ ID NO: 14923 - DNA, 446 bp, Zea mays
  unsure (1)..(446): unsure at all n locations
catgcaagcctcgaggatcctgccacaccaaaggtttcgagattttttaatcnattaaaagactttgaacagccgctgcgtgaacacacagatgtgagtctactcgcttttgtggcctggctcatggccattaagtccaagtactttttctcgaacaactacaatgagattttaaagttattcagggatgtgctgtcaaagcccaataagttgtctaaatacatgtaccattcaaagacaattatcaaaggtcccaatatgtattatgaaaagatttatgtgcgcaaaaataattgtatgattttcacaaaggagcatgcggaagagaaaaaatgtctgaaacgtggacactctaaattcgtggaaattgttaatgatgagggtgacaacgtgatgacagatgttgcacataagcagcttcgctacttctcactaactactcgagt

SEQ ID NO: 14924 - DNA, 367 bp, Zea mays
  unsure (1)..(367): unsure at all n locations
atccncacatgcgctaagcggcgatgccacagtcagcccatgctagtcttaacaattaagcatgcatctagaccggcctcctattntgcaaaatcaactaagtaaagtttgtcgtctaatacacctttaaaagctagtgaaccatcacttcttctaaagacagacacatctacatttgtgaatagacaattatatcccatattgcataattgactaacagataacaaattatatccaagagactcaactaaaaacacattagatatagagtgctcatttgatattgcaattttgcctaagcctttcaccttgccttgattcccatcaccgaatataattgaatcttgggaatccttgttcttgacgt

SEQ ID NO: 14925 - DNA, 439 bp, Zea mays
  unsure (1)..(439): unsure at all n locations
agcttaaagccatggtaagtatcttatgttcttaatatgcgaatcgactcaagcctagctacgggtgcatacgttttaccgaaatccaaaccttcgacttgggaatatccctcggccacaagtcgtgctttgttccttgtcaccacaccatgctcatcttgcttgttgcggaagacccatttggttcctacaacattttggttacgacgcggaactaaatgccatacctcattcctagtgaagctgttgagctcctcttgcatcgccaccacccaatccgaatcttgaagtgcttcctccaccctgtgtggctcaatagaggaaacaaaacagtaatgctcacagaaatgtgcaacccgagatcgagtacttacccctttatgaatgatcncgacgatggtgtcgaccgcgtgatctctttgtattgcatggtggactc

SEQ ID NO: 14926 - DNA, 382 bp, Zea mays
  unsure (1)..(382): unsure at all n locations
ngaagccatggtaagtagcatacgccaatattatactatttgactcaagcctagctacgggtgcataggtttcaccgaaatccaaaccttcgacttgtgaatatcccttggccacaagtcgatctttgttccttgtcaccacaccatgctcgtcttgcttgttgcggaacacccacttggttcctacaacattttgattaggacgtggaaccaaatgccatacctcgttcctagtgaagatgttgagctcctcttgcatcgccaccactcaatctaaatcttgtagtgcgttctctaccctatgtggctcaatagaggaaacacaagagtaatgctcacagaaatgtgcaacacgagatctagtggttactgaaagggaaat

SEQ ID NO: 14927 - DNA, 431 bp, Zea mays
  unsure (1)..(431): unsure at all n locations
agcttctaaagggagaacacgtgataggtctaaccaatgttcatttcgaaaaagatagaccttgtgcagcttgtcaagcaggtaaacaagtgggaggagcacatcacagcaagaatgtgatgaccacgtcaagacctctggagctgctacatatggacctcttcggacccgtcgcctatctgagcataggaggaagtaagtatggtctagttattgttgatgacttttcccgcttcacttgggtgttctttttgcaggataagtctgaaacccaagggaccctcaagcgcttcctaaggagagctcaaaatgagtttgagctcaaggtgaagaagataaggagcgacaacgggtccgaattcaagaatcttcaagtggaggagttccttgaggaggangggatcaagcacgagttcttcgcttcctacaca

SEQ ID NO: 14928 - DNA, 298 bp, Zea mays
  unsure (1)..(298): unsure at all n locations
nttctttttgttgaacaatgaagagatcgaaataatgctatatagaacaatttggtatataatatgaggagaaatatttgccttgctggcaacaccacaaataattaattattggtataagttctctctcaaaactatttgaaagtcgcctatagggaataggcggaatctgaaatttacaaacttaagcacacactacaagccggggttagcgttagaattaaattcgagtccgaaagagagggaaaacaaatcaacaaagaaataaagcagttgaacaccgtgatttgttttaccg

SEQ ID NO: 14929 - DNA, 413 bp, Zea mays
  unsure (1)..(413): unsure at all n locations
ntgccagatcagttctgatgtgtggntgttttctgcatatgtcagagaacaggcgtagaggaggaaggcgtgctcagcaggagcgagccgctccgcaggatgaggtgccccagcagcagcacctgccgcccccgcccccgatgtcgattgagcagatgtttctgatgcagactcaggcagttcaagccatcggtcagactctggccgccattcagcagcagcagcagcagcaacagcagcaagcaccaccccagcctcagatgcctcagatgcctagagacaagcgtgctgaattcatgagaggtcatccaccaacgttcgctcactcttcttgacccatggatgctgaagattggctgcgcacttgtggagcggagttgcataccgctcagtgcgatgaccgggagaaagtc

SEQ ID NO: 14930 - DNA, 459 bp, Zea mays
  unsure (1)..(459): unsure at all n locations
tcttcaccatgtgatccggntatcttgttaaggttgttcaatgcacttccctttaagttgtgtcaagcccatttttagcctctcattttcttctttgagctcttgatatgtatcatttttcgttcctgcaaattctagctcaaaggaagatttgcttgtcgacggacaacaagcattagcacatggtaatgtagtttcaatttaaatacatgtgcatgagtgaggttgttgggaatttaagttttctatcacaacctcatgagtaatatctaagatgatatgatcatccataagattttcatgagaacatagaagcatatcatatttttcttgaaaagctagaatttcatcttttagcttttctacttggtccttaagcaaggcattcctatntactaattgagcgatacaagcgttatctcgctcaattganatagtttcatacctcttgactaaatc

SEQ ID NO: 14931 - DNA, 456 bp, Zea mays
  unsure (1)..(456): unsure at all n locations
agcttagagatatggtgggcattaaggcttgnatttgaaggatgtatcgcagaacactctaaactgaaggaggttgcacacttcacaagttgttattttgcagaagaacataatgtatttgctcgaaagaagtggtaccatgatgatgaatgagagatgcctctgcgtagtgatatttcgatctttcaaacaaatggcaaagtcattggtcgtcccaaggtatatcacctcactatggaagaacagaagtctgctttactctacatgttcacgaatatgactgaggtggagaaacacttcgtgtaagactttatttccttaaattgttcatatgtgaattagtttatgtcctcaaatatctcatgtcctacaataatatttgagagcgagtttgatgaacacaacatgagatgactcggtatgccaacagcgagagaccaagacacattgtgatgt

SEQ ID NO: 14932 - DNA, 442 bp, Zea mays
  unsure (1)..(442): unsure at all n locations
tcatggccagaaatgacttgagaatcagttttcaggattgtccttcttattcccattgcccttaacttccgaagccccaacaggagtgcttcgtattcagcaatattatttgtacaactaaagtcaagcttggttgcgtaacatgttctgactttcgaaggtgctactangacagcagtcgctcctacaccgaaggttccccaagaaccatcacagaacattgtccaagcttcggcgtctttatttatttcttcttcctgagcccctggcatccagtcagcgatgaagtcagctaacgcctgggactgaattgaagatctatgcaaatagtcaatagcgaattcgttaagctctgcagcccattttccaatccttcacgtagcttctctgttcctcattatgtccttcaaaggctgtgacgaaggaacaattatgtggtatg

SEQ ID NO: 14933 - DNA, 415 bp, Zea mays
  unsure (1)..(415): unsure at all n locations
tggccactgtgccagggactatcgacagtcatgacgtgtccaggccaacgtcncacaggcggaggcggatgacgaggctctgctcctagcacatgcaagcatctagctatatccagcggcaccggccgcagcagcactccaccttgatgagtcgaaagcacgcgctttcctcggcgacggctccaacatagacatgatcgaaggatggtgcctcgacaccggcgccactcatcacatgaccggccgacgggagttcttcaacgagcttgactctagcgtccgaggcttcgtcgagtttggggacgcctccggcgtaaagatcaagggcgccggctcagtcgtctttactggcgcatctggtgagcacaaactgctcaccggagtctactaccttcccgcgttgaagaactctatc

SEQ ID NO: 14934 - DNA, 217 bp, Zea mays
tgtctacggagaacacttgattagtacgactaacttgcatcttagcaaagattatactggtgcaccttgattactacgtcaagagggcggatgaatccctcccttccaaaaccggagcaccagatacaaaccactgtctgcgctgcatatgaaccaatatcgacctgtattctagtatggcatcagagcgaatcagggctgcgtatgcaatgtgtat

SEQ ID NO: 14935 - DNA, 432 bp, Zea mays
  unsure (1)..(432): unsure at all n locations
cagcttgtgagcagtacagatacagaagggagaaggctgcttcngccgatcagcccaaacccatgcttttatgccaagatatcgcagagcacaaggtgctgctgggatctcaattgtctgaggaacaagagaaaaccctgataaggtttctgttcaacaacaaagatgtatttgcatggtcggctaatgatctctgtggcgtcaacagggatgttattgaacactcgctcaatgttgatccatccttcagacccanaaagcagaggcttcggaagatgtctgatgacaaggccgaaggtgctcgaaatgaagtaaaaagactcctcagcgctggagtcatcagagaagtgaagtatccagaatggctggccaacactgttatggtaaaaaaggctaatggcaaatggaggatgtgcattgattntactgatc

SEQ ID NO: 14936 - DNA, 344 bp, Zea mays
cttctcaaaatggaagttactgaataattatttaagatcagcaatgagtcaagaaaggttgaatggtttgacgcctttatgatcgagaataagctattgaatgatatcgatatcaatagtataatcgatgattttgtatcaaaaaatgttagaagaaattttataagatgagaagtgacaagtaaatttttattatttcagccaatgttattttataaacaataatgtgtaatattctctattacagtaacttatacacagtttctttactgatatgtatttagtagatgtgtagatgatatatgcatatatatctagttatatggggcctctataccaatttt

SEQ ID NO: 14937 - DNA, 438 bp, Zea mays
agcttaaccttgtaacgaggataagctatctttttttttagtggatggtccttaagcgctcttgaaatccttaagggaaaatgcttaaaatatttgtaacatgctttctgtagtgcataaactgtcatgagcatcacacttatcctatgacacaatgcacttcacattccatatgatttagatatgttctcattaacctaattatgtgcaaatggcattttacgccaaaccatgtgttctctctccatgcacatatttagggggagcaatctatgttgtatagaactatgatcatgcttaattgacatatctcttgatcatatctatttcattttggtacaaatgcatatatcctattatttccgtaccatgactacgactaatatgtctccaagtatattactatgataagtcctagattgaaagggaaatggagtc

SEQ ID NO: 14938 - DNA, 412 bp, Zea mays
  unsure (1)..(412): unsure at all n locations
aagatntccagcatgcctgtcagtgttgtatattctatttgttaggatgccaatcctatgcactgcagatacagggaagcttgaggtcccatggtcactggcatcgaaatcatgaggaatgaactcctgcagcgatgcaatcttgctcacagcctctgatttgttgcagaacactatacttttgcagccaacacagtcgttcacattgaagattgtgtgtgttatcttgaccagcatggtgggaggaacatttgctaagtgaccatagtcgaggaggtaagcagcaacctctctgaagcctgtctccccaacccgtacagaccttttcaggcccggctgtcccagagctctccccacaaaaccttttggattatttggagcaaatggttcctcatcagttggcttgacaatt

SEQ ID NO: 14939 - DNA, 305 bp, Zea mays
atctctccctcggggtggcgcacagcgcactgcgctttttctctttgggatccacatgggcaccgtcgtataaatacccatgtaaggaggattcacgcacaggggaaaggttgacttccaccggcgagaataccggtcggattctaacgaaccgtacgacattaccggccggggtgctcatccgaggattccactggttaaaggttaaggataaggcgctcgaagaattggcacacactttatgcgcgcaggtggattcccagtcgcagtcgattttaccgtgcagacccatcacctgcgcatac

SEQ ID NO: 14940 - DNA, 405 bp, Zea mays
  unsure (1)..(405): unsure at all n locations
tacttgtcaaagcaacaacatctgccagcactgtatctgcataccataccagtaacttggcctttcgcatgctggggattggatatgatcggacctttcaagaaagctcaagggggatacactcacgtattggtggcgatcgacaaattcactaaatggatagagtttaagcccattgcttctttaacctctgctaaggccgtggaattcatacaaggcataatattcagattcgggataccaaacagcatcataactgacttaggatccaacttcacaagttcagaattcttcgacttctgcgagcaaaagagcattcagatcaagtatgcatctgtggcacatccaagagccaactggcaggtggaacaagccaacgggatgatattggatgcactcangaaa

SEQ ID NO: 14941 - DNA, 460 bp, Zea mays
  unsure (1)..(460): unsure at all n locations
agcttgcttanaccatgaatgtgagaaattcatcatcttttgtgagcacagcaatcaatccctgtgaaactcaaaattatccctggcaaataaataatatgaataggacaatcacatacagttagcaaactagcaacttacagatatgggagaatctgaaccaagactacggtcccgaaaaaatgatgcagagtcttgagacgcaatagccaatattaaaggtttcggatgctctgtagatccgttattaagtggcggtaatgaagtccatacactgcccttcaagtatgagtattcaaacaatgatataacatataaaaactaaatatagaggtatgacactctgtaggtgcatatagtagcttcagacagacaattttgaactttactgtattagcgtatagtgtacatgattatgcaacttgcaaactatctctaaagagaaaaaacacacctgtgt

SEQ ID NO: 14942 - DNA, 451 bp, Zea mays
tgtgaagattcttcattccaacatgtgctagtcggcgatgcctgagctctcccatgttagtcttagcaattaagcaagtgtcgagttcagctctatcaaaatctactaagtatagctgaccctctaacactcccttaaatgctattgaatcatcacttcttctaaatacagtgacacctgtatccgtaaaaagacagttgtaacccattttacataattgtgaaactgaaagcaagttgtaatctaaagaatctacaagaaaaacatttgaaatggaatggtcaggtgatatatcaattttacccaatcctttgaccaaaccttgatttccatccccgaatgtgattgctctttggggatcttggtttttctcataggaggagaacatcttcttctccctgtcatgtggtttgtgcacccgctgtctatgatccaacttgagcccccggat

SEQ ID NO: 14943 - DNA, 425 bp, Zea mays
  unsure (1)..(425): unsure at all n locations
agctntgtgttttctggttaatataaatattgattgtttaacgctctaaagctatgatttaatttaatcctggtgcgtgaagagccacgcagtaggcttcagagccacaagcaacgcaactgtattgtttttcaaaaacgcgaatgaacgaaaaaaagatgaacagggagggagagaggaaaaagatgaacaggacaggacctcgtcgctaaaaccccagcgcagcggcgcgggagcagatgcaccttgcccttctcatctcccgcattcgcctcttgccgaccgccatgcccagcacccgttccgcctccgccttcaggctgctggtccgcgctgacaacagcccaggtgaagtgaaagcccgcttttctgcccctttcgtctncgcgtatctttcttccctttttagtgctcctttgctaagt

SEQ ID NO: 14944 - DNA, 438 bp, Zea mays
actaagctgtgatttaccaattgaaagagcacaatctctacttatgaatttcatgaagtagcttaaaagagattgcattagtaacacaagcaatagtttcctatttagcaacctctagtatatgaatgacaaagaaggttactaaaataaggaaacctcatgatatgaactaaattacccttacaagcatcatgcataacatcaattgaaaaaaagatgaaagtagcatgattatttaattaagtttatagggaaactctaattcataacatggtgagtgattaatggagaagactcaaaaccaatttaaacaagaatgaatacatcacatagtattggttcgatcttctttgaatgttgaatggcacactccatttgggaaacacattctcatgttgtgagactacataaacacttatatagaaacattagtctcac

SEQ ID NO: 14945 - DNA, 316 bp, Zea mays
  unsure (1)..(316): unsure at all n locations
tggacgactaaaatcttgctagttgaaatctggccagcccaattttgcctgatcgaaacttgggcgactgaaatctggctggttgaagtctggtcatcccaattttgccgcaccgaaacttgggcgactgatatctaactggttgaagtcttggtcagcccaattttgctcaatcgtaacttgggtggctgaaatcgggctggttgaagtctgttcggcccaattttgcgtgactaaagctnggacgactaaaatctaatatctagttacttatctganacaaacatatctctttctcttctcatttttgggattt

SEQ ID NO: 14946 - DNA, 376 bp, Zea mays
tgcacaactctcagaccgcgacagactatatcggcagccctatatcgaccgcaccagacttgggcgattcggctctggccgtgggacgagcgatcctccgagtcttcgcgcaccgactcgcgcgcgaatgatatctggcatggcgagaacctgcctgacgcatacaatggaactatctacttgtgacggtgacagactgctcggcgacgactagcatgcccaactgcgcgcgaggaccgaccgaaccacgacatatccgactgtgatcccttaaccgaagcgaacacatagacctcttctacttactcgagcgattctacagatctatcgcactgcctgggtgcgctatccctttttccaccgcagtactgtaaga

SEQ ID NO: 14947 - DNA, 389 bp, Zea mays
  unsure (1)..(389): unsure at all n locations
tcgcacatactgtttcgtatggatgcctcgaggactcaagaacgccagctcaaccttttctcgcctcaccaagaaagtccttgaaaaccaattaggccgcaacatcttcacttatgtagacgacattgccgttgcaagcaaaagcaaagaggaccacctaaccgacctcgtagagacattcgccaacatgcgtgatgcgagactccggctcaacccagagaagcgtgtcttcggggtacgtcagggcaaaatacttggctacttggtatcgcaccggaggattgaagccaacccaactaagatccaagcaattatggacatggcacctncgtagtccaccaaggacatccatcgactcataggaagattgactggcctgaacagattca

SEQ ID NO: 14948 - DNA, 388 bp, Zea mays
  unsure (1)..(388): unsure at all n locations
tcggggcagcagcaaagatcttttggccgcagcgttttgggcagaggcgccaggggcttcngnggaaggtttggagatcagccaagaaaaatttgctgcctattctgtggcgaagacaagggccataccaccaggatgtgccacgtcaccatccagaagcagaaggagatagcagaagcagcagcgcaacaaagtcagccgaagcaggtcatgcatactgcttcgtatcattcgccttatatttcagaatatgtaggcaaccaccctgcagcttctgttgcttcggcaagccaaccccaagcatcttggcagcagccttcaccgccaccaccaacacaaagaggtcagcagccagaagggagtcaacgcactaaccttcagcgggact

SEQ ID NO: 14949 - DNA, 371 bp, Zea mays
gttgttgctcggcagcaagctactctcgtcttttctcacacctctctttgtcctctcgattccactttttaagattatccaaccaccttttgtctttctctgatatttctgtgtcaatccactgctcaaaatcacatagtggtggaggagtctacaaaacacgcaattattagtatgcagaacaacattaaccattaaattgttagcatattataagactattctcaccattaaattcatccgacgttgaacaatagttggttcaaatgcaaagttagcacacatccaatacctctgtcgataagtctcatgatcctcagacttatcaaccttacaaggatcaccacaaacacacatatgcactcggacac

SEQ ID NO: 14950 - DNA, 410 bp, Zea mays
tactagtagtggatccttaggccaaacttttacttcactagttaagtacttttcctgaatctagatttgcctaatctagagcattcacttgtcctacactagcttcattttaacagctttagtttcacttgttatctacgatgagggtcgaagatccagtcttcatatccgagaagttcggcgatccgaatcgattaatacccagctggggatctccaaccacacgacatatgtagcacttaacccttgcatatgtcaactcgccaccgggtttctcaagaccagaacgggttcacgcgacccgagagcacagtactccaccgtccagccgttggccttgttggtacacgttactctcgccatggtgcccgccatgtttccgagagtacagcaccccaccttccagtctc

SEQ ID NO: 14951 - DNA, 416 bp, Zea mays
  unsure (1)..(416): unsure at all n locations
agctagctactacattgggtgcttcctcttgctaatgtttaacactgcatttcttactaaagtttatctcctacgaaaccaaacaggaaaactaaaagtgatgtgctaaagttttgcgttcattaacactctagctccaccaaaaatactaaaccgtgctaaaaatagtttccaacctcacttttagatataataagtttaacacttatatctaaacggctctcaagtgctaaagtttagcagcactatagaaacaaataggatagtgaatcaaatactatcactaattaatgaaccatcgctgtaaattaaccaccatgtagtgtatctgttctaaaatgtactcaatagagaacagatggcatatgattcactaatntaatgtatagcgcacataaataagtagcttagttata

SEQ ID NO: 14952 - DNA, 341 bp, Zea mays
tggtagccaagctcttgggtctcgacggattggcctcttctgaatgacgatggagatcaagacagcgagttcaccaagagacttgttcgattccgagaggtccaagccgcagaggctactgcgacagttattcaaacaggagtctggtgtagatactgagatgcctcagtcaaaagaactgccacgagagcaatttagtgtccaaaagaattctaccagttcagagaagggcatcgtcgccacttcatgtactaccagagcgattcaagaggtggatgtcgagtctgaagctgaagctacggtcctctacacacttgaagaaactgatcctacaccatggg

SEQ ID NO: 14953 - DNA, 427 bp, Zea mays
agctatagtcgatttaggggtcaagctatttgaatctacaagttgtgtaggtgtaaattcaagtgtaaaacacacaagggccagaaacaccaaaacaagcacatgataattttttttaggttttactagtgaaccactaggttgtttggagaagggggcctttttatgggcaaaacaggcaacaattttttattggcaaagagggttgaacaattacaataccacctagctagcaagacaagagaaccacatagcatgaactaacaagacttaccaatctgacacgaggtaaggcatttctaacatagcagtacatcacattattcacaagtttttattattggaataaaggtgagagaagcatgttggtgcataagagacaattataatgcgacaatcgtgatgcatgctcattctagtcgtcttc

SEQ ID NO: 14954 - DNA, 464 bp, Zea mays
  unsure (1)..(464): unsure at all n locations
taagttcctaaggcggactccaatggtgcccctcggctcctccccctgacaaaatggagggcgcggacgcgcccagtcgttccaacgacgccccctcgcctgccctctcgcggggtgagagaagattttcctcatatggatccactaatcaacgataataattgtggaattaaccattttcgggtttaattagtagatcacaatatgtattatggtactataaatatggtagtattatttaaaactccaaaaacggatgtaaaaaggtcagatagctcagttaaagggtagaggggagctgaatagggggaatggttggagagaaaataaaataagggaaagaatagttgagggggtatntaaatatgaatagtgagatttaagaggaggaatggttggagacagcctaatagcgacatgtatatatccacgttgtaaatcatatgtaaatggaagtgtctccg

SEQ ID NO: 14955 - DNA, 405 bp, Zea mays
  unsure (1)..(405): unsure at all n locations
tctaaagggggaacacattntatgactaatcaatgttctatttgagaaagacatgatntgtagcgcatgccaagccgggaagcaagttggaacccaacatccacacaagaacatcatgacgaccgacaggccgcttgagctactccacatggatctattcggcccgattgcttacataagcatcagcgggagtaagtattgtcttgtaatagtggatgattattctcgcttcacttgggtattctttttgcaggaaaaatctcaaacccaagagatcttaaaaggattcttgagacgggctcaaaatgagttcggcttaaggatcaagaaaattagaagcgacaatgggacggagttcaagaactctcatattgaaggctttcttaaggaggagggcatcaagca

SEQ ID NO: 14956 - DNA, 436 bp, Zea mays
gacctatgaaactacgcttgaacgactagcggaacaaaataagaatggctattggatctaaacacacacattgattacgcactgagtcatcaggttgccgtgcccaagtatccttctgcatgtgcacgaaatggcatgccatgatttgctcctttcccatagccgacttatatgggaccttaatcattgacgtaacccactgtttattgtatactagacccattcttttgagggcacatacacaccttcaccatctctgtaccatactttctgcactctcggtctacattcatttttactgatatcaagttgagctgctacaaagtactgccctctaattgatgtcaatgcaattgaacaagatctgagtgtgcgatttatctaacattggacttgacacaggtggatcccaacacatgagcgtgctactgccgac

SEQ ID NO: 14957 - DNA, 435 bp, Zea mays
  unsure (1)..(435): unsure at all n locations
agctnntaaactagatctcacttgacatatttatcttaaagtcaatttattgtattttctcagtgttggtaattttagttattagtgtcggtcattctataaatactcgattattccatcttttagtctcaatcatttatgagaattactaagagagaatttattttagtggaccagtcattttacaaaaaaatagaaattacattaaagaaagtgaacagactcagtcattcttgaataatcagtgttggtcatttgtttttaattgctgtatgaaataaaaaaaataaggcaacacaatgttaaaaagtagaaaacttcgtccttgaagtgttatctcttcgaggtaacagctcaaggacaaaggcagaatatgatcgaacggtatatataaagcatgacgaagtaagatatgagaacttatcttatgtgact

SEQ ID NO: 14958 - DNA, 467 bp, Zea mays
tgtgaagattcttcatcccaacgtgggctagtcggtgatgccagagccaacccatgttagtcttagcaattaagcaagtgtcgagttcagctctattaaaatcaactaagtatagctgaccctctaacactcccttaaatgctactgaatcatcacttcttctaaagatagtaacacctatatccataaaaagacaattgtagcccattttgcataattgagaaactgaaagcaagttatagtctaaagaatctacaagaaaaacattggaaatagaatggtcaggtgatatagcaattttaccaagtcctttgaccaaaccttgatttccatccccgaatgtgatagctcgttggggatcatggtttttctcataggaggagaacatccttttctcccctttcatgtggtttgtgcacccgctatcaattatccaacttgagccccccgatgcataaacctacaac

SEQ ID NO: 14959 - DNA, 402 bp, Zea mays
  unsure (1)..(402): unsure at all n locations
tggggatggttcgggacgccccgcagtacggtccctaagttcctcaaaactcctgggccttccgtcaataatcgaggtggttaggggtgggcactttnttaccataaaccgaaaatcgatccgaaccgtcccgaaccgaaccgaaatctcggttttttcggtagttcggttcgatttcggtttttatatctcagaagttcggttatctgtatcgtaatcggttttcaccgtataccaaaccgaaataccaaaaaaaccgaataccatactgtatcaattctaaaatttgacttttcgattatgtgaactaaatgtgtgaagtaattaaattgttatgcacttatttttatgtgatgtatgatatatctctcaatatatgtacctatataatttctacttttt

SEQ ID NO: 14960 - DNA, 256 bp, Zea mays
ggacgaccacgtaccacaaacgcatcgcaaaacaaacatccggcgacaacacagccgcggaaaaaccaaagacacggcaaaaacaacgccaacctcgaagaaagcaggagcgaccccaccccaaagccacaatcaaccaacacaaagcgccggcgcaaaccacggagacctcaacacccccaacaatcccatccgaaaaatccttcaacgccacgcccccaccccccactaggcaccacagcctaaaacgccaccc

SEQ ID NO: 14961 - DNA, 390 bp, Zea mays
  unsure (1)..(390): unsure at all n locations
agcttctgacttgtgggcccgcctgggtgtccggtgtatatcggacatctactgttccttgtccggtgtgccggagtgggcgcgcctgccatctgcgcgcgccgagcgcgcattaaatgcgcggcaaagagccgctggcgcggaggtagccgttgctccggagttgcaccggacagtccggtgcacaccggacagtccggtgaattatagcggactacccggtggagtttcccgaagctggcgagttcctgaggctgacctnccttggcgcaccggacagtccggtgaattatagcggagtcgcctctggaaattcccgaaggtggcgagtttgagtctgagtccccctggtgcaccggacatgtctggtggcacacccgacagtccggt

SEQ ID NO: 14962 - DNA, 462 bp, Zea mays
  unsure (1)..(462): unsure at all n locations
tcggatctcttgcntgcaactcttgcaacatgaccagaaataacttgagagtcggntttaaggactgcccttcttattcccattgcctttaactttcgaagtcccaaaagtaaagcttcatattgagcaatattatttatacagctgaaatcaagccttgttgcatagcatgttctgactttggaaggtgcaactaggatagcagccactcctacaccgaaggttccccaagaaccgtcgtagaacactgtccaagcttcgacatctttatttacttcttcttcctaagcccctggcgtctagtcagcgatgaagtctgctaatgcctgggactgaatngaggatctatgcacatagtcaatactgaattcgttaagctccgtagcccacttttcaattcttccagtagcttctctggtcctcataatatccttcagaggctatgatgaagggaacaatatg

SEQ ID NO: 14963 - DNA, 437 bp, Zea mays
  unsure (1)..(437): unsure at all n locations
agcttgttataaacacatatatgatatgcttatcttatctatctatagagggatcgggaggaaaaaactaaggacagtacacaatgtcattttacatgagggtgacgttctatcgatcaatacagtagtaaatctatacaaaatttgcatcacataaacagaccacatgaattcaaactcaaaccaccctttgcattaacacctagataaaaattataacagacacaattaacttacaatggtgaggctatgtcaaataggttcttctgcctctatactacacaaccgctcatcccatgatgcccgctctgttgtcttctttaagagccttgnagtctctctttaactctttctctttatcctggatttggcatcttgtaaatgtgacataacggaatctctcatggaataacttgacaattctatttcatgctttc

SEQ ID NO: 14964 - DNA, 138 bp, Zea mays
gttgggacagcatcccagagcatagacgaagtcaccggttctattttttcccggcagcacgcctcaaggagaaagacatgtattccctatgagatctatattcatatgtatatacgaagatgtattgcgacgtcgcat

SEQ ID NO: 14965 - DNA, 456 bp, Zea mays
  unsure (1)..(456): unsure at all n locations
agctcttcgcatcaggttctattccttggtcntntcacggcccacacgaagatattcatccttatgattgcttcgggggtaagttggtgaaggtagatttcaaatatcttcagcacctctacaacaaagctgcttaagggaaatcgtagtccagctttcaagaagcttcagaataccacgacttcattttcctcaggagttggacaagtcttctctccttcatcagctctcacaacggacaagtcccggaaatatctgcccctcatgttgacaagatgattttctttaatgcttgatttgccaaaaaccgcatggcttggtcgccatggtcgatcttcggagtcttcaccaccattatccacatcatagctgtcactgtcaccagtatcttcagataaacccctcaaaatntctttagtaatcttctctgtattagtcttcgacatagattgaaaa

SEQ ID NO: 14966 - DNA, 448 bp, Zea mays
  unsure (1)..(448): unsure at all n locations
ggacctataaaactcagcttcggaagggttctccgagctatactttctagatttatttgtatctgctngcaaattagcatgattttcccctttcaaaacattattccgaagatcgatgtcatgtccccttcttgtgccatatgcaacatgatgtatgatgcttatgctatgcgaaatgatgcgatgatgttatgttgtgtaagatggtgtttatttcgaagatacacacacattcctgcgataaaacacatagtctcagcgttgtcttataagcctcccttaggagcttcttcgctttttacttcagcggaatcagcgtttatttttcgctgtacgcctcccttaggagcttcttcgccttttactttcagcggtattcgcgttgacttttcgcgcttcgccttctacttatgcggtaccagcgttgactnttcgctgtatgctctgc

SEQ ID NO: 14967 - DNA, 446 bp, Zea mays
  unsure (1)..(446): unsure at all n locations
gctngtgtntacaagaaggaaagtgggttctctgntgtatttctgatcttgtatgtggatgacatattatngattgggaatgacattcctatgctggagtccatcaaggcttcactgaacaagagtttttctatgaaggacttaggggaagcagcatatattttgggcataacgatctatagagataggtcgaagaggcttataggattaagtcaagatacgtacattgacaaggttttgaaacggttcaacatggaacagtccaagaaaggattcatacctatgtcacatggtaaacaccttagccagatgcaatgtcctgcaacggctaatgagcaggagcgcatgagtaaggtaccatacgcctcagcaattggttcaatcatgtatgccatgataagtacatgcccagatgtttcatacgctataagtgctacgagtagata

SEQ ID NO: 14968 - DNA, 460 bp, Zea mays
  unsure (1)..(460): unsure at all n locations
tcattngctatagtaactaccttgctattcatttaaagtttgctggttcatgtgtctctaactgtcggttattactcatattttcagctggaatttctgcatgcaacaaactttcaatgagaggatgcaaagcaaaaggtttttattgttggattgcagaattatggagtgtttactgtagcgagttatgttttcaagtcgtccgattaatcgcaattagtcatgattaatcttccaagttggttcgagaaaatagcaattaatcgccaagtcgtccgactaatcgtgattaatcgcgattaatcgcccaagtcagttagccagaatgaccagcaagtcgtctgacttgaaaacattatagaggctatcaaggagttgacggaaaaggcaatgctagcagtaatagcacatccagtgcaaattaagggtcctcaaggtctcgtgccattcttcacatcat

SEQ ID NO: 14969 - DNA, 442 bp, Zea mays
  unsure (1)..(442): unsure at all n locations
agctnggccaagatctacgatgtcgctgttctcgagaaggaagaacagtagcgggatagtgtatcatcagtgggatgctggacaaccggagagctgatgatccctgtagatagccaggcatatgcaactccgttgtagattttagttttgataaaaggattacatgcctttaatgcaaagattagattcaacatgaaactgttgaactgtgtaaagtgagaaacaacttttgaacacaggagtccggagcttctattgtgaaggcgtggtataattgccatttttttctatagaattgtctgcgccacaatttttatttttcagttacgccatttgatctgatcgcatcaaactttacttatttcagtcgatgtcaggtcgaaccctgagaaggtttaatattgcaatatgactctgattagtgctcgatacctaattctca

SEQ ID NO: 14970 - DNA, 465 bp, Zea mays
tacctttagtcttatgtaactaagtgttataagacttttataaaggggagaaataattaacaaaaaggggaagtcataagaaaaacataagatgaagaaagttgataagtgcattccatgtcatgagcatcacatttattttatgacacactgcaccctatggatagtatgatataagttgtctatactttgacctaaatatgtgtttttggcatttgagtacaaaagtgttattttctgaaatgcacatatttagggggaggaaactatatcataggatttaaaatcttatttatcaaatcttatgtaagctttaaatgtgttgtcatcaatcaccaaaaagggggagattgaaagtgcattcatcccttttgtgagttttggtgatttggataacaacacatttaaaggtctaacgagtttgctaagtgttgaacaggaaattcagtatgatgaacatacttg

SEQ ID NO: 14971 - DNA, 418 bp, Zea mays
  unsure (1)..(418): unsure at all n locations
agcttacctntttggaggagatngaagatgtttctttctctttatctttatcagtgggagtttcctgcaagcgttaaataacaatgggtgagcggtacatacatgtatttaaaaggtcactaaaatcacatgatgttggctgttgatatgtccttttatatataaatatgcaatataagaaatactccttccgtcccaaaacatagttctttctagctcattttttccgtcaacattcatttaatgataatgaatatagacatatatgccaaatacattcatgtattacttgatgaatgcatcattagtctaaaatgaattatattttgggatgaagggagtatgtaataagatatgagtctcatttcttagtattggtcttgcagtattaataatgtatgttggttagtcagtgtat

SEQ ID NO: 14972 - DNA, 383 bp, Zea mays
  unsure (1)..(383): unsure at all n locations
tgaagccatggtaagtagcataggctaataatatacgaattgactcaagcctagctacaggtgcataggtttcaccaaaatccaaaccttcgacttgggagtatcctttggccacaagtcgggctttgttccttgtcaccacaccatgctcatcttgcttgttgcggaagacccacttggttcctacaacattttgattaggacgtggaactaaatgccatatctcattcctcgtgaaattgttgagctcctcttgcatcgccatcacccaatccgaaacttgaagtgctttctctaccctgtgtggctcaatagaggaaacanaagagtaatgctcacaaaaatgtgcaacacgagatctagtggttacccncttatgaatg

SEQ ID NO: 14973 - DNA, 427 bp, Zea mays
  unsure (1)..(427): unsure at all n locations
agcttctaaagggagaacacgtgatatgttttactaatgttcaattcgaaaaagatagaccttgtgcagcttgtcaagaaggtaaacaagtgggaggagcacatcacagcaagaatgtgatgaccacttcaagacccctggagctgctgcatatggacctcttcggacccgtcgcctatctgagcataggagggagtaagtatggtctagttattgttgatgacttttcccgcttcacttgggtgttctttttgcaggataagtctgaaacccaagggaccctcaagcgcttcctcaggagagctcanaatgagtttgagctcaaggtgaagaagataaggagcgacaacgggtccgagttcaagaaccttcaagtggacgagttccttgaggaggaacggatcaagcatgagttctccgctcctac

SEQ ID NO: 14974 - DNA, 432 bp, Zea mays
  unsure (1)..(432): unsure at all n locations
tacccatgacgaggcatgtgaccagntaataggtcctctatcagcaagcctacatcgagacggtccttaatcgactcagacggagacactacaccgagactctcttcccgtgcaagttactcgtccggtgtaaactttatcatttaaaactccaaagtttggtacctggtagaggtacatcttttccgatgttgaacccatcatggccatgatggatccaccatcaaattttatttttgaaaacatcccatcctttgtgaagcatcaccttttgttttaaaaacaaaacatttgtttttctaaagcaagactaagcatctggaaaccttttaataaaaagggtaatcaagaaatgctaaacaattccaaggaaggaaatgcagccagttggttaacacttcaactctatcaccaaatgcatcgttcaagtga

SEQ ID NO: 14975 - DNA, 265 bp, Zea mays
tataaaagatgagacatcaacttctattattcatcgtccgaagaattgaagagctccacgcttgttgtgatctcgctagtctatcgaagacaatgcgttaccttgagaggcatattgccgttcccaccgcgttatcgactcattgagatagccttgttgttaacggtggccaatgtaacaatggaaagggccttctcagctatgaagattattaagactgagttgcgctcctagatgtccgatggtcggctaaatgactcgatgg

SEQ ID NO: 14976 - DNA, 414 bp, Zea mays
tgggaaggttcttcatcctcacatgtgctaagcggcgatgccacagccagcccatgctagtcttagctattaagcatgcatctagaccggcctcttcttttgcaaaatcaactaaataaagtttgccgtctaatacacccttaaaagctagtgaaccatcacttcttctaaagacagacacatctacatttgtaaatagacagttatatcccatattgcataattgactcacagatagcagattatatccaagagactcaactaaaaacacattagatatggagtgctcattagaaattggcaatttacctaaaccttttaccttgccttgattcccatcaccgaatataattgaatcttgcgaatctttattcttgacgtaggaggtgaacatcttcttcttccccgtcatat

SEQ ID NO: 14977 - DNA, 413 bp, Zea mays
agcttcttggacttcaacaaattattttttcttcataccttgcggctctggtatggtcttcacaaacgtcgcccatgaaggatatataccatctgcaagataataacccattgtgtactcatgaccattgataatataattcacctttggagcttgcacttctgctagccttgcaaaaatcgaagatcgttgcaatacgttgatgtcattatgcgacccaggcattccaaagaaagcatgccaaatccaaagatctttagaagccactgcttctagtataattgtgggttcatgcacatgtccactatacataccttgcaatgcagaatgggcaattttccaccttcagtgcatgcagtctatggacccaagcatacctggaaaacctctactctattaactgcaagttatct

SEQ ID NO: 14978 - DNA, 448 bp, Zea mays
  unsure (1)..(448): unsure at all n locations
nganatgtgttntcctccatcattntntgatatgcaagtacacctaatcatacatctcgtggatcagataaaaatattagggccactatatttacatcatatgtttcagttggagcgatacctgngagtattaaaaggttatgtgcgaaatcgcgctcacccagagggttcaatcatggagggatacactacagaagaagtgattgagagctgtatagattacatcagtgacggaacaatgataggtgtgcctgtacctaaacatgagggtaaactatgtgggagagggagaatgggcaagaaaacttttcgcgttgaggattacaagctagtacattgtgcttatggtagtgtactacaacatctcacgatagccgagccttacatagaggaacacnctgatgagcttcgtaaagaaaatcagaaccgcacagaggactggatcatg

SEQ ID NO: 14979 - DNA, 445 bp, Zea mays
  unsure (1)..(445): unsure at all n locations
tctcttggacaaagtgtgcacttaccgctgagtgcgaagctaccacatataacaatagaggagcccctggcgttggtggagttagtgttgttaggtctatcaaatattgcttcagctcttcgaaggctctctgctggattggtccccattgaaaaacttcggctgacttcagcacttcgaaaaatggtaaatttctctctactgatctagatatgaatctgttgagagatgacagtcttcctatcaatctttgagcccccttctttgtacttggtggttccattcgaaggatagcttcgattttatttggattagcctcaatcccttttgttgaaactaggcagccaagaaatttccctttcttcactccgaagacacatttttctggattcaactntaaactggcctgtctaaaattagcgaaggtctcctgcagatcagcaat

SEQ ID NO: 14980 - DNA, 394 bp, Zea mays
  unsure (1)..(394): unsure at all n locations
aagtctattttggcctcccgcgacacatgtttcttgtcccgaacagcgatttcgtgccttccgttcgccacccatcatttgaccatagagactagtaaggctcgtttggcctcccgtgagctatagcacacgttttcatggccgagcgaccatttttatgttcgtgttcctccacacgtgtttttctccccggagcaccttaaagcggttcttggcctcccgcgagctatatcacacatttccgtggccaaacagccaattntatgtatccgacctgccaccttcgttttagaccggggaggccgttatggcatttttctgcccaccgcgagctatagcacaccgattctatggacacctagacccctaatcctatccctaaccttaacatcga

SEQ ID NO: 14981 - DNA, 361 bp, Zea mays
  unsure (1)..(361): unsure at all n locations
tactatggtttggagactcaaacttcattttactatggtttggacactattacctcttaggggcggcgtttaaggttagggtttanggattggatcttgcgtctaggttaccataaaaacatgtgctatagctcacttgtggcaaaaaatgtcgtaacggcctctccgatctaaaatgtaagtggcaggtcggatgaggccataatcaaccttagcagtctcagtgaccaaatcatgggtggtggacgggaggcatgaaatccatcgttgacgatgaatacatgtgtcacgggaggccaaatatagccttaccggcctccggcgaccaaaacgtgtgctataggttggacactacaattct

SEQ ID NO: 14982 - DNA, 250 bp, Zea mays
cagcgggaaactggccgccccgcacaagaatcgcacgcaacccttgcggccccggccgacacaacctcatgttcacacctaccacggattctgcactcacccgtactacaccaatcaagggtcccaccaagcgtcaagggcaccataactggcctaaaaaaatacgccccgccttgcccccatcgcagcacggcgacaccaataagcactctggcgcccggaagccactccaacggatgatgaacccgaa

SEQ ID NO: 14983 - DNA, 402 bp, Zea mays
agcttaaagccatggtaagtagcataggctagtaatatgctaattgactcaagcctagctacgggtgcatacgtttcaccgaaatccaaacctttgacttgtgaatagcccttggccacaagtccggctttgttccttgtcaccacaccatgctcatcttgcttgttgcggaataatacccatttggtacctacaaccatttggttaggacgtggaactaaatgtcatacctcattcctcgtgaagttgttgagctcctcttgcattgccaacacccaatccgaatctcttagtgcatcctccaccctgtatggctcaatagaggacacaaaagagtaatgttcacaaaaatgagcgactcgagattgagtggctacccccttatgaatatcaccgagaatg

SEQ ID NO: 14984 - DNA, 357 bp, Zea mays
  unsure (1)..(357): unsure at all n locations
acgtatatatntcgtattaattacaagatccaactctaacgagctatggttctagagttatcttggtcttgcaggcgggattgccataagactggtgtccacgctgaggtgagcggtactggtgctgagtcccgacgggagcgggagaaccaccatccagatgacgacgttccgcgcgctcagcccgcagcagggcgatctcagcacgagccctactcagctcgtctaatgcatggtccagctccgtgtttagcacgacggctaggttgactgtgctactcaacctaagattgccctcaccgacaggtgagacaatcacgcctcctgtgctgtcagatggacggcgggggtaatact

SEQ ID NO: 14985 - DNA, 454 bp, Zea mays
agcttgaccacaataccacagtatgatacttggtccgctccatgtacttagtttgacacataattaactacctgcgcgcacacataaatcggtgggattcctataggaaagtggcagcgtccttgttcatgcgatggaatgtgagatgatatacggcatgaacacgtaggttcgagaattgtcctgcaatacaagcctagcatttattatacacgtatatagctaacatgtacaacgatggccacctgaagataaatatctagcataatcacttactagttgagtgtaagaagtgatgacacctgaattgtgatcataatacttcatgtaactcataacataaaagccacagttggttgaccctgttctcattgttgggcaatttgatgacatatccattggagagttacacaattggggaatgatgcattgtggcaaacatggtgtaagcttt

SEQ ID NO: 14986 - DNA, 393 bp, Zea mays
ctggtcactaagtggtaagtccattttggttttccactgtattcttttaatgtcttagtgagaaattttcaagatttctagttgaacttattggggcgaggcttatctttcatttctttccctctatttcctttatgtttttaaagcgggtgtgaactaccagctgtcttaataaatctccaaaattctgtaaaaatatagtggcttttactggtcataattctctgtctaaatttggggcttaaaaggaatagttctctctaataaatatcaacatttggcggaagggtgtttgaactccactacatttaacagaggttatctctaaactattttgtggctttgatgttgactgatttgacaactttaccctaaatcttatatttactatat

SEQ ID NO: 14987 - DNA, 415 bp, Zea mays
agctctgagtaattgagatgtatatttctctattgaaagaacaagagggtttctgaagcaatatgaaagcctgatgctttcgttcttcgttttgtttaagatcactttcctcccttgttcttatgaaatgtgcaactctttaatcagggatggcaaccggtagtgaagcctcgaaggcagctgaggctgtggttgactggcataaacacgacagcaagaggatgctccatgcggtttaccgtgttggggatctggaccgcacaatcaagtatgctgctgtattgtaaatgacatttgcaacacctgcagctatgattatgctcttttatgtgacattatatgattctggtacgtactacacggaatgctctgggatgaaactgctgacgaaaacggatgttcctgatgagaagta

SEQ ID NO: 14988 - DNA, 454 bp, Zea mays
  unsure (1)..(454): unsure at all n locations
tctatcngattgtcccttcccttcgcatattgtgctatttttctggnctgaatcctgaccttccggtcaggcgatagcggcaccatacgttgcaccctttcttggaggcatcgctttaaggatcgtgcggccgacttgcttggtgatgtgtgttgtggcaaagtccgagctgctatgttgatgaggtgcaactttgctcggcaacgatgacgcccaatggactcttccgggtgttgttagttttgtttgtaggagttggtttgtggaccggtgtangaagtcagagctacttaacctcggtgcttagctcgacaacgatgatttgagccatgctatatggaccaccaatgaagtttggttcgaggggttttcgacgcgtgttcatgtctcaatccaaccgcccgcggtcgcttgggccctttgcactcgggcgtatgcttgctcctggtgctcg

SEQ ID NO: 14989 - DNA, 434 bp, Zea mays
  unsure (1)..(434): unsure at all n locations
agctatgggtcacctattgtaaaaattatattacttcatcttagngaaggtaatgcgtaagaatctttaggaaccttgtttcacttgttgtgaaaacatcattccttcactttttagcaaagttaacatgtatgattctctttgaaacttcggttcacttattgtgaaaaaagtgtatgctttctttttggggttttagatagtttagcagtaatctttgttgtaacaaaggttatctgtatctattattggtttctatttttgttgataattgagtatactcttgaaatactcgttgcctcttgcaccaaaggttttggtaataattcttatctatattntatgagaatttaagtagagtctgccatgtgacacatccactcagactgtgaagggtatctcgtgagtgaaaaaagagtgcagctcatgtatat

SEQ ID NO: 14990 - DNA, 431 bp, Zea mays
  unsure (1)..(431): unsure at all n locations
tctgagcaataagttggagtctgttatcaaagtgattacagcatcaaacaatttctacattaaagaataacaaaacgatgtgttagccaccatgctgtcaaaaaatctgcatgaaaactagaataagccacaacaaaattataaaatgcatgagctaaaaaaataagcagaaaacctaccttttgctgccacatggaactcagcagcacattttggcttgatgatagagatttactctttcctataaaggataacaagtgagttttgcaaattgattttcaagcccaaaaaggaaaaggcataagtcgagaagtacctccagaacctaataagaaaatagcatgcttgaattggttccgttgatcaaatagattataagcaagatgtcgttgntcagacaacacagtcaacagatgactcataaatgacat

SEQ ID NO: 14991 - DNA, 444 bp, Zea mays
  unsure (1)..(444): unsure at all n locations
agcttgaagcatatntggagctttatatatctaattctacaagggatttgtcctacgtcaacacatcaaattgatagagctataataggggaataactctgcttaagtgattgagccttggtgttgtacaaaaattagagtaaaatggacagaaagtttggctgttagtcaagataaaggactaaactgtgactgacagagagcactaaaggactttggaatagatttgtgcttaatccagtaagcaaatggccagggtttctatagtcgaattgtagctggattataggacaataaatttgttacaggtggattaacaagttgttatatagaaatcagagatctaggtcttacaaaacgatcagtcagatagatgaataagatcctgatggtacaatgtctgcagaaatatctcagtttcacgcccctcgcccgcagtgatct

SEQ ID NO: 14992 - DNA, 395 bp, Zea mays
tcgacttcatctatattatggatagcctttgaatccgttcaactcccttcagccctcctggcaacttcttgactcccgtgaacggcaatgggcccttgttccgaaggtattttcacgcataaatatgttggatgaagtattgcttcgaaggtattaagcatccctcgaccaatgattgcattgtatggatactccatatcaacaatgtcaaagacaacctgttcagttcttgtgttatggacatagccgaaggtgactgaccttgttatcttaccaagtgccataatctgtcttcctccaaagccacaaagagggtgtgttgcatcatgtatcttgtcttctagctcttgcatttgtctgaaatcctctgcaaagataatgtctgttgtgctcct

SEQ ID NO: 14993 - DNA, 371 bp, Zea mays
  unsure (1)..(371): unsure at all n locations
agcttgccccgaacgaccacttataatattatacttctntgcggacatggcggacagcggcggacttcactcaagacaccaggctacagcgcctcacactcaatggattatgagagagctgttgtgatggacccgtttatacgcctgggaaggtgtgcgacttccaaacaccaagcgaaattacctgaaggggtcgttcaccctctctcatatacgacgaagataacatactccgttgcggtgcgcacaccgtcatgtgttctagttccccattatgataactactgtccgcaggccaggttcatcgtgcataccttaatggacgtgctcgcacgagctaattgacaggtccgcctgttgtggatgaatct

SEQ ID NO: 14994 - DNA, 438 bp, Zea mays
  unsure (1)..(438): unsure at all n locations
tctacagggagagcacatcttaggatgaacaaatgtttattttgagaaagacaggatttgtagcgcatgccaggcggtgaagcaagttggagtccatcacccacacaagaacatcatgacgaccgacaggccgcttgagctactccacatggatctattcggcccgattgcttacataagcatcggcgggagtaagtattgtcttgttattgtggatgattattctcgcttcacttgggtattctttttacaggaaaaatctcaaacccaagagaccttacagggattcttgagacgagctcaaaatgagttcggcttaaggatcaagaaaataagaagcgacaacgggacggagttcaaaacttctaaattgaaggctctcttgaggagganggcatcaagcatgaattctcctctcctacacgccacaacaaatgg

SEQ ID NO: 14995 - DNA, 445 bp, Zea mays
agctattctggtgatcaagctttctgttattcttaataatatgctgaaaacaaatagttagccgtgtctctgaggaccttccgaagacgaacgccccccaacatctatgttaccgtgaaaggaaattgtacgcgatgggtgtactttacggcggcaagactttttttgccactttaccattgccattacgactgatttgatgacatagaactacaagtaaaaaggagatgtgatttcttcccatgttcgagagtcacatgcttccactgttgatactgttgaattaatgtgggcctggcccatacaaatattcaataatagtcaatgctagaggcccactctaatgctacggtgtactagttctttagtaccatactggaagttcaagggacaattcactcaacttaaataggtggaccgttggtgcatctattgagacgctgac

SEQ ID NO: 14996 - DNA, 461 bp, Zea mays
  unsure (1)..(461): unsure at all n locations
agctntagagtacccggngaatgttgctaccactttctctatgttctccttagaggtatcgcaatctgggatggaccccttaattaaatatcaagctcttgatgataatccaacactttttgtttgatctttcccacttcacattttctatgtttattgcattgtcttatgctcgtactatggtgcgctctctatgtgctcagcgggtttctcatattggagtgcataatattttcaatcggtgtgaacaccatttctatcttttctcaataaacatggtagttactaccatttaacggttctgtatgccccaactaacaaagaattaggacaacatttgcatctttacaaaataaaaagaaaattttctggaccatttgataataaattctagaaatataatacctacatgaattaaatanttcaacgtggtcatataataaccatgcatctaatacaaa

SEQ ID NO: 14997 - DNA, 393 bp, Zea mays
  unsure (1)..(393): unsure at all n locations
agctcgagcggagtccggcttcgntngttaccctcggaaactggtaatcagcatatccttcagcttctgccatgatgtgattgttcctggccgaagagacgagtactaagtttgtgcaacattcttgacagccatgacgaaagacttcgccatgactgcagtattgccaccatacgaagatattgttgcttcgtagctcatcagaaactgcttcggatctgagtgcccgtcgtacatggcgagttgaggtggcttgtaagacggaggccaaggtgtagcctgcagttctgctgacagacgagaagcatcatcaaaagcaaaatcttcatgatggaaatcctcataccagtcattctcgttgaagaagccctcttgatgaagctctctatgctg

SEQ ID NO: 14998 - DNA, 402 bp, Zea mays
  unsure (1)..(402): unsure at all n locations
tgtatttcatactccacttaatagcagtaaaagtgcatttattatttatccattntaagagaaattttttaaatgcacacttctcatttctggttntgctatgttttcgaattccggctttgcaatttaagtataatttgaatctgaagttttaaattttatacaacaaccataaataaaccccagcatgcaaaatgcaaaattatatttgattatttactttatttattatcctatttaagcaaggtcttttaaatatgcaattcatacacataaaaataagtattttaagaaggatagtttctagggtataaaatcctttatggagtacttatatatatttcaataaagggataaccacaatgatataggtatatttttgttaacttttttgaaaccaca

SEQ ID NO: 14999 - DNA, 358 bp, Zea mays
  unsure (1)..(358): unsure at all n locations
agcttggtgccgatgggagaaacaaaatcttgaaattctggcttgtcaaccgctngccgntgtcaactgttagttcgaacggtactcccaagcggcaaacaatgttttgccagaagaatttttgggcagtctttgatgttattgtggaaacagccctcgcctcgatccatttggtgaagtactcgaccgcgacgaaggcgaacttaaggttctcctgagcggtgggcacgggccggacaatatccaggccccaacgctggagaggccatgtatatgcgatcagcttttatactgcgaggggctgcctgaccgacgagacaacttctggcacgcttctcacgaccttgttacccgattg

SEQ ID NO: 15000 - DNA, 448 bp, Zea mays
  unsure (1)..(448): unsure at all n locations
gcttcgcacgcggcgccagcttaccgatcggccttgctcttggagcacagctggtggaagctgctggactgtgccgtgctcgaatttggacgcctctctctctctctcatgttgccatgctggacgcaagaaccgagcagcgggcaaatgaaggagcagntcgtcgtggagatgctcgctaggcccctcgagtgcggcggggtcaagccccgggagatcgcagcagcgtcaggaggacgccctcctcagctcaaggcagcacgccgcagtcgtcggctgcttctgatgtgagcattttccgtgcctgatctgaccgccagccgcaaagcgagcttcgctctgaactgaactccgctttgttgatctgtctggtagacaccggtggcgcagcaacctgacgcgaactctgtgcgagcgaagctcgagcttcgcaagaacaccaagctcg

SEQ ID NO: 15001 - DNA, 397 bp, Zea mays
attctggtattttggctttagcattcgctagtaagccttccgtcgtttgaagctcgaagtctttcttttcgatggcagctgattgctcttttatcttggtttctaagttctcaattataacttcgtgtcttttatcctctaaatcctgctgcatttttaaagccttgctcaaaagcatactctgtggacaaataaccttcgttaggaaatatttatgttattaaaaatagtaaaggttagacacaagttgtttaccttaaaattggaatagaacaaactgccgacaatgtgttgtcgtctgtagcggctgatgtctgcttctagcttcggaaaccgatactctttgatagagtaccgataaccttcgcaccggtttgatctcatatgcagcctaacc

SEQ ID NO: 15002 - DNA, 354 bp, Zea mays
  unsure (1)..(354): unsure at all n locations
agcttcttgagtggtagcttcgggcatctttgttttttttgctctagncgaagctgcttccccctgcaggaccttcggcgatgaagcatantcccaacagtagcccctttccggtgctagatcgtttctcgtaacgagcttggatcgcgaaaaaagtttcttaggcttccggaagccgaaagtccacaaaacaccttccctgagctcgttgtcagacacgatttagtttccgagcgcgtaacggtcccaccttgcagagctactatttggtctctgcggccaccgcgcagcgggtgtagcagctgttcccctggtgtaaaatcctggcgatcaccttttacctgcatactatat

SEQ ID NO: 15003 - DNA, 452 bp, Zea mays
ctatgttatggatcgcctttgaaactgtccaactccctttagcccttctggcaacttcttgacttccatggacaacaatgggcccttgctccaaagttatcttcatgtataagtacgcgggatgaagtattgcttcaaagccattaagcgtccctcgaccaatgattatgttgtatgggtactccatgtcaacaatgttaaaaacaacttgctcagttcttgtgttgtggacgtaaccgaaggtgactgacattgtgattttgccaagtgctacaatctgtctttctccaaagccacaaacatgaatcttgtcctctggttcttgcatctgtctgaaagcctttgcaaatacgatgtctgctgcactacctgtgtcaactagaacattgtggaccagaaatcccttgatgacacaagatattaccatagcatcggtgtgaggatagtctttg

SEQ ID NO: 15004 - DNA, 420 bp, Zea mays
  unsure (1)..(420): unsure at all n locations
agcttcagctccatctatgttatggattgttttttgtgttctgtctcacnnttcttccgcgccttcttggcagctttcctgactttcatgaatggcaatgggtccttggtcccaacgtatctttatgcaaagatatgctggatgaaaaattgcttccaaggcttgagagtacccccactaatgattgctttgaagggtattccatgttaacaatgtccaacaccacttgttcagtccttgtgttgttgataaatccgaagggtactgggattgtgatttttncgagtgctacaatctgcctttcttcgaagccacacaggggatgtgtggcatcatggatcttgtcttcgggctcttgcatctgcctgaagccttatcaaatagatatcagctgcactgctgtatcaaccaaacattatt

SEQ ID NO: 15005 - DNA, 435 bp, Zea mays
  unsure (1)..(435): unsure at all n locations
ntagtgattagagagagagatttgttgggttcattagttctcttgctcttggattgccncttttctttctcattcttcttgtgatcaaactcaattgtaaccaaggcaagagacaccaattgtgtggtggtccttgcgggaacttcatgttccgtttgattgagaagcgaagctcactcggtctaagtgaccgtttgagagagggaaagggttgaaagagacccggtctttgtgaccacctcaacggggagtaggtttgaaagaaccgaacctcggtaaaacaaatcatcgtgtctcgcactctatttgctcacgatttgtttgcaccctctctctcggactctgttatatttctaacgctaatccggcttgtagttgtgcttaagtntataaatttcagattcccctatttaccccctcttgcgacttcaaaac

SEQ ID NO: 15006 - DNA, 213 bp, Zea mays
gagacccaagcgaccgcagctgaagcttgtaagttctcatcccacatgtgctatttgttatgccacagccaacccatgctagtcttagctattaagcatgcgttgaaactcgccctttctttagttaaacgcagtagatagagtttgtacactaatacacccgttaaagctagagcaacttttcttattctaaagacagacatatctacgttt

SEQ ID NO: 15007 - DNA, 391 bp, Zea mays
aaagagattggaaaacattaagaaggagttcgacttacttgcgatttaaactcacccaatccctctcaatccatgtggattgagaactaaccgaacaagccctaacagagtcgaaagccttatgaaagtcaatttttagaacaatggtatgaattttccgcttgaaacaacagaataaaagatccatggcataagcataatttttccaatgcttctatctcgaacgaaactagtctgaacgcgcccaacaagagtacgagactggggataaggggctataatctatgagaaagaacttttgtcatagctttgatagggcaatcttacagggcaatagagcgaaagtccgcacgagacctggccgatatctttttggtaggagaacaacata

SEQ ID NO: 15008 - DNA, 444 bp, Zea mays
  unsure (1)..(444): unsure at all n locations
tgttgagagacaacacactttctatgtatctctntgttatccaagcatgctcgattgtcctctctntttgtgaggacaatcaatttgactggagtattgaccactactatagtataggtcactaaatgggattctctctttctaaagaaaagtgttggctttcaacaggtcaaaagctatcacaaagtccaagacttcatgtcctaactgattcctactaccatacccaaaatctctatgaaccacctcgaaaccggcatatcttctagatagaaaggacaaaaatcatgtgttccctcagtagaagtgtgatttgcttcccataagagtctccaccaatcctcttttgtttcattgttcgcacaacttttccgaaatatgatcaaatttaggaaaatcagtactaataattgaactagagagatcatagagacccttagagct

SEQ ID NO: 15009 - DNA, 365 bp, Zea mays
  unsure (1)..(365): unsure at all n locations
agcttgcaccccgttccaccctctgtgtgttttcttgtactgcccggaccacaagggctaccgctgctntgacctctcctctcgccgggtcctcatctctcgccatgtggtgtttgatgagtccgtatttncctactccaccaccacaccacactcctncgaccctgaccttgacctcttcactctcctttcgactgacgcggtggtcgagccacctatccttcctctctctgcaggtactcgctcaccacctgtcggtcctactctcggcctaatgccttgcccgggtccgttggtgtcgcctacggtggtgtcgcctctctgcgggtcccatctctgatcgcccncaggtcgagcaggggtgg

SEQ ID NO: 15010 - DNA, 405 bp, Zea mays
  unsure (1)..(405): unsure at all n locations
ntattccagtgtacccaggaccacgaagaatacctnctttcgtatgtccgaaggtntctgcgtctgagggcacaggcgccaacagtgcccaatgaaattgtcattgaggccatgattaagggacttcggccgggaccttcagcgcaatattttgccaggaagccaccacaaactttggagaagctgcttcataagatggacgcgtatattcgagctgacaatgacttccgccaaagaagggaggaggcattcaggttctctgaaatgaccaggggcttcggaggaagatttcatccgaggcacgtcaggtcaattcataactccactgagaatgatgatagagggagccaacagcaaaggccacaatactcttcgcaagcttcggggcagcagcaaagctctgtt

SEQ ID NO: 15011 - DNA, 386 bp, Zea mays
agcttgtgaagggtcttcattttcacattgtgctaagcggcgatgccacagccagcccatgctagttttagcaattaagcatgcatctagaccagccttctcttttgcaaaatcaactaaataaagtttgccgtctaatacacccttaaaagctaatgaaccatcacttcttctaaagacaaacacatctacattagtgaatagacaattatatcccatattgcataattgactaacagataacaaattatatccaagagactcaactaaaaacacattagaaatagagtgctcggatgaaatagcaatcttccctaaccctttcaccttgccttggttcccatcaccgaatattattgaatcttggggatccttgttcttgacgt

SEQ ID NO: 15012 - DNA, 417 bp, Zea mays
ggagaagtcgatagaccaaaggaaaaagccatatgttttgttgcatccaccatcaactttgcaagcacagaaatagagatcaagctagaaaatctttcatcggctcgcacattatcaataaaaaagttaagctcacgatgaagatccttcatttgtgttgaatcaaaatcatcagggtatgacttagccaactctaccaaactctcaactttgaaagcctcaaaagaattcttggggttgaaagcagcaatctgagtaagcaactgagagtttacctcattgaaacgatcattaaactctgtaagctataagtcaataattgggttcaagcaatcatatctataatgctggtagtttgtgcggttagtctttttcttggcttatggcgatcaatatagtcatcatccatatccaact

SEQ ID NO: 15013 - DNA, 368 bp, Zea mays
  unsure (1)..(368): unsure at all n locations
agctttgacaaaacaaaaactctattcttctattttcaaaatctctcaagtggtagctgatccatttatcactttggcctttattttctccccctttggcatcaagcaccaaaacgggatcaatcttggccttttaacctcattgtctcaccaaagtcttcaattaagagcaaatggcaataagatttcatgagatgaacttggaactagttaccctctcatcggagtgcagcggaagtctttcatggtccaagcccaccttttccctttcaatccttcttcgagactaaattatcaaactcaagcacatggttagtctcaaagggtcaagttgtaacacatctctccntacacatgtgcatcacttt

SEQ ID NO: 15014 - DNA, 280 bp, Zea mays
tgacactgtataacactccatctacgttctctgctagatcagctcgcctcgtatcgaactttatatggatcgaccgtggctgagtaatgcgtgctatacaatcgctggacggacagactggcattaatggcggcgatgggcggaaaggagtggttcttctactttccgatggaccatcagatccggaacggagaccggacaatccgggtgactgcgttcgagtactgaaatgctactgcctcttaacgaatgatcctacgcgataacaaccgctccatct

SEQ ID NO: 15015 - DNA, 392 bp, Zea mays
  unsure (1)..(392): unsure at all n locations
agcttatctcaacctgagaggaaagctatcnctttggggtgangcgccagcttaagctttgctagtgtgttattcatatgcttcctgcagtattatatgtgttgcatcatatggactagtgcttccgttgctatgaactaattggcatctattgtgttcattctgaaataaatagtcatgtggttaatggtgctttaagattgttttcaattagtgtcttactttgaattggtatcttaatgatgaatagtggtacgttgatatgtctgtgatatacccactaaattgaatggtgtttaactctgattatatagcggtaggttgatatgtctgtgatatacccactaaattgaatggtgtttaactctgattatgtgcatttgtgtgttata

SEQ ID NO: 15016 - DNA, 461 bp, Zea mays
tgtgaagattcttcatcccaacatgagcaagtcggcgatgccatagctagcctatattggtcttagtaattaagtaagtgtctagttcagcattgttatcattaaactcaactaaatatagctgaccttctaacactccctgaaaagctactgaatcatcacctcttctaaagaccgtaacaccaacatcagtaaaaagacaattgtaacccatttttcataattgagaaacagaaagcaagttgtaatctaaagaatctacaagaaaacattgaaaatggaatggtcaggagatatagcaattttacccaaacctttgaccaaaacttgatttccatccccgaatgtgattgctctttagggttcatcatttttctcatatgaggggaacatccttttctcccctgtcatgtggttggtgcacccgctatcaattatccaacttgacccgcaggatgcat

SEQ ID NO: 15017 - DNA, 442 bp, Zea mays
  unsure (1)..(442): unsure at all n locations
agctattccttgtcgncatcaatcttgatttataaccactctgatttccagcctgctgcccacttgcttcggtagctaattacagggaactttgtagttntccgatacgccaagttatagcaaccaaaattatcgtgcaatccatcttttctagcctttgtttgataatgcagctcgtgaacccgacagaagctgtccgcaaatggttccactgcttggcttcggagtgcccagatataaacaataagcctaacgatagcgttaggggtcagctgatgaaaatagataccgaacctcttcagcacctctccaatgatcccatgtagggggaatcttaatccagcctttaaaaagctcttgaaataacaatttcatctttctccgttttgggtagtctcttcttccccgaagcgcaaaagctcttctgattttagtgaaaagc

SEQ ID NO: 15018 - DNA, 458 bp, Zea mays
  unsure (1)..(458): unsure at all n locations
tagtgcccgaanatgagggaaaaacactgttccgtgcttaaattacatacatgttcaggcctcgacaaccacgatgaacaaagacactggcattcagagtgccattacaaacggaactctggttccccctctgcaggtacgaacaaccccactccatgggggaaggcctgcggagcaacagaagaccgacgagcggctcgccgccgcccgttctgactacgacgacaacgacccccgctccggatggtcgagctgcagcagcgcaggcctcagggtgggcgctgctgcaatcttgccctcgcccacaccgacgctcgaggggcgaggacaagtgcgaagagccggaggccaaaagcgcggatggtggcggtgatcccgtcggtgacggggacttctcgagccgccttcgcctcggcaccgacggcagggcccaccggctccccggcagatccccactc

SEQ ID NO: 15019 - DNA, 386 bp, Zea mays
  unsure (1)..(386): unsure at all n locations
agcttgngaatggctcgccatatcaacttatactgcacgntgatcgcccacatatnttggtatgtacggagagtaccacgaagcactatgtaaaacctgccttggctgattctgtcgcgcttctgcttcggcaatctctttttgcttctgaatggtgacctggcatgttcttgtagtgtggcccttgtcttcaccacaaaataagcaatagagttttctgggttgatccccatatctacctncgaagccctgtcgcctctgccccttggagctggtggcctgaaggagctttgctgctgccctaaagactgtgagctgtgctggggcctctgaaactggcttctctatcatcactctgactggagctgtggggtgatctgacatgc

SEQ ID NO: 15020 - DNA, 431 bp, Zea mays
tgtgagcagtacaagcatataatggagaatgctgcttcttcggatcagccgaaacccatgcttttatgcgaagatatcgcagagcagaaggtgctgctgggatctcaattgtctgaggaacaagagaaaaccttgataagattcttgttcaacaacaaagatgtctttgcatggtcaactaatgatctttgcggagttaacatggatgttattgaacattcgctcaatgttgatccatccttcagacccagaaatcaaaggcttcggaagatgtctgatgacaaggccgaaggtgctcagaatgaagtgaaaagacttctcagtgccggagttatcagagaagtaaaatacccagaatggctggctaacactgttatggtaaacaaggtcaatggtaaatggaggatgtgtatcgattttactgatctcaa

SEQ ID NO: 15021 - DNA, 370 bp, Zea mays
  unsure (1)..(370): unsure at all n locations
cacatctaactagtgaggacttgtacgtagcacttagtattcaaagagcaatgatgcgaggaatgtcttgtttgccagggggacattcaatgaaccaatacatcggcaacgcctgcggatatggttaacttgcacaacaaatcctgtaaaatcgtcagttaaaaagacacgaggttccgtttaatagtggacattagatcagccatgtatgaccaaaatcttaatagatcctgatgcttggcacgcacaagtaaaaaaagtgacaccggaataatagtcctaanatccaatcgtgcgaccaggcagaagagagctcncgaacgatcttgatcagtacccgccatcgttcgaccctcttgcccacatgatc

SEQ ID NO: 15022 - DNA, 246 bp, Zea mays
  unsure (1)..(246): unsure at all n locations
atgggttagttattggtgatgagttttcccgcttcacttgggtgttctttttgcacgataagtctgaaacccaagggaccctcaaacgctttctcaggagagctcaaaatgagtttgagctcaaagtgaaaaagataagaagcgacaacgggtccgaattcaagaaccttaagtggaggagttccttgaagaagagggatcaagcacgagttcttcgccccctacacaccacagcanaatggtgtg

SEQ ID NO: 15023 - DNA, 434 bp, Zea mays
tgcagctttataaatggacgtgaagaatgctctttcttattggatccatcaaagagggctatgttgagccatcttccggctttgaagataatgagtaccctaaccatgtctataaactctctaagcgcttttgggctaagcaaccccagagcatggttgaatgcctaaaaattccttaatgctaatggctttaaagtccgaaaagccgatcctactctctctactaaaacaattgcaaatgatttgtttgtatgccaaaattatgttgatgatattatatttgggtctactaacaaatctacttgtgaatagtttagtacgaatatgattcaaaaactcgagatgtctatgatggcggagttgaagtactttttatgatttcaagtgaagcaacttcaagagggcatcttcatcagccaaatgaagtacattca

SEQ ID NO: 15024 - DNA, 432 bp, Zea mays
  unsure (1)..(432): unsure at all n locations
tcttcaaccctaanaggctcaatagaagatacaaaggagttatgctctctattaattagtagcacacgatctagtggttaatcccttgttgatgtcacctaggatcatgtccaccggatggtctctttgaatggtggtgcagactcgggttggaggtgcttgtggaatgtcttcttcttcccaattttcttcatgcgctgcaccttaatcaatgccatcatcttgaggtacctattcctcatcttgagtaggggttgggccattattgaagaagacagttgatctagttcttgcgctccctgtggtcgcacatctctaatcgccatattccttagcgcgaccgttggaacctcatcctcatctatatcagtaagatcaactttctctcttggagagccattagtctcatcaaataccacatcactagtgact

SEQ ID NO: 15025 - DNA, 399 bp, Zea mays
  unsure (1)..(399): unsure at all n locations
tgcggcatgcagcttcggagcacgagttgccaccctcttatactattattgctctgtggccctctcttctatcgcccttttttcaattccggcaggctcttatctagcgggctctgaaggcctagctttggttttagttcgaattattgtagcatcgacttctacttgttctcgttcacattccggttgcgccttaaaagcttcggcnatttttctggcacgagcacgattcaaggtttttgttggttctaatacaacatctagcacatttaccatctccttgtcttacgagtctgggcgaactcttttgtgtattcagccctgttgcttctgttgacggcttaaaatccctcgcatctttgttacttntttaattctcgacctttcagccttatcttt

SEQ ID NO: 15026 - DNA, 314 bp, Zea mays
tacaacatagccggccggattgctgtctgtaaaatatgcttttaagttgtgtggcacccggcgggtcgcataagacactcgtaacttgccgccactttcaccattcaactttaattctatgactgacatcctcatcgatgtctcccttcttctgaagcattgatcctaagtaacgaaaaagtgttttcttgggtaccaacttgcccattaagactaacattggcatacttataccccatggcacttgaaacacacctcatatacatctgtttagacctacatagcctaaaacctttgcttcaacgtctgcttca

SEQ ID NO: 15027 - DNA, 409 bp, Zea mays
  unsure (1)..(409): unsure at all n locations
agcttgctaccttgaaccttacgaactcttttctgttttttttcggagttttgaaagtgaccaacatgtagatgtgtccgagtgggtattctccttcagttggcacaatgccgaagaaaggagtgtctgactcatggagctctttgagtgcgactcccaagccttggagtgtctgggggaacgtgacgttgatgttgctttccccgtccactaacaccttttttaccctgctctctcggatcaccggatcgacgaggagcgggtatttgctcgggcaatcaaagttgagccactgatccgcccgagtgaaggtgatcgggtgttcggaccatcgatatggngcaggaggaccggtggccaccaccagtatctgacggtccgtgagcttctgctgcctcttgctttcttg

SEQ ID NO: 15028 - DNA, 248 bp, Zea mays
taaccggtctgtgatgaaaagcaagggatacattatgctctataaagcaataaaaatgttttgcgaatcatcactttaagccctcgactcctaaccctggctactgttcgacttttaggaagagctataccaaaatcctggttgaattcatggacattgtgttttttaaaacaacaactcttggccacaagatatgtcaaaccaaagaattccttaacacgagcatgagaagtctggatgaacacagt

SEQ ID NO: 15029 - DNA, 444 bp, Zea mays
  unsure (1)..(444): unsure at all n locations
tatcctttgcactcctcatgtctttacttttatatcttgccngataaaggcctttcgatttctctaattttggtgcttaatgccaaagggggagaaattaataaggccaaaggaaaaggaccgcaccaccaccctgttttctaaaaactttttccaaatttgaatcattngcaaaaaccctcttaacaactaaggggcacgggagcttttatttagccaaaggaaaagcatttgaaaaaggggagaaattaataaggccaaagcaaaaggaccgtaccaccaccatgttntctaaaaactttttccaaatttgaatcatttgcaaaaaccctcttaatagctaaggggcagggggagcttntatttaacccaaggaaaagcttttgaanaacgacgagaatctctcataactttgaaatgctttagaaatcatattcttatacc

SEQ ID NO: 15030 - DNA, 465 bp, Zea mays
  unsure (1)..(465): unsure at all n locations
tgcttggatgtatgaacattggaggggattgatggccttattattcaacccccttgctggcgagactgtgttctctgaacaactctctaaatattaaatgtagagagctctccgagtgttctaaacaaccctctagatattaaatttaaaacatgaataaaaaatgtatctgtaatagttgtctaaatagactcgctaaatataattaattgttatgtgaccctatttgctctctaatttgccaaccacatcctctaatcaactctataaatattatatttaagaagtgaatgagaaatgtttctctaatagttgtgtaaaaagactcgctaaagttagtcaattattatgtaatcttatctgctctctagataagaacattgtgtgcgccgattntttccctttaccgtggtcggcctcttccgcgccaaccagatactactcaagagtcttgctgttacacac

SEQ ID NO: 15031 - DNA, 405 bp, Zea mays
  unsure (1)..(405): unsure at all n locations
ctcgtaccgcgatctctaagtcacctgcggcatgcaagcttcctactatgcacgaaccgttggttgtatcgtctgagcgcctggttgtatcgcgcatttcggattgcttcttgccacctgtgtttgtcgatgaagtccacatcttcacgtcgtagctgttcttgcgcagactcatcaaaagactggacccgtggggagcccataatgattttcggaggaaggcaagcttcagcctcgtataccagaaagaacgaggtctccccggtggctcggctgggcgtggtccagttcccccacaacacggatgggagcttactgacccaattcgcgccatgcttttttaagcagtcataggtgtgcgtcttgagcccnctgagaatctctgcatttgccctctccacctgt

SEQ ID NO: 15032 - DNA, 443 bp, Zea mays
  unsure (1)..(443): unsure at all n locations
ngaagccatggtaagtagcataggctaataatatgcgtatggactcaagcctagctacgggtgcataggtttcaccaaaatccaaaccttcgacttgtgaataccccttggccacgagtcgagctttgttccttgtcaccacaccatgctcgtcttgtttgttgcggaagacccacttggttcctacaacattttgattggaacgtggaactaaatgccatacctcgttcctagtgaagttgttgagctcctcttgcatcgccaccacccaatccgaatcttggagtgcttcctctaccctgtgtggctcaatagaggaaacaaaagagtaatgctcacaaaaatgtgcaacacgagaccgagtagttacccncttatgaatatcgccgagaatggtgtcgacggggtgatctcgttggattgcttggtggactcttgggtgt

SEQ ID NO: 15033 - DNA, 365 bp, Zea mays
agcttgagaaggttcttcatcctcacatgtgtttatcggcgatgccacagccagcccatgctagtcttagcaattaagcatgcatctagaccggcctcctcttttgcaaaatcaactaaatagagtttgtcgtctaatacacccttaaaagctagtgaaccatcacttcttctaaagacagacacatctacatttgtgaatagacaattatatcccatattacataattgacttacggataacaaattatatccaagcgactcaactaagaatacattataaatagagtgctcatttgagattgcaatcttgcctaagcctttaaccttgccttgattcctgtcaccgaatatgattgaatcttg

SEQ ID NO: 15034 - DNA, 460 bp, Zea mays
  unsure (1)..(460): unsure at all n locations
tctaaagggagaacacgtgataggtttgactaacgtgcttttcgaaaaagatagaccttgtgcagcttgtcaagcaggtaaacaagtgggaggagcacatcacagcangaatgtgatgaccacttcaagacctctggagctgctgcatatggacctcttcggacccgtcgcctatctgagcataggaggaagtaagtatggtctagttattgttgatgacttttcccgcttcacttgggtgttcttnttgcaggataagtctgaaacccaagggaccctcaagcgcttcctcaggagagctcaaaatgagtntgagctcaaggtgaagaagataaggagcgacaacgggtccgaattcaagaatcttcaagtggaggagtttcttgaggaggaggggatcaagcacgagttctccgctccctacacaccttagcaaaatggtgtggtagagaggaagaac

SEQ ID NO: 15035 - DNA, 448 bp, Zea mays
  unsure (1)..(448): unsure at all n locations
agctnttcaccacgtcgttcctagccgtttgttaccgccgtagcccctcaaccggtgctcaccggaggaagctccacggtgaaagccacccgttccctgctccagtatctctgttctctccagtcgccagcacgtcgtgatcaaattgtgagccaccgcccncgaagtctataaattgagtgcaccatcagcttcgttatgtatttgagcatctagcgcacccttctgcacctcaaatcctccaccagaaagcttcaatttgagagttcccccaaaacactcaggaactccgcacagctagacctcgtcgtggtcagcccgattcaggtccaatctcgccctcgggttccttgtttcaacatccttgctcgctctttatgctcaccgaccccgttaattcgaactagaccaccccaatccgcgggaacgtgtgctcccatgctcggtt

SEQ ID NO: 15036 - DNA, 459 bp, Zea mays
  unsure (1)..(459): unsure at all n locations
tcggctgatctgccgaagcagccttctctctnttgtgtttgtattgttgacaagcttcggctccatctatgttatgtattgcctttgaatctgtccaacttccttcagcccttctagcagcttcttgacttccgtggacagcaatgggccctagttccgaaggtatcttcatgcataagtgttgggggccttcgtcctccgaaggtcctcaaaaacgtgatttaacaaaatcttccgagtgtgacatatgaacaggtaccttcggactcgggctaaaagcatgattgtgacgaaggtcaaagttgctccgaagctacgcgcacggagcttcggcttaacggcggaaaaaggaaccgacttaaaggggaaaaggctatctagtcctcataaatttgctattagcaatagaacatataagggcatgaatgtaattctcacacgctgtatcatgtgtctata

SEQ ID NO: 15037 - DNA, 393 bp, Zea mays
  unsure (1)..(393): unsure at all n locations
agctngagcaaggccacccacctacggatatcccgatgttcgtgtccgcgacctggttcttgcgcagcttccgctccaagtgcgcggcaatccatatggtcccgacgggaccctttttggccaaaatgaactgcgagtaaaacatctncggctcccctccttacgctgagaaggggcgaacccacaanaaaaaagtcaatctttttgcgaagacaatcgaagttagctggcagaagacacgtgtacacttgtaattagatcagatccgagtagaaatgccaaatagcgtaagctatggtttgggtgcacggtttcgcgcggcaggaagggaaaagaaagggcgggcataccttcaagggcatacctggagggtgctcgtcaccggagcggcac

SEQ ID NO: 15038 - DNA, 452 bp, Zea mays
gtggtgatcgggagaccatgttcttcgagttctgctatgtattaagaccctagccatatgtttggtgaagtcaaatgtcatatgacctacttatgtcctgttcacatgataatttgtctgtaatattattacttactctttattattatttgaagcattgtgctatgatgagtcatttatgtaatcgttgtgcacgtgagttctgatcctggcacgtacatggttcgcatccggtttgtcttctaaaaccgggtgtgacataagtggtatcaaagccttgctgactgtaggaccgctagcctagagtagcattggccgttttaatgacttattgactattacttcacctcatccttcatgctgcttcaaaatattagtcacatcgactaattatatgttgtgctcctatatatcacctttgccaaagtatttttattcagtatggtctatac

SEQ ID NO: 15039 - DNA, 422 bp, Zea mays
agcttcaagccttcgaactgtatccaagtatttctcaagtttcgggtctcttgctctacaactcttgtcaatatgaccagaaataacttgggaatcggttttgagaaccgcccttcttatccccattgcctttaatttccgaagccccaaaagaaaagcttcgtattcaacaatattatttgtgcagctgaaatcaagtttcactgcatagcatgttctgactttgaaaggtgcaactaaaacagcagctgcacctgccccaaaggttccccaggaaccgtcgcaaaacactgtccaagcttcagcatctttacttgcttcttcttcttgagcccctggcgtccagtcagcgatgaagtcggctaacgcctgggactggatcgaggatctatgcacataatcaatgctgaattcgtgagttc

SEQ ID NO: 15040 - DNA, 400 bp, Zea mays
  unsure (1)..(400): unsure at all n locations
tgtcttgggctcatcttcctttntcatccataattgatggtagcctgagtagcagtctagtaggctcatgagctctgaagcagctgtcgcgtctataagggagtctatcctaggtaaaggaaactcatccttcgggcatgccttgttgagatctatgaaatcaatacacattctccactttccattggccttttttaccattacaatattgactaaccattctggatatgtcacctctttgattactccagcacttaggagtcttttaacgtcatttcttgctccttcagatttggcatctgacatcttccaaagcttttgcttccttagtctgatggttggatctacattgagagaatatttgatgacatctctgttgacactacacatatcattggct

SEQ ID NO: 15041 - DNA, 406 bp, Zea mays
  unsure (1)..(406): unsure at all n locations
agctagcggcgccctcgagcgttttgttttattcgaagcaccaagtctcccacttggaagcctcgagccgaaccctctgggcgtggtagcgtcgcaaagaatgctgataccgcgccgagtgtactaaggctacgtnccgagcctcttccagctggtctaatgaatcctatcggctggtctagttgctttggtcgtcgtaagactttgtcctcggggaaccgtattccaagtctgcgggtaagatggcctcgcgcccatacactacgaaacaaagcgagaagctcggggacctgctcaccgttgtcctcacactccaaccaccgacggtagttctcttatacaccgttaccacacttgtcgacgtccgtgtagatactccatcttagtccttgaaaatcataccgtt

SEQ ID NO: 15042 - DNA, 364 bp, Zea mays
tcatgcaactgctgccagatatgagaggtgatctgcgttcctctgtctgacactatcttctttggcacaccatgaagacaaacgatccgagacatatacagttctgccaacactgcactgctgtagttggtcttgacaggtatgaagtgggctgacttggtcaagcggcccactactacccagatggaatcgtacccggctcgagtgcgaagcaatccgactatgaaatccataccaatttcatcccatttccactgaggggtctgcaacggttgcaacaatccagcaggtctctggtgctctgccttaattcttctacaactatcacacatagccacatgctctgcgatttccctttcattcc

SEQ ID NO: 15043 - DNA, 406 bp, Zea mays
gcttgaatggctgtgaatgtaggtgaactacaagatcggtggtgaccatcgggttattgacagtggatgcacacaacatatgacaggcaacccacggatgttcacctcattaaatgagaatgttgatggtcaagataaaatcacatttggagacaactcacaaggaaaagtacaaggacttggcaaagtggcaatctcaaatgacttatcaatatcaaatgttctcttagttgcacctttgagcttcaatttattatcagtgggacaactctgtgatcttggacttcaatgcttattcactccatcagaggttattgtaacaaaaatggatgatgaatcaatggtattcaagggttttagatacaacaacctctacttagtggatttcacttcagaagatgcagac

SEQ ID NO: 15044 - DNA, 413 bp, Zea mays
  unsure (1)..(413): unsure at all n locations
gtgtggagttgggagatgattcgatcactcgggtgtgtctacaatttaatgctacagctcttgtaagtagttggaaagtggaaaacttggattacttgaatgtggggtggttgggggnnccnnccccccccctctcttccatcccctcttccctcctccctctctactcccccccttcccctttctctcctccccttctcccctctcccccctcccccccctcttctntcttttccctcccactctcctctcccccctaccccacactctcatccccactcccatatccctactcttttcccttcccctcttccccccccactccccaaatcctctcactcctcccccctcccttcattccccctccctctccccccccaccgttctccctccccctcccatcccccttcccc

SEQ ID NO: 15045 - DNA, 407 bp, Zea mays
  unsure (1)..(407): unsure at all n locations
ctgcaacctatgaagaccttcattccaacatttctactttttgtgtgccagagccaacccatgttagtcttagcaattaagcaagtgtcgagttcagctctattaaaatctaccaagtatagctgaccctctaacactcccttaaacgctattgaatcatcacttcttctaaagacagggacacctacatcagtgaatagacagctgtagcccgttttgcataattgtgaaacagagagcacattgtaatctaaagaatctacaagaaaaacattggaaatagaatggtcaggagatatagcaatcttaccaagaccttngaccaaaccttgatttccatccccgaatgtgatagctcgttggggatcttggtttctctcgtaggaggagaacatcttctctctccc

SEQ ID NO: 15046 - DNA, 409 bp, Zea mays
  unsure (1)..(409): unsure at all n locations
gcttagaagcactcttcgttcttagtccccccgacatgatcttttctcacttggntaagcattaaaacgaggattangctccgataccaattgaaagttgcctaaagggggtgaataggcaagttaaaactttttcaacaaaaactagaagcaaactgggtaaaactgaattgatctcgaaattcacccagttaactttggaaatgagatgttctagttgatccacaaggttcaaagtagtagatctgagaagggcacttctcaaaatccacacaccaaaaagatataaacaaatcttccacgcacaggtgagagaacgaagaacacaaaccaacacaatgaacaagaacaccagagacacaagaattatcccgaaggtggtcacaccaccaaagtgccctacttcctc

SEQ ID NO: 15047 - DNA, 251 bp, Zea mays
atagactcttctgataggcctgagcttttctcggctgggattttttgttgtggaaataccaacagggtttcaagaactctctgctgtatttctggcataactgacggggggcctcttcaggcacacatttatggccaagtgtctgctgaaacctgtgtctcggtgaacgctgactttggaaagggacgcgtggttgggtatgttatggctttcttccaggtagactcgcatagagcacttctcagttccat

SEQ ID NO: 15048 - DNA, 408 bp, Zea mays
tgtgaagattcttcatcccaacatgtgcgggtcggcgatgccagagttatcccatgttagtcttagcaattaagcaagtgtcgagttcagctctattgaaatcaactaagtatagctgaccctccaacactcccttaaatgctattgaatcatcacttcttctaaagaccgtgacacctacatcagtaaatagacagttgtagcctattttgcataattgagatatggaaagcaaattgtaatctaatgaatcaacaagaaaaccattggaaatggaatggtcacgagatatagctattttacccaaacctttgaccaaaccttggtttccatccccgaatgtgatagctcgttggggatcttggtttttctcataagaggagaacattttctctctccctgtcatgt

SEQ ID NO: 15049 - DNA, 399 bp, Zea mays
  unsure (1)..(399): unsure at all n locations
ttaagncacctgaggcatgcaagcttcaagagcaaggcacgattgccttttatattctctaaccgctaacgctttcaagggtgggaaagctgatccaactcttttcactaagacttgtgatggtgacctatttgtatgccaaatttatgtcgatgacataatatttggttctactaaccaaaagtcttatgaagagtttagcagggtgatgacacaaaaattcgagatgtcgatgatggacgagttaaactacttccttgggttccaagtgaagcaactcaaggacgacaccttcatctcccaaatgaagtacacgcaagacttgatcaagcggtttgggatgaaggacgccaaacccgcaaagacaccaatgggaactcacggacacgtcgacctcac

SEQ ID NO: 15050 - DNA, 460 bp, Zea mays
  unsure (1)..(460): unsure at all n locations
tccattctcttattataagcttcgtcatctcgtatagaatttaccttggaggaaagatataatttcagttctccaatcttcactatgtactgcggaaattgcaagcactgctctctccataagttcaaccgaaggtgcttttattgtctcaaaaaatacttccgaaggtagcgggagcccctgtgccactgacttggctaacaaatcagcatgcgcattttcccctcttggaatattcttgacagaaaatccttcgaaagaagcttcgagccttcgaactgtgtccaaatatttttcaagcttcgggtctctagccttgctacttttgtcaatatgaccagagatgacttgagagtncagtttaaggatggcccttcttattcctattgcctttaacttncgaaagcccaacagaagtgcttcgtattctcaaatattatttgtacaactgaattcaact

SEQ ID NO: 15051 - DNA, 416 bp, Zea mays
  unsure (1)..(416): unsure at all n locations
agctngnagcttcatcttcatgtgtgtgtgtatcattcacgcatcattcccaaacaaagataaactttgtcaatccttttgttatctgaaacggtcttataaacaattgacaaatcaaatattttgaggactcatcaaaccaaatcagccaagcatcaaaccaaatcccgcctaaacacagtactccatgcgtgcctgagaaatccatggctacgttctcatgcacacattatctgaatttcggcacaatttcatgaaccatgcgtgcctgagaaatcctacccctagctagaacagagtagtgcacaatttcggcagaattgctcgactctgaattttcagcagaaaacatgtacccctaggcctgcaaacgggttgggtgtaagcgggtattttaatgagtttattttggtggg

SEQ ID NO: 15052 - DNA, 462 bp, Zea mays
  unsure (1)..(462): unsure at all n locations
tgtgccttanatcttattcttgtgtaagctttaattgtgttgccatcaatcaccaaaagtgggatattgaaagctctcttgtaggttttggggtttggatgacaacccaattaataaactaaaaggtgtgctaagtgttgaacaggtgcttaatgcaaagctaacagggttcaacacaagtgaacaataatgtgatggtccaaagactagataatggacatcacaagtaagatggatattgcttcagtgagactcgatgtgcgtaactcagagacaaccgatcaagccaaggatggaggcaagaagagcttctaggtaccgagtgcacgagagaaggtcaataagaccaagaacccaaagccaggggtgaagaagaagacttgcaaagtcaaggttgatcgagttaagaaaagttatggtgcatcaaggatcactacacaaggacatgacttataaccaatg

SEQ ID NO: 15053 - DNA, 400 bp, Zea mays
  unsure (1)..(400): unsure at all n locations
agctttaagtgggacatggactcttatattgtttacatncgtagcgaagaagcaaccacttgagctcttgaccctttacgaacaacacgccagacctgtctgaaatctccaccaagacaatggttttaccaccgaatggcatccgggtccacccattatatcgcgcatgctattgtccagtgcctccacagcttgtctcttactcatagaagcctcctcccagataatgagagatgctttccgnnacaactctgccgctccactctgcttcgtgaagctacatacagcgtcatcgccaatagtgagaggtatcttgaagcgtgaatgggcggctcttccttcacgcattatggaagcagcaacgccagatgtaactgttgccctgcaattttgccttgct

SEQ ID NO: 15054 - DNA, 460 bp, Zea mays
  unsure (1)..(460): unsure at all n locations
tcttcctatctcccggctgatagatatctctttgttattcatgagacagtacaaaaaatcttcttccccgctgccattaaacactattgccccctttgggtattttagtttttgggcataatgttgagcttctcgttcttcttccttagaaagtacctttcccaaagcatgacggatgatgtaatcaatgctctctttcaaagcttcgggagcaggagtggcaaccttttcaggcgaaatttgctctgtggttttttcttctattgctttttcttcaatttccgcaggatttatttcagcgggctctgaaggcccagctntggcaccagcttgaattactgcagtttcaatttcggtctgctctgtttcaacttcagtttgcgccttcgaggcttcggcaattttctttgaaggagtcaagttcaaagtctttactgtttctagcacatctagtacatta

SEQ ID NO: 15055 - DNA, 394 bp, Zea mays
  unsure (1)..(394): unsure at all n locations
agcttatgaagattcttcatcccaacatttgctantcggcggcgccagagccaacccatgttagtcttagcaattaagcatgtgtcgagttcagctctatcaaagtctactaagtatagctgaccctctaacacacccttaaatgctattgaatgatcacttcttctaaagacagtgacacctacatcagtgaatagacagttgtagcccatttgacataattgggaaacagaaagcaagttgtaatctaatgaatcaacaagaaaaacattagaaatggaatggtcaggtgaaatagcaattttaccaagtcctttgaccaaaccttgattttcatccccgaatgtgatagctcgttggagatctcntgttttctcatatgacgagaacattc

SEQ ID NO: 15056 - DNA, 460 bp, Zea mays
  unsure (1)..(460): unsure at all n locations
tctaaagggagaacacattntgggactaaccaatgtttattttgagaaagacagggtttgtagcgcatgtcaagcagggaagcaagttggtacccatcatccacacaagaacatcatgacgaccgacagaccgcttgaactactccacatggacttgttcggcccgattgcttacataagcatcggcgggagtaagtattgtcttgtaattgtggatgattattctcgcttcacttaggtgttctttttacaggaaaaatcacaaacccaagagactttaaagggattcttgaaacaagatcaaaatgagttcagattaaggatcaagcaaataagaaacgacaatgggacggagttcaagaactcacaagtagaaggctttcttgaggaggagggcatcaagcatgagttctcttctccctacacnacctcaacaaatggtgtagtagagagaaataat

SEQ ID NO: 15057 - DNA, 399 bp, Zea mays
agcttgccaatacctgtcaaattcacagtctatgccagcgcagcagctgcagaccataccagtaatttggcctttcgcatgctggggactggatatgattggacctttcaagaaagctcaaggagggtatacccatgtattggtggccattgacaaattcactaaatggatagagttccaccccattgctttcttaacctctgctaaagccgtggaattcatacaaagcataatattcagattcgggataccgaacagtatcattactgacttgggatccaacttcaccagctcagaattctttgacttctgcgagcaaaagagcattcagatcaagtacgcatccgtagcacatccaagagccaacgggcaggttgagcgagccaacggaatgatatt

SEQ ID NO: 15058 - DNA, 434 bp, Zea mays
  unsure (1)..(434): unsure at all n locations
tctacttccgaagctgcagcagccgaagctatagattttgaaaacacactcattgatattgatgaaatgattttgaatatggctgaggaagatactgctgcatctgctgaggaaaccccggccgcagtgcctgaaaaaggggagaagatgcctggaaaagagaaagagcctgccgaagatacttcagaagaagaaaaatttcatctttcaaaacataattgggcaagaattgtcaaaggctaaaaaagaagagctgaaggaatatgccatatcttgcggatactagccaggggcgctgctcttcggcggtgttgccgaagagagtttangatgccttcgggaccgagttggggcgaaagttgtcagcactttatcgaanagtgttggtttcccgaagctcgaaaccgatcttagcagataccgacgacaacaca

SEQ ID NO: 15059 - DNA, 446 bp, Zea mays
  unsure (1)..(446): unsure at all n locations
agcttatagngcactggcctgtctctcttatgtttatgccagcgaaattagcacagataccgaaggaggttcagtgccctatctgcttangtgagaatatcctttcttaatatgctttagtgtttttgttattacattgtcgctcactcattcttcagttttctcgcatgactgaagcattcaaataaagtagccatgtttctgtaatgaattntctgcattaactgtttgctagtataaactcatcttcctgttatttgtagcacgataatatggctgccttgtagcatatacgtgtcattttttatggatcaccccaaatgtaaatgtttgattagatgtggtcctttattgtcgtccttattttaatggaaacaattgctgtgtaattaagtttctcctacaattaaactaccagaagtcatgaacaattctttaaaattcta

SEQ ID NO: 15060 - DNA, 415 bp, Zea mays
  unsure (1)..(415): unsure at all n locations
ngaagccatggtaagtagcataggctaataatatgcgtattgactcaagcctagctacgggtgcataggtttcaccaaaatccaaaccttcgacttttgaataccccttggccacgagtcgagctttgttccttgtcaccacaccatgctcgtcttgtttgttgcggaagacccacttggttcctacaacattttggttaggacgtggaactaagtgtcatacctcgttccttgtgaaattgttgagctcctcttgcatcgccatcacccaatccgcatcttggagtgcttcctctaccctgtgtggctcaatagaggaaacaaaagagtaatgctcacaaaaatgtgcaacccgagaccgagtagttacccccttattaatgtcgccgaggatggtgtcgacggggtgatctcg

SEQ ID NO: 15061 - DNA, 348 bp, Zea mays
tgaaccgaggaccagccccaccggagcagtgagatcatgctcgccggagttcgtgaccccgccggagcacgtggaccgggtaatccactgaaccatttctcgattccttgcgcgcatagcctctacatcacccactggagctcctcgtgcactttgattgaaccctaccaccttgttttggccggagcaagtgccgcctacgacctccgccgcctgcgctcgtggccagagaagctccggccacctccgtcgccgacccgcacaccaacatgaacgtcgtgacctccccgacgtcaccgaccaccccagtggagctatactactcgcggtaagcctcgccgctgtgat

SEQ ID NO: 15062 - DNA, 412 bp, Zea mays
  unsure (1)..(412): unsure at all n locations
agctnntgtatctntacttgcttcttccttctgagcctctgttgtncagtcagcgatgaagtctgctagcgcctgcgactgaatcggagatctatgcacataatcaatgctgaactcgttgagttccgcagcccactttccaatccttccagtagcttctttgtttctcataatatccttcaaaggctgtgatgaaagaacaattatatggtatgcttgaaaataatgtcgaagcttcctggaggccattaagacagcatacaacaccttctccaattctgtatagtttttctttgataaactaagaaagacgaagtatactggagcctgctttttcaattgtccttcaagcttctcctggacaagcgccgcacttactgcagagtgcgaagctgccacatatagcagcaga

SEQ ID NO: 15063 - DNA, 468 bp, Zea mays
  unsure (1)..(468): unsure at all n locations
atttggtcccacgtagactggggaagggtcttcaaatgcttatccatgatcctagcaaatattcagataaaataatttccataagtgccataaggcggaacaatgtcttaagaagcaagaaagacaagctatggcatacttgcaacggtaaaattcacggtggtaaaaatggcatatgactaacagtagatgggtggatagattgatgtgaagtcataacatcaagaagcataacatgcgctagactggcaacagaagatgatcattgtagtacatacacatattactgtcaggtgcaaatgataatctaggagcacacatgaatcanatggaccttccataactggaccagatggaatgttgagccacgacaacatgttaactataaatcatgaacgatctgaataaaatgataacatagacatgtgatgggtctggtacataggtaagtgaaagttaagttacgtt

SEQ ID NO: 15064 - DNA, 265 bp, Zea mays
tccaaaacttcaaatcgggaacgttgacaccactctattcactaacagaattggcaaagacttaatttgttgcccaatctacgctgatgatattatttctggatccactaatgaattattttgtgaggagttcggaaaaacgatgtccaaagaatttgaaatgcctatgataggagaattgagcttctttcttggccttcacatcaaacaattgaaagatggatcttctataagtcaatccaaatatttgaaggacatgctcaac

SEQ ID NO: 15065 - DNA, 452 bp, Zea mays
  unsure (1)..(452): unsure at all n locations
ttatgaacgacacccttcggcatcacatacagacagctttatccgattctgtttcttnctgcacgaacttcagcgacgaagcatggtccgaacagtagccccttcgcggtgctaaggtcgttttcgtaacgagcttgatccgtgaaaaaagtctcttaggcttcaggaagccgaaggtccgaaaaacaccttccctgagctcgttgtcgagaaacgatacagcttccgagcgcgtagcggtcccaccatgcaggttcactattttggtctttgcggcccaccgcgcagcgggtgcgagcagatgttngcctggtgtaaaaatcctaacgattcaccttcttacctgcagcactatataaacagacaggtaggtgtgaagtaccacagcattcattgctatcgcactgtnttgatngccaaaaatttaaccatagccaaagcttaactctcgc

SEQ ID NO: 15066 - DNA, 325 bp, Zea mays
  unsure (1)..(325): unsure at all n locations
tatccttgaatgatactgaccagtggcataccgacttcagntacccgaaaccttgtctgctgtacataatgtgttccacgtgtcttaattgaagaagtgtcttccggttccagatcgaactattgaagtgacagatgttgtccttgaaccaaacttgacatattcagagcaccctattcgagtcttagatcaaaaggacaggattacccgaagaaaaactctctagttttataagatacagtggaaccaacattccgaagatgaggctacatgggaaactcaatactctttagataagatttcccaggctttttagcctcctata

SEQ ID NO: 15067 - DNA, 362 bp, Zea mays
  unsure (1)..(362): unsure at all n locations
tctncagggtttgtgggggtttcctggaaaatactgagtcgtatgttctggccgaagccccttgatcatggcctcaatgacaatttcattgggcactgtaagcgcttgtgctcttagacgcaggaacctttggacatacgcctgaagatactcctcatggtcttgcgtgaacttaaacaaagcctgggcagtgactggcttcgtttgaaagccttggaagctagtgattagcatgtccttgagcttcttccatgaagtgattgtccctggccggagagacgagtaccaagtctatgctacacttttgactgtcatgacaaaggattntgccatgactgcagtattgcccccatatgaagata

SEQ ID NO: 15068 - DNA, 262 bp, Zea mays
  unsure (1)..(262): unsure at all n locations
agctttagcttcctactaaactttagctatatgaattgaagngctaaagtttagctccttacgctgtttggactactctaataaagtttagcacattggaataaaaagacatccatgcctctaatgcggagagagagaatggggttggagtatagttgtccaaataggccgggcccaccaggcagcccgtggcccggcactgttttggcccgtaaccagcccggcacggcacggtgacacgcgggccttctctttcactccc

SEQ ID NO: 15069 - DNA, 454 bp, Zea mays
  unsure (1)..(454): unsure at all n locations
tatacaggagaatagaagcaagagctcgaccatatgttataatagaaggggagttatacaagcgtggggtctgttccccattgctcaagtgtttatccagatccgaaggtatagaattaatgaaggaaatacatgcaggcctgtgtggatctcacattggatctaggcccttgcttgggaaagttttttgccaaggattttatcggccaaaggcagcttcggatgcagcggatctggtccaaaagtgcgaaggttgtcagaaatgtgcaaaagatcaaaaacaaccttcgtctttaacccaattaatacaacccacttggccgttgcaaaggtggggcctcgatttactaggcccattaccaccagcacaggggaacctaagatatgtagtagtggcagtggaatatttttccaagtggaatgaggcanagcccttagccacaataacttcatt

SEQ ID NO: 15070 - DNA, 454 bp, Zea mays
agctatggctgtcttatgcggttagcaatttattttttaattcctaaatttaacttggtcaaaaagtctaagtgccatgtgtgtgttgaatcaaaacaaccccgcaagcctcacaaggctgctgaggcgaggagtttggcacctctagaacttgttcattctgatctgtgcgagatgaatggaattttgaccaaaggtggtaaaagatactttctcacttttatagatgactccactagattttgctatgtgtatctcttaaaaacaaaagatgaagcgttcaattattttaaggcctataaagctgaagttgagaaccaacttgagaggaaaataaaacggttaaggtctgatcgaggtggagaatatttctctaatgtgttcgatgagttctgcgtggaacatggtattattcatgagaggacaccgccattctcaccacaatccaatggga

SEQ ID NO: 15071 - DNA, 411 bp, Zea mays
gatcaataatgactgtggctactgcataggatgaagatgcctgcacaataacacaagacactatagaggaagtcagacttcacgccatagaccacatcaataaatatcaagccgatacaatcaaatggtgagacagaaaacggagattaaatatattaagctaggacatctggcgctcctaagagtagccaactcatacatagtggggaagctacaacttggtgggaaggtaccttcttgatagtgatcgtatcaagactccgttcatacaagctgtatgacatggatgggaatgatgctccaatatcttgcaatgcagatgagcttcagagatcttacatatcaactaaagtcactttctttctttcccctatggcgcccgtaccgaaatggacccggccattggctaat

SEQ ID NO: 15072 - DNA, 452 bp, Zea mays
agcttatcgtatcttgaatatctaagtttttcttatatttagtttcaaagggcaggtgggggtggggtttttggattacgtactgattcctttgggcagaaagtcggggaagcgagaacgtagaaaatcctcagtctcccacgtcgcctcttccactgaatggtggctccactgaaccttatacatgttgatcgaccttgcccgcgttgatctctccttttgatccaataccttgacggggtgctcttgataggataagtctggttctatctccaattctggttcaggtagcacttccgtgggtaagcggacacatttctgcagctaagatacgcggaacacatcatgaactgctgacatatggggtggcaacttcaattgatatgccacaggtccacaaatctctatgatctcatagggcccaatgtagcgaggagttaactcgcccttga

SEQ ID NO: 15073 - DNA, 435 bp, Zea mays
  unsure (1)..(435): unsure at all n locations
tgagaaagacctgaatacagttcgaaggcttgaagcttttttcaaagggttttctgtcaagaatattccatgaggagaaaatgagcacgctgatatgctagccaagtcagcggcacaggggctacccttaccttcggaagtattctttgagacaataagagcaccttcggtggaacttcttgaaagagcagtactcaatatatctcctgttcatagtgaagattggaggtctgagattatatcttttctccaaggcaactgcctttcagatgacgaagcttataaaaagagaatggaggcaagagcacgaccatatgtaataatagagggggagttatacaaacatggagtctgctcccactgctcagtgcctatcagagccganggttagaatgatgaaagaatacgtgcggattgttggatctacattgatct

SEQ ID NO: 15074 - DNA, 235 bp, Zea mays
tactgacctctaacactccttaaatctatcgaacacactcttcttagacgggacaccgatctgtaaaagacagttggaacccattttacatcattgcgaaactgaaagcacgtcgtaatctaaagcaatctacacaaaagacattggaaatggaatggtcacgtgatatagcaatttcacccaatcctttgaccaacacttgatttccatctccgaatgcgatacctcggtgggg

SEQ ID NO: 15075 - DNA, 483 bp, Zea mays
  unsure (1)..(483): unsure at all n locations
cggaccttagaatactaagcttgtaagggttagcacaataattgccaagtggctaatgtggagatcttgcacagtacgacaatcacaaagaattcaacacagagaagacacggtgatttatcccgtggttcggccaagtacaaaacttgcctactccacgttgtggcgtcccaacggacgagggttgcaatcaacccctctcaagtggtccaaagactcacttgaataccactgtgttttgccttgcttatctttatcccactcgcgaggaatctccacaaattggagtctctcgcccttacacttaagattcacaaagaagcacggagtaagggagggaagcaacacacacaaatccacagcgaaatgcgcacacacacggccaagaatcgagctcaaagactatctcanagttctcacaagaacggagctcgaatcacttagaatgacaatcngatgcgcanagactgagtgtggatgatc

SEQ ID NO: 15076 - DNA, 436 bp, Zea mays
  unsure (1)..(436): unsure at all n locations
gcttgtcaagcatattttggtacccattgtttgatttgttcatcatggctagccaacaaagatctaggaacccaaaagtcctttgcgttaacactaagtaaactcattacctttctagcacaagttgcaattttgggttgcctaattacaagagaattaattgacaagatggaagtgttaccaatgggacaatctttgcattgatgtcccttctttcggcatatgtagcataggcgatcttcgagccttgaagatttcttccttccttgtttcttgcttgctacatggttagtgaatattttcttttctaacattatgccttcttgttttaaatgaggacaagttctaaataagtgtcccttcttggagcatttaaaacaaactttatcatncttgttaataatcaagtccattttaatatagggacatgacctaa

SEQ ID NO: 15077 - DNA, 362 bp, Zea mays
gagaagagactaccctatatcgttacagattattatgtatcttcaagagctcattaaaggctggattaagaatccccctacatgggatcattggagaggtgctgaagaggttcggcatctattttcatcagctgacccctaacgctatcgttaggcttattgtttatatctgggcactccgaagccaagcagtggaaccatttgcggacagcttttgccgggttcacgagctgcattattaaacaaaggctataaaagatggattgcacgataattctggttgctataactctgcctatcggaaaactacaaagttccctgttattagctaccgaagcaagtgggcaacacgcttgaaatca

SEQ ID NO: 15078 - DNA, 435 bp, Zea mays
  unsure (1)..(435): unsure at all n locations
agcttctaaagggagaacatgttatatgtcttaccaacgttcatttccaaaaagatagaccttgtgcagcttgtcaagcacggaaacaggtgggaggagcgcatcacagcaagaatgtgatgaccacttcaagacccctggagctgctgcatatggacctcttcggacccgtcgcctatctaagcatagggggaagtaagtatggtctagttattgttgatgacttttnccgcttcacttgggtgttctttttgcaggataagtctgaaacccaagggaccctcaagcgcttcctcacgagggctcaaaatgagtttgagctcaaagtgaaaaagataaggagcgacaacgggtccgagttcaagaaccttcaagtggacgagttccttgaagaagaaaggatcaagcacgagttctccgctccctacacaccac

SEQ ID NO: 15079 - DNA, 431 bp, Zea mays
  unsure (1)..(431): unsure at all n locations
tcacgggctactggcggagctagccgaagcactggcttgcccggaagatggctggggtgggctggccacggtggccgaagctctggcggcaatggcgggcggaattaagctcgccggagctaaggggaagtggctggccggtgagggtgagtgcggcgcgaagtggggcgcgcttgggaaggctttatatgcgcggcgcggtgcacgggctgtcgtggaccggcgagtgcgcgcgggcgtgcacggngaaggcgcggtgcgcgaacgggcgtgaaccangggtgtcagccgcggtcgaacacgtgttcccgttgcctctgcccctgttcaagcgccgattgggagcaaatcttcgcgaatntgggcaagatcactgcaagggaattgttaccagaccaagctntgtcttttgtgtatggacgacgtgcggt

SEQ ID NO: 15080 - DNA, 299 bp, Zea mays
  unsure (1)..(299): unsure at all n locations
agctagaaagactgcttcngtttagatcttctaacgtgatgactcgttcggtccacggagtcgctttatccgaacgcaagttacttatcgcnnaangggaccagtgaggtatcccgtatccggaggcgtacgagtccctcggctcggtcagccttggctgcttacgtgtacctcgtcgtttccaggatccgctttccaaagtagtcaagaagcacggaagaaatcctgctaaaaagaggtcctttttcgaggaaaaaattcgacccaaaaaggggctccccccttttagcccccgaggg

SEQ ID NO: 15081 - DNA, 453 bp, Zea mays
  unsure (1)..(453): unsure at all n locations
tgtactcctgataacaggtggttcatgctcatagcctgttaacaagaagcagaagaaggaggcagagagaagggtacaacatgtangggtgcaaggacccttcatcaagtcaagatggtctcacatcccgattaccttctccgaagaggatcttcagctcaaggattaccctcataatgatactatggttatctcttgtgttatcaaaggatttctggtccacaatgttttggttgacacaggcagtgcagcggatattatatttgctaaggccttcagacagatgcaagagcccgaagataagatccatgacgccacacatcctctntgtggcttcggngaaggcagattgtagcacttggcaagatcacggtgccagtaaccttcagatttatcaacaacacaaggactgaacaanngtgtgttgatattatngacatggagtacccttac

SEQ ID NO: 15082 - DNA, 420 bp, Zea mays
  unsure (1)..(420): unsure at all n locations
taagcctggcagagcgagccgcatacaccgagccgcattgacggtactacgngttagcgaactacaccccggatcctcttattattcatctaagggcaccccattccacccttatggttgcactgttttcccgggcggtcatccatagaacaggttcttacggagaggcactctaaaaaccgctcgagcccccttaaaggccacaagtataacatcataataagaagagggaaaacagcgtatcatagataatctcatcatgttcattgattatagttaagcaatagcatatagctaaacaataataatccaacccaaatatgtaaacatcgacatggataacaaaagctagtcaatccttaggcataaatgtgtaaagctggatgtgaattaaataatgagttggacagagataggtct

SEQ ID NO: 15083 - DNA, 465 bp, Zea mays
  unsure (1)..(465): unsure at all n locations
atagaagtttctatcanatatatagatccagtcgatctttttctatcagtcaaagnggcttatttatgttgatacgtgcacttacctcgtatatcctagaagagtagaggtaaagttcctaaaatagtccttgcaaggatatgcaatccgtttgctaaatctttatgtgcatatacttccagaagaaggtgttttgtcttattgatacggttttgcaaggatcagggggagcacatttctaaagttagcccttgtagaagattcgatagaatctagatcccaaaggatcgaaatatgtcccgatgacagttgttgtactctttttcccttggtgagttttcttgaagtttctcacatgaggtttttaacgaggcaacaaagtgcaaatgcaagttgtatcaccatgcactctttcttcatatttttcccactgggtttttcggagttttaacgaggcatgtgttg

SEQ ID NO: 15084 - DNA, 468 bp, Zea mays
tgaatcatgggaagcgggctaggccgttgtacctagatgactatgtaatggaagatgaagcacgacacgaagatgatgtccaagttatgggaagcaggtcaatgtcagcatcatccaaggcttcctcatgtactgtgccaagttctggaacaactgccaaaagaaacaaagcaatattccaattgaagccccacccaattgcagctccaaagaagtcagttgcatctatggttcgacgtacacctcaagaggttgtagcagagagacatgcaaatggacctgctcaaactaccataagtgctaccatgaagcctaaggaagaaagaaattctgtttgtttggagattgccaagtttttctatgagtgtggtataccattcaatgctgcgaactcaagggcaattgaggtagctgtggaggctattgctcaatatggatctgggttcaagcctcctactctccatgagc

SEQ ID NO: 15085 - DNA, 446 bp, Zea mays
gtacctttgtttgatgggtaggattgttcttttagtgaacttaagattagattagctgttgcatttaaggacatatatcttaatgtgatcatgagattctctttagtcatgtatcttgtattttgtatcaaaaggtgtgtgaagcttttgatagacttggttagctaaggacatgtttatggtgttggctctatggaccctttagtaaaagggaaatgttcctcacagtcatttatatatttttttggcgcttgatgaccatcacaaccatatggactaactagtttgctaagtatatgactacatgttcacaatatcaaataaatgagtctctaagtcagaaatagctcaaacctatctagaaagggggtatattgaaagagatgaactattggtagttttgcatcttggataagttctaaacactcataggaacatatttgaac

SEQ ID NO: 15086 - DNA, 398 bp, Zea mays
  unsure (1)..(398): unsure at all n locations
actaagcttggctattccattcttaacgtcaanatactctattgttttattttcctgcatcaaatctctagtactgatatgctcagacacaactcgaaattcgcccatagcttctcggcatggtgacccttgcagcatgtcgcacaggggcctaattaatctgaatgttaggtccagtgggcttttgactatcttctccttcttctcaataaccttaacataaaaccactcatttttcaaccggttggccatttggtgcgatagctgatcaccggagtcttcatatctttgcggtaagcaaagttgtaacagccgaaattctcatgtagcccatcttcttccaccttagtctgataatgaagctcgtgcacccggcagaaagctttgcaagcgggtcc

SEQ ID NO: 15087 - DNA, 452 bp, Zea mays
  unsure (1)..(452): unsure at all n locations
tgaccacaaggacatgacaattcgtcctgggccagttttttgtctaaaaatcacaaaggacattgtgcatcttatccttggtgtaccaaatcatggcggtggaaaaccattggggattgatgaagcagttgcagcaagtaacttgagggcagagcttggtttggctaaagacgagttcaatgtgacattgctacaggatcgtttaaggaaaggggaggatgatgaccttaccatcagatgtttcttccttatcttattcaaccgtctgttgtttccaactgctagctggngcataacaaaccatgaattgcttctgacagaagaaatgcaccgtttccatgagaccgattggtgccaacttatatttaatgaccttngtgaagctgcgaagaagtgtcataaccgcagcaccacatacgtntncacgacgatatacagatgctcaatagctg

SEQ ID NO: 15088 - DNA, 469 bp, Zea mays
  unsure (1)..(469): unsure at all n locations
aaactaagcttacaaccgaccagnttgaccctaccagacatacatatgattntgtcatcttctgggatgcttccaagcaaggcttagggtgtgtcctaatgcaaaatgagaaagtcattgcttatgcatcccgcttactcaagccgcacgaacagaactaccctacccacgatctggaattggcagccatagtgcacgccctaaaaatatggaggcattatctgatcgggaacaagtgccacatcttcactgatcacaagagtctcaagtacatcttcacgcaaccggacctcaacctccgtcaaagaaggtggctcgaattgatcaaggattatgacctcgaaatccactaccaccccggaaaggccaacgtagtagtagacgcccttagccgaaaacctttcggcgttaaaggaacaaactttctggaagattggaagagagaatcagctcagctgaatgcatgtct

SEQ ID NO: 15089 - DNA, 380 bp, Zea mays
  unsure (1)..(380): unsure at all n locations
atctgatatggcatgaataaaggtgtaaaaaaatgctaagagccttcgcaggctaaagaggaatgatataagggtgctacggaatgcgctaacaatttatggcgcattctccttggagcagaactttatccgtggtgatcctgacggngttatncagcggattaacggcgaagccaaagcttttgaagagatcctcagtgatagaggagacttttgtgcctttgccggtgcctatgaagttgtgtcggtccttgagaaggntggctatgaacatgccaaggctgtggttcagccagcattctcgctctcagccaacgatattagaaaccacttcgccgaagccgctgcactaagtggaaattttatcttgaagcctggct

SEQ ID NO: 15090 - DNA, 326 bp, Zea mays
  unsure (1)..(326): unsure at all n locations
actaagctnntgcacttggcttcaagtccccgattggatcgttgttgtcgctactgcttccttcatgtctgggagctaactgatgacgaggcacgccaaaaggtccagtggacttgcacgcggttttcctcgtacgtgccatatctccataagaggggaagatttaatagtatagtaatttttaaacatgatgcatgcataacccaataattatggaatcaaccttcgctgatccccaacttcctatatattgcactctgttacgtggtctttcaagatgagaacttccataaagtggcaaggcaagagtgacagactattttcgg

SEQ ID NO: 15091 - DNA, 167 bp, Zea mays
  unsure (1)..(167): unsure at all n locations
actaagctgaggcgcattggtgtctacttgggtagaatcnnctcttgcctccgtgccttgaatgcgacggttgcgcctcggatgtagatggatcatcaagctcgttgatcttcctcgagccttcgatcatgcactcaaaacttacaaaattccccataacttgctcg

SEQ ID NO: 15092 - DNA, 255 bp, Zea mays
ctatagatactaagcttcactatataagaacaacgtagacggatctcttagattatcctatgagatgatgctgaagcagccacaacaagagggtagaaattggtgaagccgaccacaaattttataagcataactccatggtccttgctctctcacaaccctacttgaccctctaggaccctcttattcttgccccatacatgaatctagtgcattaaaactgtctaccctaattctttttgccgctttcagctg

SEQ ID NO: 15093 - DNA, 469 bp, Zea mays
  unsure (1)..(469): unsure at all n locations
tataaaactaagctgagcaagntacactagcacaggacatgctcgttacttatcagcaggactatcatgagtactgagtntgcataccttcaccaaacctttcttaatgatatcgcgaacgaagtgataacgaatttaaatatgcttggatttctcattaatcatttgatctttggtgagataaatagcactatgactatcacaatgaatggtaatgcaagacttaatttcacatagctctgaatatatacctttcaaccataagacttccttagtaacttctacaatcgccatatactcagcttttgtggtagacaaagcaacaatatcctgtaaacgagcttttcaactcacaacacaatctccaacagtaaagacataacctgaaagtgatctcctcctgtctaaatcaccaccataatctgaatcaaccatagcaaccagaccatctccagatttatcacaacat

SEQ ID NO: 15094 - DNA, 195 bp, Zea mays
  unsure (1)..(195): unsure at all n locations
aactangcttcgaatactacgacttcattctcctcagggggcggacaagtccnctctccttcgtcgaccatcacaacggacaagtaccggaaatatctttctctcacgatgacaaggcgagtttctttgatacttgatttgccgaagaccgcatggattgctcgtcaagggcgatcttcgcagtcttcaccacca

SEQ ID NO: 15095 - DNA, 204 bp, Zea mays
  unsure (1)..(204): unsure at all n locations
tctaagggagaacatgtgataggtctaaccaatgctctanttcaataagatagaccttgtgcagcttgtcaagcagggaaacaggtgggaggagcgcatcacagcaagaatgtgatgaccacttcaagacccctggagctgctgcatatggatctcttcggacccgtcgcctatctaagcatagggggaagcaagtatgctcta

SEQ ID NO: 15096 - DNA, 365 bp, Zea mays
  unsure (1)..(365): unsure at all n locations
actaagcttagctcatctatgtatggattgcttttgagtcagtccaattaccttcggcccttcttgcagcttcctgacttccatggatagcaatgggtccctgatccgaaggtatcttcatgcaaagataggcaggatgaaggattgcttcaaaggcattgagagtaccacgaccaataattgcattgtaagggtattccatgtcaacaatgtcaaacacaacttgctcagntctaaagtgtgtgatgaatccgaaagtcactgacatggtgatcttgcccagggctacaatctgtcttcctccgaagccacagagaggatgtgtaccatcatgaatcttattttctggctcttgcatttgcctc

SEQ ID NO: 15097 - DNA, 243 bp, Zea mays
  unsure (1)..(243): unsure at all n locations
actcagctaacaattaccatgttttgtgagaagactncttgcattccaagacatcatccttttcattaataaaatttattaattcattgaccttatcaatttgtttttgagaaagaccttggaaaaacaaagataggtctttctcatcatcactagaatcaccctcatcatcagaagtagtatacttggcggtggctctaggtgncacctccctcttggtctccctgcccaccaaacactctc

SEQ ID NO: 15098 - DNA, 173 bp, Zea mays
  unsure (1)..(173): unsure at all n locations
aagcttgattgcgaatggcgcatcgcttccatgcgcttgcngatgagatcactgccagtctgccttcggtcacgccaactgccaagtctgtccccgcggatgactaacccgcggccccacgcctggtggttttgtctagccaccctcacggcgcctagataccagctcctctc

SEQ ID NO: 15099 - DNA, 314 bp, Zea mays
  unsure (1)..(314): unsure at all n locations
actaagctttcaccatgcgtgtagccaagtgtgcattactttcataatgatcaaacgacatgaacgctccttaatgacacactttgtttgaaacaatgtatgtcgctgattctgctctgccttctccatttgtgcactaagcacacgctgtacaatgaggctctcataatgctctgcatcatctgcaccaatctgttcttcgggtggttccttagtgcctgctggtttctgggcagatttggctgctgaatttgtggaagatgcacgtggtttgtcctcggaggaaggcggtggagctgcncgactcggcgagg

SEQ ID NO: 15100 - DNA, 313 bp, Zea mays
  unsure (1)..(313): unsure at all n locations
gatgagaaagaaccaccaaaagagaagaaaattcctaagaagagaaaagtatcatctccgaagcgaaaagtatccaacgaagaagagactcccgcatcacgctctgccactgacgtggaagagattttgaaggtaatgactgaatccctgcctgtgaagctaagtccattagggcctcaactgacgaagttttttcagaaggaaaaggagcccgaanaaactaaggaaacaactaaaacaaagagacaaagaatcatcgcagcgacagaacgcattgacaagacaccaccgagagcttcagctcggaagatac

SEQ ID NO: 15101 - DNA, 442 bp, Zea mays
  unsure (1)..(442): unsure at all n locations
tgccctcatnctcaagagagccttctattggtgtgttcttgtactctgccccgctggcgcttctaatctttntgatccttaagccgaactcattttgagcccgtctcaagaatccctttaaggtctcttgggtttgacatttatcctgcaaaaagaacacccaagagaagcgagaataatcatccataataactagacagtacttattcccgccgatgcttatgtaagctatcgggccgaataggtccatgtggggtagctcaagtggcctgtcggtcgtcatgatgttcttgtgtggatgatgaacaccaactttcttccttgcttgacatgcgctacaaatgctgtctttcttaacatgaacatttgttagtcccacaatgtgctctccctttagaagcttatgaagattcttcatcccaacgtgggctagtcggcgatg

SEQ ID NO: 15102 - DNA, 268 bp, Zea mays
  unsure (1)..(268): unsure at all n locations
tctttatctccgatggtctgtaatgtctgccagacggttgaaacgctcctggcgaggtaaggaaagataccgagcttgtcaagtagctcaggggcacctacagggttgtctgaggtccgctggacaacgacaactgtaggcgggcctaatcacttgggaggctccgtcacagctggtatcggagcgtacccctcttttgcagatattatgaggcatcctcaaaaggattntcaaaagtcttacctaaacaatttttcctcttcttacc

SEQ ID NO: 15103 - DNA, 350 bp, Zea mays
  unsure (1)..(350): unsure at all n locations
tgtgaagantcttcattccaacatgcgctagttgttgttgtcatagccagcccatgctagtcttagcaattaagcaagtgtcgagttcagctctatcaaaatctactaagcatagttgaccctctaacactcccttaaatgctattgaaccatcacttcttctaaagacagtaacacctgtatacgtaacaagacagttgtaacccattttacataattgcgaaactgaaagcacgttgtaatctaacgaacctacaagaaaaacattggaaatgcaatggccagctgacatagcaattttacccacatctttgaccaaaccttgattctcatccctaaatgtgatcgct

SEQ ID NO: 15104 - DNA, 275 bp, Zea mays
  unsure (1)..(275): unsure at all n locations
accttgatatatctctttatatgctatgactaatgcgttttcaagcttatttcanaccaagtcataggtatattgaaagggaattggagtcttcggcgaagacaaaggcttccactccgtaactcatacttcgccaccactccgagcaactctctcttctttgnggaagaaatgagcatcaaggaaaaggacttcatccttgcgggacgaaagtaaaagctcatacgcacaaggactccgtccttggcctccgcctatctcacttacttatgacc

SEQ ID NO: 15105 - DNA, 291 bp, Zea mays
  unsure (1)..(291): unsure at all n locations
tctctatgttgtgcttattgcgtccaggacgctacgccacttttnctaggcacatacgggtgtggtggcgacctccttcctattaagggccatcctccacaactctaacgccacaggcaacatcgccaagtgggcagcggagctcgctgagttccagctgcacttccagcctcgccacgctgtccagagctaggntctggcttactccctcatggagcgcacctcgtcccccaccgtctccgccgcctcgcttccccaccctacttccacaccacgtgtctcccccctccc

SEQ ID NO: 15106 - DNA, 400 bp, Zea mays
  unsure (1)..(400): unsure at all n locations
aatagcttaggaaaggataaatgacccaagaaaaacttttttatttntataccctcgcgataccagaaaccctaattagaaccctggaaaaacctaaaactaaaccctaggggcttatgtgcaaaattagtccacttttgggctaaagtgcaaaaaaccaagccaaataagtattttaagtcatttggttcacaaatatgcgaatttgcaagttaaaccctaagttttgggcttatttgcaaaaatcccctcttaagcactatagagcctaagtctgaaattcagattagttggttcaactttggagccctgtatcttttgaaatatagggtttttgccctaggccaccacatcaaaattatagccgcatcataggagcacaactttgctcaagagcgtg

SEQ ID NO: 15107 - DNA, 399 bp, Zea mays
  unsure (1)..(399): unsure at all n locations
aaaacccgcggcgcacggaccggtaagcccctgaccgntttcaattcgttggcacatggcctctatatcaccccgtgaagctcctcgtgcaccctaattgaactataccgccgtggtttggccggagcaggagccgccgacgacccnctcgcgctgtgctcgtggtcagggtagctccgaccacctccgacgtcgacccgcacaccgacgtgaccgtcgcgacctcccggacgttactgaccaccccgccggagctctactgccgccggtaagccccaccgccgtaatctatgccgcgggtactgtttaagccggtcagggagcgcgagttagatttcagttaagtccagggggctttgcgcaatgtcagtgacccaagccaatagtggaccgagggct

SEQ ID NO: 15108 - DNA, 340 bp, Zea mays
  unsure (1)..(340): unsure at all n locations
tgcgacgccaatcacaagtttattgaagaatgacgntaaattcaattggtcttcgaaatgcgatgaagcctttgaacaattgaagacactattgaccaccgccccggtattggctcaaccggacatcaccaagcctttcgagtatattgtgagatctggcagggactggtgcggctaatgcagagccgagaatgcgagttacggagtacgcgcatgaagatacccctagatcacactcgtggcacgcgcatgcgcctcccaccatcccccccccccaccctaccatccccccctaccccccccctccccacctcctctccccctgtcgcccccccccccc

SEQ ID NO: 15109 - DNA, 388 bp, Zea mays
  unsure (1)..(388): unsure at all n locations
atgcagcagtctgactgtacatgtacnttgcatatatgtatgtgaaaacctgcgtaactatgcgttgtgtaatgcataagagggtaagcctgtgaaccatgactgtacaaaaaatgactctgcgttgtgtaatggaaactggcataaatgtctgtgtaatttgtcataagctttaacagttatgcagcaaactgactgtacatatactacggccaataattatatcgtgaacatgcatacgtccagataggttatgcagntatgcagcaatctgactgtacatttatgcagcaatctgactgtacatatgcagcaatctgactgtacaaacatgcataagcctctcaataattatatcgtaaaatccgttcaagaaacatgcatactt

SEQ ID NO: 15110 - DNA, 395 bp, Zea mays
  unsure (1)..(395): unsure at all n locations
tagcaatgataagcacacacaaatcaaacgttntgtatatggtaagaatagagattttccaaagcacggactactcagattcggnggctaagcataactactattgcttggctccttaacagagaactatgctaaatgcgacttatgagcactaacgttaaagcatcacatatgcactcaaaaggggagaaaacatcaagcgaaattcattntgaaatgccctagggggccacacaattagagttttgcaaaacacgagtctacacgattacctctcatacatgcagggctctagccaaagtgaagaaaaacttcactacccaatgcatgcagaggactgcgcataactaacttcagatctgcgagctcgtcttctggcgaggctggcacacacc

SEQ ID NO: 15111 - DNA, 294 bp, Zea mays
ctaaaataggattttagggtgttacagctagcaacctggcttttggggcttggggtagctcactccgttgctcgggcgaatacaacaaagggggagggatattaggggtggggtccttggtgagctagcttagggtgtgccacagcccacctagacccattgggtccgccactacccatgatcatcgcgaactgtcatgcttcggacgctcgaacgaaagtaggttgtcgcggcgatcaactatttctcattccctgcgggcacgcacgccgcccctgctttaacggcccacac

SEQ ID NO: 15112 - DNA, 382 bp, Zea mays
  unsure (1)..(382): unsure at all n locations
cctcttcctgacaaggccgctgcgcaaaactcccctgtcgcgcgcgcgccaatcgcctattcccatgtnctcccttgaacctgaccctattcacgaggcctctggtcggaagatccgtgtccgcgccaagcggtcgcatgtcatgcacccacacacaaggccgctggccaactcttgctcctctccaaaactaccccttctccccaatgcgcctcctcactacccgcccctcgataacaccccgcgccgcccctctcctcccctaccccacctgccccccccccacccccccctccatcccctccaccccctcacccccccttcccccccccctcaacccccccccccccccatcgcgccgcggctcgcgccgccccccccc

SEQ ID NO: 15113 - DNA, 451 bp, Zea mays
taaagggtcctcttcactcgaagcaagattagtttgtgtctcttgcaatcaaatgaaatacctcacataaggcaaaaggcaaaggtatgtgaagtattctttttcatttggtatttaatcaatagtagtcccttcaattggcattctttcaattgataataatctattatgcggaaagaaatgttaggatgaaggttaagttcctattttgtcttaaaagctattaaataatgcattatttccatccaacatatgtgctaacttaaaggaatttattttataccttcatgcctcataaatgatggtttgttcactactcatatccaaggatcgtcatttgttaaactttcccttgtgctactaatgctcttctttcaagtgtcttatcaaagttctttcaagtgacttcaagaatcaaaagaatttatgcacgttcacctgaatagacaag

SEQ ID NO: 15114 - DNA, 399 bp, Zea mays
  unsure (1)..(399): unsure at all n locations
actaagcttcggtaacaagctgagctgaagctggccttagatgtttacaaggagcaaccttttgaagccgaagcaataaaaattccagaaccagtattagttgaagaaactgacaccgccatccccgaagcacctgtcagcatgcgtgattacatgatacgacatgcttcggngaagaagctatccgaagaagaaactcatgaagccatccattatgcaaaggaactaaaatatccgaagggggcagtaatattcaatggaacgaatgaagatgacttcttatactgcctgcctgacaacaaagagctatctgtctgccgagaaatggccagaagtattgggttcccgaagcttgaatctggactaaccgccatgacgaacgaagatctcgcagcaagt

SEQ ID NO: 15115 - DNA, 434 bp, Zea mays
  unsure (1)..(434): unsure at all n locations
tctacagggagaacacattntgngactaacaaacgttcattttgttaaagacaggatttgtagcgcatgtcatgcagggaagcaagttggtgttcatcatccacataagaacatcatgacgaccgacaggccactcgagctcctacacatggacatattcggcccgattgcttacataagcatcggcggctgtaagtactgtctagctattgtggatgactattctcgcttcagttgggtgttctttttgcaggaaaaatatcatacccaagagaccttacagggattcttgagacggtctcaaaacgagttcggcttaaggatcaagaaaataagaagcgacaacgggacggagttcaagaactctcaaattgaaggctctcttgaggaggagggcatcaagcatgagttctcttctctctacacaccacaac

SEQ ID NO: 15116 - DNA, 446 bp, Zea mays
  unsure (1)..(446): unsure at all n locations
ctacccctacctatcacttgtattattttatacactcgatcccttcttgtatgtccataaatctaatgcaacatacgtattctcataacacttatttgctgaacatatcacctttttataggtcaatattatgcaacatataacatagcaagtctaatcatcatcatataaaagttatcttttagcttctatgatactctcttatcaaatataatgctagatgctactttatccaccctatttatatcctatggctaccacttcaccaatatcctcgtctctctgtcacattgattctaaatactgaaaggtctacttcctcgtgtgtagtaatgcttaagtcacatctcatatatttggttntagctctattgagtctaaaacctttgaagtatagagtatcccgccaaaattctagnttcttatttactcatgtctgactttca

SEQ ID NO: 15117 - DNA, 124 bp, Zea mays
agaagcaagagcagacggcaagaaagcgcgccagatgcgctcgcgtcgcgctcttatttatacgcccagtgcgctgcaacgcggagggcccattgactgatgccattctagccaaggcaaggcc

SEQ ID NO: 15118 - DNA, 340 bp, Zea mays
atagaataatcaagcctcggtattacagcatatccgaagatgaaggggcgtatgtcttatagatagaacgaccttttagtccataagggtctaagtcattgttgtacactcttatgaggggcatgattgtaattcctcacaggctgtgtcctgtgcctataaatagtgaacagtactcctttattgctcacgcattcctggaattgccaacgcattactcggtaactattatttgtcaaggcaaaggtataaatgcacctaaacattatgatctaacatttcagattcatataatacgagatgcgaacgatgtcatttatttccgatatattcattttta

SEQ ID NO: 15119 - DNA, 304 bp, Zea mays
atagcttaatgctgatttccaaagtgtctagagttattttttatagccatgaacactcactgagatatcgttctgtaggactatcacaccatagttcattgagaagataagtattcatcttcctagagtgacacagaatcttgaatagcctattatttagctcctctggaataccttcaagcgatccaatacatttagaatgcttcgcaagagtatttaagcataagttcgtaagtgacggggcagcttgagctgctgctgcattcttcccatcctttgaaggcgactcaaccctgaccctact

SEQ ID NO: 15120 - DNA, 393 bp, Zea mays
tcggaatactacgacttcattgtcctcaggggtcggacttgtcttctctccttcgccggccctcacaacggacaagtcccggaaatatcttcctctcatgctgacaaggagattctctttgagactcgagtggccgaacaccgcatgcgttggtcccctacgtcccacatcgcccctccactcccccgcgctccccccccctctcccccccgtctcacaccccccgcttgccgacacacccggcctcctcacaccgcccagctaccaccccgcccccccctcctctctagctcggccgtccgccccacgcgtctgcgcctcctgctcgctccgccccgcccccccccaaacactggcgggctcacttcctccccccccccccccccgcccccc

SEQ ID NO: 15121 - DNA, 306 bp, Zea mays
  unsure (1)..(306): unsure at all n locations
ttaccctgtagtctggactataaggtgggtatgttaggtgtaccttatgcagnttgaccatttccagcatttgcataatgaggactctagggaaaagcctcgtagtgagaccctagccaatcacctcgaaagtgaatacgggtctagctaactcgggctagaagggaatcatgactcatgggtaaagatgtgccacctctgcagagtgtaaaactgatatatcagccgtgctcatggttatgagcagcctagactcctcacatgataattgaacttgaggatgaaaataaatcaagattcgatgat

SEQ ID NO: 15122 - DNA, 466 bp, Zea mays
taggttttctttaggataacatagtggatgggtattgccttgatacattttagtggacagattacaaaggttttaggattcacattattcacattattcattttcctttccttaatttccatttagggtttccagggtaggttgaactacaacggtgttttactaatttccaaaaattctgtaaaaattacagtgggttgtcacttgctattctagcttgttttaagaatttgaggcttaaggtacaaaagctaggctttaatcaaaaatgacaagagttaaacaaaatgggccactttacactacatctctaagctagggtaggttctgtcctaaaggttatttttgctggcatcccatagtaatgataggtctctatgctaaaactcacagaaaactaaggggtggttatttagttatgattttcttaagtttaaggtcaaaaaggctctttctactatattat

SEQ ID NO: 15123 - DNA, 463 bp, Zea mays
  unsure (1)..(463): unsure at all n locations
tcggcactactttcaagcatacaatattgttgttccttcttctttctcgttgaaggatattatgagaaatagagaagctactgggcagattggaaaatgggctgcagagctcaatgaattttgcattgattatgtgcatagatcttcgatctagtcccaggcgttagcagactttattgctgactagacgccaggggctcaggatgaagaaacaaataaagatgccgaagtatggacagtgttttgcgatggatcttggggaaccttcggggcaggagcagctgctgtgttggtctcgccatccaaagttaaaacttgttatgcggcaagactcgatttcagttgtacaaacaatattaccgagtacgaagccctgcttttgggtcttcggaagctaaaagcaatgggaatcagaagggccattcttaanactgattcccaggttgtttcnggtcatatcgac

SEQ ID NO: 15124 - DNA, 443 bp, Zea mays
  unsure (1)..(443): unsure at all n locations
ntattctagtgcacccaggaccacgaagaataccttcatttgtatgttcgaaggttcctgcgtctgagggcacaggcaccaacagtgcccaatgaaattgccattgaggccatgattaaggggcttctgccgggaccttcagctcaatactttgccaggaagcctcctcaaactttggagaagctgctccagatgatggacgagtatattcgagctgacaatgacttccgccaaagaagggaggaagcatacaggttctctgaaatgaccaggggcttcggaggaagattccattcgaggcacgtcaggtcaattcacaactctactcagggtgatgatagagggagtcaatagcaaaggccatagtactcctcacaagcttctgggcagcagcaaagctctttccggccgccagtccaaggggcagaggcgccaagggcttc

SEQ ID NO: 15125 - DNA, 446 bp, Zea mays
actcagcttctgtcctggtgtgatagttgatattcattattctgttctgtcagatgtgccagacctgcaggatccaaaagttaagaacaacatgcacattgaaccaaacaaataattgctacatatcatggaaacagtaacttgttactccagtagattgtcacagcaagctaaaatatgaaggctcactaatcttatctgccgtcttggatcttgatatggtaacgcaccatcacagccctaattgcctatgggcaagcaaagcctcagaccaccagtaggggggaaataatgcatgaagaaacaatgatgtcttcatgagttctgcagttatctgcacaatttgcattctctaacccatgttacatgccaaatctttagtgaatacagacccacgtgcaattgtaagttagtcatggaagcattgttatctgaatttcggagta

SEQ ID NO: 15126 - DNA, 432 bp, Zea mays
actatttggccaagcttcttttatctttattgtagcttatatagtatatttcaatgtttatatttggcctaagccatgattttatatttttcatagtcttttgcccctttccttcaattctacttaattagctcaaatagggttggtattagggtttcaacattttccccctttctgaaaatcttatttgtttgtaacatgattctctagatatacacttagtagatcctttcttcttaagtcaatttgatgcttcatgctcaatttggctcacatgaaatgttgattcttgggttagcaattgagagaaaccctaggtgacactggtgtgtcacaggaccgcccggagaagcttcggaccgtccggagaagcttctgaccgtccgcgtctggatggcagaccgcccgtgatgcgcagcacgggttcccgcg

SEQ ID NO: 15127 - DNA, 271 bp, Zea mays
acatccactctggattattggtgtaaacataaaggtgcaaaatttgtttcatctgcttttcatcagtgcaccaatataataactcttggtgaccttatttactggtagcactcatttatcctgaagtacatatatttcaacaagcagcttacaatttgtttgtctatatccgaaaacaggtgctcgcccccttgctcaactgcggtcaattaattcatcaacaagcagaaataaacgtagcagtttcttgtattgcgacagtgcaccctgg

SEQ ID NO: 15128 - DNA, 259 bp, Zea mays
ctaagcttatgcactctacgctcgctgatagtcgcctagatggtggtttgtgaatagggcgaaactgaaatttacaaatataaacacaactacaagctgcgttagcgttagaaataaaaacgagtccgcgagagaggctgcaaaacacatcttaagcacataaggagtgtgacacagggatttgttataccgaggttcgcttcttgccaacctactccccgtcgaggcgttctctcacaccggctttccttcaaccctt

SEQ ID NO: 15129 - DNA, 441 bp, Zea mays
actccgcttctcaccatgtcgctgctagccaagttggtgcagttatctccatcaatgatcaaacgacatgaacgctccttaatgacacactctgtttgaaacaacgtatgtcgctgattctgctctgccttctccatttgtgcactaagcacacgctgtacaatgaggctctcataatgctctgcatcatctgcaccaatctgttcttcgggtggctccttagtgcctacatcatcagccgcaagcaaagcaagtgtagcttcatccaaatcactagcagaggaatacccaccatcgtcttttaccaccaaaacacgctgattaggacaataacgctgcacgtgtccatagcccttgcatcgataacacagaacatctcttgttctacctgtggaagctactgaagaggcactacctgcgggtttctgcgcagattcggtt

SEQ ID NO: 15130 - DNA, 345 bp, Zea mays
actcagctcaaaggagagcacatttaggataacaaatgtttattttagaaagacagggcttgtagcgcatgccaagcaggaaagcaagttggtgcccaccatccacacaaaaacatcatgatgactgacaggccactagagcttctacacatggatctattcggcccgatagcttacataagcatcggcgggagtaagtactgtcttgttattgtggatgattattctcgcttcacttgggtattctttttgcaggaaaaatctcatacccaagagaccttatagggatctttgagacgagctcaaaacgagctccgcttaaggatccagaaaataagaagcgac

SEQ ID NO: 15131 - DNA, 322 bp, Zea mays
  unsure (1)..(322): unsure at all n locations
tcagaagattcttcattccaacatgggctagtcggcggttgccttatccaacccaagctagncttagcaaccaagcaagtgtcgagttnagctctatccaaacctaccaagtatagctgaccctctaacactcccttaaatgctattgaatcatcatttcttctaagacagaaccctacatagaaagacagtgagccattgcaaatggaacgagaatgattaagacacaaaactgaaagaggaggaaaattacacctgcaactgtcatccaggagcgggactgttttaaagacactttccgagggagacggagacacgcccg

SEQ ID NO: 15132 - DNA, 396 bp, Zea mays
  unsure (1)..(396): unsure at all n locations
ctttgnntaagatctgtanaaatcgggcgcacagntcgcccactttgttctattggccttcntctaccaataacacgcgttagcgcatgcccattctgtggtaccttcacttctctctgataacatcctggcactgaggcagtctttcgaccttcgctgcgagcaccttcggccttatcatctgacaatctccgcagcccctattttcggctccgccacctccctcccatttcatcagccccccgattcccatctccccccacctttcccgcctcccccccccccccccccctccccccccccccccccccctccgcctccgccccccccccccctccctcgcaccctcccccctcgcccccccccctccccccacctgcccccactggcctcccc

SEQ ID NO: 15133 - DNA, 350 bp, Zea mays
  unsure (1)..(350): unsure at all n locations
ctgctatctttctctatcatgctcactcgtctccgctgtggncgcattgccatctgcatttcgaggcaagagattaccacaatcaatagcagtctcagctgcttcaggttgcatacgctgcatcaacctgccagagttgttcttgtggtttaaagctccattcctcctgcctacgtgctttgattggctacttggagttatctgagcattcgtctcgctaccaacatcatcagtcccattacatttccggttctggncatctctagcaccattcctcctgcttgagtgccttctcgccacttttgcgcgcctcgcctcctgaccttctccactcgtaggcccctcactca

SEQ ID NO: 15134 - DNA, 297 bp, Zea mays
tcacaatctgaacaggttatggccaatgttatgcatattcttatataaatttatgctacatacgacaacgtcctatgctataaaaaaactcgttgtacattcataaatctacataactattaaatgcttatgataactttcacatacgtttatgacagtatgtaaacatatttatgacgctgtctatgcattgacaatttaacatacgaatcacatttacatccagaatataattttctcataaatcttatggtactctactctctaccacatgaatcatcatctccgacatacacc

SEQ ID NO: 15135 - DNA, 344 bp, Zea mays
  unsure (1)..(344): unsure at all n locations
acgaagctcgaagtcaccttagacctgattatttttgtacctattactttaccttcatcgttaattctgcgctcttcttacaccgctttaatatgcacaggatgatgatgctgaggaacaatgagccgaagcttgtcagatgatccgaagctctcatgttccgaagctcaatgatgccgaagctgaaggctctgctgaaaaaactttaaagaaaatcttgtaatatcattgtaaaaatatttgtaaattaagaatcaagcactaannnggtaaacttgtacataccttgcaatatattcttacctttttatttatgtatgaactgctctgatgtggacgaagcc

SEQ ID NO: 15136 - DNA, 200 bp, Zea mays
  unsure (1)..(200): unsure at all n locations
tcgtattaattacaagatccaactctaatatctatggctctagagntatcttggtgttgcaggcgggattgccataagactggtgtccacgctgaggtgagcggtacgggtgctgagtcctgacgggagcggcggaaccaccatccagataacgacgctccgcgcgcttacaccgcacatggctgatctcaacatgagcc

SEQ ID NO: 15137 - DNA, 134 bp, Zea mays
  unsure (1)..(134): unsure at all n locations
atcatcagaaagcattattaattaggagtcactgcgctgtcattttgttcttgagncaatcctaatcggactatgttagtgaatgaacttgtgctgcaccacagcagatgagtgcatcaggagatctcccagga

SEQ ID NO: 15138 - DNA, 268 bp, Zea mays
aggtaaacaggtgggaggagcgcatcacagcatgaatgtgatgactactttaagacctctggagctgctgcatatggacctcttctgacccgtcgcctatttgagcatagggggaagcaagtatggcctagttattgctgatgactttccccgcttcacttgggtgctcttcttgcaggataagtctgaaacccaagggaccttcaagcgcttcctatggagagctcaaaatgagtttgagcttacggcgcagaagatatggagcgac

SEQ ID NO: 15139 - DNA, 394 bp, Zea mays
  unsure (1)..(394): unsure at all n locations
tttagggntaagcaccctactccagggtnntactngcaaaatgccatatcaatacaacttgtttgaaacttcagcctagtgaatgcattctaggtgtatcaaacacatgaaatgctaatgttgatgatgttatgctcaagttttagtaacagtaacaccaggggtgttacaccacatattcacatacattcacaaacatcaattcacataagtattcacattcacaaacatcacctcacattcacanacatatagttccaaatagtctgaacacgtcttttacatcaacatatagctccacattaaacattgacatagttcgacacatagtccttgacacgaacattgacatagctcctaatcaaacacatttgttgaactatcactcatatcc

SEQ ID NO: 15140 - DNA, 294 bp, Zea mays
  unsure (1)..(294): unsure at all n locations
cttcatctatattggggattgctgttgaatcatttctttcccctcggcctttctagcaggttcgtgactcccatgaatagcaataggctcctgatccgaaggtatcttcatgcaaagatatgctggatgaagaatcgcttcgaaatcattgagtgctccgcgaccaatgataacactgtacggatattccatgtcgacaatgtcaaacacganttgctcagtccttgtattgttgangaatccgaaggtcactggcatgcggatcttaccaagcgctacaatctgccttcctcc

SEQ ID NO: 15141 - DNA, 286 bp, Zea mays
  unsure (1)..(286): unsure at all n locations
taacgtactttttttaanagacagaccttgtgcagcttgtcaagcagggaaacaagtgggaggccctcattacaccaaaaatgtgatgacaacttcaagatctctgcagctgctacatatggacctcttcggacccgccgcctatctgagcatacgaggaagtaagtatgcgctagctattgctgatgactnttcccgctttacttgggtgttctttctgcaggataagtctgaaacccaagggaccctcaagcgcttcctcaggagagctcaaaatgagtttgag

SEQ ID NO: 15142 - DNA, 213 bp, Zea mays
  unsure (1)..(213): unsure at all n locations
ggcggacaggcattgccctaatgcttttgactttatgttgtatttttgtgacttcggacttatttatgttttatantcgcagcacactatctcctcccccggagcccttcgagtcactgggcgaccccgaagcaaaaaaaggaagatgaaataagatggctgaagctattatggacgaagctcgtactcgantactaaacgaagctgtatata

SEQ ID NO: 15143 - DNA, 354 bp, Zea mays
  unsure (1)..(354): unsure at all n locations
gagtcccttggtggacgagtcctatttttagctnnttcatttcttgacacaaagtgttctcggaggtcttcgccataagacagtggcaggaagtcttatgactcaacgcatctgccaccacattggccttgcctgggtgataatggatctccagttcatagtctttgatgagctcaagccatcgtctttgcctcatatttaattctgactgggcgaagatgtacttcaaactcttatgatctgtatatatgcgacagatatttcccagcagatagcgacgccacatcttcagggtatgaaccacagcagctagctccagatcatgagttggataatgcctctcatgtcggtgca

SEQ ID NO: 15144 - DNA, 466 bp, Zea mays
ctcggacggcgctgggagaagcatacctgacgtgcctcctcttcttgtatgcacttcatctcgatcctttgcctgcccttggtcgacttaacgaccttcaccatttccaatacgtacttggcaatatgttgtttcttggctatcaataatattctctagaacagatgcagtcgtgatctgcagagaatatatggttaggcaatatgacagtgggggtttatatagagatttagtagcaagatatatgttttgattcatgtgaatgcatggtgtacttttggtcattttgtagctgggcaccatgttaataataatttatctggaagatattccttgcattggatggaaacttttgatgtatagattttcaaggtgccatccaacattttacaatcgacatttttggaagtaaacagacaaagcatgttaattgtggtgcaaactgcacatagtggaactaataaat

SEQ ID NO: 15145 - DNA, 365 bp, Zea mays
  unsure (1)..(365): unsure at all n locations
tctcttaaccatggctggacgcgaacnttacactcgtaagccatacgaatcaataattagaaacactagtaatcaactcccactaacaaaatccactagacggctgcaaaactgaatctaacgctgaacaccgcagcatcagctctaagaaaagcatcatacatactagcagcgcacaatgtcaagcagcacactaaaaacacagcacacgacataatataaacccaaagcagcgctagaaaacacatcaaactagtacgngtgctcaccagaattctgagccagtaaaacntggacaccactacctaaaccagatcagaaatccgcgcataattcgtggctgcccctctcactgcacacgcact

SEQ ID NO: 15146 - DNA, 360 bp, Zea mays
  unsure (1)..(360): unsure at all n locations
actacctccaccatgattcccaaaagccagcatatccttgagagnctcttcctttgacgggcaagacttgcgaaaatacactctgtactcagggttttcaaacccatgctgctgtaggtgacgaaacagctgagttgtgccgcctctgtttcaaggcggcctccacccgcttggaacgccaccccactctccgcgcccgcgctttctccccccccccagcccgtcttttctcccaccaacccccccgtcccccacccctctccctgcccctcccttcccccgccaccctcctacccccttctccgcccctccgcccccgccccctctcccgctccctcctcgcgtccctccctccctccc

SEQ ID NO: 15147 - DNA, 266 bp, Zea mays
  unsure (1)..(266): unsure at all n locations
ctgacaagcgccacactcactgtagagngcgaagcttcattatacagcagcagaggagcccctagcgctggtggagttagcgtcgttagatcgatcagatactgcttcagctcttcgaaggctttttgctgaactgatccccattgaaagacttcagctaacttcagcacttcaaagaatggtaaacttctctctgctgatccggatataaatcgattcaaagatgccaatcttcctgtcagncgctgagccnccttctttgtgct

SEQ ID NO: 15148 - DNA, 456 bp, Zea mays
  unsure (1)..(456): unsure at all n locations
tacctgtcanagcaacagtagatgcgcagtctttatttacagaccataccaataacttggcctttcgcatgctgaggattggatatgattggacctttcaagaaagctcaaggaggttatacccacgtattggtggcaattgacaaattcactaaatggatagagttcaagcccattgcttctttaacctctgctaaggccgcggaattcatacaggatataatattcagattcgggataccaaacagcattatcactgacttaggatccaacttcaccagctcagaattctttgacttctgcgagcaaaagagcattcagatcaaatacgcatctgtggcgcatccaagagccaacgggcaggttgagcgagccaacggaatgatattggaggcactcacgacaagggtcttcgatcagaatgaaaaattcgcaggaaaatgtataagagaccta

SEQ ID NO: 15149 - DNA, 338 bp, Zea mays
tcttacttggtcgacaccaaattctacccctagcgaccctatattcctctaccaattgcaaaattctagctcaaaatctctctgtcaaagatgacggcgaaaaccgaagacaacccgaggtgttcccggtgatctagcgtggtctagttcaattggctgggttgataagcatccctagcataccagggtgctgaaacgagggtaaggtggatgtgaacggacctggaaacggcggttcacgacgcggtggtccacgttggcgcggagaaccgaattgcgggaagtctgacactcctcctgctacgtcagctactctgctcgcgagtggctgctgcact

SEQ ID NO: 15150 - DNA, 268 bp, Zea mays
ccttatgaagattcttcatcccaacatgagctagtcggtgtgtgtcagagccaacccacgctagtcttagcaagtaagcatgtgtcgagttcagctctatcaaaatcttctaagtatagctgaccctctaacacacccttaaatgctattgaatcatcacttcttctaaagacagcgacacctacatcagcgaatagacagctgtagcccatttgacataattgagaaacagaaagcacgttgtaatctaaagaatctacacgaaaaa

SEQ ID NO: 15151 - DNA, 415 bp, Zea mays
tctcgccgctctcagctgactggggtcgtattcttgtttccttttatccgcgtcttggtctcttggacatttttatttagccttgctcggctatttctattacacatagattggatgaaattagaaaaaattaaaaagaagtttgacttgttatttatgatttaaacctactcaattgacatggattaagagcaaaccgaacaagtgctttttttatcatggaaacaaaagttccgacttttgcatcaaatgcgtacaaccattacatgtcaaatattgactcaatgaacagttgtttgaataattaagctaactcaacgaaaacaaatagcgtgacaatggataacactagccacactcaagtcttgtatttgatcgtcatccatgattcgcaaagacttccatcgccaccgct

SEQ ID NO: 15152 - DNA, 468 bp, Zea mays
actaagcttaggacttactccaagaaggcgccaagttgctgttgctttttgctagcactaagctgggttacaaatctgatgagaaagagaataagaagatgggggacgccaaggattcacaagatgggctgtagactgtagtgatagccgtctgttgaaatgcgtcaatattatccttgtttttctgttagatcagtggtagtgcttcctaagggaagttttctttgtcttgccttagttcaatcctgaatcatgttttgtgttccttgctggaaaatagttgtctgctcattaggtgtttagtaagagcatctccaacaacaaaccctaaaatagagtcctaaaatttgaaataggaccatatttagaatgtttagggtttcaaaagaaatgtttactccaatagtcaggccttaaataatgctatttaggaaataaatcatgatattaggaaataaatgattagag

SEQ ID NO: 15153 - DNA, 389 bp, Zea mays
tggcacccagcaacccgcttcaagcgcataaacccagcttgcctggcgcggaagctacggcgaagagattcgtgttcgttatagagggagaagacggatttgtggacatggccccatgtttcaggcgaacccgcggcaaaagaggccccacatgtgaaccagagtccgtgcgcagagctcaggcggagaccgcggcattcgcttgagtttgttacggagtccgttttgctgtacaggagcccgccacgttgaatggagatgacgattctggacagtgggccccacacgtaagccacatacgtgaacgacagtgagcgccatgggctgagcggggagagaagctgagttgtgccgacccgagaggaaaacggtccagccgggacttccct

SEQ ID NO: 15154 - DNA, 156 bp, Zea mays
ggacctataaccacattaccttctgtggcctttaataatgggctgaaccggcggctccccctcttcttttggacgggttaaattcgagcaacgctttgagagcacaaaaggaaggtgaggacgaaagctaacagatagcactcggtaaccctccgc

SEQ ID NO: 15155 - DNA, 279 bp, Zea mays
  unsure (1)..(279): unsure at all n locations
gaacacgcgataggtttgactaacgcgcaattctaanaagatagaccttgcgcagcttgtcgagcaggtaaacaagtgggagccacccaccacacacgaatgcgatgacactcacgcacccgcgctccgccacgcccccccacccccgccccaactacccccccccccccgccccccccccccccccccccccccccccccccccgccccccccacccgccccccccccccccccccctccccccccccccccccccccccccccgccccccccccccc

SEQ ID NO: 15156 - DNA, 345 bp, Zea mays
tctccaccatgtcgctgctagccaagttgttgcagctactcttctataatgatcaaacgacatgaacgctccttaatgacacactttgtttgaaacaacgcatgtcgctgattctgctctgccttctccatttgtgcactaagcacacgctgtacaatgaggctctcataatgctctgcatcatctgcaccaatctgctcttcggccggctccttagtgcctgcatcatcagccgcaagcaaagcaagtgtagcttcatccacatcactagcacaggaatacccaccatccgtttttaccaccaaaacacgctgattacgaccaccaccgttgccgtctccatac

SEQ ID NO: 15157 - DNA, 160 bp, Zea mays
tctaaagggagaacatgcgttaggactaaccgacgtctattttgagaaagatagaccttgtgcagcatgtcaagcagctaaataggtggaaacacgccactccaagcacgaatgtgatgacaacatcaagaccactagagattcttcatgcggatctctt

SEQ ID NO: 15158 - DNA, 394 bp, Zea mays
agagtgagctcgctcgatatgatctgactaaaggtgtttatctttttcactctctgaccggctaatggagttggtcaacacaataagagtgcttggaagtgaagattggagtgactccaaggtcactagactatttatgagagcatacaaaataaggacaagagtctagctagaatgataagggaccgcgatgactatgaagaaatgacacctcaccaactatttgctaagatttaacaacatgagtctgaagaagccccaatcaagacaagagacactcatgccttgatctcaaatgaacaatattctccccagaagaacttagaccacaagacaaagaaagtggttggacatcaagtgataaagatagttcagtgatgaagacacaactatg

SEQ ID NO: 15159 - DNA, 260 bp, Zea mays
ctgcatgctgcttgatagcctttttttttgctttacgactctggaataatttgtataaagaacgatgtcattaaattttacttgacagactttgaccataccttgtaatatattattacctttccatcaatgtataaagcgctttgatgtgaacgaaattaacatttttgagctgaaggccaaaaacaccttccctttttttcgtacacagcgaaacatcaaactgcttctttttcttttttccgaagccttctttttaa

SEQ ID NO: 15160 - DNA, 426 bp, Zea mays
caaactaagcttataatgaatgagtccatcacattatgagtatgttcaaatggtactttaatatgaagataacatgtgacacaagggttgaatttaaatttgaattcaaattgaatttggaaatggagaaaaggaagatcgagaaagaaaaaaaagctaaaacaggaacttgggccaaaaccatcctgttcggcccgcctactcttacctgcgcgcagaccagctaacgtattggcgccgacacgtggggcccaccaagcagccgcacgagtcgcgcccgctctcaatctctcactggttcgcggggctcgctcgacagttgcctcactccgcgtccgcgccataaccttatgacgatgactggcggacccacctagtctgtctcccatcgcgcgggatcggacgccgacgtgtgggaccggacac

SEQ ID NO: 15161 - DNA, 317 bp, Zea mays
agctttgtggtataaatttcttcattgaaagtactctttaccccaaataatgctgcattggtttcaaactggtcccaactcctgcaaatgtatggaatggattaatatttactaattatcatgaagccttgtacaaccaaaggaaataatgtttcagatgttccaacactatttccattgatgtgataggacaccactaaaaatgaaaggtgtctctacactgacaaaatcacatattattgttcaacattatcatctacatagtccatgttttcatagttcaatatggcatgcgtggacctctttttcacttgtct

SEQ ID NO: 15162 - DNA, 488 bp, Zea mays
  unsure (1)..(488): unsure at all n locations
ctcagctcatccacaccttcattccttaaggaatgactgaaatctctatgctgtttatttttcggctgcaccgtttatgtttcggtgtaagttctgcattccctaaggaacgtcttttgaacttcttcggcttctatttctacggtattcgcgttgaattttcgcgcttcgccttatatttcggcggtatctggctctacattccctatagaacgacatttgagcagaagacttacgctgcgctcccttaagaacggctntttgaagcttctgcaaacttacgctgcgctctttaagaacaacttattttagcttcggtgaaactnttactgcaattcttagttctgcattcctggaggaatatctctctgtagcttcagcattcttgtaagtctgtgacgaaggtatatttcattttgacataaacaaagctagtacaggaaagtaanataacaagacaactaggcttacattgattgttcttatta

SEQ ID NO: 15163 - DNA, 301 bp, Zea mays
agctttatgaacgggacccttctgcatcacgtacagacaggttcagtccaagctgtttctttctgcaggaccttcggcgacgaagcatggtcccaacagtagccccttcgcggtgctagatcgatattcgtaacgagcttgaaccttgaaaaagtctcttacgccttcggaagccgaaggtcaaaaaaacaccttccctgagctcgttggcgaaaaacgatacagtttccgagcgcatagtggccccaccctgcccggatactatttggtctttgcggtccaccgagcagggggtgtgaac

SEQ ID NO: 15164 - DNA, 431 bp, Zea mays
  unsure (1)..(431): unsure at all n locations
tataaagttatatgttctcgctctcagaagttagacaacattcttttcttggggagagactgatatctctgcctctagagcaagcttgtggttgtttcagttcttaatgcttcaaggatcaaaacagtaataatttcttgtactagctacgtatgtattctgagaatttacatggcgttgacgctgaattagatcacaaaccaactaagactagatcgttcgaatcgtcgtgcacccaacaacacattcaatatatcacanatctctactacaccttaagagtacagtgagagcgtccatcaagcatcaccgtgcccgcgcgcgcgtcttccttcctcgcattcgacatgccgcacgcgcgcccgccagtcatcgccgccgggtatcccgtccgcgagcccgcgccctcaccaaccctaccaccgagcgag

SEQ ID NO: 15165 - DNA, 323 bp, Zea mays
agcttgaattgggcctatttttcatgttgcatcattcctaggactattttttccatctcctggcatagtgtggtgtcagaggtcctcactgtaagacaatggcaggaagccttgggacttagtgcatctgccaccacattggcttttcctaggtgatagtggatttctaaatcataatccttaatcagctcaagccatcttctctgccttatgtttagctctgactaggtaaaaatatacttcaaacttttatgatctatatataaatggcaagtatttcccaatagataaagacgccatatcttgagggcatgaacaaatgc

SEQ ID NO: 15166 - DNA, 448 bp, Zea mays
  unsure (1)..(448): unsure at all n locations
tgacataaagtgttgtcagaggtcttcgccataagacagtggcaggaaaccttacggctcagtgcatctgccacaacattggctttacctgngtgataatggatttccagttcatagtccttaataagctcaagccatcgtctttgtctcatattcaattctgactgggtgaagatatacttcaaacttttatgatctgtatagatatgacaaatatttcccagcagatagtgacgccaaattttcagggcatgaaccacagcatctagctccagatcatgagttgggtaatgctcctcatgtcggcgcaactgccttgaagcatatgcaattactcggccctcttgcattaatacacagccgagtccactgcctgatgcatcacaatatacatcanaaagcttggtgatgtccggntgagccaataccggagcagtggttaataatg

SEQ ID NO: 15167 - DNA, 308 bp, Zea mays
acctgcggcctgcaagcttctaaatgatgatttcattttgggactaacaaatgttcattttgagaaagacaggatttgtaacgcatgtcaagcggggaagcaagttggtgttcatcatccacacaagaacatcatgacgaccgacatgccacttgagcaagtactgtctagttattggggatgattattctcgcttcacttgggtattctttctgcaggataaatctcaaacccaaaagaccttaaagggattcttgagacgggctcaaaatgagtttggcttaagatcaaaaagaataaaacgacat

SEQ ID NO: 15168 - DNA, 423 bp, Zea mays
  unsure (1)..(423): unsure at all n locations
ngatgtattccaacgctagatatatntatacctctgtcttttctaagaataagttccgagtgatgtgattgcaattgccacaatctgtgaacagtaaaggaatactgttcactatttataggcacacgacacagcctgtgaggaattacaatcatgcccctcataaaagtttacaacatcgactcagacctttatggactaaaaggtcattctatctttaagtcggttcgtcccttcaccttcggatatgttgtattatcaaagcttcatgaatgataccttcggcgtcacgtacgggcagcttcagccgaagctgtctctttctgcaagaccttctgcgacgaagcatggtcccaacagtggccaagatcgccgtcctcaagcctangtcatcgcagagcgcccggatgttctgggggagta

SEQ ID NO: 15169 - DNA, 311 bp, Zea mays
agcttgacaacatctttttcttctttacagacattgagatgacgtctcagattagcagcagcatcgatttcaccgtaccaatcagtaaactctctacctcccccggcacatggcaaccccaaaatgagatgaaccgtatcttttgttatcttaagttctttgccagcccctgggcgtatggtcatgtcatttggatctaatttgtccatcaaccacctgataagtgatctgctctccaatgcatcagttcgcaaatcaaatatgctagaaaatcccaacctagcgacggcatcacgctggcgaacgcttat

SEQ ID NO: 15170 - DNA, 239 bp, Zea mays
agaccttgtgcagcgtgtcgagcaggttaacaagtgggaggagcacattacagcaagaatgtgatgaccacgtctagacctctggagctgctgcatatggacctcttccgaccccgtccctatctgagcatatgaggaaagaagtatggtctacgtatttgtgatgactttttccgcttcacttgggtgttctttttgcacgataagtctgaaaccccagggaccctcaagcgcttttt

SEQ ID NO: 15171 - DNA, 315 bp, Zea mays
agcttgggaaggttctttatccctacatgagctaagcggcgatgccacagccagcccatgctagtcttagcaattaagcatgcatctagaccggccttcttttttgcaaaaataactaagtaaagcttgatgtctaatacacccttaaaagctagtgaaccatcacttctttctaagacagacacatctacatttgtgaaaagacaagtatatcccatattgcataattgactaacaaataacaaattatatccaagagactcaactgaaaacacattacatatagagtgctcatgtgatattgcaattttgcct

SEQ ID NO: 15172 - DNA, 500 bp, Zea mays
  unsure (1)..(500): unsure at all n locations
ggcaccccgttccaccctctgtgtgtttctcgggtactcctctgaccacaaaggctaccgctgctttgacctctcctctcaccgggtcctcatctctcgccatgtggtgtttgatgagtccgtatttccctactcctccaccaccacaccaccctcctccaacccctgaccttttggctattctgtgaaggctcttccctctcgcaaagagatcgtcaggtgtgacaactcctacccccttcacctgttgtagcttgtagcccccaccttcaatgccgccatcacctttcgtttggcatcagcgtatcggccatcctcatcctcaattcctcttaaagttggtgaaatgttcttgtctttcttgtaataaaagtgcaagtgacactctntctcatgcatgccaacttggtcgtcatacacatcttcccttntatgcgtcatcatcacgtgtcgctcataactntcagttaatacattgtgatctttggacctcatgttac

SEQ ID NO: 15173 - DNA, 316 bp, Zea mays
agcttggacttatctttttttggaggtcgtgcccgagcctccgttttcggcccgtgcgccatggcgaacccctcgttttcagcccatacgcaaggccgaacagccctgccgcccgtcgccgcgtgactccgtgtcgttttccctctgttccaccgtgcccttcaccaaagacatccactctaggttcggtgtgtttccacatgcttggacttagtttattttcgggttcgtgccacagccaccatttccggcccgcgcgccatggtgaaccacctgttttcagcccaaacgcatggtcgaacagccctgccggccg

SEQ ID NO: 15174 - DNA, 491 bp, Zea mays
  unsure (1)..(491): unsure at all n locations
ntgacaaagccggtgcccgctgccaagttaaagaagatgtttcgnttctaatgtcaaaagaatatgctgagcagcgccaacagtacgaggataggttgaacatgcttcgtcaggaggccaaagctgagattgacagtttggagaagagcattgatggccaggcaggacccagctcatcatttgatgatatccagttcccggcggagtctgatgatgatatcaacaatttgacccaaccaatccgactttctcaagacgaagtctcagtaagccaggctgatttcagtgagtctcaaaggatgatattcaagcgcctatgtgatagagtgctgaagaagcctanggagtacatatccctcgtcaagatccctcataatcgacctgagatacccctggccaaagctgttgcacttatgcggaagatcgcatctgatcctgagctgaaanagtnnttttgttttnccaagttgaattgctattacttttatttt

SEQ ID NO: 15175 - DNA, 320 bp, Zea mays
agcttatgaagattcttcatcccaacatgagctagtcggcggggccagaaccaacccatgttagtcttagcaattaagcaagtgtcgagttcagctctatcaaagtctactaagtatagctgaccctctaacactcccttaaatgctactgaatcatcacttcttctaaagacagtaacacctatatccgtaaaaagacagttgtagcccattttgcataattgagaaactgaaagcaaattgtaatttaaagagtctacaagaaaaacattggagatagagtggtcaggagatatagcaattttacccaaacctttgac

SEQ ID NO: 15176 - DNA, 404 bp, Zea mays
  unsure (1)..(404): unsure at all n locations
ttatgttntacccctttaatccctatttaaggttaagttccctatccagggttctatttgcaaaatactataacaatacaacttgtttaaaatttttacctagtgaatgcactctaagtgtgtcaaacatatgcaatgccaatgcttatgatgttatgctcaagttttagtaacagtaacaccaggggtgttacataggctacgcgcgtggaggccaaagtggcgcgggcggagagcagtatcgccagccaacgcgccgaagagctggaggcgaggtacaacgccctgcgcagccacatggacaaggtcgaggcctcgacgtgctcggaagtcgagcggacgcangcgcagtttgtggacacgtaccacgagctgtgtgcgcggactgctaacttcgaataccc

SEQ ID NO: 15177 - DNA, 280 bp, Zea mays
  unsure (1)..(280): unsure at all n locations
agcttgatggtctttatattttacaangatatctgggtgaatggtggctgagagatggcccaagaaattatcgagaaaagtgaaaaagattcccacgatgcccgagtagaagcaagacaagctgaagaagctgcagcacgcgaaaagcgtataggtattgttttttggcttttagcttcggcatttgtttttatggcttcggactgattaacttttttctacttcaactgaattatcttcgccaccggaacccgtcgatcccctatcggatcccaaaatt

SEQ ID NO: 15178 - DNA, 382 bp, Zea mays
acctattaaactcagcttgaccgaggcccgcgtaccggagaagtttaattcgcttaccggagttcaagaacccgccggcgcacgtggaccgggtaaaccctttcaccatttcccgatacggtgcgcgcatggcctctgtgtcatcccgtgaagctcctcgtgcccattaattgaactctcccgccgtggtttggccggagcaagcgccgccgtctatccccgccgcctgtgttcgtggccagaggagctctgaccacctctgacgccgacccgcacatcgacgtgaccgtcgcgaccttctgaacatcaccgaccacctctgcggacctacctcgcaggcggtaagccgcgccacccttttctttcacgcggctactggttc

SEQ ID NO: 15179 - DNA, 349 bp, Zea mays
  unsure (1)..(349): unsure at all n locations
gttgagcttcgtattgaaagacacgttntcgtcatttccgaatagaagatgtctcaagacaagaagacagttgctgagatgaagctaaccgaagaggagaagctccttgaggagaagactgctggatttgttgagtcaatagcaaaaacaaatacagagaagattactaaagagatactaaaaggcttgtctgaagatactgatgatagcgacagctacgatgtggagagtggaggcgaagactctgaagatcggccctggtgaccaagtcatgcagtcttcgggaaatcaactgtcaaacagagtcatcttgataatatgagaggaaggtattttcaagatatgtcta

SEQ ID NO: 15180 - DNA, 481 bp, Zea mays
  unsure (1)..(481): unsure at all n locations
ggcaccccggtacataggtcctttccctattcttgaacaatgtggaccagtggcataccgactccagttacccgaatcattgtctgttgtacataatgtgttccacgtatctcaattgaagaagtgtcttcaggttctcgatcgaaccattgaagtaacggatgttgccttataaccggacttgacatatttagaacatcctattcgagtcttggatcanaaggacagaattacccgaaggaaaactctcaagttttacaagatactgtgaaaccaacataaagaagatgaagctacttgggaaactcaagactttntggaaaagaatttccgaggctttntagcttcgtgtaaattgtaaagatgtgtaccattgttgtaatagaagaatgaaccccataccacccctggcctgtaccaagaataaagaaataaaagtatgacatgtgttggggacttngtctcanatgctatgagtcaa

SEQ ID NO: 15181 - DNA, 473 bp, Zea mays
  unsure (1)..(473): unsure at all n locations
agtggaacaagtaagccctaaacatttcctctagactcagtgtgtgtatccaacanaaatgttaaaggcatgtttggtttactgtctaacttgccacaatttgcctaactttntctgtctaaggttagttcttcaatttagccgactaaccttagacaagttgtggagcggttagctgagaacaaaacaggccctaaagctctaagagtgcattgggacttgtatgtatgagatgaaagtaaaactctaagagtaccttagtgcttaggcaatgtaagaaaaggggcaacagtaaagctttaaagtgacccgacttgattgagatgtccagttttcttcaatacggtgtgtacttatttatggataaagcacagtacaagtaatgtgacttgaactctaaactggttcaagcaccaaccgatataaactgatgatcgacaaccataccaacagaacgacggtaatatctaaag

SEQ ID NO: 15182 - DNA, 257 bp, Zea mays
accaggatcaagggaaccacacggacaagaaaaaaaactatcagaaggcaaagggcgaggcacaacctggcaaggagagggattcggaaagctccccgtccgactccgaacaagaaggaactgccgccaccgccatcaacaaggcaaccctcttccccaacaagcggcacacatgccttaaggcaagggagaaaaaagaagtaccccaaacccgaccaagctctccaaggaggacgaaaccaggagacgaagaaaca

SEQ ID NO: 15183 - DNA, 468 bp, Zea mays
ggtaactctcgaagcttcgtataggatcttcattggtgaagctttcattcgtagtacaaaggtgatcaagttatttcaacgttcgtatggtcttcgtccttgagtaaattgagatattcacctttttcctttattaccatgtttattactttttttaccaaagctaagttagtcttgtgaatgaatgggaaacaaagagtggttgttagactgctcctaaatatcgacagttgcgtttgcgtgtggtgcaattcccaacagtaaacccctcgtggaagaagaactgctccgaatcttgcgaaaccatgatttttgagttaaggtaagaatgtcatccgcgatctctggagttggctattaacgagtgaacattatattttatactcgtaaggatcaagttacgattggcataggttataaaagacaggtgaataattggttttgaccgaagctgcctataaataccac

SEQ ID NO: 15184 - DNA, 486 bp, Zea mays
agagcagtaaccggctgtttctgatacccttggaaaccggttatctttatttacttcagcttctgccatgatgtgattgttcctggccgaagacaggactaccatgtttgctcaacattcttgactgccaccacgaatgagttctccatgactgcactattgccttcatatgaagatatggttgcttcgtagctcatcagagaccgcttttgatctaaatgctcgtcgtacatgggaatctgagattgtttgtcagatgtggccaacgtgtaccctgcagttttgttgacagatgagaagtaccatcataagcgaaattgtcatgatgggaatcatcataccatccatcatcatcgaacaattcttcttgatgaatctccctgtgctgggccttagtcttgctcgtcttagccagatgacgaccgtttaatagcttcgctatttgctctgagagtggtagcacgacatctattcttcttttttgac

SEQ ID NO: 15185 - DNA, 459 bp, Zea mays
  unsure (1)..(459): unsure at all n locations
taagcttgatcattcattctgttccatttgctgagttaagaattattcatggtcattttaatgcattatttcatactccatattccacacagtttttaacatacatacaaacgagaaagataacgtttaaacaatggttgtactcataatagttgttttgcaactatccgggaggggttacataggaactacccttgtgcaaacagcctaaaatgcttaaataatgcctctttgttgtcggggaaagggaaaatctcaagcagagtggtgccaacaagatgctctttgttggtggtagggtatcattcgcaaagttcacttgaagctttctaggatgcatgaaagccagggatggataggatatgtcatatttctaatttggtaattaaatgtggcttttggcattcgttatattagtatattatctnggcatatgctgtattaaatattaatgtcatg

SEQ ID NO: 15186 - DNA, 466 bp, Zea mays
  unsure (1)..(466): unsure at all n locations
ntgccttgatccgtcgacaactatcacacatcgccttatgttctgtgatntccctcttcattccgtaccaccagaatttcttcttcagatcttgatacatcttctcactttcagggtgaatcgaataagatgcctcatgggcttccttgaggatcaactcccgaatagactggacattaagaacacaaaagcggtctttgaaccatatcacaccatctgcatcttcccgaaaatctttgcctccgccttccagaatcagtcgctggatctcactgatcttctcatcattcttctgcatttctttgatttcccgctccagggtaggttccaactcaatcgtgactcctcacgtattgttcaaaaattcgaggctcaacctgtcaaactctttggccaactcatagggcatcggacgagcgaccatcagaatgtcctgactcttcttgctcaagcctctgcgcataca

SEQ ID NO: 15187 - DNA, 470 bp, Zea mays
  unsure (1)..(470): unsure at all n locations
tgtacagttcaacacaagtgttcaaaggtgatggtccaaatgctgagtcgactatagttgtggacatcacaagtaaaggagaacattgcttatgtgagacttggtgtgcatatcttggagtcaactagtttcgaggtcatggaggcaagaagagcttcgaggcaccgagtgcatgggagaaggtcatggaggccaaggaacccaaagccaggggtgaagatgaagacttgcaaagtcaaggttgatcgagttgagaagagatatggtccatcgaggattacaatttaagaacatgactaacaacccttgaggtaatatctatggttatgtgaaggctcaagatcaagctcaaggcatagagcaaggtcactagatggagtagtgtcaaagctagaacctagaagcaacccanaagagctaagtttactttaacccctgagttgagagtcctgtgttggatatgttatgtg

SEQ ID NO: 15188 - DNA, 62 bp, Zea mays
ccccccccccccacccacagcgaacagggaacgcacgtaccccgtagcaccaacccacacac

SEQ ID NO: 15189 - DNA, 464 bp, Zea mays
  unsure (1)..(464): unsure at all n locations
ttacggacctatgaaactcagcttcttcaagatttctgtcnanatatccctcgaggacttaatgagcatgctgatttgctagctaagtcagcagcacaggggctgcccttaccttcggatgtgttcttcgaaacaataaaggcaccttcagtggaacttcttgaaagagcagtcctcaatatatctcctgtttatagtgaagactggagaactgagatcatctcttaccttcagggtaacttcctttcagatgacgaaacttataacaggaggatagaggcaagagctcgtccatatgtcatatagaaggggagttgtacaaacatggagtttgtgctccattactcaagtgtttatctagagccgaaggcatagaattgatgaaagaaatacatgcaggcctgtgtggatctcacattgtgtctaagccgttacttggaaaagttntccgtcaaaggttctat

SEQ ID NO: 15190 - DNA, 240 bp, Zea mays
aacctgacagcatgcaagcaggcagaactttttcacatcctcgggaaaagctagaggatactgaaatcccggaaacccaatcccaaaatcccgcaacaacactcccatacgggctaccacctgggccgcagccgacgcaataagaaagtccacctccccaagcacatgccataccagagagagcggcataaaaccaggttggaaaacatgaaaccagagccccacgttttccaatcgaac

SEQ ID NO: 15191 - DNA, 485 bp, Zea mays
  unsure (1)..(485): unsure at all n locations
ctcagcttcttgccaaatctgaactcaccaaattattgcagcttcctatcattataataacatgtgcttgccgattctcgatggagaagaaagtctggaacaaattatggcgttgcttcttctctgatggttcaggctgagaactaagaacacgctgcaccatgatgcgtcgaaggttcaccgtatcatcagcaccaagtatggcatcatcattagcagcaacatcactagagtcatcatcgtcaccctcaccgtcggaagcactaatgtagccttcatccgtagaaatgtatgttcgctgactcggacaatccttcttcacgtgaccaatcccataacagcggtggcaaacaatacccaaagaacgaccactggaaagtgctgtaagtgctggtgaattctgtntcttggcgggtacctgcaaaggaaggttaccaacatgtgcatcaagtgtcgagggagtatggtctgaggcatgtgtgtgc

SEQ ID NO: 15192 - DNA, 284 bp, Zea mays
agggcaccgaccatgccaaagacaccaccaccaccactgcgcagcacacctgacaggcccaggcggaaccttccgagcacgacccacatgaaccccttaagcctcgggctggcatcatcaccaaagaggtcgaacagcgccatccggaaagaacccacatcaaggccagcccatccaggtagtcccctgagcaccaccatcacggaccagagcggcagggagcggtacttggtgcggccaacacccgaaggcggagcgaaaccgacgcccagagcacaacccca

SEQ ID NO: 15193 - DNA, 449 bp, Zea mays
  unsure (1)..(449): unsure at all n locations
tcatctatgtatggatgctttgagttttcctattgtcttggcccttctgcagcttcctgacttcatggatgcaatgggccctgatccgaagtatcttatgcaaagatggcaagatgaggattgcttcaaggcattgagagtccacgaccaataattgcattgtaaggatattccatgtcaacaatgtcaaacacaacttgttcagttctagtgttgttgatgaatccgaaggttactgacatggtgatcttgcccaatgctactatctgtcttcctccgaagccacagacaggatgtgtagcatcatgaatcttatcttctggctctagcatttgtctgaacgctttatcanatatgatgtcagctgcactgcctgtgtcaaccaagacattatggaccagaaattctttgatacacaagagataacctggcatcgtngtgtgggaatc

SEQ ID NO: 15194 - DNA, 174 bp, Zea mays
acccgcacgcacgcaagcgacaggtattgttaaaaatgcaggcggcgaaacagagcaaagagcaacgaacgctgtgggaaccccaaacccacccgacggaggatatactgacgcaggcaagaaggtgaaacgccagaacacaacaccaagcgtacagaggcacccactgaacgg

SEQ ID NO: 15195 - DNA, 456 bp, Zea mays
  unsure (1)..(456): unsure at all n locations
agacgggtacaaccgtagcatgcactaatattcctttaatattacgtcaaggacttgaggattgccaagaggaaggaacaaaagaagaaaatcaatacctcttccaaaagcctcaaccatgcctccataaaaggtaacatccaaagtaataatcaagtcacacttcacactaagaaaagtaagaagtgtagtgaatgctntaaaaaggggcactcgattaggtcatgtccctatattaaaaataacttgattattaacaaggatgataaactttgttttaaatgcacaaagaagggacacttaattagatcttgtccctatttaaaacaaaaaggcattatgttagaaaagaaaatattcactaaccatgtagcaagcaagaaacaaagaaagaagaaatcttcaagacttgaagatcgcctatgctacatatgccgaaagaagggacatcaatgc

SEQ ID NO: 15196 - DNA, 311 bp, Zea mays
agctttgtaggaggatgagatggtatgaaactttggggtgcttgagggagttaattcaattcttattaactcaagctataaatcttcaaatgatctacatattcaagattgacccaaggttatttcaaattactatatcttaaactcatatcatctcgggaagagtatttatgttgtaggaagtaagaactaatcctatgccaaaaggtcaattcctacaacatggaggaaagtcaaagaatggtaacaattatgtttttaagtgcaagtatctcaaccttatcattcttatgtatcttgagtaatcacat

SEQ ID NO: 15197 - DNA, 374 bp, Zea mays
acagctggctgaagctatagagcagccggtcgagccgtctgctcaggccgggttcctggaagagaccccggcgacgatggcccaagcgcggagttgacatctttcttcggggtggagatccttggaccgtgtcaccatccgaagctgggtcggactccgccgaaggtggagtcgatgccgagggtgctgctgctccccctattgatgtctgaacctgcaggaacaatttatctgtagtgtgcgtatgtctcttttagggccgccaaggcccaatcataccgttgtcgtgttagtaagctgcagttcttatcccttgtttcagatcaggacttatttgtcggtacagaatcgttatccgacgagagttactttac

SEQ ID NO: 15198 - DNA, 302 bp, Zea mays
agcttcagcaacaggtgctttctcttctcagccgctggaccccaactaggagaccctctctcttcgggaggcccgaagccataagaggaaggctaccagtccaacgcctcaagaggatgatttggatcaagagattataaatatggagatactccatcaatacgtccaaaggaagaaggagaaaatggctaggctagccgacttgcagaggcagatagacgaagcctccgaaaaagttcgcctctttctcaagatgagccaaaccgaaggcctttacacaaagagcttcatctcgagggctt

SEQ ID NO: 15199 - DNA, 471 bp, Zea mays
ctcaagcttcagcttcatctatgttatggatagctcttgagtcagtcctgtttttcttattccttctggcagcttcctgactcccatgaatagcaatgggtccttgatccgaacgtatcttcatgcaaaggtaagcatgatgaagaattgcttcgaaagcattgagggtgccacgaccaataattgcattgtaagggtattccatgtcaacaatgtcaaacacaacttgctcagttctggtgttgttgatgaatccgaaggtcactggcatggtgatcttgcccagtgctacaatctgtcttcctccgaagccacagagagggtgtgtagcatcatgaatcttatcttctggctcttgcatttgcctgaaggccttagcaaatatgatatcagctgcactgcctgtatcaaccaagacattatggaccagaaaccctttgataacgcaagaaataaccatagcatcgttat

SEQ ID NO: 15200 - DNA, 321 bp, Zea mays
agcttccacacgcttttttattgatcagctaagcatgtttgaatagctctctgataagtcgctccagcgtttttaaggtcgaacggcatggaggtatagcaaaaagcaccgaatggagggatgaacgctgttttttcctcgacttcttttgccaggctaatctgatgatacccagagtaaccatccaagaaagacagcacaaaacattcagcggtggaatctaccacctgatctatcctatggagccccaagggaccctttggacaatgtttgttgagaatctataatcaaccacatgcccccatccattttatttttttg

SEQ ID NO: 15201 - DNA, 307 bp, Zea mays
agcttctgttcaatttaaaaaaagatttaataagagtttcctggaaaaacagtttacaccgaggcccctgggtttaaactaaatcaactcgcacaaatctacccctgcgccactgttcccctgggtcgctgatgtgggggatagatatcccccgggtccactaaaagagtaaaagacctcacgaaaggcccaagggcccgataaatcgtaaggtcattctttcgtgggcctggagagggacaaccagcaaagcagatcgacatggggccagattgatgcaaacccggacggcccacaacgttgagcg

SEQ ID NO: 15202 - DNA, 488 bp, Zea mays
  unsure (1)..(488): unsure at all n locations
tgcatcggactacanagacctgcagaggaagatagtatcgtttttcttcacttcctgtacctcagccttggaaaatctgtagctcttgctggatggaagtgcttcactgatgaattgcaagagcacacgccctgngggccctgttggaatgcctctgctggcgtgtagatggccaagctattgcagcaactgcaatctgtgaccatctctacaaaccgaagctgctcgtcgtgagttgcttcatccgaagaatgcggagacacggngtcgtgctcccgaggctggcttgtgtgattntatccgcacctgattgttaccgcatactgtagttgcgtttggtgaaagaaagctacttttgagctagttcattgngagccaaacttgctctttggtgaacgaaagctactttggaactaatttcgtcgcaatgtgggtgtggtccatgtgctcctgaaatcgctatagcaacactagattcgaaatacgta

SEQ ID NO: 15203 - DNA, 421 bp, Zea mays
  unsure (1)..(421): unsure at all n locations
actcagcttggaaggttcttcatcctcacatgtgctaagcggcgatgttatagtttgtccatgctagtcttagctattaagcatgcatctagaccggcttcttcttttgcaaaatcaactaaataaagtttgccgtctaatacacccttaaaagctagtgaaccatcacttcttctaaagacagacacatctacatttgtaaatagacagttatatcctatattgcataattgactaaccgatagcaaattatatccaagagactctactaaaaacacattagagatagagtgctcattagaaattgcaattntacctaacccttttaccttgccttgattcccatcaccgaatataattgaatcttgggaatccttatttttgacgtaagaggtgaacatcttcttctgccccgtcatat

SEQ ID NO: 15204 - DNA, 287 bp, Zea mays
caagccctggatgaactccgtgtaaggaaaccaatgccccggaccgtatccaaagaaactcttgatcttgtacaattgctttatgatgtgtagcagccacagaagagacatactgatctaagagcccttcaaagaatcttttagggtttctcagtggaaacttgggatccttaaaaaaaagtcttacataaattccaccaacctgaaatttggacagcataccgacatcttaagcaaagttacagaattattttacacacaaaaaagttctggaatataaactacct

SEQ ID NO: 15205 - DNA, 407 bp, Zea mays
  unsure (1)..(407): unsure at all n locations
ctcagccttaagaatatcaactctacgccaagtacaggtaatgcgagtttttttattgtttatgtgccatttcttggacatatcatttcgaatggaaggatatcattggatcctgctaaagtcaaagagatagtggtgtggagcatacccactaccgttacagaggaccgaagtttcttgggacttgcacgatattattggagatttattgaaagattntctaaaaatgctaagcccatgacatccgttttggagaaaggaagagaattcaagtggaatgagaagtgcctagagagctttgatcaattgaaagagagaatgatgtctccaccagtattgactatgcccgatctgcagaagggaattgatattactgtgatgcatgttgccaaggactaggatgtgtg

SEQ ID NO: 15206 - DNA, 294 bp, Zea mays
agcttctgcagttttttcgctctgaatttgcagtgaaggatcttggggccctcagttattttctggggattgagggtcatagaacttgtgagggccttttactcacacaacggaagtacatcaatgatttgttgctgcgcacttgaaaggatcaccatgcccaagagggggggtgaatagggcttttctaaaaatcaacactaattaagaccttagacaaagcttaacaagaagcccactttacctctacaaattaccctaagaaaatgactcttgaaatggaaccacccttag

SEQ ID NO: 15207 - DNA, 443 bp, Zea mays
  unsure (1)..(443): unsure at all n locations
tacccatgacgaggtatgtggccagataaaagttctatatatcttggcaacaatcggtacggtccttagacgactcagacgaagacactacaccgagactcctttctcgtgcaagtcactcgcccggtctcagctttattatttaaccccaaagtttggtacatggcagaggtacatcttttccgatgttgaatccatcaaggccctgatggattcaccatcaagttttatttttgaaaacttctcatccaatctgtagcatcacttttgttttaaaacaaanacatttgtttttcttaagcaaggctaaccatcataaaattcttttcaaaacgggtatcaaggaagggtaatcaattctaaggaaagaaatgcatcaacgaattagcacacaactcctatcacctaatgcatcaaacaatgtgataaagaattaaaaacac

SEQ ID NO: 15208 - DNA, 307 bp, Zea mays
  unsure (1)..(307): unsure at all n locations
agcttggngcctatgtattaacaaaaatccttgaaatcttggctgtcgaactgtttgccgttgtggactgttagctcggacggtactccgaagcggcaaacgatgttctgccagaagaatttttgggcagtctttgatgtgattgtggaaacagccctcgcttcaatccatttagtgaagtattcgacagccacgaaggcgaacttaagattcccctgagcggtgggcaggggcccgacgatgtccangccccaacgcttgagaggccatgtatgggcaatcaactttgtttattgcgaggggttgc

SEQ ID NO: 15209 - DNA, 488 bp, Zea mays
  unsure (1)..(488): unsure at all n locations
tcccggtatcttctagagtaaagcactnttctcttgagatttgtttatatgagaatggaagcataaggtgaggattagatctaatttgtgatctatgttttttagagaaaacctttcttaaaaaaaacacacaagctcagcaatgataagcacaaacaaatcgaatgttttgaataaaggaagaatagagtttttccaaagcacggactactcagattcgggggctaagcataactactattgcttggctcctgaattgagaactatgctaaatgcaacttatgagcactaacgttaaagcatcacatatgcactcaaaagggaggaaaacatcaagcaaaattcattttgaaatgccctatggggcaacacaaatagagtttttcaaagcacgggactacacgattaactctcatacatgcagggctctagccaaagtgaagaanaacttcactacccaatgcatgcagaagactgggcatactaac

SEQ ID NO: 15210 - DNA, 294 bp, Zea mays
agctggggaagcctatttcgagtttatcgaaaaatgacattaagttcaattggtcctctaagtgaaaggaagcctttgagcaactgaagacattatcgaccactgccccggtattggctcaacccgacatcactaagccttttgatgcatattgggacgcaactggcaaagggctcggctgagtactgaagccacagggccgaataattgcgaatgcttcaaggcacttgcgccgacatgaggagcattatccaactcatgatctggagctagctgctgcggctcatgccctga

SEQ ID NO: 15211 - DNA, 440 bp, Zea mays
  unsure (1)..(440): unsure at all n locations
ctataaaactcagctgtcagcacatttggtccctcgcttgaggtttttttgttataaacaagattagaacccaaagtctttatgttagcgcttggtaacttgtacctttctgcacaagttcaattttgggttcctagttcatgcaaatgattgacaagctaaggtggggttgttaccaatgggacaatccttgattgatgtccttttttggcatgtgtagcaacgcgttttcgaatcttgaaatatctttttccttgttagtgcttgctcatgagtagaaaaactttctttttaaccctatgctctttgctcaaatggggacaagatttattagagccctttttgacattaaaacaagttatctccttgtaataataaccattttaatganggaatgactaataatgtcctcttcaacattactacacttttatttttta

SEQ ID NO: 15212 - DNA, 299 bp, Zea mays
agcttgtgatggggattggggacttaagggtagtgcgtatattggcgataggatatgctgctaatctgtaaccgacaataatgcattctattgtgtttatcctcagcaagattgtccagtctcttttaacctttggttatacagtttttattcaccacttgtcagcattgtggtctggagcttcgatcctgatgtccggtaccttttctcataaaattctagccctgatagaaagtaggatgtacctttacctaaaattccaaatcatattctggcaagtgctctctggatttatgaac

SEQ ID NO: 15213 - DNA, 312 bp, Zea mays
agcttgacagtcttttttttataacttcaagtgcaacttgaaagctgcaataacttcaatgcttcatctttattggttgattctaaggctaactcctcaaataataccatttgtaaacattatgtaaaatatcatgcttcttgttgcttgactaaccatgcaaggaaggaaatcttacaagttgaagtgaagaaaatattgaagaagtgctctaacaattatgggttaaggaaagttgaacccaagtacaaaactctgaagcccaacaatgggagaaaagggcttgggtacaactcatacagggttaaccct

SEQ ID NO: 15214 - DNA, 482 bp, Zea mays
  unsure (1)..(482): unsure at all n locations
tgatctataatttagaagaatatagaggaataactgtttgtttccttggttagcatagtttggattaagctaacaaatcaatcaataattttaaaataagctttattccatagttgaaaattgggatgttacactcgggcaccttgaaatcctgcgacaatttaagcaaacatggacttatccggatgttagtgccgatgagaggtttcaactgtgatacatggaacactgaatggacagaactcgttgcaggaagttccagttcatatgccacaagattgattttactaatgatcttatatggtccaatgaatcgaaacaatagcttctgatttagacattcagtgactgaagactgatgatacgaatagagctttaanaagactcgatcgtcaacagagaagttgtgtggaacacctcaatggtgattactaacanatgatggtacaagtatataccagaatccgcagagataccatgat

SEQ ID NO: 15215 - DNA, 300 bp, Zea mays
agcttggatgttcttatctaagcatggatattttcacgaagcatgaatctttttctttatgaagcatgaaaagaagggaaggtgtttttttcgccgaaggctcaaaaatggtatgaatataaaagtttcatgcgtcgcaaagaagtgaattaccaaataatttacatattagattcaaacatatacacatcgaatattacagtcttgttacagcaaagctacattgtccatttaaaaatggttttaccaagaagactaatccttttttaagaactttttccccactttatttaaaaaatt

SEQ ID NO: 15216 - DNA, 461 bp, Zea mays
  unsure (1)..(461): unsure at all n locations
atgttattacagaccagactaaaagtgagtgtgagtagtttaatattatacaagccaggggaggcacaaactcctcccgataagtntaatatacaaaagatcctaagtggaggaccgagtcctcccgcacttcagtcttctttttcctcgtttggtaccaccttggagcagaagcaacaaaagtttgtcgcttcttcacctatcaacaacaaagggataaaccctgagtatggaatactcagcaagtcttatccgactaatgaaaagactctcaaaggtatgctggataaatatgaatcaaggagaggctntagcagaaatcaacttactattttgtagaagtagcttactaaagtgagtccttactttcaatcttttaacgccatgttaagcattaatagactccatttgcatgtagtctaatntcacatcacatcaagacaacatcatttttattcatt

SEQ ID NO: 15217 - DNA, 255 bp, Zea mays
tgataaaatgtgttgaggggaagaacccttggtccccaaacttgagcgggatagacccattagcgagtaaagagaagcccatctcaacaatgtgcatgtgcttacgctcgacgaccccattctgctgatgagccatagggcaggacacaagatgagtgatgccaacgataccaaaaaaagaattaagcccgtcatattcccccccccaatcgggttgcatagcaatgaattttttattgagcaacccctcaacaa

SEQ ID NO: 15218 - DNA, 341 bp, Zea mays
cctataaaactcagctgacacaagctgaaatctcgcgagttattttgtgttctaggagaaaaacacttgtggtgaccacttggtccaggggacacgtcacaagtcactcgtcgaatagggactggggacttgccgacacgccattgtagacgtgctgatggtaaccgagtctaaagggtcgaaaggtgggcccacgagcgcggtgaggcacaggccccttggtcgataaggcgaggactactaggcacaaaagcctgaccgtggttgaagagaggacatcagaagatacgattgagtgggagaccataagaaaatgtctctcaaactgttaaatatatgtg

SEQ ID NO: 15219 - DNA, 471 bp, Zea mays
  unsure (1)..(471): unsure at all n locations
tggaagcgtctataggttgtcggctaggtgtagactcctccttcttttcttccgtcgccttgaatgcaacgggttgagcttcggatggctcgccaagctcgttgattntcctcgagccttctatcatgcactcaaaacttacaaaatgcccgataacttcctcgggggtcattttagtatatctaggattaccacgaatcaattgaacttgagtgggattaagaaaaatgagagatcttaaaataacgtttaccacttcgtggtcattccatttcttgctcccgaggttgcgcacttggttcaccaaagtcttgagccggttgtacatgtgttgtggctcctctcctttntgaagccggaaccgaccgagctcccnctcgatcgtttcccgctaggtgatcttggtgagctcatctccctcgtgcgcagttntgagcacatcccanatctcctttgcattnttcaatcctt

SEQ ID NO: 15220 - DNA, 317 bp, Zea mays
agcaggcacgagcttttttcgatgacccgcgccaccggaataacgaaatcgagctcgccggagtttacaaccccgccggagcacgtggaccgggtaagtcactgcgccatttttcgatgcaatgcacaaatagcctctacatcaccccgagaagctcaccgcgccatgggattgaaccagatcgccggggttagaccggaacactcgccgccgaggagagcccccgcctgcgcgcgtggacaagaagaatccggccacccccaccgggaagccgacaaccgggcgaacggtcgaaacccccaaacccaaccccgccc

SEQ ID NO: 15221 - DNA, 494 bp, Zea mays
  unsure (1)..(494): unsure at all n locations
aggtcattntatagctaactgtcccgacaatgatagtgatcatgatcaatggaacaagagggagaaaaagaagaactataagaaggcaaagggcgaggctcatcttggcaaggagtgggattcggactgcttttcgtccgactccgacaatgaaagactcgccgccaccgccttcaacaagtcatcccgcttccccaacgagcgtcacacttgcctcatggcaagggagaagaaagtaagcactcataatactagtacttatgcttcttcaagtgaggatgagtctagtgatgatgatgagatagattactcatgcttattcaagggattagatagaaccaaggtagacaaaattaatgaattgattgatgccttgaatgatacgaatatacttttagaanagcaagaggatttgttgtatgaagaacatgataaatntgtagaagctcagaaatctctagctctaganattaagaggaatgaaatgctctcta

SEQ ID NO: 15222 - DNA, 125 bp, Zea mays
ttatttagacggccatctccaaagttggccaggaaaatctctatagaaccccaatctgaaaaggacccttaggctcccagccataaaaacaagaccgcgagaacctgcccaacaataggattttt

SEQ ID NO: 15223 - DNA, 505 bp, Zea mays
  unsure (1)..(505): unsure at all n locations
tagttggtggagaattctctactgacatctgggaaaatgacttgttttggatggtccacgaaataataaaaaagagcgaacaagatactcacgatgaaagggaagcaacgaaggcaactgaaaaggctgtggagctcgaaaagcgaataagtattgcttaatagcttttaactttattttttatttttgcgacttctaatcttatttacgttttctactgcagctgaactatctccttccccagagtccttcgagtcattaatcgagccagaggcaaaggaaccagcagaatcattaatatggccganagcattttggacgaagtcgttactcaactactgaccgaagctgcagacgaagttttgaaagaagaataatagatattgtaaaaacattgtctggaaaaataatgtaacatttgctggactatgcttgtaatanttggtgctcatgaaactttaatgtaatgtataaatggctctgtaattcatttctttgcgatgca

SEQ ID NO: 15224 - DNA, 412 bp, Zea mays
  unsure (1)..(412): unsure at all n locations
atagcgaggactatattntatatcctgctggttatctcgaacacaaaattaggagaactcatgctaagaaatctcattctgtatctcaccatgcttttatgtataagaatgaggcatctagctctacgcattctacccatgttaaaatgcctaaaaagaaaactcctactgcatcaaatgatcctaatatgtcatttaagagttctgatgcatcttatgttttaactaacaaatccggcaaagtagttgccaaatatgttgggggcaaacacaaggggtcacaaggagtcanagacttngtgttgggtacccaagctgcttgttctaacatcaaaagacccaagactgttgggtacctaagacaangcctaaattgtttgcaagttatgcattcggcgctcaagtggatatc

SEQ ID NO: 15225 - DNA, 324 bp, Zea mays
  unsure (1)..(324): unsure at all n locations
agctagagagcnttttttctttttaagaaaggctctctctaaaaacatagatcacaaattagagctaatcctcaccttatgctcccattctcatcttaacccatctcaagggaaaagcgccttacccaagaagaaaccggaaagcttacccttgaagcctggaataagcctacaaaagcaatcagcccagccgctcagtcaaaaggaccgaccgtgagaatcaaagcactaccccttagtcaaagtacacagaaaaagaggacaaaaagagttattaccatacagaaaggcaaagaatcttggaaccagagaccacaaacatca

SEQ ID NO: 15226 - DNA, 359 bp, Zea mays
taagacaatgaagaagaagatcaagaagatgaaccacctctttatgatgactatgatcaagacaaggaagatgagcaggagattcatggtcaaagaccgccacacccaagagtccaccaagcgatacaaagagatcaccccgtcaactccattcttggtgatatccataagggggtaacaactcgatctcgagtcgctcatttttgtgaacattacacttttgtatcctctattgagccatatagggtggaggatgcactaagaaactcggattgggtgctggcaatgcaagaggtgctaaacaacttcacgagaaatgaggtatggcatttagttccacgaactaaccaaaatgttgt

SEQ ID NO: 15227 - DNA, 485 bp, Zea mays
  unsure (1)..(485): unsure at all n locations
taatagacacatgccatctttcatgttgcacacaattgttgttgagtgtgtctatatgcatgatttctatttgtatgcatgcttaagaaaggtatcattaatatgacataagaaagactttgaaaatataatcatcaaaatgaatatctaatgggaattttcttgtggatcttatgatattgcatataaaagggtatgattttagaccaagtgagttaccttcatatgttgaccaatttgtaagttattttctaaccaacatgtttttaagatgctagcctttgtgcagtgatgagagatgtctcacaaggtcaccaggttgcgggttcagagtagcctctctatatttgcgttggtaggcttgccccaatttatcccttcctcagatcccactcaagccttgttcggttgtntgtgaacctaataatttactaaactcatacatctcttgtctaaaatatcaggatgacatgcctccctgacta

SEQ ID NO: 15228 - DNA, 276 bp, Zea mays
cttaaaccgaccgcagcatgcagctccgcattgatatttgttgccctgaaggtaagaaattatctcagttctccaatcttcactgtacacaggagaaatagtaagaactgctctttcaagtaactccactgaaggcgcctttattgtttcgaaaaatacatccgaaggtagcggcagcccctgggctgcaaacctggctaacaaatcagcatgttcattctgccctcgagggatattcttaacagaaaaatccttccaaagaagcttcgaaccttc

SEQ ID NO: 15229 - DNA, 453 bp, Zea mays
  unsure (1)..(453): unsure at all n locations
tcaaagctaanagcttagcggatcacagtgcgcaatagctatattatgagtgagcaggagtggttggccagaaagcgtgcaaaataagtttgcggtatggccgtatttatacgcttgatgcgttgaaagttgaaagaccccacttgtcattgaatgttgctattctagcaaaaggaaggtgttttttcggaccttcggcttaaaagccttcgtccatgtcgcaatctaaatttattaacaaattaatattgcgaggggctactgttgggggccttcggcttccgaaagtcctcaaaaacatgatttaacaatgtttctggagtataatgtgtgaacaggtatcttcggacttgtatcagaaagggagaagctcaaaagatactaaggttgacacagtgccgaagctgtgaagcaagaaagcttctgcatgttcgcagaacaaagaaccgactt

SEQ ID NO: 15230 - DNA, 409 bp, Zea mays
tgcagcataagaaaagagtatagtaattctccacaacactgtttatatgagcatcttcactgatctccaacacagaccaacacagcttctcagaataagaggaaagtggaataaaagggcttccaactagataactaacttcattaacatataacaggtaaaccaaaatgcaggggatacccacactctggtgacagtcattacaaagatccaaatctaacatagttcatcatgacaaacataaatgcacaggataagcaaactaccctgtctaactaagactaactaatagcaagactaacgctaagactatagcttctatgtatatattttcgtattaattacaagatccgactctgatgatctatggtatctaaattatcttggtcttgcaatcggagttgccata

SEQ ID NO: 15231 - DNA, 269 bp, Zea mays
agctgagcccaaactttttccaagtgaaaccaccgggaatcatgtgggcataaaaataccattctaaccattcacgaattggaccatgcagtgttggaattaggctcactagtggggggcccaattcaataaagaagccaaggtggtgggtaaaaatggcatggggcttgagtcatatattgctcatctaagtaggaaagaaccaacttatatgggggaggggaccctacatttcacatgagacaaataaatggtaatggagggtgcac

SEQ ID NO: 15232 - DNA, 472 bp, Zea mays
  unsure (1)..(472): unsure at all n locations
nacaagatcacctattcaccctccctctaagagctctcaattggtatcggagccgttctcttcaagaaagggactaaccgcccgaagagatggatcctaatgggaagggaatcatgatcaacgacaaggaaaaggagtccttcgtcaacgagccaaaagatgacaaatccaacgactctggctcgggccacagacgtaaagaagggaagaagaagaagacaaggcgcatcaaggagatcgtctactacgacagcgacgaatcctcttcttcccaaaaagacgacaacaacgactacaggaagacggtcaattcgaacttttcatttgattattctcgtattccacatagttcgaattcacatttgctttccattcctcttggcaaacctccacactntgatggggaggactacgngatttggagtcacaaaatgcgtagtcatttattctctctccatccaagcatatggga

SEQ ID NO: 15233 - DNA, 487 bp, Zea mays
  unsure (1)..(487): unsure at all n locations
tgcatatggacttaaaatattttgacttaattctagtccacaaatcatgagcatcaacaaaacaatcattgtcactactcatgatagcaaaataagcatctcaagaaagggactcaactaagatgttgcaagcatggtgattgagagataaacatcttagttctacctcagaaggatttttactaatatcgaagggaaaatacttatactataaatatgtatcaactctggattaatatacatgaaatcattataaatagagacagactaagatntataattggaaccatcctctanaagaagttgtagagttacctcttgtgacgacatcatcttctccggacagctcagcccacactagagagccaagctccgatactaattgaaagttcctttngcccatgaacatgatctggatgtcgcatagagggnggtgaataggcgaaatananataacacttaaaaactagagtttcttactctactc

SEQ ID NO: 15234 - DNA, 316 bp, Zea mays
agcttttagaggcattatagatccaaaaagaataacaacattcattaatccacatggatatgccgcttagagataagttgataaaacaagcgtcatgatcctcgaagaaagagtatgagaatgaccagaaatgagagatttaggcaagatcaacatccgatacttgagaacgggtcatagcagataaccagataacgaagcagaatcattaagggatccaaaaaatcgggaggttagggcaaatttaatcacaaaaaaaccggtttaccaaatccagccaaagggaaaggtgggcaaccaggattactttggagaa

SEQ ID NO: 15235 - DNA, 482 bp, Zea mays
  unsure (1)..(482): unsure at all n locations
ntactcaacagcatactctatgcacaaacaacgttcgttatataacatctttgttggtaaagataataaaaactgaagaaaagttttttaccttgaaattagaatagaataagctaccgacaatatgttgtcgtcggtagcagcttatgtcggtctcaagcttcgggaaaccaatactctntgatagagtaccgataaccttcgctccggtttgatctcggacgcaacctaacttttcatcgtcaacgccaccgaagagtagtgcccccggttgatatccgcaagatatggcatattcttttaattcttctttcttagccttcgtcaactcttgtccaactaagttttgaaagttgaaaatttcctcttccgaagcatcttcgcgaagctatttcttccncttctcaagtactgtagccatggtttcttcagtggctgcggcagcttcttctgtggccatgatcagaagtatcttatcaatg

SEQ ID NO: 15236 - DNA, 304 bp, Zea mays
agcttctaaagggagaacacattttaggactaacaaatgttcattttgagaaagacaggatttgtactgcatgccaagcagggaagcaaactggcacccatcatccgcataagaacataatgacgaccgacagaccactggagctcctacacatggatctattcggcccgatcgcttacataagcatcggcgggagtaaagactgtctacgtattgtggaggattattctccctttacttgggtattttttttacaggaaaaatctctaacccaaaagaccttaaagggatttttgagacacgc

SEQ ID NO: 15237 - DNA, 412 bp, Zea mays
tgaaccgatgacccgcgtcaccggaatagctaaactgtgctcttctagagtcatcaccccgccggcgcacatggaccgggtaaatcactgcgccatctttcgattcaatgcacagatagcctctacatcaccccaggaagctcaccctgttcgtggattgaactatgtcgccgtggtttggccggcacacccgccgtcgacgagaacacccgcctgcacacgaggaccgagcaattctggccatccccaccgtcgagccgtacatcgctgtgaccgccagagcctccccgagccaaccaccgccctcgccggacctatctcgccgtcggtaagccgcgccacccctttcttctctgcggatactgtatacacttgggaaagaccgcggcggagaggaagagaaagtcacggg

SEQ ID NO: 15238 - DNA, 483 bp, Zea mays
  unsure (1)..(483): unsure at all n locations
gagagtntctttaagaattgtaagatggtagttggttatggtcgtcgtactcagttttagaanaatttctggattggtgatggccctctggctttgaggtttcccattctgtttgatttaactgcagacaaagacatctcggtgtttaaagttttgtcttcggattttgaggctctntctttcagaagaagaatgactggcgaccttcaagggctntntgatgagttagtggctttatgttctgattttaatttgtcaagccatgaagataaacctgtttggagattgggcaaaaatgggttcactgtcaattctttgtataagaaaaattctttggaccagatcaaagttccttacagatttctttggaaatctaaattaccacagaaaataaaagttnttctgtggctggtgattagaaacaaaatccttactaaagataatctgaanaaaagaaattggaaagggtctgatgaaatgtgt

SEQ ID NO: 15239 - DNA, 248 bp, Zea mays
agcttgggagtgggtgaaggtttctctgaaagtgtcaaaccattgcactcaccaaccttcccaaagcaagcgacactcccatccttagcagcaaagcctaaccccggtccgccaattcccctcttgaactgactgaccatcatgcccaactggggctcactgcacgacacccaactcaagacagatcaaaggtatgtgttttcttccttgattcttggcttgtcgggtctacaggactcaagggcgga

SEQ ID NO: 15240 - DNA, 464 bp, Zea mays
  unsure (1)..(464): unsure at all n locations
gggctgccgcgcaatanaggccggccgcccccgctgaccatcgatttccgtcgtgatccttgcatcaatccggaccgggtcgtcagcctcgttttcggagtataaaatcgaaggtcgaacctccctgttcccatggaaagctcctccgccgtaccctgcccctctgctcgactccaccgccatggccgcaacaacccgccggatgcgcgcgctctagccgggcacgacaatggccttccaaccacctcgtatcgctcgggcatatatgacccatgtcgctgcaactccgtgcccttggttcaaatggatcgaagttgactccttgcgcgtggaagggagcataaacggagaaattgggtgcgggcgccgcagtcgattccgcctgtacaccatcggaaggtctgtgggccatgtctgggaagcttcttatgcagccgcagaggtgctcgtccatcatctctggc

SEQ ID NO: 15241 - DNA, 277 bp, Zea mays
ccaagcttttccggtaatgaagctcctggtatatttaacaacctcatgataacagatgattagctgtgtttttgaaaaacttcggaagacgaagactctcgacaccgtcatcggttggttggttgtattattaaatttgccctaagtggcgcaaagtataacttgcatcctgaatgcgcccgcccctccccgaatctagatccattttggatcatcgttacaacgtgtgttcacactagagagaagctcgaccaaccgttttgttcagcatgcctca

SEQ ID NO: 15242 - DNA, 429 bp, Zea mays
  unsure (1)..(429): unsure at all n locations
ctatacacactcaagctngacacanacttgagccaactcgttagctcgaatgagctaatatttatcatcttttcacagcctacacttatattggatgaattaataaatgacgaactatgttaatttggcgtttaattgatatgatatatgaaattatgagtattattactctcttctaatgttaaattagtatgaaattaactagcaattgattatatagttgtgtgtgtatagtttacgagccttgggcttccaatagctaagagaagccctggcctaatgctgccattcagttcaaccgcaccagatcccggacgtctataaaagagctccaagccaccacggttcattttttgacgcctccgccacgatgcacgagcgacagtcgcccacctatgcgcacacgacgacggcagtttcacgagagcg

SEQ ID NO: 15243 - DNA, 316 bp, Zea mays
agctttggcacatcggtcttctcaatgcgtctcggtctatgtgtcaagaccttcttcactttcttcgccttcggcgcaccagaggatgctgaagcagcattttcctttttctcccttgtttccgaacaggaaaccagtaatcacggtaaacaaacccgataacatcgaataccctgttcaacctctttctccctcgagcgccaaaggcaaccatcatagcttcgtcttcaaccttcgagtaagctccaagcagctcatcactaattgcctctatagcatctagccaggcatcatttgggtcatcaaaatggcttat

SEQ ID NO: 15244 - DNA, 506 bp, Zea mays
  unsure (1)..(506): unsure at all n locations
tatgctntgtgaccacatcatgacatcattaataacgtgcggtacaatgatgatattganaaaggaaattagaaagtggaattggaagttattgtgagagatatcaaganaagagaaggtacagtgagaccattttaaatccatcttctttaaagaacacttattcatagcttcttcaatctaaatgcacaaaattatagttcattccgtgtttcactaatatcttctggtgctacattcagtatcttactatcttattcaatttatgcatgtcatttatggccagcatcaacatgctggtactaagaacaattccagtggtattaactatcttttctaccatcttccaacatcaagcacttcaaaagcactcaaggatgatatcgtgttcacattgctccatactacccagcagaaagatattctgganatattattcagcannaatatcgganaacatagctagaagttctgctaggacagtacacataacatgagagcaacag

SEQ ID NO: 15245 - DNA, 323 bp, Zea mays
agctttgaaagaaatttttgattatatcatccgtcatgcttcgggaaaaaagctctctaaagaagaagaacgagaagctcaacactatgcccagaagctgaaatatccaaaggggacattagttttcagcagcagtggagaagaggatttcttgtattgtctcccagacagcaaggagatatctgtctgccgggagatgggcagaagcttcggattcccgacattagaagatgggctctcagtactgtcaaaagatgaattggccgatagtttagcatataacagcataaaggtgtgtaattcaatttttgtattttaaaaaa

SEQ ID NO: 15246 - DNA, 421 bp, Zea mays
tcagcttcacgctctttagcttcatcaacttgctcctcagcttctttattctgtacatatttaagtattgtaagaattattcaagcttaaagggaaaggtaagcacaaggtatgcttttgttaccagcttaagatgacttctagctttgtcaccagctatgcttcgtccacccttcgtccatattagttttataaatatgtttcctatgcttcgggcaagaatgagaatatcaactagatctgctggtgacaaactaaagttgggcctattaacaatgttcccatgtgtactaccagatatctggaaagcgacagctgtgccccgagaagctaccagagcacagaaatcaccatgtccgactataatttcatcaaagtcatcaatatcaccctcgatatgttcaaaggctcctggcaagtc

SEQ ID NO: 15247 - DNA, 312 bp, Zea mays
  unsure (1)..(312): unsure at all n locations
agcttggcatggtatatgccaaagctgnggcattgatgcaaaacctttttgtgctggagtgaacgaagtctccttgttgactggcaatcacactgatgtggaggcctcaaaagagaaccgtggagcatgcagtttgaacaatgatcgtgctgatgctctagaagaagaggccaatgtttccacagctaggataggtcatgttgagagtgctgaccctggtggctctgtgggtgtataaaaggaaattttcatggcttgtaatgaggagcctgagggggagccaactgggcaacattggaggatcggctttct

SEQ ID NO: 15248 - DNA, 271 bp, Zea mays
ttatataaccgcagctgcagctgggatgggtaagtttttaccaaggggtcaaaccattgcacttgccacccttacccaaacgagcgacactcccatccttaacagcaaaggctaaccccggtccgccaatgcccctcttaaactgactgaccatcatgcccaactggggctcactgcaccacacccaactcaatacacatcaaaagcacgtgatctcatccttgatacttgccttgtcatgtctacaagaatgaagggcggactgttaacc

SEQ ID NO: 15249 - DNA, 460 bp, Zea mays
  unsure (1)..(460): unsure at all n locations
tacaagctcagacaggagaaagctgcttctgtctattatccgaagcncangctttgatgcgacgacgtgacagagcataaagtgctattgggatctcaactgtccgaacaacacgagacaaccttgataacgtctctgttcaacaacacagatgtgtttgcatggtcacctaatgatctttgcggagtcaacaaggatgctattgaacactccgtcaatgttgatccatccttcagacctataaagcagagggctttgaagatgtctgatgacaaagccgaaggtgctcgaaatgatataaaaagactcctcaacgccggagtcatgagagaacgataatacccagaatggctggctaacactgttatggttataaacgccaacagcagatggaggacgtgtatagttntactgatctcacaaggcctatttgatgatgaattctcatgaccggatagat

SEQ ID NO: 15250 - DNA, 315 bp, Zea mays
agctggcacacatattttttttgaatacctccgatcatatctctttaatatgccacgactaatgcgtttccaagcctatatcaaaccaaatcataggtatattgaaagggaattggagtcttcggcgaaaacaaaagcttccactccgtaactcatacttcgccaccactccgagcaactctcttttcttcaggggagaaaagagcatcaaggacaaggacttcatccttgggggagaaaggaaaaagcccaaacccaaaaggaacccgtctttggaaaaaacccaaaccccctatttaagaccacaagggaaaa

SEQ ID NO: 15251 - DNA, 476 bp, Zea mays
ctctaaagggagagcacattttacgattaacaactgttcattttgagaaagacaagattcgtagcgcatgccaagcaaggaagcaagtcggtgctcatcatccacacaagaacatcatgatgactgacaggccactggagctcctacacatggatctattccgcccgattgcttacataagcatctgcgggagtaagtactgtctagttattgtggatgattattctcgcttcacttgggtgttctttatgcaggaaaaatctcatacccaagatactttaaagggattcttgagacgagctcaaaacgagttcggcttaaggatcaagaatattataagcgacaacgggacggagctcaagaactctcaaattgaaagtctccttgaagaggaaggcaccaaacatgaagtctcttctctctacacgccacaccaaaatggtgtagtggagacgaagaatatactctttagacat

SEQ ID NO: 15252 - DNA, 220 bp, Zea mays
ccttggacagcttggcaagcagggaaaccagtgggaggaaccccttacaacaagaatgtgatgaccacgtcaagacccctggagctgctacacatgggacctcttcggacccgtcgcctatctaagcataggaggaagtaagtatggcctaactattgttgatgacttttcccgcttcacttgggtattctttttgcaggataagtctaaaacccaggga

SEQ ID NO: 15253 - DNA, 462 bp, Zea mays
cttgcctcctcggaccaatccagaaatgccacgacgctttggagagtatatatggcgagagtagcgtgtaccctccgtggctataggctatacggtggtgtatctgtgctctcggttggcatgaacccattctagtcttgagaaacccggtggcgagttaacatgtgcaagggttaagtgctacatatgtcgtgtggttggagatccccagctgggtattaatcgattcagatcgccgttacttctatgacatgaagacttggtcactgacttacatgtagcaatctagtgaactaaaaggatgataaaagacggctagtataagtcaagtgtttgatctacgatagaaagaaatctagatgcacgtaactagttaatctgataataaaatgcgtcttaatgatccaatcttattaagctgttctgcaagcagagtcttgaatcctgataagctttaccttg

SEQ ID NO: 15254 - DNA, 425 bp, Zea mays
  unsure (1)..(425): unsure at all n locations
tacttctcccttccttttcncctcctcccctctccctcctccctaccatacgctagggnncttgttgttcttgaccccccccgggacctctaatcacctgcgggctgcagcttgacactattgtattggctcttatcattaagagctttcgacaaatccccaaacaaaggaaggggaaggaactacaaccccattccaagagggtgtgctataggtgtggtaagtccggtcactttatagctaaatgtccctataccagcacaaggacaacgacaagaagggggaagaaaaagatggaaaagaaaagaatattccataagggggggcaggcacacatggggcgggaatgggactctgaccaaagctccaccgacttctcctccgaagaagacaccgcccacatcaccgtcaacaagggactcccc

SEQ ID NO: 15255 - DNA, 486 bp, Zea mays
  unsure (1)..(486): unsure at all n locations
tccacccgaatctcggagtttgtaaagcctagtggaaagtatatttacatatatgtgcttaaatgttattgaaagttatgttttaatttctacattgttttctgtttgcaagacttggatcgacgactcgttcacaggcacaggacactacaggcaggtgaacatggtccttggtaatcttgttcgtctgcactggcctggtcttgtgactttgcctactggcgagtctgtccccgccaccacttgggagcattatcgctatggtgtctatagaacgtttggcaacacacaggcactagtttgggatgcattctaagtatgaattgtttatactaatttagtatcccatatatggttgctcttatgataacactattttntntgcagaaacggtgcaagttgccggacgatggatcatatgatatgaacgctcgttacgtgtttgagtataacgtgaacgttgttgttgcagatgcaatgtactat

SEQ ID NO: 15256 - DNA, 282 bp, Zea mays
agcttgaatttaagtttgaattgaaatctgttaatagagaaaatggaaaaataaaagaaaataaaatagaaaagggtaaagacgcataactgggccttgagcgggttttcggcccatctgatctatccagccgtgtggcccatctgaattccttcccctcacgccacgtcccactgcctgaccggtcccacccgtcagctccatccccctccaccggaatcccccgtacatgccccgcgcgccccgggggaatcacatgctcggttggggggggggggggaa

SEQ ID NO: 15257 - DNA, 391 bp, Zea mays
  unsure (1)..(391): unsure at all n locations
ttttcttctgatgaagtaagctctacactggagcttcgtctggttgcgagagtcaagcttcggctgtggttaaaaatgttggcagcgaaacagtgcaatagcaatgaatgctgtggtaacttcacacctacccgtctgtttatatagtgctgcacgtaagaacgtgaatcgtcagaatntttacaccacgcaaacagctgcttacacccgctgcgcggtggaccgcagagaccaaatagtaaccctgcaaggtgggaccgctacgcgctcggaaactgaatcgtttctcgacaacgagctcaaggaaagtgtttttcggaccttcggcttcctgaagcctaagagacttttttcacggatcaagctctgtacgaaaaacgatctatcacca

SEQ ID NO: 15258 - DNA, 258 bp, Zea mays
agctttggctgttttatgcgggtagcaaatctaaatctaattcctaaatttaactttggcaaaaagtataagtgccctgtgtgtgttgaatcaaaacaaccccgcaagcctcacaaggctgctggggcgaggaatttggcacctctaaaacttgttcattctgatctgtgcgagatgaatggaattttgacaaaaggtggtaaaagatactttcttacttttatagatgactccaccagatattgctatgtggatctc

SEQ ID NO: 15259 - DNA, 443 bp, Zea mays
  unsure (1)..(443): unsure at all n locations
gaacatatgatgatgtctaaggacagctcggtgtttatgaggaaaaacgactatcaaaactcccccttatttattgaacatatgtcctatcaacatttatgtaagatacatatatgcaaaaagattaatacttccttttgtacctttaccatgatgtagtgtacttcccatcttgaaagtagttaatctctcgagagcttctccacacttgtgcctgattctctctcctaactttttcttgttgctaagacaccaaacttagaacaagttatagtattgggcacaagaagaaacttctattctcatgattatcaaaagatgtcaattgaagcgaactattacggctaccaattgaaagataccaattgcaaagttcatttattatcatggctccatgatanttaagaataagcatctattatcaccagatattatagagcatg

SEQ ID NO: 15260 - DNA, 54 bp, Zea mays
ccccgacccccgcacagagaacgatcaaaacccgacaccgcacaccgccacccc

SEQ ID NO: 15261 - DNA, 478 bp, Zea mays
  unsure (1)..(478): unsure at all n locations
atcgtcgtcatcacatctaggacattggccatncgtattctattgttgtcgcagctagacctctttgtgccttcggcaccgtcactctagccaaaaggcttaaaacttctaatgtttttgtcccttcaatgcttggatcctcaattttgtcagtcttcagcattgcaaccggatctttaatcctctacttaagagcaagtcctcttgcttcaatagctgaagaagtttcaccgccaaattcaaacactatggccaggtcaatgtaacacggtcgaggggtaaagaccttcaactatttcctcttcggtgcatgctcgcttgaagcagtcgaagcatcactctttccacaagttgcaccctttcttttctgaccccgcagcgggtagcgatagtcatggtacacaaatccaatagcatcaaaaaccctaattagacttctcttttttcagctctctacagccgcagatagtggattatc

SEQ ID NO: 15262 - DNA, 320 bp, Zea mays
  unsure (1)..(320): unsure at all n locations
agcttctaaagggagaacacgtgataggactaactaatgttcaattcgaaaaagatagaccttgtgcagcttgtcaagcagggaaacaggtgggaggctctcatcacaccaaaaatgtgatgacgacatcaagacccttggagatgctgcatatggacctttttggacccgtcgcctatctgagtataggaggaagtaagtatggtctagtaattgttgatgacttttcccgcttcacttgggtgttctttttgcaggataagtctgaaacccaaaggaccctcaagcgcttcctcaggagagctcanaatgagtttgac

SEQ ID NO: 15263 - DNA, 407 bp, Zea mays
  unsure (1)..(407): unsure at all n locations
tcccttcaccgttccttcgtacnactcctcgcaatcccgtttcataaccgtcttcgattntttctgctcggccgggacgtgcggcttggatccgctgttgggatatataaatcctgatcgcttcttgcttgatccgaccactacgctggtaccgggcctggatcttcgtcgcgagccatggccatctggcaaaacgcagtgccgagccagtaataatggggaagaaaaggacacctcgcgtacatacaggagaagaaagaatcagaggatggatcgtatgctggccctgtggacctgctgggggatcccgggctttcggtggggcacacccgcatctggactcactcggcgggaaagaaaacacactggttctcattcttgctccggtctcggtaaaatgggttaac

SEQ ID NO: 15264 - DNA, 431 bp, Zea mays
  unsure (1)..(431): unsure at all n locations
gacctataaaactcagcttctactggctaaagtggctccgagcttcgtcaccagccattnttcttccgtcgtttatccaaatctgggtcataaacctgtttcctatgcttcgagctacgctggggatgtcaaccaaatctactggcgacaagctgaagtttggcctattaacaattgtcccgtgtgtacagccaaccttcaagaaagcagtagccatgcctcgagaagctaacagggcgtagaaatcggcatgcccagcgataacttcgtcaagtgcatcaacttcgccctcaatatattcaaaggtgcttggcaggttgtcagctgaaggtgtaaacttatcagagctggctccaattgagtgaaacacatgcttcagccgctgcacacatcggctgccgaaatctaagcattnttcctgaatctctttc

SEQ ID NO: 15265 - DNA, 325 bp, Zea mays
agcttgtgaagattctttatccccacatgtgttaaacggcgatgccacagccagcccatgctagtcttagcaattaagcatgcatctagaccgacctcctcttttgcaaaatcaactaaataaagtttgccatctagtacacccttaaaagctaatgaaccgtcacctcttctaaagacagacacatctacatttgtgaataaacagttatatcccatattacacagttgactcacagacaacaagttataaccaagcgattcaactaagaacacattataaataaaatgctcggatgaaaaaacaaattttcctaaccctttca

SEQ ID NO: 15266 - DNA, 222 bp, Zea mays
caaatggtgctcctcggtctgagactatagtccttggtatcccatgcacacgaactatctggtcaatgtagatctctgcatactcctctgtcctgtggttggtgtgcactggcaaaaaatgagcagtcttagttaatctgtccacaataacccaaatagaatcatggtgcctggaggtattgggcaatcccactatgaagtccatgcaaatgttctttcatt

SEQ ID NO: 15267 - DNA, 279 bp, Zea mays
agcttgagtaatatgctaaggcgatcatgacgaaggttaaaataatcacgaagctatgcgtagaaaagcttcggcatgtcagcaggaaaggggaaccgacttaaagatgaaaaaccaaattagacctcgaagaattacgatagggttattgataaatgtaaagggcattaatgtaattttacatgggctgcgtcccgtgcctataaatagaatgaacagtacttccgtactggtcacgctgactaaatattggcattacgcttggacccttacttttct

SEQ ID NO: 15268 - DNA, 499 bp, Zea mays
  unsure (1)..(499): unsure at all n locations
ctagtccacattgtgggcttgtgaagcttgctatgagaatatgcatcacagntgaaaccattgcgtgcatagatctgttaagagtaaaatcaaatttcaagaactagttctacagcacagacagaattgcgcgacatagcatgctacagtacacaatcatcggaatcaaaattaagtgagccggcattgatttgatcttggtcctccacatgcatgcagggcatgaattcagattcagttgtcttgttatgaaatttgcaggtaacataatagaatgtgagcatttggagaaacatcagaaatgtcgctctttataacaggggatgaagcccactattttgattatcaaaaccacagcatcagaagtgaagaaaaacaagagacaagcttctcatattatgagaagcacatggcggtgattctactaatttgaccacgcatagaccatatacacacaatgcagatggaagtatagagcaagaatactataccactggat

SEQ ID NO: 15269 - DNA, 419 bp, Zea mays
  unsure (1)..(419): unsure at all n locations
tagtggtgagtgagtgtgaanatgtgctactcctctcttttgggtaaaacctcanagtatcgccttgctctgaaaagaaatgagtaacttcaactccaccatatcaatcatgtaccgtataggtctctccctctttacgggtgggatgagcttgcggaatactaatgtattcacccagatttatttatgtttttcagctactaaagacttcctttctgctatgttcgactagaaagggggttgtgtctacacctagtctgcctgtggcttgagctagatttcttccactgtgttgtgcttccaggctcactagagcttgaattttggtattgtaataactactatttaaagactttgtactatttgaagaaatgaatgtgtttactagcctcctgngactagtaattgtatcacatttg

SEQ ID NO: 15270 - DNA, 315 bp, Zea mays
agcttttgctatgtccaacttgatgaaaagagatggcttcttggatttgggcagcttctggattactctttggacatataaaaaattgtcatgaatgcaccttcccttgataaaggcattttgtgagcgagatactagttgtcccagttttggagccaatctctcagccattacctttgtgattatttttgctaggctattgatcaagctgatcggtcgaaagtccgtaaggtgcaaagcattctctttttttgggaagagcacaatattggcctcgttcgcctagggcagcttggtagtgcgtaaattggaaaa

SEQ ID NO: 15271 - DNA, 503 bp, Zea mays
  unsure (1)..(503): unsure at all n locations
tntntcggcggcatgacgaaagtgatgcttgccgattgtgttcatagctcaagatatggaagtgagttcaccggaggtgggcgccaatgttagggacttgttcttaaatactatgaattaagaacaagacaacacaagatgttaaatgttaatacccttcgtccttcgaagcattatttcccttaagacataatgatcttcagacgaaagtcatgaaagacataccttcatcattgcagtatatgttaaataaaagaagaagcatataaaatatggaatatgaagtaaaatgtaggcaattatatgttgttatcaattcatttctgtattattattattgaagaataaaaacgacatcaagttacagatgtaccttcagcttggaaagaagtaaaagtacaagcgtgacgcanaaagtaaatgccaagtcagcgtgaacagtacggtggtactgttcacctatntatatgcacggaacacaacccacattaaaatacatccat

SEQ ID NO: 15272 - DNA, 236 bp, Zea mays
tttgttttaaaaaaaaaaaacctttggcacctggccaaccagggaaccgggggggcattcctctttaaaccagaaatgtgtgaccaccttcaaaaccccttaagggcctccccataaattttttcgggccggtggttttctaaacatcgggggaaaaaagaatgggcttgtttttgtaaaaaatttttccccctttacttgggggtcctttttgaggaaaatttggaaccccggaa

SEQ ID NO: 15273 - DNA, 462 bp, Zea mays
  unsure (1)..(462): unsure at all n locations
ctcgagccagagccataganatccactctcctttggatggcgatattatcttatatctgtccgaccagagttgtacccattcttgtgccttcgttatgatagagtccncactggaaaagataccagtggtccgtgactaccctgatgtgtttccggatgagttgccagggatgccacctgaccgagatattgagttcgcaatcgagttacaacccgggactgctcctatcttcaagagaccctataggatgcctcccgcggaattggcagaattgaagaagcaattgcaagagatgttggacaatgtgtttattcgcccaagtacttcaccatggggatgtccaacattatctgtgaagaacaaggatgaaagtctgaagatgtgtggtgactaccgcctttctaatgcagtgactatcaagaacaaatacccgctgccccgtattgatgttctgtctgatc

SEQ ID NO: 15274 - DNA, 475 bp, Zea mays
  unsure (1)..(475): unsure at all n locations
gacctatagaaactcaagcttaagttnttcttctcattatcaatatcttgtaacattctgtgttttttaccatagagaagatatatcttctccatagatttacagcgtcagaaaaattaccgaagcactaaagctcggtcttaagagctcgtgattacagaaagtatctccgaagatataaaaaagtcgttctacggaacgcagcgtaagttgccaaagttataaaaagtcgttcctaagggagcgcagtttaagttttctgctcaaaagtcgttccaaagggaatgcagagcttacagcgaataataaacgctgattccgccgaaatagaacgcgaagaagctcctaacggaggcttacagctgaaaataaacgttgattccgccgaaatagaaagtgaagaagctcctaaaggagacttacagcgaagaataaacgctgattcctgcgaaatagacagcgaagaaagctctaa

SEQ ID NO: 15275 - DNA, 328 bp, Zea mays
tctaagtcaactgcggcaggaagcttaagggaaaagttataaaatgaccccaagaatgaacttgcattatccttatacccctaaggtaccaaaaaccctaattggaaccctggaaaaccctaaaaccaaaccctaggggcttatgggcaaaattagtccacttttggactaaagggcaaaaaccaagttaaataagtatataaagtcatttggttcacaaatgtgtggacttgtaagccaaatatctggattttggacttaattgcaaaatggacctcatttgaggtttatactaagtctgaaattcagtgttgagggctcaactttg

SEQ ID NO: 15276 - DNA, 448 bp, Zea mays
gcagtgactggctgtcgttggaaccctaggaagctggttatcaacaagtccttcagcttttgccatgaagtggttgtccctggccgaacacaagagtaccaagtttgtgcaacagtcttgacagccatgacgaaagacttcgccatgaccgccgtgttgccaccatacgaagatataggtgcttcatagctcatcaagaattgcttcaggtctgaatgaccgtcgtacatggggagctgggatggcttgtaagactggggccaaagtgtagcctgcagttctggtgacagacgagaagcatcatcaaaagcaaaatttccatgatggaaatcattataccagtcatcctcattgtagaagccctcctgatgaagttctctgcgcggaggccttcgattctagtcatcctgagcaagatgacgaacttcttccgaagcttcatctatct

SEQ ID NO: 15277 - DNA, 292 bp, Zea mays
gcagcagcgactcccacattaattgttgtttttggcgcacgccttatcttatcagcttacggataagctaaaggataggactaaagccgaacgacaaaaccccgttcgtgatagagaccggcaaagggacgcaaaaccctagctgcacatacaaacgtatggctatcctcatacgaatcgcttaagataaaaaatagacgcctacattagcgggggaaagagttttcctaattcaccaccctcttaggcatccataatccctgcaaacggaattggaactaccggcccattt

SEQ ID NO: 15278 - DNA, 416 bp, Zea mays
tacttgtcaaagcaacaacacatgccagcacaacaactacataccataccagtaacttggcctttcgcatgctggggactggatatgatgggacctttcaaaaaagctcaaagaggatatacccatgtattggtggcgattgacaaattcactaaatggatagagttcaagcccattgcttctttaacctctgccaaagctgtggaattcatacaagacataatattcagattcgggataccaaacagcatcatcaccgacttaaggtccaacttcaccagttcagaattcttcgacttctgcgagcaaaagagcattcagatcaagtacgcatctgtagcacacccaagagccaacgggcaagtcgagcgagccaacgggatgatattggaggcactcatgaaaagggtcttcga

SEQ ID NO: 15279 - DNA, 214 bp, Zea mays
ctgcagcagctgctagctgagatatataccctggacgaacgaaaccacctcagtacaccaactccggctataaaccggggatatattaaagactgctctgtcaagaccctcgaccgaaggcgcttttatcgcccaaaagatacttgcacaagtacgggcagaccctgggctgctgactcggccattagaccagcccagtcattttctccacgag

SEQ ID NO: 15280 - DNA, 463 bp, Zea mays
  unsure (1)..(463): unsure at all n locations
ctcatattctgctgcattattggatgctgagaatgataactgttgatcttatttgagttgttcacctctaggtgcagagaagaggatccctgtgcctgcccctgcagcttcaacgagccatagaaatacatccgtcatacttctgcagtctccgagttatctagcacttgttgctcggtccattctgatacgaagtcaactagtgcttgagtcttgattgcagtacgaggtcgaaactcaatgttgtgagctcctagctcgcaggcccacttggctattcttccgatggttctttattgtggagaatatcccatatngaaaatccagtgactactatgactttgtgatcgtcaaagtagtgacggagcttgcgtgcagttagaagtactacatacaatagcttttgaacttgactgatgaaatagacggcgtgttgtactgcgtatgcatgtccttcttctac

SEQ ID NO: 15281 - DNA, 377 bp, Zea mays
cgttccggtttcctgattttggttttcttttcctgtttctcactccccatgttgactccaggccgatgttcttcttaccgaccgggaccttatagcattgcagcctgcagctttaaaggaattttttttagattaccaacgttcttgtggaaagacagatttgtccgcatgcacgcagggaagcaagttggcctcatcatccacctaagaacataatgaccaccgacgggcccctagaactcctacacatggatctattcggcccgatctgttacatatacattggggggagataagactgtctatttattgtggatgaaaaattttcgcttcacctgcgtattcttctaacagaaaaaattcatatccaaaaaacc

SEQ ID NO: 15282 - DNA, 478 bp, Zea mays
  unsure (1)..(478): unsure at all n locations
tctacagggagagcacattntacgactaaccaatgggcattttgataaagacaggatctgtagcgcatgccaagcaggaaagcaagttggtgcccatcatccgcataagaacataatgacgaccgacaggccactggagctcctacacatggatctatttggcccgatcgcttacataagcatcggcgggagtaagtactgtctagttatagtggatgattattctcgcttcacttgggtattctttatgcaggaaaaatctcaaaccaaagagaccttatagggattcttgagacgggctcaaaatgagttcggcttaaagatcaagaaaataagaagcgacaacggaacggagttcaagaactctcanatcgaaagcttccttgaggaggagggcatcaagcatgagttctcttctccctacacgccacaacaaaatggtgtagtggagaagaagaatcgaactctattgggacat

SEQ ID NO: 15283 - DNA, 520 bp, Zea mays
  unsure (1)..(520): unsure at all n locations
ctataaaactaagcttgatgttcaaatcaagaacttcaagtgcaacttgaaatatgcattatcatcaatgcctcatctttagtgattgaatctaagtctagctccttaaatgataatttttgcaaacattgtgccaaatatcatgcttcttgttgtctaactaacaatgcaaggaagaatagcccacaggtgaaggtcaaaggaattttgaaaagatgctctagcaatgatgggttaaagaaagttgaacccaagtacaagtccctaaagcccaacaatggaagaagggggcttgtgttcaactcatccaaggaaaaccctagcacagtgcataaagggtggagatcccccaagttcatagagggaaccaccctatatgatgccttgnggaggattcactcctcaaatgacaagtcacctcaagtaaaggtaaacttgagttccacaaagagtaagatgaaagaagtgtgatcctcaagtggacaacaatttaatgctcccatttctcactcttatcttt

SEQ ID NO: 15284 - DNA, 506 bp, Zea mays
  unsure (1)..(506): unsure at all n locations
ttgagtcaatcatttgcanaggataattgatgcctcaaaatattatctgggtatgaagcacatacgagagaagataaaggctggagtagccaaatgtttcaaggaagacgatcaacgtgtgatatggtttaaaaaccgcatagtagtgccaaagaacgaagagctccgtcagcagattcttgatgaagcacatcttagccgttattctgttcatcccggaagcactaagatgtaccaagacttgaagcaacattactggtggacaaagatgaagattgaaattgcacgctatgtggctaagtgtgacacttgcagacgtgtcaaggccatacacatgaaaactgctggtccattacaatctttgccgatcccaacatgganatgggaagacatcggtatggactttatcgtgggaatacccangactgcaaanagtatgattctatttgngtatcattgatcgactacaagatcgccacttcttcctgtaagacaagtatacatac

SEQ ID NO: 15285 - DNA, 303 bp, Zea mays
agcttggcttcgcatgttttcagcttgtccactaaggaaaacaatatcttatcttttcaaaagcttcgttccttagtgtgatgacctctgatcgaagatttccaagggctatctggtagctctcattgtttgcctccttttgagcccttagagctttacatataattaatccctaaaaacaaaaaaatatatgtgagaacataacgatagcaaggaaatctacaaacatagtttattttatagcaaaaagatgtatacctctcagctattataagccagactattcgcaagaacatactttga

SEQ ID NO: 15286 - DNA, 432 bp, Zea mays
  unsure (1)..(432): unsure at all n locations
tgtgaactatccaacccgcactcctaacctcatcggaatggttgtctcggcggaaaaaaaggcggcggagcttaccggcggcagcttatctccggcgaagtgtcctcagagatcggtgaggttccggcgaacacgtcgatgggctgatggcggtcggaggtggtcagagtcgttctggccgcgtgcgagggcgaaagagctcgtcgacagcaaggggtcccacctatacacggcggtagagttcaattggtcggctcaaggagctntaccaggtgacgcagaaaatgtgcgcacgaagaatntgataatggtgcagcggcttacccggtccacgctctccggcgggtggagggattcaagcgagggtgatctagtgtctccggtgaggtagcgctcggtctgaaggcttatgaagcttcacaggacttctgt

SEQ ID NO: 15287 - DNA, 269 bp, Zea mays
agcttcaacggtcataatccaacgacagtgatgacgtggcgggggcaccggacatgtccggtgtgcaccggattgtccggtgcgccatcgaacagacagcctcccaacggccacttttggtcgttggggctataaataccccaaccaccccaccattcattgcatccaagttttccacttcccaactactacaagagctctagcattcaattttaaacacatcaaagagatcaaatcctttccaaattccacacaacaccctaatgact

SEQ ID NO: 15288 - DNA, 469 bp, Zea mays
  unsure (1)..(469): unsure at all n locations
tatctntagcctctcattntcttatatgagctcttgatatgtatcatctttcgttcctgcaaattctagctcaaaggaagaattgcttgttgacgagcaacaagcattagcacatggtaatatagtttcaatttgattacatgtgcatgagtgaggttgttggaattttaagttttctatcacaacctcatgagcaatgtataacatgatatggtcatccataagattttcatgagaacatagaagcatatcatgtttttcttgaaaagctatattttcaatttttagcttttctacttggtccttaagcaaggcattcctacttaccaattgagcgatacaatgtaaagagttatcttgctcaattgaaatagtntcatacctttggaccaaattaacatgagagcactntagctcctcatgttctttagtcaactcatcaaaagcgtagcatttcatggagagaaca

SEQ ID NO: 15289 - DNA, 296 bp, Zea mays
agcttcaactagtgattctccaattacttcaagaattcatcattcaattgtaaaggatcatccaacaaatcaaattgtgggtgatataagtaaggttgttcaaactcgctctcgtattgcttcattttctgaacatttctcttttgtatattgcattgaacctaaccgtgtagatgaaactcttcttgatgttgattgggtaaatgcaatgcatgatgaattaaataactttacccgtaatgaagtttgggagcttgttaagagaccaaagaaccacaatgttattggtaccaaat

SEQ ID NO: 15290 - DNA, 477 bp, Zea mays
  unsure (1)..(477): unsure at all n locations
tctagagggagaacacgtgatatgtctaactaaagttactttctataaagatagaccttgtgcagcttgtcaagcaggtaaacaggtgggaagctctcatcatgccaaaaatgtgatgacaacatcaagacctttggaattacttcatatggacctcttcggacccatcgcctatctaagcataggaggaagtaagtatggtcttgttatagttgatgatttttcccgcttcagttgggtattctttttgcaagataaatctgaaacccaaaggaccctcaagcgcttcctaaagagagcccaaaacgagtttgagctcaaagtgaagaagataagaagcgacaatgggtccgagttcaagaaccttcaagtggatgagtatcttgaggaggaaagaatcaagcacgagttctccgctccctatacaccacagcanaatggtgtggtagagaggaagaacaggacactactagacat

SEQ ID NO: 15291 - DNA, 476 bp, Zea mays
  unsure (1)..(476): unsure at all n locations
tataagttttccgagatgactaggggcttctgaggaagaattcaccctangcatgtcagatcaatacataactccagtcagagtgatgacagacgaagctagcttcaaaggccacagcatagctcaaaatcctcaaggcaacagcaaagctctttcaggccaccagccccaaaggcagatgctgtaagggcttctgaggaaggtatggngatcaacctataaaactctattgcttattctgtggtgaagacaagggccacactacaagaacatgccaagtcaccattcagaagcaaaaggagattgccgaagcagaagcgcgacagaatcagccgaagcaggtcttacatactgcttcngtgctactctccaatataccagaatacgtgggtaatcaacttgcagcctctgttgcttcggcagtcattacaagctttctgccccaactccactataccaccattgaacctactcat

SEQ ID NO: 15292 - DNA, 306 bp, Zea mays
aacttgtggcgcccttcggcgtcttgccgcaaccgaaacaccaagtctcctacttggaggtctcggggccgaacccctcgagcgtggtagcgtcgcaaaaactgttggtaccacgccgagtgtagcaaggccacgtcccgagcctcttccagctgctccagcgagtcttctcggttggtctggttgctttggtcgtcgtacgcccttgtactcggggaaccgtattctaagtctgtgggcaaaacagccttcgccccatagactagaaagaacggggaaaaacctgtggcccgggttggcgtcttc

SEQ ID NO: 15293 - DNA, 311 bp, Zea mays
tacattgttttggttggacttgtgtggtctgtgacgcttttgcccgaataatatgataactaataaatagtcttatccaaataaataaaatatgcctatacctcggcatatccgatttgtgtaacgtaaacaaattaaatgtggttcgcttgctacatggggttaatgaagaacgcccataacattccaatagctagcgcttgcatatagacggcgccgggtctctacattaaatgtaagtttgtccgcctgtatttaattagcttggaatattttcattgattcataccattgccatctggatttcatta

SEQ ID NO: 15294 - DNA, 234 bp, Zea mays
agcataaagccgaggtattttttatacgctaataatatgcgaattgactcaagcctaactacgggcgcataggttccaacgaaacccaaaccttcgacttgggagaatgcctgggccacaaatcgagctttgttccttgtcaccacaccaagctcaactagcttgttgcggaagaccaaattggatcctacaacattttgaataggacctggaactaaaggccacacacctatt

SEQ ID NO: 15295 - DNA, 450 bp, Zea mays
  unsure (1)..(450): unsure at all n locations
tggcatcngcctgcgcagcatgcgcatcggcaatggccttgttcgtctcccgcctctcctccaccagctggcaccggagttcccccttctcggcctccatagcggccaacttctccgtcagcctttggcttttgctttccgcagccgacttctcccggacagcatccgcatgctgcacccggagacgctcgacttctgcagcaaactctgcagtcagagcacccgacgcgacatggtcggcgaagtcggctgcctgacacaaaaaccatgagactcacaacctcataaaaccaacgaaacatcgaagtccaccacgacttacatgattcagctgctgcgacgcccgcctcacctgctgggacacggagcccgccacatccttagcggcggtggccgatgaaatcgtgccgctcgcgcagaaagcggaccacaggtcccgcgaagcaccct

SEQ ID NO: 15296 - DNA, 252 bp, Zea mays
agcttggcccatcactctctcatgctcctcctctgctgaggtagggtcccactcgactgtccaccccggtagcaagatggacggccaagtcactccagcaaccatatcctccagagaacctgtaaaaattatgccacaagcaaggctgagtatatatactaatactcagctagacttacccggtgtgaagagtctactcctctaactctaaacatgcacctggttggccgaaggggtcggtttgcccaaaaa

SEQ ID NO: 15297 - DNA, 411 bp, Zea mays
  unsure (1)..(411): unsure at all n locations
gagagcttccgaacgtgaagacttgttctgtccacagagtcgctttatccgagcgcgagttacttatcgcagaaggtgatgagtgaggtattcgtatcccggaggcgtaagagtccctcggctcggtcagccttggctgcttacgtgtaccccgtcgtttccaggatccgctttccgaagtagtcaagaagcacgaaagtaatcctgctagaaagagatcctttttcgaggaaaaattcgacgcagaggggatctctccccttttagcccccgaaggagggtcgggctttgccggagctaagccgacccttccttgacgactaaactttgcgtaagtgcgaggtatatgaacaacttggaaacatcttaaaggtagaagcgacgtanctgtttgatgttccaggcgttgtc

SEQ ID NO: 15298 - DNA, 316 bp, Zea mays
agctttagtgactagtgagagtgatttgttgtgttctcttgagctcttgcgcttggatcgcttgctttctttctcattctttcttgtgatcaaacactcacttgtaaccaaggcaagagacaccaattgtgtggtggtccttgcggagaagttttgttcccggttgatttgaaagagaaagctcactcggtccgagggaccgtttgagaaagggaaagggttgaaagagacccggtctttgtgaccacctcaacggggagtaggtttgcaagaaccgaacctcggtaaaacaaatccatgtgtcacacttcttatt

SEQ ID NO: 15299 - DNA, 334 bp, Zea mays
  unsure (1)..(334): unsure at all n locations
aaaccgtgattgcatggtgaagaagcttgagacgggaacaaccgtggcatgcactaaatcccttgaagaaaatgtcaaggacttgaggattgtctagaggaagaaacaaaagaagaaaatcaatgcctctgacaaaagcctcaaccatgcctccatgcaaggtaacatccaaggtaataatcaagtcacacttcatactaagagaagtaagaattatagtgaatgctttgaaaagggacactcgattaagtcatgtccctatattaaaaatgacttgatactaacaaggatgataaactnntgtttanatgctcanagaagggacactttaata

SEQ ID NO: 15300 - DNA, 309 bp, Zea mays
agcttgccagcccttttacccgaccggacttcaccggaggcccgagatcaacctcaccggacttcggtcttccgccgccgcgcgtggaccaagctatccagtgagtctccgcccgattcctttcgctcatgtcttctctggcatcccgtggacctctctgacctatttgattgaactatctcgccgggaccaggccggtctcctcgccgccgacgagcatccccgcctgcgcgcgtggaccgaccgactccggccatcttcgacggtgttccgcacaccgttgtgatccccgcgacctccccttcaccc

SEQ ID NO: 15301 - DNA, 448 bp, Zea mays
  unsure (1)..(448): unsure at all n locations
ttcctgcgcatagcttcngctgtgcatcatccttcggacagtttggttattatcccgtccttcatcttgatcccccttcgtctggcttaagcttcgtcctgaccgtactccttgttcataatctgagtccgaaaatacctgttcatataatacactcggagaacattgtcagatcttgtttttgaggaccttctgaggacgaaagcccccaacagtagcccctcgcaatattaatttgttaatgataaataaattcagattgcgacatggacgaatgccttaagccgaaggtccgaaaaacaccttccctttgctagaatagcaacattcactgacaagcggagtctttcacttttcaacgcactgggcgtataaataagatcatgccgcanactccttttggtacgcacacttgccatctgcccccgcttacttcaattttagttct

SEQ ID NO: 15302 - DNA, 319 bp, Zea mays
agcttgacaatgttgttatgacgctcatcatcaagagcttccgccaaatcctcaagcaaaggaggggaaggactacaagccccgctccaaaagggtgtgctaccggggtggtatgtccggtcactttatcgctaaatgtccgtatacaagtgaccgtgacagggacgacgaccagaaagggaagcagaagaaggagaagaaaacatattccaagaaaaaaggtggtgaaaaggaaataaggttaaccttttcccacaattaattctgatgggtgaatgcccaacacaaacaaaaggattaactagtttgccctaaaaac

SEQ ID NO: 15303 - DNA, 224 bp, Zea mays
tcattctctaaatcatgatcatcaatctcagcactaagttgagctatgtgatcattttgtttcttaattaaagctacgtgatcatgaatatcatcaacattaatgtctctacatctagtgcaaatattaacatgctcaacggttgatgtatgtgtttccagaatttaattcaacaatcgtagcatgtaatatggcattttcatctctaagattggcaatagaag

SEQ ID NO: 15304 - DNA, 312 bp, Zea mays
agcttgtggaggtttttcatccccacatgtgctaagcggcgatgccacagccagcccatgcaagtcttagctattaagcatgcatctagaccggcctcttcttttgcaaaatcaactaaataaagtttgccgtctaatacacccttaaaagctagtgaaccatcactttttctaaagacagacacatctatatttgtaaacagacagttatatcccatattgcacaattgactaacagatagtaaattatatcctagtgactctactaaaaacacattagagatagagggctcattaaaaattgcaatttta

SEQ ID NO: 15305 - DNA, 499 bp, Zea mays
  unsure (1)..(499): unsure at all n locations
acctatgaatctcagcgttatcgctcgatacctgcatgatagttcctctttcttgtttccacatcttccacgagcatgtatctatctggatgtctggttacaatatcagctattcatgtggttgagaataaaatacaaaagattaagataaatattcagatgatcgtcagtatagtctcatccacgacaagttcattatgatttacatagacttcatttttacacccaaaatcaaaagaaaataatagaaaaccggtagaaccttgcctacgtttcggtttcgttgctaagtgcagtgcatgcgtgttgcatgatgtgagtactctaacgctaaccgaacgattcaccatcttgtcccnctttcaggctggcccatcggatcctcagcgctttccgttcgatttggtcgggaacaagattgattatatggcgggagcaacggatggcagtttcctgatgctcagcctctatatatatatagatcaaaactctgagctct

SEQ ID NO: 15306 - DNA, 312 bp, Zea mays
agcttgggaaggttcttcatccccacatgtgctaagcggggatgccacagccagcccatgctagtcttagctattaagcatgcatctagaccggcctcttcttttgcaaaatcaactaaataaagtttgtcgtctaatacacccttaaaagctagtgaaccatcacttcttctaaagacagacacatctacatttgtaaatagacagttataccccatgttgcataattgactaacagatagcaaattatatccaagagactttactaaaaacacattaaaaaaagaatgctcattagaaattgcaattttg

SEQ ID NO: 15307 - DNA, 489 bp, Zea mays
agttcgttgtggcttactacatctttaattcaactacaacttctataatattttatctctatggattgtcatcccaaaacatataaatatgttcttctgctcatttctgtctctaacggacagcccaataaggctcaatgactgcatggcccaacttaacttcccacaggcatcaccttcacatcggagcatcggagtcgacattgcccgcaagccgcagcgctcctatgtttcccctctcgttttttcgacaaaccctagcagtaagcggcggcggcgacgatggttgtagccaccgtggcacgtcgcacgagctgtcactacaaggccactgacccatagaacgaaaggctactgggactgtgagattcaatttgtaagttaaaatgttagttcagttgtcttccaatttcccattcaatatattacccaccgcatgtgctcaagtagaaccaccaacactgatcattggatagtctggttaaatca

SEQ ID NO: 15308 - DNA, 277 bp, Zea mays
agcttagaactttggttacaaagtatactggggtttggtttttgatttatccttctaatttctcctgcacaagcgccgcactcactacagagtgcgaaactgccacatataataataacggagcccctggtgcaggtggagttaatgttgttagatcaatcaggtattacttcagctcttcgaaggctttctgttgagttgggccccactgaaaaacttcgggtgaatttaatatttcaaagaacggcaaggttctttctactgatctaaatataaa

SEQ ID NO: 15309 - DNA, 192 bp, Zea mays
agcatgaagatcaattttatgaagagcgaaatctggtgacccatggggacgacgatgtaaaatgaaatatgctaacctctctgaatgccaaattggcacttatccaaagaaggaacctgggggtccaggtaacccctaccccccggggatggcccaatggaaaatacctggaaaaaaattcgagaaaaaggc

SEQ ID NO: 15310 - DNA, 403 bp, Zea mays
  unsure (1)..(403): unsure at all n locations
tatcagcagtataagcacanaagagnaaaaggtgcttcagtggatcttcctaagcctatacttttgtgtgaagacatagcagagaaaaaagttttgttgggatcccagttatctgatgaacaggaaaaaactttgttaagtttcttgtttaacaacaaagatgttttttcttggacaaccaatgatctctgtggtgtcaatagagatgttattgagcactcgctcaatgtggacctgttcttcagaccaagaaaggagaggcttcagaagatgtccgatgataaagccgaatgttgggggccttcggcttccgaaagtcctcanaaacatgatttgacaatgtttctggagtgtaatacatgagcaagtaccttcagagtcaaaatcgttgtatgaagaaaca

SEQ ID NO: 15311 - DNA, 417 bp, Zea mays
ctcagcttacgggctactggcggagctagccgaagcactggttgtgctggatggtggctggagtgggctggccacggtggccgtagctctggcggcaatggcgggcggaaatgagctcgccggagctaaagaacggtggctggccggtgagggtgagtgcggggcaaagagaggtgcgcccggtgaggttttataagcgcgggcgaacacagccgaaggcgtgggcgcgcggcggacttgaccggacgccggggcgagcgcgcgcgcgggttgggcgagctctggcgtgccgaccagggtcgaacacgtgtgcccgtgcgttctgcccaagctctggcgcgtgtggtcgctcatccgagcctgctctcgccttggtcagtgcacgaaacctcttctcctccctacaagctaccattc

SEQ ID NO: 15312 - DNA, 307 bp, Zea mays
agcttggtgcctatgtataaacaaaaatccttgaaatcttggctgtcgaactgcttgccgttgtcaactgttagctcggacggtactccgaagcggcaaacgatgttctgccagaagaatttttgggcagtctttgatgtgattgtggaaacagccctcgcttcaatccatttggtgaagtattcgacggctacgaaggcgaacttaaggttcccctgagcggtgggcatgggcccgacgatgtccaagccccaacgctggaaaggccatgtatgggcaatcagctttttatattgcgaaggggtgc

SEQ ID NO: 15313 - DNA, 476 bp, Zea mays
tgacaatgaagagatggcgctcgtcatcaagatctttctgtttatcctcaaacaaaggagagggaaagactataagtcccgctccaagaaggtttgctacaaatgtggtaagcccggtcattttattgctaaatgtcctatatctagtgacagtgaccgaggcgacgactagaaggggagaagaaaggagaagaagaggtattacaagaagaagggcggcgatgcccatgtttgtcgcgaatgggactccgacgagagctcaagcgactcctccgacgactaggacgccgccaacatcgccgtcaccaaaggactcctcttccccaacgtcggccacaagtgcctcatggcaaaggacggctaaaagaaagttaaatctaaatcctccactaaatatgaatcctctagtgatgacaatgctagtgatgaggaagataatttgcgttccctttttgccaaccttaacatagctcaaa

SEQ ID NO: 15314 - DNA, 306 bp, Zea mays
agcttatggctttctttactactatcacgcttgtagggctagtggggcaaacaatgacatattcatcattcataacttgtcgttgtttctagcagattcagctagagcgtggctagagcacctatcatctaccggattcataattgggtggatcttagagaaatatccatagggaacttccaggcgggttcttaacaatgcatcaagtctcccgccaacataaatgtagctttcttttttgaaaccacttgcgagtccctagtccaaaagcttgggtgcaagcctccagggacactgggggaacta

SEQ ID NO: 15315 - DNA, 359 bp, Zea mays
agcttaatgagttcttggcactgacttaggtgacccgcaccgtgctgcaatatgcccaggccttcaatgacctgcgccaatatgcaggttatcatgcagactctgatgagaagaagagggaccatttccaaagggggctcaacaccaagctccgtgagcgcctcaaccctgttcgtgtcgacagctacaatgaactggtcaaccttgccatttcacaagaggactgcatcttggcccaccgggcagagaagaagaggaaggcaccaatgacaaggtcctcagctccacctcagaggatccggattgtctccaacaatcaaagcagcggatcccaacagcaagcagggagatgggtcatc

SEQ ID NO: 15316 - DNA, 283 bp, Zea mays
tcttctcgctccggcttctcttctcagtataccaagctgaatgcccacacatggccacttcaacagtgggggctggatattatccggccactacctacggttcaagagaacctcaagttcaccttcggcgccgtcgaatactacacacaatctgtcgatgctttggcagtatacacaataacctccaacaactgctaaaagttcttctggcaaaacattgtttgctgattcacgagcccgtacgagctcacacgctacaacggcaaacagtttgacagccatg

SEQ ID NO: 15317 - DNA, 368 bp, Zea mays
  unsure (1)..(368): unsure at all n locations
atgcagcttggaaaatattgtggctttctgcttgctcctcgtcatcagttngagtagagttatgaattgacctaacgtgcctcgggtgaaatcattctccgaagcacctgatcatatcagagaacctgaatgcttcctcccttctttggcggaagtcattgtcagctcgaatgtattccttcatcttctggagcagcttttccaacgttcgtggtgtgctccttggcaagaactgcgctgaatgtcccggctgaagccccttaatcatggcctcaatgacaatttcattgagcactgttggcgcctgtgtnctcatacgcaagaacccttcgacatcgcctgaaggtattcttcgtgattctgagtac

SEQ ID NO: 15318 - DNA, 438 bp, Zea mays
  unsure (1)..(438): unsure at all n locations
aagtctctttgaaatccttaaaggaaaatgcttaaaatggttgcaacatgctttcataagtgcataaactgtcttgagcatcactcatatactatatgcacttcactttctctatgatatagaactgttctcattaacctaattatgtgcacttggcatttaaagccaaaatatgtattcctctcaaggcacatatttagggggagaaatctatattaaatagaactatgatcatgcttaattgacatatctcttgatcatatctctntcattttggtacaaatgcatatatcctattattcccgtaccatgactacgactaatatgtntccaagtatattactatgctaaagtcgtagattgaaagggaaatggagtcttctgcgaatacaaaggcttncactccgtatatcatacttcgccatcacttcaagcaac

SEQ ID NO: 15319 - DNA, 354 bp, Zea mays
  unsure (1)..(354): unsure at all n locations
tgcaagctggcctgngcgcgacaaccatgttcatctcttctctcggccggngagatcttgaagggtgaggtggtggggggactccagcttgcactactgtgtcctcccccgcgggggaagcagacactgtcatcgaaagcggcaagccactaagtgctgggatttgggacgggtcaagtcatgagtggacgacccgctcatgaactcctgtcccaaacacgaaactgacggctgcatcctgcagtcaccggactgtactgagaccgctctcgtctggtgatgaggancatgctcttcgatctagactgtcctaatggatcaattatctcatcatcaatcaatatatccccatgt

SEQ ID NO: 15320 - DNA, 333 bp, Zea mays
  unsure (1)..(333): unsure at all n locations
agcttgtcaatntctgacattgtaaccactatctcttctgcttcagcttcgcgggtatcttcggcaaccgcaggaattgcttactttgtcgctgaagccgaatgcggtgttcgttcaatggcttgcagtatgttcacaattcatcgtttcttctgcccttcagtcttctcttctgtagccgaaggcgtttcgtttctctgtaaaagtttgtcagttccaatcccagaggacttaacagcttgaagggcggagaatcggtcattaccttctaaatatcaatcacttccgcagcaattggcgacggaagggttntctctactgctttatcgacct

SEQ ID NO: 15321 - DNA, 367 bp, Zea mays
  unsure (1)..(367): unsure at all n locations
gcttggtattggtgttcgagatcgtcctcttttcccttgccattaccgagaagcagcagntgctatctctgtaccagtgcacaggtttcatggacctagacgttttaagcttgaaaaatggcttcttttactacgtatacgtacgctgagagggaacagatactgngtgtaagtcatccagcttgaaataacagaactccaacacatggcattnttgtcctaacttgcttggtttggctatcaaacatgcaatcagtctgtctcacactatgctcgcgtctaccatgtnttacatacatgtagaataaataggccaaacaaaactgatatntcacataatatcatagacaagcactaactgggtaac

SEQ ID NO: 15322 - DNA, 361 bp, Zea mays
  unsure (1)..(361): unsure at all n locations
gaagaatgccaaagagccctcatgattatatgctcttttattggaacgagagatctggttcaagagcatattgccttcagagtatggccgctcgcggataaatgggaaatgcctgcagagaccataaatgaggctgacgaaggtggacttatcatgctgaagtatactttcaaatatggagataaatttcttgagccagatgatgactggctgaanagcattgcaaattaagtgatgaactacttggcgtttattcaaaggccgaagatactgcattgtcggcagccttctgaggccggaataagaatagactgatatgatgtgttgacgcaattgggttcgtgttccccgactaccacta

SEQ ID NO: 15323 - DNA, 340 bp, Zea mays
tgtgcatctagacgatatatcatgcttagtgtgtgccttggttcaagctaaccacgaagagtgtcacctagcggctgttaagagaaatgttgagatatctagtccacacccaaatatatgctctggtatccagggctccttttcgatttatatggttctctgactcggattatgcccggttcaaagtagatcgaaaaagccctcggggacttgcaattccttggcggacctggtgtttggagcttaaaatcaaaccggttgcactttcactctgaagcgatactactgctctgctgtggctattgctatgagaacaacttgaggatttgctggatttaaa

SEQ ID NO: 15324 - DNA, 306 bp, Zea mays
  unsure (1)..(306): unsure at all n locations
cttgagcttactaatgactatgaactggaaattcattatcacccaggccatagcctatggtgtggctgatgcactaagncgtcaggtttcctgtcactgacttaccgtgaagacctctgactacactctttgtcaagagatggagaacctaaacctggaatggtcacacaagaactttaatccgtaaagctgagcaatttctctgcaaagatattatgctcaaagatatatggcttaacacattcggagagattaggttaaatccaatgttaacaaaataacaagctttgttgttaatacccatat

SEQ ID NO: 15325 - DNA, 415 bp, Zea mays
aatggaggccattgtctgctgacttggcccatagtcactacacccaaagacctcgggggtctgggtattagtgatcttcggatcatgagctgggcactgctggctaagtggccttggctgcaaaaatctgattagacttagccattgtcagacttccagaatcatacttgcgacattgtgcacagcttgttggctgctgctgtaatcactcatttgggagattggtctgatactctgttttggaaagatctgtggctgaatggcaaatgtattaatgagggggcacctgctgtcttcagtatggtgcccaagcgtattgtttataactccctgtcatgatgccttgtctgatctcaattgttggtaatctgaaagggcttttttgttcagccttgcaatctatgaccttttactt

SEQ ID NO: 15326 - DNA, 459 bp, Zea mays
  unsure (1)..(459): unsure at all n locations
gcttggttcattggactctggcaggtgcaatacataactgtatattggtgtcactgccatggagccaccccacactaatctccttctatatgggtaccgctagctagctaccttnggatcactaagcttgtatgtagacaaacaatcgatactttattatgaggtcttaaatccttgcactaatattagtgccccgtgcgtttgcgactgtacaccaattatttgataaaatattaatacacaacgattacatgaaataacaatatatattatcatcaaccttaatatctcacaaagaanaaattctttgctaacaactaatatagtgttactccacaatgtagcataaaatatataataaaaagatgcaaagtacatgaatgtcttttctttaacccaagctagaaataaatccataccacttggacacagaataaatantatcaccattcttatcta

SEQ ID NO: 15327 - DNA, 446 bp, Zea mays
  unsure (1)..(446): unsure at all n locations
gatccttgagtcacctgccgcatgcaagcttctcctgnacaagtgctgcacttaccgctttgtgcgaagctgccacatataataacaaaagagcccctggcgtaggtggagttaattgctgctagatctatcaaatactgtntcagctcttcgaaggccttctgctggattggtccccattgaaagacttcggctgacttcagcacttccaagaaatggaagtttctctctgctgatctggatatgaacctattgagagatgccaaccttcctgttaacctttgagccccctttatgtagttggtggctccatccgaagtatagcttcaatcttacttggattagcttcaattccctttgttganaccaagcattctagaaatttccccttctttactccgaagacgcaattttctggattcaactntataccagcttgtctaaac

SEQ ID NO: 15328 - DNA, 253 bp, Zea mays
  unsure (1)..(253): unsure at all n locations
atgcaagctatacaaattgaaagctctcttgtgggttttggtgttttgatgacaacccacataaaggactaacatgtggtcttagtgttgaacaggtgcttaatgcanagcttacagggttcaacacatatgaacaagtgaacaagtgtgatggtccaaagactggattattgatagataatggacatcacaagtaagatggacatttgcttaatgagactcgatgtgcgttactaatagacaaccgattcaa

SEQ ID NO: 15329 - DNA, 90 bp, Zea mays
cttgggctccaagtttaacacatggtcgccacagatttcactttgaatctcactggacaaaacagccgatttattacaacaggggaggct

SEQ ID NO: 15330 - DNA, 343 bp, Zea mays
cttcggcggctcttgcgggtcacaaagaggtctccggaacttttggcgagcttcggggagttgggcgcgggacatgggattctactgggaagattgctgggcactggggcgggctttttatccgtggcgcgggcgtggtcactggccgccgctgacgcgcgggggttcgcgcacgggcgtgctctgtacactcctcctattgtcagctcgctgtcaacacatgtgtgtttgcttttgcctggttcaacctgccattgtacaccttatcgtgctgatctttgcataccactggtgcggcgtttccttcctatatctaccttttatggagtcccacctatatctg

SEQ ID NO: 15331 - DNA, 389 bp, Zea mays
agcttaaccttgtaacgaggataagcttctctttttctcaaagaggacggtccttaagactctttgtaatccttatatgaacatgctctaaatgtttgcaacatgctctcataagtgcataaactgtcttgagcatcactcatatactatgactacaatgcacttcactctctctatgatatagacttgttttcattaacctaattatgtgcacttggcatttaacgccaaaattatgtttactctcaagcacatatttaggggaaaatctttttatattaactagatcatgctaatgaattctttgatatatttttaatttggacaaacattatttatattccatccagactcactatatgttcagaatatcatcaatctaattaatg

SEQ ID NO: 15332 - DNA, 478 bp, Zea mays
  unsure (1)..(478): unsure at all n locations
atccttagagtcacctgccgcatgcaanncttgcttaanatgaagcaaagtcttgattatgtttgtggtcccaaatgcaccgatctccacatatacaatttccctctgtaggttaagcggttcaacctgaaatatctaaatgcatgttgagaatgtgtcatagctctatgaataagatagagcgtcgtctcgtgagtgggatgcataaatgaactcatcgcatttcattatttttgtctttcttaggctttctcttatctctagtatattgggtggcatctataaatgaaattgacgcaataatatcctccatctatctaacctgatatcatgtggatctagtgagaatggacgccctaccctcctaggtttgggcggctctgatcttgactgttaccttgataggtcagctgtcctctctcctctctctcttctttggtttataagaatttcatctaattctacgactttgcgtgat

SEQ ID NO: 15333 - DNA, 91 bp, Zea mays
agcttatgaggcttatgttcttgatacttatgtttgtgttgagaacttggatatttatgctcgtgctggatatttatgcacgtggcgatat

SEQ ID NO: 15334 - DNA, 434 bp, Zea mays
  unsure (1)..(434): unsure at all n locations
tcaataaactacaagcgcctctattgtgtctctacataactgaaatggtcatataagcaagtcttgtatgttttcagagacatccagcctgcgccttgactctccaactgaatgtgttcggcttatatgggcgattgggacattcagtctggggccagtgggcctttactttatccgaggtccttcgacctgaatctattcggcgtaattgcacttttaccttgttggcttgttgtgctgtcccaagttcgtagtgcggacaaccttctcctggcatttcgtggccgctactactctgttcaatgctaagctggtntgacagatcgatgcctcgcgctcgtcattagactagcgtttaacaactggagtactatattacgccccatttgatacatccatctctgcagcgtctaataatacacccaacatctaat

SEQ ID NO: 15335 - DNA, 479 bp, Zea mays
  unsure (1)..(479): unsure at all n locations
gcgaaagacgtntcactttgaatcccacttgacaaaactgccaggtttcttggaaagaggtgagtcttgctggacctctacctcctcgtcttcttgcccatatgtatctctctcaagaaaatttggctccactgtcaagcgtctacaaagctggagtcagaagagagttggccacatcatttctcagatggagctggcacgtgaaatatctcatcagctggagatcgcccacgataacaggcccttatctgatttggagaagtggttattggatcagctggaggctcacattgttgccctctcatacctgcagcgttctttggttagaagccattcccaaatcacctggcttgctgcgggtgacgccaatacaagcttctttcatttacacgctaaatatagaagaagcaagagtnctatcaatagcctgatttctgatgatgggttgatcatgaccaagcatgatgacatggagagag

SEQ ID NO: 15336 - DNA, 286 bp, Zea mays
  unsure (1)..(286): unsure at all n locations
agctntatcaaatggacgtgagaagtgccttctctaatggaccaatcaaagaagaggtctatgttgagcaacctcccggctttgaagatagtgagtatcctaaccatgtttataaactctctaacgcgctttatgggctcaagcaagccccaagagcatggtatgaatgcctatgagacttccttatcgctaatggtttaaaagcagtaaggccgatcctcacttatttactaagactcttgacactgatttcgttgtatgccaaaattatgttgatgatatcaaa

SEQ ID NO: 15337 - DNA, 459 bp, Zea mays
  unsure (1)..(459): unsure at all n locations
gcagcttgacctcagtttcgagatctctttctattacgccggccatgagctataatggctttaatactagaccggccgtgaccatgaacaacaactatgcccagtagcattgcacatcttttcctcccactttatcaaaatccatatggtatgcacgtttagagatagttcgaaaactttatttttctaatggattcatatatntctcagagaaaatgaactaactctttttttggaaaatgaaagattttcttccaaaaatgggatttctaaactagcacttacagtgatgaaatctgtctttgattctccacaagctgcagataagcgcttatacatatgtggccactggcgctagggtaacatgcggctaatagtcaagctgtattgagctttcagtccattaatatcctagactagatagcccacaacaccacctagctcttttttaatggtatc

SEQ ID NO: 15338 - DNA, 311 bp, Zea mays
  unsure (1)..(311): unsure at all n locations
catggcctgattggtgattggcgcgccgtttcaacgtgtctgctgacacacccaccatcaattcaccttcggtcacgccaactgccatatctgtccccgcggctgactgacacacgggcccccacgcctggtggtttcgtttggccacgcgaggggtgcctcgttgccgcttcattggtttaaaaaattaccttttgtttttacagcggcccaaggaagcgcactacangcgcgtgcggcagttcgctctttccgcacccgaaatacggcacacaaactgtatgacttgtggacccgggccctcgtgtcat

SEQ ID NO: 15339 - DNA, 422 bp, Zea mays
tatcttagagcgcctgctgcatcaagcttgagggtgcaaagctagcgatcattatcatgagtgttgcgattttataccaccctgattaattcatcaagccagtcgtcctttaggaatctgaccacatactttgagaattctcacaagatgatgacattagctctttcaactaacccataagatttctggtgtcttactgaaactaaatgtattggtgtgcctgcttgattatcgaaggatatgaatgtttcaaaattaaactctctgccattatccatatgtagaggttttggcaacctaaagcggcatatgaagttctaccaatataacttctggattgtagttgaagatatgtgtgctaatgccttcgcgttatccacttggaaatgattctagtcaaatacaatattctcaagtccctt

SEQ ID NO: 15340 - DNA, 346 bp, Zea mays
  unsure (1)..(346): unsure at all n locations
agcttggatcttagcctgcaactctgtcatatgacccgaacaacctggaatagttntaaaatggcccttgattccatngctttatcctctgaaacccaaagccggcttcctctcagaatattgttgtccactgaatcgatcttgctcatacaagtttacttggatggtagaccaaacactactgctctgccctaagtccccaaaccatcgcaacatgtcctactctgcttcttattgttcttatctgacccctgctccacagcaaaaattgcaacctgggactgtcaaatctatcctatcatgcaattattgactcttacccttttcatcgccaggcttcttttct

SEQ ID NO: 15341 - DNA, 349 bp, Zea mays
  unsure (1)..(349): unsure at all n locations
ccatgcttttcatattgtgaacaacttcatacccatattcgaacgttcctgcacatatattatacttgggaaacattgttaaccatgattttgaggaccttcggaagacgaatgctcccaacatttaccattctgcaagcaaagactattttgtattgagtggtaaagagtataagtggataaactatcttctctcgttaacttaaacttttgggttgaactgattagtgcgtccactctaacatgttatcagagtcagatgtcttgagtctgaatcctactagatgctttatttatgctccacccatttattttcatgtntacgcttntctctctgattgcacgtgag

SEQ ID NO: 15342 - DNA, 365 bp, Zea mays
  unsure (1)..(365): unsure at all n locations
gcagctttaatacttacaatataccttctattttttgttgggtcttgagacatgcatgaggtgctacacttatggggagttttcaaaaactcaatatttcatgaaaacccctagtgcaacgccaatatgtcaatttcaccatttgccctatttctctaaaaattatttaacctaccgcaaaatattttgaaacttatgagaaaatatatgagggtgccaatacctgtcccaacaagtgttattttgtgtgatataagtngggatttggtctggctgcaaactagatagaaaatttcaaaattttcctctgtttgggctcaccggacagttcggtgtgcaccggacattgcactgtgcactgttcg

SEQ ID NO: 15343 - DNA, 348 bp, Zea mays
tgctagcttcagccatactcctccgcaagctctctatctttccggatcaagagatcgctggagcttgccctgcagacagagtgccatcggacgcctgatccctcaccaccgtagaccggccagtatagccatctctaccccagctaacccttggaatatattatacgtgctctggtgaagctcccagagcaaggaattaagctctgcctcgccggagacaccagatcaaggttatcggacttcactcgaccaccggcaaacgtataccaagccccacggtgagtaattcttctaatccttgcacggcgtgactcattatcaccccgagaagcatcccgtgcccttgga

SEQ ID NO: 15344 - DNA, 461 bp, Zea mays
  unsure (1)..(461): unsure at all n locations
acttcgttggttatccattgaatgactttatcatgatntccacgaataaatntctgctgggaggaatatgctccaactttagagctgatctttaaatatctagcgcattccatggatatttgataacatattcctttggcggcacgaagctcatcgacattcttttgcgctcttgacctttcaatttcacatatttcatgcttcaccacttcaacattgaagttctcagttgcttcgtcaactttcttctttagctcttgcatcttggcttcatgagctctggcttgagcagtaagcctgggcttcctagattcaactttttcactaaggagagtaggaatctatccttctaaagagcttcatttcttaatggtaataacttctaaacgaaagggttcaagcgctattcggcagctctcatactgtgcatcattctgggctttcaaagccttgcttaaaat

SEQ ID NO: 15345 - DNA, 274 bp, Zea mays
  unsure (1)..(274): unsure at all n locations
agcacttcatggtctgaataataaaatccctcttttctagtgcacctttctgctcttgaccatgatttcaagaccttgaattgcgacagttttcttnttcagattggcttcatgattatcaaattttcaaccaaatcttgatgactgctgtgttctcttttcctcagaacttgttgatcttagaaccttgcttataatatgctctattgaatgatcttcgtcagacacgacccaaagttatataattgtataaattacaaattttgtacctgaa

SEQ ID NO: 15346 - DNA, 317 bp, Zea mays
  unsure (1)..(317): unsure at all n locations
aacaagcccataacagtaaatatcaaaggcccccatccttcataacatcatttccctcccgaattaccaatttatgacgaatgtcatgaacgacatacctccatgatcatgataaaaaatgaagaacattcatactatatacagaaagttacacaatgtctataaacattgcaataatccatgactatttgtattacttgtgtaaacaaagataaattacanatataccttctgcttgaatgatagaaaatacatgcgtggcacaaaagtgaatgccaagtcagcgtgaacagtacaggaatactgttacctattat

SEQ ID NO: 15347 - DNA, 264 bp, Zea mays
atgccagagccaacccatgttagtggtagcaattaagcatgtggtgagttcctctctattaaaatccactaagtatagctgaccctctaacagacccttaaatgctattgaatcactacttcttctaaagacagtgacacctatattagttaatagacagttgttgcccattgacataattgggaaacagaaagcaagttgtatctaatgaatcaacaataaaaacattgtgaatggaatggtcacgtgaaataacaattttac

SEQ ID NO: 15348 - DNA, 310 bp, Zea mays
  unsure (1)..(310): unsure at all n locations
tgatgtctagatcccttctatcatcttgtgcatgatccccatgattgaccctacctgtatgcctggttcccaccgtactccacccatntgtcccttcccgatgatggtagatgtcatgtgactatgtttcatccccaactcatgtgcaacacgtgtgtgagggcccgctacttctgtaattttggcctttgtggcgatcttctatgctccgtatcacaaaccatccatgcacagctatccgtgagcgatacatccgtgagacgacgcatgtggtttggatgaattacaatctacgacctctttcgctata

SEQ ID NO: 15349 - DNA, 297 bp, Zea mays
  unsure (1)..(297): unsure at all n locations
agcttctccgncagtctgagcagtccgaacgtatttaattttatcttaatgcacaacttgaagccgatgctcaacaaaattcagatctgagaaaactattgacgagccttcaagaaaaatgtttggaatttagcaacaaatgcattcaacgattaagaaagatttctcactcagttggagccagcagtgataaattcaccccctcagctgaagatctaccgaaaaccttctaacatattgaaggtgagattgacgagctcgacgaagtcatagctgggcacggtgacttctgtgcct

SEQ ID NO: 15350 - DNA, 447 bp, Zea mays
  unsure (1)..(447): unsure at all n locations
gagcatgcactcgccgacttttattctggcctactttttggtcactgcccataattaggatattcttaacccagtgccataagcactcggttcacccttcgctttcgaccggggccgacagctgctgtcatcacgtgatcctctttcttcgaataatcaccaagaaattcattacacatcacctcaacagtatacaaccactcttggagggcttcttaaaatattctcgaatttgaagtggaatgaagccggacatgaaccccttccttcttctacccctttaactntggcattcccattntttcagagaagggaagactctgaatgctaagaattctgaaccaaattcctggtaccaatatgctcctgcatgatcctgaattcatccattgcccgttgagtatgaccctctggtgtcatagtgcaactgggtccgtgttctcccaa

SEQ ID NO: 15351 - DNA, 475 bp, Zea mays
  unsure (1)..(475): unsure at all n locations
catgcaagcttggtcaagtnatgtaccactattatcaatttttcatatttgcaccacanaaagctgagcacaatggtgactatacaaaggaacgtttagccaaagcattctatgctatgttataattaccatatacatagaatattctaacagtaacaatgctaatcaagggcatttggtggaaatataaaattcaagacataaactcactttcttaaatactgcatctctgatacgatccacaattgcaggaactgaaatcataagagtangattcagtacagaaacatctgcttttgttcccttcttaatcttgttcgatgtatcagtcatagttaatgctgaaccatatncaatggcactgccagatgctaacatgacagtctggattgacaacatcgtatcattaaagatagtggccactcttgtacacaacatgtatatgaatattaaatatattcacctcccctgctag

SEQ ID NO: 15352 - DNA, 370 bp, Zea mays
  unsure (1)..(370): unsure at all n locations
cttggcaagcatgtaaacaggtgggaagctctcatcataccaaaaatgtgatgaccacatcaagacctttggagttgcttcatatggaccatctcggacccgtcgcctatctaagcataagaggaagtaaatatggcctcgttatagctgatgattgttcccgcttcacttgggtatncctttngcaggataaatctgatacccaagggaccctcaagcgcttccttagaagagctcaaaatgaagttgagctcaaagtgaataagaatatgagcgacaacgggtcccgagtcaagaaccttcaagtggaggagtacctngaggaggaaaggttcaagcacgagttctccgctccctacacaccacagca

SEQ ID NO: 15353 - DNA, 456 bp, Zea mays
  unsure (1)..(456): unsure at all n locations
gatccttaagtcacctgcagcatgcaagcttgaacaccctatatcctgctagatctgaatnggctagctttgtgcgtgaggaagcttcttgactggaggtggtgctggtgaagcctgggctggtatatctcgctcaagaggaaatgcagtgttgtcaaactgagtgccatcattctcggataggaagctgccatattgtgccttaacnttggtccaatccgtacccatgctgtacattcaaggaagtcacgtaagaaccatgtcaaatgaaagcagaaccatgtcaatgtttacaggacagacacaagaaactcagaagtggtgcacactacatatattgcagacttcataacattnntcagaccacgttaacattaacatgtcatgaacatcgcgttcggatagtttcgacacatatacatgacattcagtaaaccactgacttgtgacacacat

SEQ ID NO: 15354 - DNA, 466 bp, Zea mays
  unsure (1)..(466): unsure at all n locations
ggactcaatcacgagctcactgccgttctcctcgtttttaacacgtatcgctcaagataatacttattggtgtcctgcaatgagatatgacaacttctcttgtatcttacatgactgatgaacaatggagggcattagttgcaaagtggtctgattaaaaagaacatggtatgggattcttgtcatatattcttccttcactataagtttgcacaagatcttcgcatattgaacctatgatctaatctgacatgtttattctcctgtaggaaataagtgaaaagaacaagcagaaccgcagtaaagtctagttcattagtctacgggtgctcgctgctatgtggcacactnacatgcatantgtatgtaatattaccttggactactacctgcactttngcactctacaacctctatagcatttgatctgagaaaactttgttgtgattgttatccatgaacagaa

SEQ ID NO: 15355 - DNA, 369 bp, Zea mays
caatcaaagctcacttgcgaaaataatcttgtggtcttttctcaacgaacaactgggcgcgcctaggcccttgtcacatacctttaacaagtacacaagctcttgctttgcgggaacataaggccaagcttcagcctcaacctgagttacaacagtttccgcggtctcctttatatttttctcactcatgctgggcacttctatagaggtaggagttggtacctttgtcgactccataacagcgtctagtacgctggccattctcctcctctttggagatactgcacgaattttttatacctctgtcgatttcttaattttggcacttcagtcagttttccctagcttctgcagaacacttcggcacat

SEQ ID NO: 15356 - DNA, 316 bp, Zea mays
  unsure (1)..(316): unsure at all n locations
atgcttggcaccctggccgattaaatgtacctgtgattgtttgncaaaactttaacctttatcctctgtggcgtaacagagatggtcgaagtagcatattttcttttctttcccttctttcgcgagagataacaattgtctgggcatactaaaccaattacattcaaaactctgtttaatctcctcttgcctcattctccgaaggctatgtcatggcataccttcgccccttgtgttggccccaagcaaatatcactagtcgcctcatactttccaccagcatcggtcggttatcgaattgatctttgatttgaag

SEQ ID NO: 15357 - DNA, 352 bp, Zea mays
  unsure (1)..(352): unsure at all n locations
atcaaagcaacaacatttaccggcacagcagctgcagagcatccctataacatggccatttgcatgctaggggttggacatgatcggacccttcaagaaagctcaaggaggctatactcatgtgctggttgccattgacaaattcacaaagtggatagattataagcctattgcctctttaacctcagccaaggcagtggagttcatacaagacataatattcanggttgggataccaaacagcatcataactgacctgngatccaacttcactagctctgaattcttcgatntctatgaacaacggaccatccagattaagtacgcgtcagtagcgcatccaatatccaat

SEQ ID NO: 15358 - DNA, 372 bp, Zea mays
  unsure (1)..(372): unsure at all n locations
aaggtctacagcaacgcttggaacatccaacatctacgtcgcttttaacccttaaaatgtttcaatgtcgttcacatatctcgctntctttacatgcataaataaagtctaaccatcaaggaaggatcagtcctgcctcggcaaagccccacccttccttcggggctaaaatgggggaaccccctctgcatcaaaatattcctcggagaagtcttttgccagaatatctttcgccctttccgactgcgtcgataacagaatcctaaagacgagcgagagagaaccttgtcggctaggtcgactgagccgagggactcatacgccttcgagatacggatacctcacttcatcaccttcacgaaaagtatctca

SEQ ID NO: 15359 - DNA, 450 bp, Zea mays
  unsure (1)..(450): unsure at all n locations
ttcttatcaactcaagctatcaatcttcaatatccaagattgacccaccagtattttgaattattatgtctaacactcatatcatctcgaggaagatattgatgttgtaagaaataaagaattctcatgtgcggaaaagtcaacgcctacaacatggaggaatgcccaaggatggtaacacttatgcctttaagtgcaagtatcttaaattatcatttcttatgtgtcttgtgtagtcacatagaaaaaggaagcacttaagatgctttaaattatgtcaccatnntcttgaaaaaattcctctcatatgggagattgtgtattcatcatttctatattatgacaatctacatgctttaaattattggaagtacctcatggcatgttctactctcattatcctattattgccatgatctacatatagaaagagattccatgtcttaaaag

SEQ ID NO: 15360 - DNA, 351 bp, Zea mays
  unsure (1)..(351): unsure at all n locations
gcaagctttaagagattggatgtcgttggtgctacttactcntttttgtaatcgtcgnacgttggagcgaagccagatctgtcgctccgtgccgaatgactctgttgttcctgtccactttgaagtcagccacgaacttcgcctctgctttntggatcagctgctcctggcgctcctcgaacaggagctgttcttcagccgacaatgcgttccatgtcggtgtgatgatattgctggtggaaacctcagagctatcctttgaaccagctatngagggccgatttgaatgtctatatgtgttgttcccagcggagtcgtccaaagtatattgactctctgtctgagcgccca

SEQ ID NO: 15361 - DNA, 236 bp, Zea mays
ctgcagcttattaatcactcacccaatctaccttctttttgggagatgagttttgctgacctctaaagcccctctcagaaaagtggggtccaaaacttacactaggaaccactggcaccttctgacatcttatgatcccttttagacccctcaccaccaagaacccaaatccacaacagacttcactaagaagagatgagattcattggatattggagagagatacatttgctgct

SEQ ID NO: 15362 - DNA, 285 bp, Zea mays
cggagttatttttacagcgatggctcttaatcggtgccatctcctcatgattcattatcacgtttccacaggtcaatgcccaagctccgaattttgcgcttgttaggaaatcctctatagttccttccatacatattgccattgcataacctcaggcatgtcacacttgcaaatattataattgaagcagtggtaagtcttaaatctgtcactgtacagatagaggtacatgaactgtaatggcctcttgttgttcttttaattaagacattccacaactaccaa

SEQ ID NO: 15363 - DNA, 318 bp, Zea mays
cggagcaagagttgcaacctttttatactatatttgctctgtggcctttacttctgttgccttatcttcaatttcgacaggacttatctcagtgggctcggaatgcccagcttttgtttcaatttgaattattgtaccttcgacttctgcctgtgtcgattcagcttcaggttgcgcctaagaaccttcgacatatttcttggcacgagaatgattccagttttttgctgtttctaatacaacatctatcacatttaccatcctccttctcttaagagttgtggcagaactcttttgtgcttcaaccctgttgcttct

SEQ ID NO: 15364 - DNA, 360 bp, Zea mays
agcttagcaagtgtgagttctggattagcgatgatccatccctgggtcatattataaaccaagatggactagctgttgatccaaagaacgtagcagcgattctggactataaagcaccataagatgtccgacgaatcaaaagttcctttggaatggccggcttctatccgtgtttattgaaaggttctccaagattgcgagaccaatgacagccttgctagctaataaagttgatgttgagtggaccccaccgtgcctataatcatttgatatgtgaagcagaagttaacaacagcgcccgtgtatgttctgccagatgttcacaaaccattcttagtgtattgcgatagctcgtacacc

SEQ ID NO: 15365 - DNA, 378 bp, Zea mays
  unsure (1)..(378): unsure at all n locations
ttcaaattttattaactcaagctatcaatctacagcgatctacatatccaagatagaccccaagttattncaaattattatgtctaaaactcatatcatctcgtgaagatattaatgttgttcgaatcataaaaaactaatcccatgtcgaaaagtcaagatctacaacatggaggaaagccaaaggatggtagacaatatgtattcaagtgcaagtatctcacatcatcatgtcttatgtgtctcgtgtacgtacatataaaaagaagcactccaaatgttctaaaataatgtaacattccttgaagaattcctccatatggtaattgatattcatcttctaatcttggccattacaagttctaaattattaccaat

SEQ ID NO: 15366 - DNA, 156 bp, Zea mays
acaatgaggagatggcgctcgtcatctatatgcttcgccaaatcctcaaacaaaggagggggaaagactacaagtcccgctccaagaacgtttgctacaaatgtggtaagcccggtcatattattgctaaatgtcctatatctatcgacagtgacc

SEQ ID NO: 15367 - DNA, 412 bp, Zea mays
  unsure (1)..(412): unsure at all n locations
ttaagagactgagctgcaacttagagcttgtttcagctgaaagaatgtattatgttcttctcctttgactccaaataccagttagatttggnttcacacgcaacaaatcatttagaataataataaaacgtgatatatagtaaagcgttgtattacaataagaagtagttcaacttcataaatgttcattatacaatacagaagtcccttcagcctaatggttcggctaagctatgactctgtcttacttattcactctcttagacttcttattgacttctttgctctatagaaagagagacaaagctaatattaacggaagttaatgaataaagctttgacagttcaaacttaaagccaaacctttctcgtatattttattcatctagaagatacttcggggccctattca

SEQ ID NO: 15368 - DNA, 322 bp, Zea mays
ctttcttgagagcgaactcacttgtatttgaggcaagagacaccaatcatgtggtgatccttgtgggaactttgtgttcaagcgattgagaagaaaagctcactctgttcgaaggaccgcttgatagatggaaaaggttgaaagagacccggtccttgtgaccacctcaaccgggagtatgtttgcgaataccgaacctcagtaaaacaaatccccgtgtcacactcattatttgcttgcgatttgttttgcaccctctctcgcggactcaattacagttctatacctaaccaggcttgtagtgcatataatttgaaaaatc

SEQ ID NO: 15369 - DNA, 455 bp, Zea mays
tggaggtgcttatcctcacatgtgctaatctgcgatgccacaaccagcccatgcaagtggtagccattaagcatgcatctagaccggcctcttcttttgcaaatcaactaagtaaagtttgccgtctagtacaccctttaaagctagtgaaccatcacatcttctaaagacagacacatctacattttgtaatagacaattttatcccatataacataattgactgacagatagtaaattataaccaagagactcaactaaaaacacattagagatagagtgctcattagatattgcaatcttgcctaaacctttcaccttgccttggttctcatcaccgaatatgattgaatcttgggaatccttattcttgacgtaggaggtgaacatcttcttctccccgcatatggtttggcattcgctgcgataatcagttgagccccggatgataacct

SEQ ID NO: 15370 - DNA, 158 bp, Zea mays
aacaaaagatggtacatatcaaaatctcaaagaagagaatgagaggcttaagatgagcttgacacaacttaaagggaagtgcattgctcaaccctctcaagataactgtgatcacatggtgaagaagcttgagacggagacaatcgtggcatgcacta

SEQ ID NO: 15371 - DNA, 468 bp, Zea mays
  unsure (1)..(468): unsure at all n locations
tagcttttgtaggactagccttagantatctttttgtgcntcttcattcggagaatatatcagtatgctcgtaatgaatactaccacatactgatccagatattccatgaatactttattcatcaagttcataaagtatgctggtgcattagtcattccgaacgacatgaccaaaaactcatattattcatatttctgcgtgaaggctgtcttgtgtacgtcttctgctctaatctttaactgatgataatccgatctcagatctatcttcgagaatatcttaactccttttatgtgatcgaataaatcttcaattcggggtagtgggtatttattcttgatgggtacttcattcatactttataatcaacgctcattcttcttgaccatccttcttgttacaaatagcactgggctcccatgagacatcttgggcaaaaaacctttttagtaatctctattgttctc

SEQ ID NO: 15372 - DNA, 430 bp, Zea mays
  unsure (1)..(430): unsure at all n locations
cgtcccgagcccgcgtcctctctctggcccgagccttcttcgcgtccttcttctccttcctcttctccgcggcgaccctccacgcagctcggtccaccgcgtcctccaagaccggtggcagggaaggcttgtgatgccctacctcctggagacagacgaanagtctcggctgtgagaaccgagggcaatctgacgcaagaagggagaaggagcggatactcaccagagacacgcacccgcgattgggacgcatcaagggctgggaaaaggtgctgacctctaacttcgctaccgtgccggccacccgcctgtggaggtcgtcngtgggaagggggtccgaagacatctgcaaacccttcaagtcgaccccggcatcatctcccaaagcggagccgccgctccgtcatgggagcaccctcctgcgatgaat

SEQ ID NO: 15373 - DNA, 394 bp, Zea mays
  unsure (1)..(394): unsure at all n locations
gagaacacattntgggactttcacanntgtcatttgagaaagacaggatttgtaactcatgtcaggcatggaagcaagttggtgttcatcatccacataagaacatcatgacgaccgacatgtcactcgagctcctacacatggacctattcngcccgattgcttacataagcatcggtgggagttagtactatctagttattgtggatgattatnctcgcttcacttgggtgttctttttgaagaaaaatttatacccaaagaccttaagggatcttgaacggctcaaacgagtctgcttaagatcaaaaataaaacgacaacggacgattaagactctaaatgaagcttcttgagangaggataacatagtctctttcctcaccccacaaat

SEQ ID NO: 15374 - DNA, 348 bp, Zea mays
  unsure (1)..(348): unsure at all n locations
gtaaaagtgccttcctcaatggaccaatcaacgaagaggtctatgttgagcaacctcccgactttgaagatagtgaatatcctaaccatgtgtataaactctctaaggcgctttatgggctcaagcaagccccaagagcatggtatgaatgcctaagagatttccttatcactaatggcttcaaagccggaaaggtcgatcctactnntattactaaaactcttgacaatgatctgtttgtattccaaatttatgttgatgatatcatatttgggtctactaacgaatctacatgtgaagatattagtatgatcatgacatataaattcgagatgtctatgatgggag

SEQ ID NO: 15375 - DNA, 388 bp, Zea mays
  unsure (1)..(388): unsure at all n locations
tgaatacttagaanacaaaatataagatcaaacagctgcttttgaganaaaagagtttgaactccaaacaactgaaggtttactagcggaagccgaaactgaaataacagaactgaatacaaagcttctcggttccgaacaagaaaagctgaagcttaatgaaaaacttgaggctgaaatccagaatggttaagtttgaaaaaatcattgtagacttcaaacaaatggtgaaatcacaatcatgtgtcaaaactgaagacgtgttatccagcgggcagtatgaaattattcttcatgaaattacagagcttcaacactgaagtgaaagagactgatgagtatgtgacatggatttggcctgagtttcgggacgtgtggtataaactgt

SEQ ID NO: 15376 - DNA, 386 bp, Zea mays
  unsure (1)..(386): unsure at all n locations
acggttcaaggctaaagtagaaaatcaacacgtattgaagataaagattgtccgatcagatcgtgggggggagtactatgggcgccataccgagtatggccaggtcccaggacctttcgcgaggttcctaagagaaaatggtattgttgctcagtattcaacacctggcgaaccacaacagaatggggttgccgaaaggcgtaacagaacgttaatggatatggtaaggagtatgctaagttactctaacctgccattgggtctatggatggaggctnntaaaaccgctatgcatatactcaactgagttcctagtaaatcagtggctaaaactccatatgagttgtggacgggcagaaaacccacactcaactacnttcacatat

SEQ ID NO: 15377 - DNA, 239 bp, Zea mays
  unsure (1)..(239): unsure at all n locations
tgaagacttaattgtctccaagacgtctagtacatttaccattcttttcctttatggngtcactgatggccccttatggtgatttgctgtcccaacgattgctgtatgactcaaaacttctgagtgtttggagccctcagttgcttctcttacctnctcaattatttctgtgagcggcgcttcggttttctctattggttctgacaacaaaatgtttgattggtctgaatctatctttg

SEQ ID NO: 15378 - DNA, 228 bp, Zea mays
  unsure (1)..(228): unsure at all n locations
agacacctgaggcatgcaagctatggtaccatattcttttccggccttcgacacctttattnagattctcgtagacaggggattcanaacccagggcgtccagcactcgattcaatcttcgcttcggacgggtaccgaaggccgcagtcaataactgaacctctttattggagtaaataccgagcatttgattgcacaatatttcaattgtgtccagccactcttggc

SEQ ID NO: 15379 - DNA, 498 bp, Zea mays
  unsure (1)..(498): unsure at all n locations
tgcaagcttccggaccggagcagcccccaccccncgccatgatatccactcgccccaccacggtgccgacaactcctcctggatcctcactaggggtagatatcgaaccagctcagctcgttatggctcgttatagtaacgagctaaacatctgactcgactcgttaagaagctcgagccagctcgttaggctcgcgagctacacaactaaatagatctatgtacataaatatatgtataaccgaacaatcatagtttaagtgttaacattacacacccgaaactnttataatattaatatcatatcatcgccctagcttctagaatttaatattaaattaaataaccagataggtattaacttacatatttacaaacccttattataataagataacaacaagcatcattataaagcaattcatcatccattccacagacatgtaacatntcattgcacaacactaacatcatatgctgctagaaacagaagtcaca

SEQ ID NO: 15380 - DNA, 506 bp, Zea mays
  unsure (1)..(506): unsure at all n locations
agctctcttcaacattttaagccactcangcattcgcatatatctatatgtgccactgacggatatgaagctagtcttgggctcatcttccttcttcatccagatttggtgaaatcctgaataacaaactaatacactcatgagctttgatgaagctgctgcatctactagagaatctatccttggcaatgggaactcatcctttggacaagctttgttaagatctgtaatatcgatgcacattctccatataccaatcggccttcttcaccataaccgtattaactagccactctgggtacttgacttctctgataacttcagcgctgagaagcctctttacttcgttacgagcaccttcagccttgtcatctgacatttntcgaagcctatgcttccttggcttgaagatggatccacattgagtgaatgctcaaccatatctgttggcaccgcaaagaacatcgtctgaccaacaaaaacatctttgtgttgaataaaatcta

SEQ ID NO: 15381 - DNA, 510 bp, Zea mays
  unsure (1)..(510): unsure at all n locations
tgggcggaaaatttacactgacatctgggcatatggtggccgagaaatagctcatgagattatgaagaagagcgaataagacatccatgacgcccgagtacaagctaagcaagctgaagaaactgcagagcacgagaggcgcataggtattgtttcgcggcatctagcttcggcatttgttttcgtgactttgaactgattaattntttctaatatagctgaactatctcctccaccagaaccgttcgaccccttggccgacccggaaacgaagaaagcaataaagatcatcaatatggccgaatctattattgacgaagttgttaacaagttgttatatgaagttgcggaaaagatcctgaaagaggactagtacttattggtataaacattttagatgatcaatgtagaattgtcgatcaagacagaatattcgatgccatattcttgaatctaatatgtaaaatattgaattcagtctttgcatgctgaaacttatatacataccgg

SEQ ID NO: 15382 - DNA, 443 bp, Zea mays
  unsure (1)..(443): unsure at all n locations
agcttcgtcatctgatatggaagtgccctgaaggtaagatattatttcagttctccaatcttcactgtacacaggggaaatagtaagaactgctctttcaagtaactccaccgaaggtgcctttattgtttcaaagaatacatccgaaggtagcggcagcccctgtgctgcagacctggctaacaaatcagcatgttcattttgccctcgagggatattcttaacagagaatccttcgaaggaagcttcgatccttcggactgtgtctaggtatttttcaagcttcgggtctttagccttgcagcttttgtcaatatgacccgaaacaatctgagaatcagttttaaggatcgccctcctgatccccatcgcctttagtttccgaagacccaggagcanggcttcgtactcagcaatattatttgtgcagctgaaatccagtc

SEQ ID NO: 15383 - DNA, 229 bp, Zea mays
gtctattggatgtccacatggtgtaaactcctccttcttttccttcggtgctttgaacgcaacgggatgggcttccgatgtggtggcatcttcaagctcgttgatctttctcgagccttcgatcatgcactcataacttacaaaaatcccgataacttcctcgggggtcattatgggatatctaggaatgccacggattaattgaactttgagtaggttaatgaaaata

SEQ ID NO: 15384 - DNA, 423 bp, Zea mays
  unsure (1)..(423): unsure at all n locations
gcttgaaagaatgctgagcagcatatgctaataaaatttgtatagattcaaacctagctacaggagcaaaagtcttctcaaaatccaaacctgcaacttgggcataaccttttgccacaagtcttgccttgtttcttgtcaccacttcgtactcatcttgcttattatagaacacccacttggttcccacaacattttttctttggacgtggcaccaggcaccagacttcatttctcctnaagttgttgagctctttctgcatggacatcacccagtatggatcctgcaaggcttctttaccctgaagggctaatagaagtaacaaagcagtagtgctcacaaaaaatagcaatacgtgaacgagtagtaactctcttgctgatgtcaccaagaatttgatccacctgatgatccctttgaat

SEQ ID NO: 15385 - DNA, 491 bp, Zea mays
  unsure (1)..(491): unsure at all n locations
aacacgtgataggtctaaccaatggtcattatcaanaagatagacctcgtgcagcttgtcaagcacgtgaacaagtgggaggaacacaccacagcaagaatgtgatgaccacgtcaagaccactggagctgctgcatatggacctcttcggacccgtcgcctatctaagcataggaggaagtaagtatgggttagttattggtgatgacttttcccgcttcacttgngtattctttttgcaggataaatctgaaacccaagggaccctcaagcgctttctcaggagagctcaaaatgagtttgagctcaaggtatagaagataagaagcgacaatgtgtccgagttcaagaaccttcaagtggaggagtaccttgaggaggaacnggataagcacgagatctccgctccctacacacctcagcaaaatggtgtggtagagaggatgaacaggacgctcatatatatggcgaggactatgcttgagaattca

SEQ ID NO: 15386 - DNA, 326 bp, Zea mays
  unsure (1)..(326): unsure at all n locations
agctntaagcaagtgttctgaggttacctctctaaactctatacccacctcatattagagctcanaagtgtgctatagtgctctaaagcttttagagctctaaagtttggaggggaaaactgaaagggaaatgtgcccttgggccatttctaagtattatggtgattgagtgccaacacaagtgcttaaatgtgaatctatgctcatggatgaacaaagtgcaaatctagagcanaggtatgtttctaagtcttagtatatttagtttgtgtactaatatacttgtctaagtatgagaaacaggaagaagaggaaaagagaagagt

SEQ ID NO: 15387 - DNA, 395 bp, Zea mays
aagcgcacgcgtgagaaattacaggacatgcaccaaagaatataagatagtattcggtatctttggtactcttctaagctttagtgacaaaattcacgagctcaatccaaatattatggaaggaaacaaaaatgtcaggtattttcaggattgcagcacaactgctcttgagaatagctggttgacaaagggaatactattgtgcttgaatgaggaagtctgtctaacaggttggaagaaatcatgaacacatatatagctgcactgatgtaatattgaaagctgacagaacatcacctgtgaaagaatggacattacaccatgaacgtaccaacatggctatacctttagagatacacatttttttgtactgtaatagataatattcaacggat

SEQ ID NO: 15388 - DNA, 266 bp, Zea mays
  unsure (1)..(266): unsure at all n locations
cttagagtcacctgccgcatgcaagcttaccacatatgaagcatgagcgcttccctttgtcttggtcttgctcngctgccaccttgggccctttagcgccgacttgaatctctcgaagatgagagccactcttttatcttaagttcgggcgcctcaatttgagccaccttgctaggtagcatctccttgcttcttgttggcttgagagcaagaggttgacgctcattgattggacctgttatagcgtcgtcgacgtatctcgcctt

SEQ ID NO: 15389 - DNA, 352 bp, Zea mays
tgcatgcttgtcaacaatatatacacaacagagagaacgccgcttttgtagaacaaccgaagcctatgctcctgtgtgaagatataacacattatagggtaatgctgggatctcagttatctgctgaacacagaaagactctactaagatatttattcaataacacagatgttctcgcttggacaactaatgatctctctggtgttaacagagatgttattgaacattcactctatgtggatccatcttttacggcaaggaaacaaagacttttgaaaatgtcttgaaaataagccgaacgtgctcggaatgaagacaagagacttctcagtgctggccgtatcagagaagt

SEQ ID NO: 15390 - DNA, 111 bp, Zea mays
cactggttgttaactaacagacaatctggaacattcagacgcttatcctgctactcaaccagcagtttatgaatatggccgaacacctttgaaaagttattgaggcacaaa

SEQ ID NO: 15391 - DNA, 253 bp, Zea mays
ttaagagcttctttatggcagggctttgattcccttttcgtgagatgattggagaggttttaaagaattttgagatatactttcatcagttgacacctaatgcaatcgttacacaagtctacatatgggctctccgaagccagggtatgagtcctaatgtcgaagctttctgccaagtgcatgagctgcactatcaaacgaagggcagagcggatggtcttcataataacttcggctgctacaacttcgcata

SEQ ID NO: 15392 - DNA, 384 bp, Zea mays
tagcataggcaaagaatatatgaattgtctcaagcctagctacgggtgcataagtttcatcaaagtccaaaccttcgacttgttaataacctttggccacatgtcgggctttgttccttgtcaccacaccatgctcatcttgctatgtgcgaaatacccatatgggacctacaacattttgattatgacgtggaactaaatgccataccttatttctcatgaagatgttgagcttcactcgcataactaacacccattcgaatctcttatgcatcctccaccctatgtggctcaatagaggacacaaaagagtaatggtcacagagatgtgcaactcgagatctagcggttacaccttataatgtcaccacgatggagtcatgg

SEQ ID NO: 15393 - DNA, 361 bp, Zea mays
  unsure (1)..(361): unsure at all n locations
gcttcttanataaacctttccatgacagcaggtctgagaaagatgntctgtgcctttttgaatcattactaacatgtgaaccttttgtcgtcccttgtgattnttggtaatcttgctatccactgatgaacctggagctctcaaactgtctactgtgcctcaacatcggtagcttcaactttcacacttttcaagtagtagtgcgcatcaattccaaaatgggtggaccaaaggccactcaatcgccttatttatttctgcatagctattttgctgagtaccaatgcaccgatctataggtttcaaaaaaagcactgatctatgagaatttgttctccagaacgcaatgttcgccacgata

SEQ ID NO: 15394 - DNA, 211 bp, Zea mays
tgaagatcaagaggatgagccacctcttgaggaggacaaagatcaagggggaggtgataatgatcaagaacaggaagatgatcaagaagtacagggtcaaagaccgtcacacccaagagtccaccaagcgattcaaagagatcaccccgtgaactccattctcggtgatattcataagggggtaactactcgatctcgagtcgctcatttt

SEQ ID NO: 15395 - DNA, 416 bp, Zea mays
  unsure (1)..(416): unsure at all n locations
gcagcttattcaaggtttagatagaactaangtatataaaatcaatgaattgattgatgctttaaatgaaaagaatagacttttaaacaagccagaggatattttatatgaagagcatgattagggttgtagtgtgccaaagtctcttgctttataggttaagaggaatgaaatgctttcttcagaattatctgcttgtcatgaaactgtgtctagcttaaagagtattaacgatgacttaaatgctacactagaagtagttaataaatctagctcttgtgtagagcatgtcgtcatttgtaatatgtgtaatgatcttgatgttgatgcatgtgttgagcaccttacttctattacnacaataaatggtgaagtggcangtcttaatgcgcaacttaagacttgcanaaaatgac

SEQ ID NO: 15396 - DNA, 413 bp, Zea mays
  unsure (1)..(413): unsure at all n locations
gggtgtgctacatatgtggttagctcggtcattttattgctaaatgtcctatgtctagtgatagtgacaggggcgatgacaagaggggaaagaggaatgtgaataagaagttctatcagaagaagtgcgacgatgcccacgtatgtcagtaatgggattcctacataagctccaccgactccttcttcgacgaggatgccgcanacatcgtcttcaacaatggtcttgtcttcccaacatctggcacaatatgcctatggctaatgacggctagaggaagagggtacaatctacatgctccactaaatatacaacatctagtgatgaatgtatctctaatgaatatgaggataatatgcttactcatattgccaaccttaacatgcaacataaggaaacattaaatgaattga

SEQ ID NO: 15397 - DNA, 536 bp, Zea mays
  unsure (1)..(536): unsure at all n locations
gtcacctgccgcgtgcaagcttaaaggatactattcaactaaagtaagatgtaattgttaagaggccaacgtatgaaaacttcctctccttcagctgtttattttatccttagtggaatgtaccatagtatatgttaaattcctcgcaatataaaatgttcaatagtgcatataactttgacatcaactatatgtgtgcactaatttaaaggaatttagtctatccttttgggtttcaataatgatgattcatttgccatccgtatataaggatcatcatttgtgaaacccatccttgtgtttctaatgctctcttttctaagtggttcaataagcgtccttccaagtgctttcaagatggattcanaatctacggatataacggtcttgcgtgtttcaatcattgagtttcaattgatctcatatcaagtatgatcgaatcaagaaaggatgaaaggcagtcatgatcactcggttggatgaaatcataaagagacaagagatcacagtgattcaataacgggagctatattttt

SEQ ID NO: 15398 - DNA, 393 bp, Zea mays
agaagcactatagcgtgattgtttaaagttaagggcattaatgtgatattacacgggctgctgtccgtgtctataaatagatgaacagtacttcctgcatgtcactctgtcgtggcatttgtatcgcgcgtagtcccttactgtgcttcaagcctgatgtacatattgaatttgttgtcgtttatatcagcgaactacatagtaatgaattaataataatgttcaacgaatccatgtattttccgtgtttatgtgtaaatctctcttatttttattgtattatgaacgcgggaccttataaacttcgttcgaactcattatatcataggaaatatgcttcaagtcaacggctctgaattacatttactcgcctgtcttaatcaacattggaac

SEQ ID NO: 15399 - DNA, 472 bp, Zea mays
  unsure (1)..(472): unsure at all n locations
ctcgacacgcgatccttaagtcacctgcggcatgcaagcttgagagtggcttgccgaagcgacagaggccgtatgctgttgattacctacgtattctgggacatatggagaataacatagtagtatgtaggacttgcttcggctgattctgccgtgcctcagcttcggcaatctctttntgcttctgaattatgacttggcatgttcatgtggtgtggcctttgtcttcaccgcagaataagcaaaatagtcatctgggctgatccctgtatctttctccanagcttctgccccctctgcctcttggngctggtggcctgaacgagctttgttgtggccctgatgactgggaactgtgttgttgcctttgagggtgactatctctatcatcacttgggttggaattatggatcgacctgacgtgtctggcgtgaattcactacaagacaaacacccttatagcaacgcatac

SEQ ID NO: 15400 - DNA, 373 bp, Zea mays
cagcacatgccatcacagcagctgcgaaccataccagttacctggcctttcgcatgctggggactggatatgattggacctttcaagaaagctcaagggggatatacccatgtattggtggcaattgacaaatttactaaatggatagagttcaagcccattgcttctttaacttctgctaaagccgcggaattcatacaaggcataatattcagattctggataccaaacagtgtcatcactgacttgtgatccaacttcaccagttcagaattctttgacttctgcgagcaaaagagcattcagatcaagtacgcatctgtagcacatccaagagccaacgggcaggttgagcgagccaacggaatgatat

SEQ ID NO: 15401 - DNA, 464 bp, Zea mays
  unsure (1)..(464): unsure at all n locations
gcaagctnggaaatgaaactangtgttctctacaagcattattgtcataatctttacacctagtacaaatgtcaacatgttctacacaagaaatggatatatttgctacttctaatttagcatttaaatcattgttgacacctttcaaagtagaaatggtttcatgacaagtatatagtttaaaagaaagcatttcatttcttttaacttctaaagcataggatttttgtgcctcaacacatttatcatgctctttatacaacaaatactcttgcttttttctaaagtatattcttttcattcaaggcatcaattaactcattaattntgtctatcttagatctatctaagcccttgaacaaacatgaataatctaacttcatctcatcactagaatcttcctcacttgaagaacatanngtagagtgcgagacataccttcttctccttgcataaggatgtgt

SEQ ID NO: 15402 - DNA, 285 bp, Zea mays
  unsure (1)..(285): unsure at all n locations
tgaagccatggtaagtagcataggctaataatatgcgaatggactcaagcctagctacgggtgcataggtttcaccgaaatccaaaccttcgacttgggagtatcctttggccacaagtcgagcttatgttcttgtcaccacaccatgctcgtnctgcttgttgcggaagacccacttggntcctacaacattnntggtaggacgtggaactaagatgccatacctcatttctagtgaagttgtgagctcctcttgcatcgccatcacccaatccgagtcttgga

SEQ ID NO: 15403 - DNA, 382 bp, Zea mays
  unsure (1)..(382): unsure at all n locations
agcttgtagcaacatgagagcacaaaacgacccttggtttgcggagattatgctgcgcgtangcggtggaactgaggacacaaatagtgacgacgacattcgtcttcctgacaatgtgtgtgtgccttacagtgggagtgacaacgatcttgacaacctaatagacttcgctttcccaaatctcaacgaanatatgtctgattccacctacatcacttcaagggcaatattgtcaacacggaacgactgggtggatatgataaatggtaagatgattgatcgctttcaaggggagcatatggtgtaccatagtttcgatagcgccatggatgatccccataactactacccacctaagttcctaaacacattgacgcctaat

SEQ ID NO: 15404 - DNA, 463 bp, Zea mays
  unsure (1)..(463): unsure at all n locations
agacaacatatgtgtcatggttttatacgtttctttctctagttaattgttatgtagtattgggttgcgtaaatatccaaaatgtttgtcgtctttttagtggtgtaatgttatgcgctcgatgatatgtagttagctaacgctagtgggtgtgggtgcttgtgatgtctcactacttagtgtttaattcgctagcgtgtacttaaagtatcttgtgctatttcattatattcatacatatgcatattgcatctcatttacgaccgagagatgatgatcgagccagtgatgtggtgccaaccacaagatgcagttggtggacgacctgaagaatgatggacatgaccagtagatgctcgccaagcgagtaccttccccagcanacactgtctaagttgctaaataaagggcagccccggttntatgcataaccgtttatatatgctatnttactacacttaat

SEQ ID NO: 15405 - DNA, 265 bp, Zea mays
gcttcttgaccaaatctgaactcaccaaattattgcagcttccaccatcaataataacacgtgcacgccgattctcgatggagaagaaagtctggaacaaattatggcgttgcttcttctctgatgattcaagctgagaactaagaacacgctacaccatgatacttcgaaggttcgccgtagcatcagcaccaagcatgacatcatcattagcagcaacatcactggagtcatcatcgtcaccctcaccgtcggaagcactaat

SEQ ID NO: 15406 - DNA, 515 bp, Zea mays
  unsure (1)..(515): unsure at all n locations
atgcaagcttgtgtaatacttgccttgaacgcttgtatcaaatatgcgttatcagacatcacctgtgttactttataggtaccctcccagcttggcgaccattttccaaactttcagtctttattccttagaggcaggatggtcttccacaccaggtctcctacttgaaatgactttgctttaatttgaccttcttatagtaggccctggctaccatgatcttgtcctcttccattgctcccaaagctatcaccctcttgtcggtcaccccatcaatattatccatcattgcatcataataatcagcgagagttagatcattttgtctggcgaacctgacagcattcaaacttattttcacatgcaacactgcttcctgtccatagacaagctcaaaaggagatactctagtagcactatgtntagatattctatgagcccataaagtttcggaagaatcttatgccaatgttacgatatcacaatcttctttttatcaagtgataatgcctatt

SEQ ID NO: 15407 - DNA, 395 bp, Zea mays
  unsure (1)..(395): unsure at all n locations
ccatcttaagtcacctgccgctgcagctaaccctgttgttcgcttttccagcttcttgtcccaaangtgatacggaccgccaaacactcagctgttcagtcaacttctataaaatttgtttgggtaaaaacatttaaaatcaacataaacatataatcgattgagtccgcgcaatagtagtaatccatcactttatagatcctgagccccatgtataactttatcttccttcgcacgtaattctaatgatactcagattctctacacaactagaattctcccacagctagaatctcggaaaaactggtcagaaaaagctgaaccaacaggccataatagacttaaatcttgagtgggctctccaacagggcatattctttgaagatatcttttat

SEQ ID NO: 15408 - DNA, 253 bp, Zea mays
catggaggacttcactgacgtagtataacggcttctggatggttcggacccctgcgggctgcgggtggtccccagccctcaagctccatggtggttggaccaccaccttctcatatgggaactttctgactcccgtggggatgttgtgccgtccttttgacgaccagcaccatgctcacacgctctgtagccgctgcaatgtacaagtacaatagctcccctggctctggagctaccagtattggtagggaca

SEQ ID NO: 15409 - DNA, 401 bp, Zea mays
cgctgcacacgtaggcgacatttgcgcggatagtcttcgcgatagacatcggatattttcgcacttgttgtgctagtcccgctgcacccttatgcgacttctgcgcggatagtcttcgcgatagacattggatatttttcgcacttgttgtgctaatccggctgcacccttaggcgacttctgcgcggatagtcttcgcgatagacattggatattttttcgcacttgttgtgctagtccggctgcacccttatgcgacttctgcgccgacttgtcgcacgcgagggtggctagcgcttaacctccagtgacttcgaattggtcgaatgccgaagaccgttgtcgctgtctttattcgacacatgattttgcgggggatatctctcacatatattacatgg

SEQ ID NO: 15410 - DNA, 70 bp, Zea mays
  unsure (1)..(70): unsure at all n locations
antgcgtgcaagcttngtatcacggattaaacatcgccatatcactgggtgtcaatagactgatggtgta

SEQ ID NO: 15411 - DNA, 303 bp, Zea mays
  unsure (1)..(303): unsure at all n locations
acatgtgcaaaacggtgatgccacagccagcccatgctagtcttagcaattaagcatgcatctagaccgacctcctcttttgcaaaatcaactaaataaagtttaccgtctagtacacccttaaacgctaatgaaccatcacttcttctaaagacaaacacatctacatttgtgaataaacagttatatcccatattacaaagttgacttacagacaacaagttatatccaagcgactcaactaagaacacattagaaatagagtgctcggatgagatagcaattnttcctaaccctttcacc

SEQ ID NO: 15412 - DNA, 371 bp, Zea mays
  unsure (1)..(371): unsure at all n locations
agctttcttggcacttctcatcccacttaaattctcttcctttctccaaaagcgaggtcataggcttaacaatcttagagaatccctcaataaatctccgataatatcctgcaagccccaagaaactccgaatctcagtaactgtagtgggcactctccactccataatctccttgaccttagcaggatccactgctattcctccattagaaataatatgtccaaggaatggcaccttgncaatccaaaactcgcatttactgaacttggcgtagagttgattatctcgtaacttctgtagcaccaacctcagatgttcctcgatcactttcactcttggaataaataagaatatcgtcgatgaacactac

SEQ ID NO: 15413 - DNA, 382 bp, Zea mays
  unsure (1)..(382): unsure at all n locations
acgaattcccgttgccaaggatagactctctagtcgatgcagcagcttcttcagagctcatgagtctcttggactgttactcangatatcatcaaatctggatgaaaaaggaagatgagccgaaaactagcttcataactccaagtggcacgtattgctatcttcggatgcctgaggggctcaaaaacgctggaggaagtttcagcagaatgactgcgaaggttctccagtctcanataggtagaaatgtgttgacttatgttgatgacattatcgtcaaaagcacgaagcaagaggaccatattgctgatctgcatgagaccttcgccagcttcagacaagccggtctgaagctgaatccagagaaatgtgtcttctgagt

SEQ ID NO: 15414 - DNA, 108 bp, Zea mays
agcccaggcatattcacgccctgagccacagcgactaaagcccatatcgaagaggggtctaaaacccatctgtcgacaccgcaaagaaatatggcaactaggacaata

SEQ ID NO: 15415 - DNA, 320 bp, Zea mays
  unsure (1)..(320): unsure at all n locations
gcgcagcatgaagagagtcagaaatgctctttatacagaattgccttacctaatctcgacagaattttcatctaaccaagagaatgaatcatccattgcaaatacgtgtgatgctggatgtactgaanaagcagtttcagaagcgcatgtggcacgatggaggtctctgttttgtcagatggaccgagcacttcaggaggaagggaaacagctggtgagtttaccggttggattaatttcgtgtgatgaaaggactatgccatccgtcattggttgtgttggtaggtgtacatagccctattatattacttgataatgga

SEQ ID NO: 15416 - DNA, 454 bp, Zea mays
  unsure (1)..(454): unsure at all n locations
aagtcaactgacgcatgcacgcttctaaagggagaacacatattgggactaacacatgttctatttgagagagacagggtttgtagcgcatgtcaagcacggaaacaagttggtgcccaccattcacacaagaacatcatgacgaccgacaagccacttgagctacttcacatggacctattcagcccgatagcttacataagcatcggcgggagtaagtactgtctagtaattgtggatgaatattctcgcttcacttgggtggttcttttgcacgattaatctcatacccaagagaccttatagggattcttgagacgggttcaaaatgagttcggcttaagaatcaataagattataagcgacaatgggacagaggtcaagaactctcaaatagaaggctntcttgaggacgagggcataagcatgagttctctttcctacacaccacaac

SEQ ID NO: 15417 - DNA, 218 bp, Zea mays
cattatcctcacgagtttgacaagatttctccctatcgtcgcccttacaataattaaataccgaaaatatttgcccctcatattgaccagaagactctgtttgatgcttgaattttcaaaaactgcatgtgttggtcgccaacgtcgatctttggaatcttcaccaccacttttcacatcatagctgtcgctattaccagtgtctttagacaaaccct

SEQ ID NO: 15418 - DNA, 327 bp, Zea mays
tgagtgagtgggagcagttggtcatagagcgtatcaaatgagtttgcggtatggccgtaattatacaccaagtgcgttgaaaattaaaagaccccgcttgttagagaatgttgctattctatcaaagggaaggcgttttttctgacctttcggcgaaagccttcgttcatgtcgcaatctaaatttattattttaaaacaaattaatattgcgaggggctactgttggggaccttcatcatctgaaggtgctctaaaacaggatttaacagtatttctggagtataatgtgtgaacaggtatcttcggattcaagccagcatcacag

SEQ ID NO: 15419 - DNA, 421 bp, Zea mays
  unsure (1)..(421): unsure at all n locations
gtatcattcccacggttaatatctccatttcctgacataatgtggtgttcggagtccttactgtaagacaatggcaggaagccttgcgacttaatgcatctgccaccacgttggcctttcctgngtgataatggatatctaattcataatcctgaatcatctcaagccatcttctctacctcatgtntaattctgattgggtaaaaatatacttcaaactcttatgatctgtatatatatggcagatatttccagcagataatgacgccatattttaagggcatgaaccacagcagctaattccaagtcatgaggtggataatggttctcatgccggcgcaactaccttgaagcatatgctataacatcggcctcctgcattagacacattcgagacactgtcgatgcgtacagtacacat

SEQ ID NO: 15420 - DNA, 285 bp, Zea mays
tcctggtacttgagcaatgtggaccagtggcataccgactccaactacccgaaaccttgtctgctgtgcataatgtgttccatgtgtcacaattgaagaagtgtcttctggttcccgatcgaaccattgaagtaacggatgttgtccttgaaccagacttgacatactctgagcaccctattcgagtcttggatcaaaaggacagggttacccggagaataactctcaagttttataagatacagtggaaccagcattctgaagatgaggctacatgggaaactc

SEQ ID NO: 15421 - DNA, 366 bp, Zea mays
  unsure (1)..(366): unsure at all n locations
ttttttttaatggtgcttcagcttcacanaaattattggtcaaacaatgacatgcattatgtattttcagttaaaaacaattgntntttccatttcatgttgtatttaagcttagctacatttgctgcaggtgtttaacaaccacactgaaaatacaaatttaggtactgatatgttggatcaagcagcactaatcattaagaagtgtcatggacttccncttgcaatatctgcaatangtggatacctagctaataagcccaaaactgctactgaatggaggaaggtcaatgatcgcatcanggctgaattggacatgaatccggaacttaggagtataaagacagttcttatgaggagctatga

SEQ ID NO: 15422 - DNA, 349 bp, Zea mays
  unsure (1)..(349): unsure at all n locations
agctngtgaaggttcttcatccctacatgtgctaagcggcgatgccacagccagcccatgctagtcttagcaattaagcatgcatctagaccggcctcctcttttgcaaaatcaactaaatagagtttgtcgtctaatacacccttaaaagctaatgtaccatcacttctaaagacagacacatctacatttgtgaatagacaattatatcccatattacataattgacttacggatagcaaattatatccaagcgactcaactaagaatacattagaaatagagtgctcatttgagaatgcaatcttgcctaaaccattaaccttgccttggtcccatcaccgaatat

SEQ ID NO: 15423 - DNA, 378 bp, Zea mays
  unsure (1)..(378): unsure at all n locations
aatttggcagcagaacagtgcatatagcaatgaatgctgtggtaacttcacacctactcgtctgtttatataatactgcaggtaagaaggcgaagcgccaggatttttacaccaggcggacacccgcttgcactcgctgtgcggtggaccgcagagaccaaacagtaactctgcaaggtgggaccgctacgcgctgggaaattgaatacgttctcgacaacgagctcatggaagggtgtttttggaccttcngctcctcgaagcttaagagacttttttcacggatcaagctcgttacgaaaaacgatctagcaccgcgaaagggctactggtgggcctgtgcttcgtcaccgaaggtcctatatgaagaagcggtct

SEQ ID NO: 15424 - DNA, 340 bp, Zea mays
  unsure (1)..(340): unsure at all n locations
agcttatcacaagtataatgcaagntgtgtccttgatcactttctttacctaataatgattctgttaatcaccgcgacacagttaggttaagctgatggtatctaatagggtacctagttttgtttaccctacaccttacaaacaaatgagctatcgggtactcttgctatgttatacctagttctaggattaatattatatttgaattatgatcatgctctattattattgctggagttatattggntcttgataagaatatttcgttaaatggaatatggagaaccacccgagaaaacagtgctaccataagggtggaatgggacgcccttggccagt

SEQ ID NO: 15425 - DNA, 387 bp, Zea mays
  unsure (1)..(387): unsure at all n locations
tgggatgtcgatagaggatccatccatagatttcatgggtggtgaattagtggagaaaaggaccgccaaaacgaaggcaagggaggatattaatacccacctagattctcagaaggagaggcggtaccgaaggttttggaccatagacgaacacaggttaatgatttctttatttcacacatgcatttggtttgttctatttataatctttggcttatnttggaaacacttttcacattttcatgcacattattgntacattcattagaatgacgtatggngtattcggtattatgaagtgtttgagaatttttcactaataatgttagtgtggatactatgcatttntcaatctaatccttatcttggtgangaatttctctatgg

SEQ ID NO: 15426 - DNA, 471 bp, Zea mays
  unsure (1)..(471): unsure at all n locations
ctgcggcatgcaagactggtcatattattgctaactgtcctgataatggaatttatcattacaaggggaacacaagggagaagaacaagcactactaaaaggccaagggcgatgcacatatacgccatgagtgggattcataatgctcctcctccgactccgacaatgatggactctcctccaccgccttcaacaaattggtcctcttatccaacgagcgttacacgtgtctcatggctaacgagaagacagtaagtactctatactctacttatgcttcttctaagtgtgatgaattcattgaccatgatgaaatagactattcttagttatttaaaggtctagatacaattacgattggcaaaataatgaattaattgatgcattgaatgagaagggataactcttagacaaacaagaggatntatggtatgaagagcatgataaatctttagaagctcaataatctca

SEQ ID NO: 15427 - DNA, 396 bp, Zea mays
cacacatttgaagtatagtttagcttatcacccgcagataaatggtcaaatagagagaaccaactagattcttgaagatattgtgagagcttgtgcattacaagacaagatatgttggaacaagaggctaccatatgcggaattctcctacaacaacaactattatgccagtctgaagatgtcaccattccaagcactctatgggaggaactgtagaacttcgttgcattgggaccaccccgacaaaagcacgttgtctgtccacaattttgcttgggccgaagaaacatacgatggtcgagagaattaagacaccagttagcccaagtatgctgaccccgaaaagaatgagttcaagtggggatacgctattgaggtgtaccatcagggagatac

SEQ ID NO: 15428 - DNA, 235 bp, Zea mays
  unsure (1)..(235): unsure at all n locations
agcttctgtaatgttcatgaattattatatgaaacaaagccttggtgcanagaacagtaccataacaactatggctgctacagcttcgtctctcgggccggggcaagctgtcccgtaccaacctttctgaagagatggcccggcgattggatgacacaatggttttatgtgaagaatgacttatcagcacgagaagacatctaaggtataattatgcgtcctatttggcaaagct

SEQ ID NO: 15429 - DNA, 479 bp, Zea mays
tggttgatgtatgcaacttaatattgtatcagagccggaggtcccgagttcgaatcctggttagcacaattaaataaaataattgttgctcgctcctatattccacgttagagacccaaaaagaggctcgacgtgagggggagtattaaaatataatataagtgaattgcccacctcctcctatcagcttaagctcttgggttgaattggttggtgcatgcaacttaataaagcgcctgtcatcaatatctccagcccaatctgcatcattgaaggcactgaccagcagagaaggtgactttgaaatcttcaacccatggtgaagagtgtatcgaaggtaccttaagatacgcttgactgctgtccagtgatctgttgtaggtgaatgcaaatattggcacactttgttcactgcacaactgagatcccgacgagtcaaagttagatattgtagggcacctactatgcttctatatcgt

SEQ ID NO: 15430 - DNA, 157 bp, Zea mays
catgaacactattattccagcaattcacctctactgactgaacaaatgtcttagagtacccatagaaagattataagcgtaagatctataggttgggttacacttaaggcatgtgtggatggctgaacgaggacattccttcttcgcgcccctctac

SEQ ID NO: 15431 - DNA, 256 bp, Zea mays
agtgaagctacccgtcgcttcttgcatgtgtgtgcgtgtccttctttatgtgtagagccagatcaagatgatatgaatgttcgaacgagtaacacgagctatagactacttaagtctttttacagaaagcgagtgaatagtaagcgtattcccgagtaagtcgataagtcaaagttcactctaaagtgatttatttctttcgcactgagattcccattgctttcatacgcgaaagaaagagtcggatatcgatttt

SEQ ID NO: 15432 - DNA, 514 bp, Zea mays
  unsure (1)..(514): unsure at all n locations
agcttcatcttgtgccacaatactataacttggtctaagtttggtgtcttaacaacaagaaaaggtcaggataaaggatcacgcacaagtttgaaggagctccctagagataaagctttcaagatgaaaatcttaaattgatgacaaaagcaactccgcctacttagatggaaagtacaccataacaatggtaaaggtacaaaaggaggtattgaccttttttgcgtatatgcaccttaattnttctcanatgcttgtgttgcatatgtntaatgtgtaagggggagtaatggtagtgtgttgcatttcactttgctgtcccttgacgtcatcctatgttcttgcttgaatatggtattggcgtttgatgtcaaagggggagaatttgtgcattaaagcttacctcgacctgagagggaagcttatcttangtgtgaagagggtgaagatcaatttttgtgtgcgaaggactctaggggtttcttgagtctttgatctacgagatgtgtagttt

SEQ ID NO: 15433 - DNA, 325 bp, Zea mays
  unsure (1)..(325): unsure at all n locations
taagtcacctgcngcatgcaagcttccaccataattcttgagcccctcaagcatctaaagatagcaatatgtgccactaggggttatgaagctggtcttcagctcaccctccttcttcatcaaaatatgatgctagcctcagtacaaatctagtatgctcataagctctgaagtagctattgcatctataacggattcaatccttggcaacggaaactcatccttcgtgcatgctatgttgaggtctatgaaatctatacacattcttcactgtcatttgattcttgaccatgactatattagctaaccattctagatatgcaac

SEQ ID NO: 15434 - DNA, 420 bp, Zea mays
  unsure (1)..(420): unsure at all n locations
cttctaaagggagaacacgtgatanggttgactaacgtgcaattcgaaaaaaaatagaccttgtgcagcttgtcaagcaggtaaacaagtgggaggagcacatcacagcaagaatgtgatgaccacttcaagacctctggagctgctgcatatggacctcttcggacccgtcgcctatctaagcataggaggaagtaagtatggtctaattattggtgatgacttttcccgcttcacttgggtgttctttntgcacgataagtctgaaacccaagggaccctcaagcgcttcctcangagagctcanaatgagtttgatctcaggtanagaagataggagcgaaacggtccgaattcaaaatttcagtggggagtttttgagagagggacagcacgagttcgctcctaccaccaacaaat

SEQ ID NO: 15435 - DNA, 329 bp, Zea mays
  unsure (1)..(329): unsure at all n locations
agcttagccataataactcaaataaaaccccatatcaatcttcttatatggngacttattgggaattctgaatatcagaattctgaaattcagaccttgagccaaagatcagggatgttcaccttgatccctaactggaatcctaatggccccattgacaaaattgtgtctaactaacccctctgtcatgtgccagaagatggcattgggacgcgagccctatacacgaccaaacctctgatttacctcgggttcgggcagggagacagaccagaaattcttggtccataactctgcaaccagtaggcaaaatcctatgacccccacac

SEQ ID NO: 15436 - DNA, 295 bp, Zea mays
agcttcgccaccatcactcaactgctcgctcacgtgtgctcgtaaattttcttggtcgagtctgctgagctgaccaatggtccagctcgccgttatcgccaagtaccacgcaactgtgctgtctctcgtcgtcattcattcctattttttcaccgccatatgtcgcctcgccttgatgcgtgtcgtcatctttaatcccagtaactcttccgatacgcgtctcgtcgtggttcgcctcctcttggtcagacccatctaggtcatgggggcggaagaattcaacactacttcatat

SEQ ID NO: 15437 - DNA, 336 bp, Zea mays
cacttgaactccactatgttgcctatccaagttgtcatcggctttgcaatctttcgaaacccttcaatgaatcaccgataatattcgggcattccaatgaaactcttgattactcgagcgtctgttggcgctttccagatcataatgtctgccactttcttcggatcctcagccaatccttctttgttaattatgtgacccaagaacaggacttcatcaatccagaactcgcacttgctcaacttctcatacaactggtgctcttgcaatatctgcaataccatctttaaatgagtcacatgctcttcttcactttgagaatatataagaatatca

SEQ ID NO: 15438 - DNA, 394 bp, Zea mays
  unsure (1)..(394): unsure at all n locations
ttctgtctagtggtgcaccggacaatctggtgtgccaccggacaagtcctgtagacggtccggtgcgtgatctccttccaaatttggcatatctgaccgttgctcctctgggctgattagcgcaccggacagtccggtgcaccaactgaccgttggagcagtctacgtgtcgcgtgaagattgcgtggccgaccgttgctcatgcgaccgttggctcaccggacagtccggtgaattttagccgtacgccgctgtcaaatctcaagagcagtgagttcaccgaggaccaatggtggtgacttgttctcaagtgctatgaaagaacaacgcnacacacaatggtaaatgttaatacccttcatccttcgaagcattatttccctttggatataat

SEQ ID NO: 15439 - DNA, 260 bp, Zea mays
agcttctgaacttgtgggtagcggatcttggtttctgacagtacctcgctgacgaagtaaactggcctctgaacgggcaatgcatgcccctcttcttgcctctcgaccacaatcgcggcgctaaccacctgagtggtcgcagcgacgtagaccaagagggcttcttcggcagctggaggcaccaagttaggcgcctttgtgaggagcgccttcaagttcccgagagctctcctcggcctcggggtccaagtgaagcactc

SEQ ID NO: 15440 - DNA, 451 bp, Zea mays
  unsure (1)..(451): unsure at all n locations
cacatgttggaatgagcacactcaagaaggttggaagaaagatatggttagaggattaaaggatgtggtgtttgaaaaagacaagccatgcagtgcatgtcaagctggaaagcaagttgctaatacacatcctactaaagctttcatgtcaacatcaaggccactggaactacttcatatggatttatntggacctacaaattatgtcagtgccggtggcaacctctactgtctagtgaatgttgatgacttctcaagatacactcgggtgttctttctccatgacaaatctgaagttgcatctatattcaagaagttcgccagaaagcaccaatgaatttgatgcagattaaaagatagaagtgcaatggcaagaattgacacacaacattatgagtactggataaattggacagcataagatctgcaattacactcacaaatgagtgtg

SEQ ID NO: 15441 - DNA, 345 bp, Zea mays
  unsure (1)..(345): unsure at all n locations
agcttgtcanacattgagtagatgtccctcgccagccttgtctatcttctcatgaaanttggggacaccttagaaagggagttcggaagcaccttatanaatgctcgcgcgtagtgtgatctgtggcaactgtatgcttgtaatgaacttgtgtgatgaataaaataacgtgtttgaaaaaaatatggcatatgcatagtagtaatcctttttccctagcagatggcttcngataaaaccacgcctaccacctcacggattggaccaaggtctcccctatgtgctgaatgagaagtctgtggagaacggagtgaaacccaccttcncacaccttcggagttgaca

SEQ ID NO: 15442 - DNA, 301 bp, Zea mays
  unsure (1)..(301): unsure at all n locations
ctccctggacaaacacttaaataatggatggcgctggggcangatgactggacctggcgtgaggacactagagtggacagacagacaccgaatggacactactggtgttagccgtcgggcattgttgacacctcatcacagcagcgaatcggtccaagttatgccccccaaggttctcacttatcttccatctttccctagattctatagctgcgacgatattntctttaaaatttntttgctgtgcactgaactgctcaagtccgactgaacccctttgttagcccccacctttctcact

SEQ ID NO: 15443 - DNA, 302 bp, Zea mays
  unsure (1)..(302): unsure at all n locations
acacacttgcacatatatgagaggtatgggttgaagtatctctgatatatattagtgactttgaagtgcagatgacaataatttcaccccttccgatttctttacggtgatgtggtaagttggttatggcttaacgcttgatataaattatttctgaaaatttgatatttgtttaataatgcgtttgatatcgctagncatttgtgagaatgaagtgttactatgcttgtgaaatacaagtatggctatggtgttttaccatgttttcatgggtgagtttattacaaaaaattgtatatatg

SEQ ID NO: 15444 - DNA, 339 bp, Zea mays
  unsure (1)..(339): unsure at all n locations
agctntatcanatggacgtgaagagtgccttcctcaatggaccaatcaaggaagaggtctatgttgagcaacctcccggcttttaagatagtgagtaccctaaccatgtctataaactctctaatgcgctttatgggctcaagcaagccccaagagcatggtatgaatgtcctagagaatttcttatcactaatggagtcaaagtcggaaaggtcgatcctacactctctactaatacacttgaaaatgaatttgttgtatgccaaaattatgttgatgatattatatttgggtctactaatgaatctacatgtgaagagattattangatcatgacac

SEQ ID NO: 15445 - DNA, 410 bp, Zea mays
  unsure (1)..(410): unsure at all n locations
agcttcgtcatctgaaagagattaccctgaatgttatatatgatctcagttctccaatcttcgctgagaacaggagatatattaagaattgctctttcaaggagttccaccgaaggtgcttttattgtttcaaagaacacatccgaaggtaaaggcagcccctgtgccgctgacttagctagcagatcagcatgctcatattgtcctcgagggatattcttgacaganaacccttctgaggaagcttctactcttcgaaccatatccagaatattttcaagcttcggatccttagccttacaacttttgtcaatatgacccgaaacaacctgcgaatcacgtttaagtatggccctattgattcccattgcttttaacttccgaagacctaaaatcaatgcttcgtactc

SEQ ID NO: 15446 - DNA, 396 bp, Zea mays
  unsure (1)..(396): unsure at all n locations
agctttctgtgaagggctgtggacactctagcgatgttagttattatacggggcaccatggtccgcgttggctgcgaggccaccatcaccatctcacaaggtcgaaggaggagcagcgccttcaagtgcaccctttntttaatgcaaataagtgaggctatatttatttcaagagaacgctataatactctgcacatgacaatctgtacatatgtcctcttttttgtggggctgtgtgtgctacattataaaaacacggttcgaaaaagaaagggatagcatcgttgaacgtcagttaagttgagctgtagctcagctagactcacagaaggctcaagcttaagtgcttaacatatggtatctgaaatgttaactggatagtagcaagtagtactc

SEQ ID NO: 15447 - DNA, 504 bp, Zea mays
  unsure (1)..(504): unsure at all n locations
agcttctaaagggggaacacattntaggactaaccaatgttctatttgagaaagacaggatttgtagtgcatgccangccgggaagcaagttggctctcatcatccacacaagaacatcatgactagtgacagaccactggagctcctacacatggacttattcggcccgatcgcttacgtaagcatcggcggtagtaagtactgtctagttattgtggatgaatattctcgcttcacttgggtgttctttttgcaggaaaaatctcatacccaagagaccttanagggattcttgagacgagctcanaatgagttcggcttaaggatcaagaaaaatagaagcgacaacgggacggagttcaagaactcacaatagaaggcttccttgaggaggagggcatcaagcatgagttctcttccccctacaccccacaacanaatggtgtagtggagaggaagaatcgaactctattggacatggcaagaaccatgcttgatgagta

SEQ ID NO: 15448 - DNA, 217 bp, Zea mays
  unsure (1)..(217): unsure at all n locations
tggctttccatgctggggactggatatgattggacctcttcagaangctcacgggggatatacacatgtattggtggcgattgacaaattcactaaatggatatgagtcaagcccattgcttctttaacctctgctaaggccgtggaattcatacaggacataatattcagattcgggataccgaacagcatcatcactgacttatgatccaacttc

SEQ ID NO: 15449 - DNA, 69 bp, Zea mays
ctccatacaataccaaatatttatataaataaagtcggcttgatctgcatggaccactgacggaattaa

SEQ ID NO: 15450 - DNA, 342 bp, Zea mays
  unsure (1)..(342): unsure at all n locations
gcttcagcttttgatggttgaagttatctgattgagaaagaagcttcatatttaattctgttattttggcttcagcatccgctaataagccttcagttgtatgaagttcgaagtctgtcttctcgatagctactgattgctcctttatcttgttttctaagttctcaattataacttcgtgctttttatcctctaagtcctgttgcatgtttaaagccttgctcaacagcatactctgtgaataaataaccttcgntagaaaacatctatgttactataacaataacagttacagagcagttgttaccttgaaattggaatanataggctaccgacaatgtg

SEQ ID NO: 15451 - DNA, 491 bp, Zea mays
  unsure (1)..(491): unsure at all n locations
aagcgaccggtaaggcaactgaggagtcctcccttctaatgatcttcacattcacatnccgaaataggcaattataacccattccacannagtgtgaaacggacaacaaattataacttanagaatctactaataaaacatttgaaagtgattgttggtcagagataggaattntaccaataccaatcaccttactcttgccactatcttcaaacacaatttcttgtgcttcttgagttagttgcaatgtatgaaacatgtctttcttcccggtcatgtgaattgacatccactgtcaagcacccaacttgacccaccagagggagtagacctgcaaacaagtttanggtatgctttttaggtacccaaatgaattgggtccctacagtgtagttatagcctttngtacccacacacttcttttcataactttttcgttagtgtaggcacccacatattttcacaaccaattcccctaatcccaagtcaac

SEQ ID NO: 15452 - DNA, 470 bp, Zea mays
  unsure (1)..(470): unsure at all n locations
gcttagctgattgcaagagaagccganattattcctggggagcaatgtgtcatagaagtaaggcgattcttatgatcctatgtctgggaataactaaagggttgctctanaatttctcanatactcaaccctttgaatgatangtcgctcgacaccccgatgccattacaagtgtcacanggatagtanggtgtgcanggcttgaaggtacaccccctctatttaatcatattctctctgnacttcttatgtggcttgtccaagatctaatgtgcatatacttctaacattataaatgttcgggaaatggatcatgngctgattgatatttctgtggacgcaataattatctgacatgtgtgtatatgagctttaaaaagaactatcgtctaatctgagcattgctgataatcttcttgcacatcttagtcatgatatgcatatacaaatgcataattagtatttggtgt

SEQ ID NO: 15453 - DNA, 239 bp, Zea mays
  unsure (1)..(239): unsure at all n locations
tggaactcatacatactgatgcgtgcggaccaatgagtacgacagctaggggaggattccaatacttcataaccttcactgatgagtttagtagatatgggtatgtctacttaatgaaacacaagtctgaatccttagaaaagttcanagagtttcagaatgaagtagaanatcagcgtgacaagaaaattaaagcactgtgatcagatcgtggaggtgaatatttgagtcatgagttt

SEQ ID NO: 15454 - DNA, 272 bp, Zea mays
  unsure (1)..(272): unsure at all n locations
atatctcaattctcaaccaggtatttcgctcgagccaacaatgtgtttgctccttcagtgcgacttcatgtcgaanatgaatcgccccacagcacccttcanattttgcgaatccgggtaaagcagttggaaaagggagtgtacgtcacattgaaggatcagatttgaacacgctaatgctatatatgtatagcaatattgacagcacacatgaggcgttcgagtaagttntcctcatagttacttccattttctcatctcataatttctat

SEQ ID NO: 15455 - DNA, 249 bp, Zea mays
taacttaggaaagctaagacccaaatactgatattttacctggtataaacctatggaccggaacctaacaactagggcatgcaatagctttgataggcaaacagtaaagatttagcttggccatttgaattgagtaactagttggtatgaaaacttaactatacagtgaatatatgtcattgactgtttaaatgattcaagcccagtgacattgaacatgtaaccactgttgaaatgaaattccactgt

SEQ ID NO: 15456 - DNA, 161 bp, Zea mays
  unsure (1)..(161): unsure at all n locations
ctgcagcttatgccaattctccccttgcatacacaccaaaccatattaagccagaacatagaatgatgtccagggacagcanggtattgagcanggtaaatttaacacactaacattacttccccttacacattgaacatattcaacacangcatttggag

SEQ ID NO: 15457 - DNA, 211 bp, Zea mays
  unsure (1)..(211): unsure at all n locations
ctgcgtgtatgcggtggaactgaagacacanatactgacggcgacatccatcttcctgacgaggatgtggccttacagtgggagtgacaacgatcttgacaacctaatagacttcgttttcccaaatctcaacaaaaatatgtctgattcgacctacatcactttaagggcgatacttgcaacacggaacgaatgggtggatatgataaat

SEQ ID NO: 15458 - DNA, 287 bp, Zea mays
  unsure (1)..(287): unsure at all n locations
gcttgtcattcttatcaaagcagcagcatttaccagcacagcaactgcttaccatacccgtaacatgaccattngcgtggtggggactagacatgnatggacccttcaagaaggctcanggaggatacactcacgcggtggtcgccattgacaaattcactaaatggatagagtacaaaccaattgcttctctgacttcagctaaggcagtggaattcacacaagatataatattcagggttggaataccgaatagcattataactgatttgggatccaatttcact

SEQ ID NO: 15459 - DNA, 246 bp, Zea mays
  unsure (1)..(246): unsure at all n locations
agctttataacacagatagtattgaagtgcagatataanaacgagtaatgtatagagtcatgatataacagagcacacagacgccagggtttatcccgatgttcggccaagcctgaaatgcttgcctagtcactcgntggagttagccacacctgggctcggagtctatttcaactccttcctcccgttgctcagatctgtcaatatgacagatagagcctttcactattgagtggnngtacaaca

SEQ ID NO: 15460 - DNA, 216 bp, Zea mays
  unsure (1)..(216): unsure at all n locations
atcttaagcactgcagctgcagcttttgaagctgactgcgattcccttgagcagcttcgtggggatgtgctgaaaatattcgaaatctatctccatcaacttacccccgaggcaattataaagctgaatatcttcgtgtggaccgtgagaagccaaggtctgaagcctgatgcanaaagcttctgtaatatacacgaattatcatatgagacaaaa

SEQ ID NO: 15461 - DNA, 353 bp, Zea mays
  unsure (1)..(353): unsure at all n locations
acaagtgggaggagcacatcacagcaagaatgtgatgaccacatcaagacctctggagctgctacatatggacctcttcggacccgtcgcctatctaagcatagaagtaagtaagtatggtctagntattggtgatgaactttcccgcttcacttgggtattcttttngcaggataaatctgaaacccaagggaccctcaagcgccttctaaggagagctcanaacgagtttgagctcaaggtgaagaaaataagaagcgacaatgggtccgagttcaagaacctacaagtggaggagtatctngaggagggaggaatcaagcacgagttctncgctccctacacaccacaac

SEQ ID NO: 15462 - DNA, 296 bp, Zea mays
  unsure (1)..(296): unsure at all n locations
tgcagctgcagcttaattggttgcatcaatactaaaagggggagattgaaagctctcttgtgggttntgggggtnggatgacaactcaattaaaggactaacaagtgtgctaagtgttgaacatgtgtttaatgtanagctaacagggttcaacacaagtgaacaagtgtgatggtccaaggactatatgatgatagataatgggcatcacaagtaagatggacattgcanaagtgatactcgggtgcatagctcggagacaactgatcaagccaaggacagaggcaagaagagct

SEQ ID NO: 15463 - DNA, 392 bp, Zea mays
  unsure (1)..(392): unsure at all n locations
tatgaaaccaattttnctangcttcttattttccataggatttaataaaaatagctcatgaattctagtttaaatagggaattttatggcatttaaaatagcttaaagaaatagttctggaattttacggaattaatagtaatgcccaaaatgttcaaaattttatatgaacctcccacattatttagaagccttgngtggagtttgaattgattnggaccatgttngataactagaacccanaaccctacccgtgcnctttgaactccctttaccgactccgaaaccctannngtctcgagttccgtgaaggaaagttgtattcaagactttagtaataaatctttattatctttgcactctcatgagcattacatggcattcattcttat

SEQ ID NO: 15464 - DNA, 293 bp, Zea mays
  unsure (1)..(293): unsure at all n locations
gcttcgacgatcaagtgatctagctcttcgagttccatgaggctgaagaccctgagcatctgtttggtgaaggaaagtgtcctctgacccattatgtcccattcactcttaatgcactatcccgcattacttaattgaaacctaaggattgactagctttccatttaccttatccttggttaccttttgggttatcatggntagcattatgctattgctttacttgaatcaatgaacatgatgtgaatacttatgatactatgatngtatcccgatgatgttcctgtgatact

SEQ ID NO: 15465 - DNA, 283 bp, Zea mays
  unsure (1)..(283): unsure at all n locations
gtcacctgcggcatgcaagcttctaaagggagaacacattntangactaaccaatggtcactttgagaaagacagggtttgtagtgcatgtcaagcangaaagcaacgtggtgctcatcatccacacaagaacatcatgacgaccgacaggccgcttgagctacttcacatggatctattcggcccgattgcctacataagcatcggcgggagtaagtattgctttgaatagcggatgaatattctcgcttcacttgtggtgtcttttngcaggaaaaatctc

SEQ ID NO: 15466 - DNA, 368 bp, Zea mays
cactgagctgcagcttaccctgcagacttcccatttttttacaagtattcaatcgcagcaatctatgctgttattactgtctttgatgggactgtggttctaattaatggtggtgatgttgttgcacgctaaaacatcggcaaacccaaaatccagaaaccctgacacatccgtggtgagcaggtcctgcctttttctattatttattcctccgcttccatttactaagatgctacttgtatcatgtcttgtactattggtgatatatgttacttatgcttgcacttatcatgactgagaattttatcccgttccacttattcagttctgggcttagggtcagcgtttaggcttctagactgtctgta

SEQ ID NO: 15467 - DNA, 199 bp, Zea mays
gcgcatgccaagcagggaagcaagttggcactcatcatccgcataagaacataataacgaccgacaggccactggagctccttcacatggatctattcggcccgatcgcttacataagcatcggcgggagtaagtactgtctagttattgtggatgattattctcgcttcacttgggtattctttttacaggaaaaatc

SEQ ID NO: 15468 - DNA, 137 bp, Zea mays
  unsure (1)..(137): unsure at all n locations
gcatactacaagccaatttaaatttctcattttctagttcatgctcgacaattntaacatcctaatttgctatatgaacattttggtatttaatcatagccaggtgatcatggatagcatctacattaacatctcta

SEQ ID NO: 15469 - DNA, 177 bp, Zea mays
  unsure (1)..(177): unsure at all n locations
tagcataggccaataatatacgaatggactcatgcctagctactggtgcatagggttcaccgaaatccanaccttcgacttgngagtatcctttggccacaaaagtgggcttgnttcttgtcaccacaccatgctcgtcttgcttggtgcggaatacccacttggntcctacaacat

SEQ ID NO: 15470 - DNA, 318 bp, Zea mays
  unsure (1)..(318): unsure at all n locations
actgagctgcacctgggtgcctagaggactactacattatgcgtggctactgccgtttcagcgggaacctgcggccactgcttatgaatcgcaaccaaccctgcngcgccgggcgtcaccaatcttatgttgaagctatatcgatttcgccttcttcgttatatactattaggcgacaaccagcgttaaggcccaatactgcttaaaaataccccgcctgcctatccagactgtgaatattagcattgcgactgagcatccaacggtgataaccgaatgcgcgcatacacctgcgctgctataattgcctgggaaacg

SEQ ID NO: 15471 - DNA, 345 bp, Zea mays
  unsure (1)..(345): unsure at all n locations
agcttcgngagagagggaaccagcccctaggcctcttgagaagcctagtgttgcaaagtggagttcgatgtttgagtgagtccgtcttcgtcgttcttaccggccgtgccttccttctcctcttgagaaggccctgngcatccccttttatagatataaggggatggtccagctgtacatatggnggtgtagctatgtgctaacgtggccggcagagaagtgcttgagccctgtatgaagcgtanctggcggtgcggccctgggtcctgcttgacgttctttgcctcgtagagagcttgagaacaatcgacgtcatgggcgcatgcanggaaccatcattacctg

SEQ ID NO: 15472 - DNA, 436 bp, Zea mays
  unsure (1)..(436): unsure at all n locations
agcttcctcgctctcgccctgctgtgcatgcagccggcggtccaccggttgtatctgnttgtngtgngcgctctacagcctacatacagtctgcagcaacaatattntaagccggcatggcaagccaagccaagccaaggcgattatgcgaggccacgcatgagatatgggtacggcacccgcttcacctgtgcaacttgtccccacggntgctgcgtgcagattattgctgtactatagtactccgatcgccgagagcgaggccccccctggtctctctcaagagccgtgccccgccgcgtctctaccccaatctgtggtgacgaaagcgcgacagacccngnagacngtgtgcgtgtgaatctctgcttgtctcatgcgcgtgcccaataatcgctcgtcggatatgggcgcagcgcatatatactggatgtat

SEQ ID NO: 15473 - DNA, 519 bp, Zea mays
  unsure (1)..(519): unsure at all n locations
agcttctaaagcgagaacacattntatgactaacaaatgttcantttgagaaagacaggatntgtagcgcatgccaagcaggaaagcaaagtggctctcatcatccacacaagaacatcatgacgaccgacaggccgcttgagctactccacatggatctattcggcctgatcgcttacataagcatcggcgggagtaagtactggctagttattgtggatgattattctcgcttcacttgngtattctntntacagganaaatctcanacccaagagaccttanagggattcttgagacatgctcannaatgagtcggcttaaggatcaagaaaataagaagcgacaacgggacggagttcaagaattctcannatgaaggcttccttgaggaggagggcatcaagcatgagttctcttctccctacaccccacaacanaatggtatagtggagaggaagaatngaactctatnggacatggcaagaaccatgctngatgagtacaagacctcggatc

SEQ ID NO: 15474 - DNA, 188 bp, Zea mays
tggcgggaacaatctgattgtgcatgtgcgttttgtctgcggctcacgacagttgcaaaattgcgcttatgatggaatacctcttaccatgggagatcaccgtcaagcaactaagtccctgacgtggagggccacattcacccacgtgaagctgtgcatacttgtatgaggtgctgacagaagacttg

SEQ ID NO: 15475 - DNA, 171 bp, Zea mays
tgccgtatggcaaaattcgctccctctgaagaggtttcatcaatcttctttctcttgactgaaattgtcgcgatcacctccttcttcacaaccacatctaatataagtctgtcgatttcggacagagtggttgtaagggtttcaccttcggctgtaccagtgggttcagca

SEQ ID NO: 15476 - DNA, 406 bp, Zea mays
  unsure (1)..(406): unsure at all n locations
agcttatgcctattntngcatattatctcaagtcgataggaggaaggcgaccacgatcatatgatgttgatgctgttaccaggctttcagttctagacaacccatactatcgagatcttctttgtgaatgtggtgctatattngccattgcaaacagagtcgatactgtacataagctaccatggataggtttncaatcatggcgggctgctggaagaaaggaccacttttaccttgtaaatagaactttgtgtctgtcatggtcatattggtcatgccagcttccttagaacagattactctttgagaaaaaggacatgatatgtatcactcttgaaacccttacactgacttgccaagccattacttgacatcccctanacaataaaaccagagcacaacccct

SEQ ID NO: 15477 - DNA, 397 bp, Zea mays
  unsure (1)..(397): unsure at all n locations
gcttagcgggctcaatactagcgtcttgagcttcttctcttcttctatttgccttaacataaaaccactcattctccaactggttggccacttggtgtgatagctaaccatangagtcttcatatctttacggtaagcgaacgtgttacaaccaaaaatctcatgaagactgtaacacccggttttaaggaacaaaaccgggtgcatctcatacatgcgccaaagatgacaacatatataataacagagtgtatagagataaatgtcatataacatcagagtattattacatagncggagacttattacaaaatatagtaattaatatagaacgaactagggatcgtcggcgccaatgtcgactgagaaacgccacctagatcagatcatactcctc

SEQ ID NO: 15478 - DNA, 323 bp, Zea mays
  unsure (1)..(323): unsure at all n locations
cacagagagagcgcggcgagacattcatgagacgacgcgccttgaaatacgtgtgggaaaatacatgacacaccactttctctttcagatcggtgtgaatcacaagggtcaagatctgcacagtttgcatctggagactgatgaactgcatattntatcccttagctagcttccaggtaactccacatgggttggtacttggtattggtagttacttaaactattgattggatccgaatgtgatgatatccagtagtacgtcaggccatgatacacantgtaattcctcgcanaaactttccccagccttctaagtctctagt

SEQ ID NO: 15479 - DNA, 133 bp, Zea mays
gcgaagcaatgaaggggaagaagctaaaatcttatgcgacaagaaagaaagataaaaagacaagtgttggcccctgaattatattgtaagtcatggtgtgtaaacctctgtgggcatatatgtaatctcatgc

SEQ ID NO: 15480 - DNA, 216 bp, Zea mays
acctcaaagtcttgagttaaaataatatggtttctaagtataaaacctacagtggagtgcaaactataattggaacctaaaaaaaatagtttccctgcaactgtcagactggccttttcggaatcacagcaattttacaacgatgtgtgcgtgggaacccttatcttttacccttgcatccaatattggctgggcagttgcgttcctatgaatact

SEQ ID NO: 15481 - DNA, 365 bp, Zea mays
  unsure (1)..(365): unsure at all n locations
cagtgaaaccgaatctgggcttgctgctcatctgtccaaaagtcctatagtaagntctcgtctaatttgtgttagtcttatttagnttcggtggctctggtctctcaatggttcgggacaatcttgttcatttcattgtgaatatgttcaaatctcgtttgtctagggtcagttcaatggtgtacatgtcaatttaattgttctgatttcagtgtaccgagttcgaggtaatatataccacacactggtattttgaatacatgnttggtccttgtacggtatatcacgtacggtcttgttcagctanggtgtaggtcttacattttgcatcanagcatcgtaattttggctctagatttaactga

SEQ ID NO: 15482 - DNA, 265 bp, Zea mays
  unsure (1)..(265): unsure at all n locations
gcttctaagggagaacacgtgatacgtctaaccaatgttcatttctaataagatagaccttgtgcagcttgtcaagcanggaaacaggtgggaggctctcatcacaccaaanatgtgatgacaacatcaagacccctggagctgctacatatggacctcttcggacccgtcgcctatctaaacataggaggaagtaagtatgggttagatataggtgatgaactatcccgcttcacttgggtgttcttattgcaggataagtctg

SEQ ID NO: 15483 - DNA, 480 bp, Zea mays
  unsure (1)..(480): unsure at all n locations
agcttantaagggagaacacattntaggactaacaaatgttcattntgatgatagacagggtttgtagcgcatgccaagcacgaaagcaagttggcacttatcatccacacaagaacatcatgacangcgacaggccactggagcttctacacatggatttattcggcccgatagcttacataaacatcggcgggagtaagtactggtctagtattgtggatgattattctcgcttcacttgggtgttctttttgcaaganaaatctcatactcaagaaaccttanagggattcttgagaccggctcannaacgagttcggtttantgatcaagaaaattagaagcgacaccgggacggagttcaagaactcacaaattgaaagcttccttgacgaggaacgcatcaagcatgagttctcttcttcctacaccccacaacacaatgatgtagtggagaggaagatctaactctattgaca

SEQ ID NO: 15484 - DNA, 373 bp, Zea mays
  unsure (1)..(373): unsure at all n locations
agctaatgatctttgcagagtcaacagggatgttattgaacactcgctcaatgttgatccatccttcanacacagaaagcagaggcttcggaagatgtctgatgacacggccgaaggtgctcggaatgaagtgaaaagactcctcatcgccggagtcatcagagaagtnaaatacccagaatggctaccaacactttgtatggtaaaaggccaatggcaaatggaggatgtgtattgattntactgacctcaacaaggcatgtccgaaagatgaatntgcattgccaaggatagattccctangtgatgcaacagcttcattagaacttataangtctgtcgagtggtatttancgtatcatcacatttggat

SEQ ID NO: 15485 - DNA, 204 bp, Zea mays
gctgctttttcactagcttcttaaataaactacttcctacattcttttttatttgacgtattttaagttaaaaataaactaaccggcgataaatattcaaaaacagaggtagtatcttttttaacaagaaaaagctctatccaacatgcctttggtagcttaccaaaaattggaactctggatcttcgattacatatttacatg

SEQ ID NO: 15486 - DNA, 167 bp, Zea mays
catcatccgcataagaacatcatgacaagtgacaggccactggagcttctacacatggatttattccggccgatcgcttacataagcatcggcgggagtaagtactgtctagttattgtggatgattattctcgcttcacttgggtatttcttttacaggaaaaatc

SEQ ID NO: 15487 - DNA, 239 bp, Zea mays
  unsure (1)..(239): unsure at all n locations
gcactgcctcacaactcatttaggagctgggatgtcgtccctcggagagatctgagggtgtccatatctgctnggcattgtccaagccgctcaccttattggactctctcctgcacaatgacgctaatagaacaggaatagcttgtgcatttctatggatttgttcatttataagcatagggctatccgagctatcaaattatattccattctctacaatactccatatgcttggatgg

SEQ ID NO: 15488 - DNA, 296 bp, Zea mays
  unsure (1)..(296): unsure at all n locations
gttcttagtccctccgacatgatcttttcctcacgcggttaagtgttagaacgaggattacgctctgataccaattganagttgcctagagggggtgaataggcacagctgaaactnntnctcaacataaactcatgaaacaaactgggtaacaacccggttcacgccggtgtcatnaaccggntcacgctggttgcacgagctcaactaaacaatgagatataaactgaattgatcttgaaattcacctagntaacttangaaatgagatgtntagttgatcacacggtcaaagt

SEQ ID NO: 15489 - DNA, 389 bp, Zea mays
  unsure (1)..(389): unsure at all n locations
tcttaagcacctgngctgcacttaaaatataatgataagtctcacaatcttggaaggttatcaatgaagtcacctcggaaattagtattatagaacataactttatagattagaaaacactgttaatcgatagtagtggctacctccatttctcatctcttaaaatctcagagaacatatgtgcacaatagtggttcctttgttattagaaaancatgggggcatggngctgatgatggttgatccctctcctaagtccatcacacagatatgccctagcctgccttggggctcaaatgtcgagcatagttcatctctttcactttggtgccatccaatctacataggngcacaccataatgatgcaccaaattcatcacacacctacc

SEQ ID NO: 15490 - DNA, 283 bp, Zea mays
  unsure (1)..(283): unsure at all n locations
gcattcttgagcctctcagtcatccgaagatagcaatttgtgccactgggagttatgaagctagtcttcggctcatcttccttcttcatccagatttgatgatagcctgaataacaatccaatagactcatgaactctgaagaagctgctgcatctacaagagagtctattcttgtgagagcacctanagggggggggtgaataggtgatcctgttaaacttaaacttatagccacaaaaacttggtaagtgttagcacagntattgccaagtggctagagag

SEQ ID NO: 15491 - DNA, 351 bp, Zea mays
cactgagctgcagcttctgggaactactggctgggcctcatcttgcattttttgaatgaccattcttcagcgttcgcgatctctcgaagccggaccaacaatttcctttcttgccctgtggggaaactccaatcctgattctgatcagttctcctctgaggtgggctaaaccttctctttggctctagctctacagcgctctgatagtgcaatggtgaggcagccctacccgtgcttcttcgggattggaaatcatgttgccaacgggcgaagattcacgaggggcccatgtggtctgtctaatgcttctcagataacaccaatgtaagataaacctgtcttaagatattc

SEQ ID NO: 15492 - DNA, 457 bp, Zea mays
  unsure (1)..(457): unsure at all n locations
tataagttctggatgagaatcccagaagaccaatcaggaaagaatcctgtgggangtcataagagaaaggtttgcgtgatggcatcgatgcttcttcaataagctagctgccaagcgaaagatagaagcctcgggatgatctttgagtagccagaatcagcgtttgcaattggcaaccggatgctcctcataggccagattcttgtgaagttccatctcctcgaagagtatgcataatgaagatgtgtagctgaagtaaagatatacccataacccatctaggaacaatcccgaggacgagattcattttaagtggggtagatctgtagcgccctgaanattcaaatcttgaaaatntctcanactcgctctaaattcanaatggaatttaaatntcatttcanaatgagtggttgcgagtngatctcaacanataaaatatagtggtctatattcc

SEQ ID NO: 15493 - DNA, 112 bp, Zea mays
  unsure (1)..(112): unsure at all n locations
acctgcggctgcaagctgatagcacgaaaatattttagcgtaagcacttgtatatatacacaaagcaccactgagcgacngggcccacagtgcagaatggttcgctattcta

SEQ ID NO: 15494 - DNA, 147 bp, Zea mays
  unsure (1)..(147): unsure at all n locations
ctagagttntcgtaagacgntctaattttgtttntatttttccaatgcttgaatttttctctctaagtctcgaagacttaagaagctaattggaaccatgaatattaatcccgagaataaatccacaccatataggatccctggaca

SEQ ID NO: 15495 - DNA, 146 bp, Zea mays
  unsure (1)..(146): unsure at all n locations
tgcagctttaacanggtatgatatgaccactactttatttttcatgattaatgtacaacttgtatgatacattcttcacattacagagagatccaaaactgtatagaccaaccgatctatcccttggatgattactcattgtaaaa

SEQ ID NO: 15496 - DNA, 292 bp, Zea mays
  unsure (1)..(292): unsure at all n locations
tagaagtcctaattcacccccctcttaggcgtcaccgtttcctacaagtggtatcagagcgaggtttggctcatttgaaacattntagcttcatcgctaatcgagctgacgctttttagaggaagggaatggatacccataggccaccacacttcgacagcactaacttcccatataatagtgctagaatggcttgtacctagaggtcgttgatctaggtgttnggagagtcactcatggtgggatgaaaccaccaaanaatcccgagaaactcaccacgagtgaagaaaag

SEQ ID NO: 15497 - DNA, 382 bp, Zea mays
gtcactgagcctcagctgtgtcctatgaggactactacatttttggtgcctactgccgtttcagcgggaactgcgtgccaatgattaagatcgcaaccgaaccctgcgcgccggccgtgccattctatgttgcagtatctcaattttgcatcgtcgttatatactattagcgagaccagcgttaaggcacatactgcctaaaaataccccgcctgcatcatgagactgtgatcataacatttgcactggaccatacaacggatgagactgatcgcacgatcgacttgtgctggataattgcatgggaacgggcaaaattgcttggcagtaataacgggactacaggatgtgacaaactattataccttagaaagcagttacg

SEQ ID NO: 15498 - DNA, 492 bp, Zea mays
  unsure (1)..(492): unsure at all n locations
gcttgataatggagatgacagggagcatncganggatgctataggtgaatcaccacttgcgcacggagaatgcccatggctttctatgtgagtacttgatcgggtgcctggatggctagaaacgagccgagctgagctcggctcggctcggtgggtgatcgagctcaactcgtacattcttgcgtgtcgggagtgagagcacctagaggngggggggtgaataggtgatcctgtgaaattcaacactaaatagccaacacttggttatgaaatgttagtgcaattaaaaaccaagtgctaaagtgtgaactttgaanaagaccantcacaaagaagatggcacaagacacagtgatntatcccatggttcggtcaatgcctactccacgttgtggtgacctccttcggtcaaggatggcactcaatccctctcaagtgatccaatgatcaactntgagtaccacgattatcttcctttgtagaatttcccgt

SEQ ID NO: 15499 - DNA, 377 bp, Zea mays
  unsure (1)..(377): unsure at all n locations
cagctggtggagggtcttcatccccacatgtgctaagcggcgatgccacagtcagcccatgctagtcttagctattaagcatgcatctagaccggcctcttctttggcaaaatcaactaagtaaagtttgtcgtctaatacacccttaaaagctagtgaaccatcacttcttctaaagacagacacatctacatttgtaaatagacagttataccccatgttgcataattgactaacagatagtaaattatatcccagagactcaactaanaacacattagaaaatgagtgctcatttganatggaattntatctaaccctttaccttgcttgattccatcaccgaatacaatgaatctgggaaatctattttgacg

SEQ ID NO: 15500 - DNA, 215 bp, Zea mays
actatactatactatactatactatactatactatactatactatactatactatactatactatactatactatactatactatactatactatactatactatactatactatactatactatacttgtcggcgtttccaccccgggggtgcactgaccgacgagaaaatggcgtgcgtggccagccgagatgtgcggcgcgagacgggacac

SEQ ID NO: 15501 - DNA, 292 bp, Zea mays
  unsure (1)..(292): unsure at all n locations
agctngcacacatangctctntgaatacctttgatcatatctctcttatatgctatgactaatgagttntcaagtttatttcaaaccaagtcataggtatattgaaagggaattggagtcttcggcgaagacaaaggcttccactccgtaactcatacttcgccaacactccgagcaactctctcttctttggnggagaaatgagcatcanagaaaagaacttcatccctgnggaagagagtaaaagctcaaaagcttcgtctttggtataatcttaactcattnacttatg

SEQ ID NO: 15502 - DNA, 303 bp, Zea mays
  unsure (1)..(303): unsure at all n locations
tgaagctgcagcttttacatgtatacggtatcttgaaaagtgagcatacactctcctttatgngttgtaagctcatctntagcctctcattttcttctttgagctcttgatatatatcatcttttgtcctgcacattctagctcacaggaaggtttgcttgttgacgaacaacaagcattatcacatggtgatatagtatcaatatgaatacatgtgcatgagtgaaggtgttgcgatttaagattttatcacaacctatgagtaacattaatatgatatgatcatccataagaatttcatga

SEQ ID NO: 15503 - DNA, 287 bp, Zea mays
  unsure (1)..(287): unsure at all n locations
ttcatctatattatggatnngctttgagtctgtcctattttcttctgtccttctagcagcttcctgacttccatgaatagcaatgggcccttggtccgaaggtatcttcatgcaaagataagctggatgaagaattgcttcgaaggcattgagagtaccacgaccaatgattgcattgtaagggtattccatgtcaacaatatcaaatacaacttgttcagtccttgtgtgtgtaatgaatccgaaggtactggcatgtgattttccaagtgcacgatctgctttct

SEQ ID NO: 15504 - DNA, 233 bp, Zea mays
ctgcagcagtaacaggggagagcgcatacacagaatgtatgccacgtcagaccctggactactgcatatggactcttggacccgcgctattaacatagggaagaagatgttagtatgtgagatttccgttactggggtctttgagatagttgaacaagacctaacctctagaagtaaaattactcaggaaaaaaacaacgtcagtaacttaggagatctaagagaaacattct

SEQ ID NO: 15505 - DNA, 111 bp, Zea mays
  unsure (1)..(111): unsure at all n locations
atgttcaatgtctagtgatagtgacaggggcgacgacaagaggnggaagaaggagaagaagagatactataagaagaagggcggcgatgcccacgtgtgtcgagaatggga

SEQ ID NO: 15506 - DNA, 403 bp, Zea mays
  unsure (1)..(403): unsure at all n locations
gcttctanagggagaacacgtgatangtctgactaacgttcaattctgaaatgatagaccttgtgcagcttgtcaagcaggtaaacaagtgggaggagcgcatcacagcaagaatgtgatgaccacttcaagacccctggagctgctgcatatggacctcttcgacccgtcgctattgacatangagggaagatggctggtattgaatattttccgttactgggtctttgagaagttaacccagacctagcctctagggtaaagatactaggaaaaagacaccgtcagtcaactatggggtcttgaagaggaaaccagtttctctcccccaaaggggtaagaacgccttcctgagcaatgaataaccatgttgcgacgacgtgcctacagtcttcttaaagtt

SEQ ID NO: 15507 - DNA, 266 bp, Zea mays
  unsure (1)..(266): unsure at all n locations
agcttctanagggagagcacattntaggattaaccaatgttcattttgagttagacagggttngtagcgcatgccangcaggaaagcnaagtggagcccatcatccacacaagaacatcatgacgaccgataggccgcttgagctactccacatggatctattcggcccgattgcttacataagcatcggcgggagtaagtattgtcttgtaatagtggatgattattctcgcttcacttgggtgttctttttacaggaaaaatct

SEQ ID NO: 15508 - DNA, 172 bp, Zea mays
  unsure (1)..(172): unsure at all n locations
agattattggaactcatacatactgatgtgtgcggaccaatgagtacgacagctatgggaggattccaatacttcataaccttcactgatgagtttagtagatatgggtatgtctacttaatgaaacacaagtctgaatccttataanagttcaaagagtttcagaatgaag

SEQ ID NO: 15509 - DNA, 246 bp, Zea mays
  unsure (1)..(246): unsure at all n locations
tcatcttctcttctctttgcccaaagaagntctaatacctctgtgcaagcaccatttcacctcggcgtaatgctttgccttctttctttccaagtggtctcttttctacatcattctcttggatgaaagatctagagggctttatcattgcatcgtgagggtagacaatagtacaggaactgatttttatggcctctgttcttgtggtggttttaatctcgtatttgacattgttgctaccatggg

SEQ ID NO: 15510 - DNA, 294 bp, Zea mays
cttaagcgacgagctgagctgtatatatagagccacaaagtaccctggacaaacctcctattttagtgtggaagggccattaccaacttgtatttgctaactacctttatttgacctcaatctaaacagcttatgaccaaggaagcactgtattttacaaattggaaaagtactcctgtgagtcaacctcctaaatctaatgaataaaagggaatgataggaatatgctctaaccttgaatgtcctgaaattaagaatacatccttctatctataaactaactaaggaaacaaa

SEQ ID NO: 15511 - DNA, 139 bp, Zea mays
  unsure (1)..(139): unsure at all n locations
gagaaagacatgtattgtagcgcatgccacgcacgaaagcaagntggtgctcatcatccacataaaaacataatgacgaccgacaggccactggagcttctacacatggatctattcgccccgatcgcttacataagca

SEQ ID NO: 15512 - DNA, 245 bp, Zea mays
  unsure (1)..(245): unsure at all n locations
ctgcaagcttcctgcacgccgagatacacagatctctgatgacaggacacactgtgtattgtccggtagcaaatatatatagtcccaagttttatattctctatgtgcctatgcccacatgtcgngctcagagcctctatgcatgcgcncttcagctatataaggggaggcatgcgtcgntacaagacagatacaagctcagactcgctagctcatacaagccctcaagcaatatatctcacaat

SEQ ID NO: 15513 - DNA, 191 bp, Zea mays
  unsure (1)..(191): unsure at all n locations
actangggttatgaagctgngttttggttcatcctccttcttcatccagaattgatgatagcctanatagcaatctagcaaactcataagttctgatgaggctgctgcatcgaccagagaatctatccttggcaatgggaactcatccttcggacaggccttattgagatcagtaaaatcgatgcacattc

SEQ ID NO: 15514 - DNA, 176 bp, Zea mays
ctttgcaaggcgtatttttcattcaccaagctctagttttgtattcgcaaacatctctggggacccagaaacaactcgagtcttttagctaaaatctgtcatattttaaatgacctttctcaaatttcgattcttctttagccgggcggttttcgactgacactttccgcttcaac

SEQ ID NO: 15515 - DNA, 214 bp, Zea mays
  unsure (1)..(214): unsure at all n locations
ctcatgtngatttggtcctaatgtatgaaactatntcaatggagcaagataactctttacattgtatcgctcaataggaaataggaagccttacttaaggaccaagtagaaaagctaagatctgaaaatctagcttctcaagaanaatatgatatgcttctatgttctcatgaaaatcttatggatgatcatatcatattaaatattgctcatg

SEQ ID NO: 15516 - DNA, 147 bp, Zea mays
atcttacagcacctgaggctgcagcttacacacacagtggagcagggtggtacgctccagcggcctgaaccactctaaatcctcgtgttcactcgtgttcatcgatctcccgatagacaggcaaaacgcttaggcccctcctcatct

SEQ ID NO: 15517 - DNA, 225 bp, Zea mays
ctgcagcttggaagatcttatccccacatgtgctaagcggcgatgccacagtcattctctgctagtcttaacaattaagcatgcatctagaccggcctcttcttttgcaaaatcaactaagtaaagcttgccgtctagaatacccttaaaagctagtgaaccatcacatcttctaaagacagacacatgtacatttgtaacaaacagttatatcccatattgcat

SEQ ID NO: 15518 - DNA, 161 bp, Zea mays
ctatggcaacatgtaatttctaatatcctgaatattctgtggtgtgcgctcaaagagggttatggtgttgtgtgcgagtggaggctggtaacaatatagcttagaaagcacccttttgtgtatgtagcgagggatcacacaaatgatcctgtactactcat

SEQ ID NO: 15519 - DNA, 248 bp, Zea mays
  unsure (1)..(248): unsure at all n locations
ctgcagcttgatccctactacagcacnccgtgcaagatatatagcctattctccctgctaaagaggcttttagccaacagataactggttatctgctaatcattcggcaggcaccacataaattactatcggtgaggtccccggtccaacaccgcaggttggattggggccatgctaatctatactgaaaactanaaatcatgctaataatgacgataaaatatttacangggaaccgtttttgttta

SEQ ID NO: 15520 - DNA, 182 bp, Zea mays
  unsure (1)..(182): unsure at all n locations
gcgatccttaagtcacctgcngcatgcagctgacatgaggaatggcgctcgtcataagagcttccgtcanattctaaacataggagggggaaagnactacagtcccgctccaagaagggttgctacaaatgtggtaaagcccgtcattntattgctaaatgtcctatgtctagtgacagtga

SEQ ID NO: 15521 - DNA, 311 bp, Zea mays
  unsure (1)..(311): unsure at all n locations
tgaaaatataaatcatggctgggccattataacattaaagttactaataagaacaacaagatatggngcttggcaaacaattatataaacttaacaactttcaaggggttaataggaattgaaataaatttaaatcaacctgaccgagacagctgtcactgatctactcaatctatgaccatgcaaactgctatactttgctggcaagatgatcgacttgctgaactaacaaacttctggcgataacacaatctcttttttatcacacactgacccccaaaaagacgagaaattatgaatgctatcaatgg

SEQ ID NO: 15522 - DNA, 147 bp, Zea mays
  unsure (1)..(147): unsure at all n locations
gtaaatctagttccagattaatatcagatacttctaccaccttgtcacgtgattgacggcatttctttaggtgggatacgtggaatacattatgtatgggcgaaagatgttcangcagcttcactatgtatgccacggatccacact

SEQ ID NO: 15523 - DNA, 177 bp, Zea mays
  unsure (1)..(177): unsure at all n locations
atttatctcatgccgntatggnntgcttcccattgctagcagactattaatgtctatntatgtttcttatcatgatatctatttatactttngtgcttcccccgttatgccattttcaaaggagatgctgtcgaaattttatatacgaatggtagatngtgtagttagtatcattct

SEQ ID NO: 15524 - DNA, 222 bp, Zea mays
  unsure (1)..(222): unsure at all n locations
ctttctgactagcagagaagcttatgttctctctgtatttagctcggcttctgctataagccttcagtgctggattcaacttttctttcnaagcactgatgtctttatttgtttctaagnttcaattaatctcggcttntatctttagacctgtgcatttcaagcttgctcatacatactctgacgcaacacttcgtaggaacttttgtataaaaaaaagta

SEQ ID NO: 15525 - DNA, 117 bp, Zea mays
gacacatctacatttgtgaatagacagttatatcccatattgcatatattgctaacagataacacattatatctcaagagactcttactttaaacacacttatagatagagtgctca

SEQ ID NO: 15526 - DNA, 124 bp, Zea mays
  unsure (1)..(124): unsure at all n locations
tgtgttactcctttatagactgtgggtacttactanttagtagatagtgacatatctcttttgaaaacactttaactatgtttaatatttttacacaactaacttcgaaaaaaatgtataccct

SEQ ID NO: 15527 - DNA, 200 bp, Zea mays
  unsure (1)..(200): unsure at all n locations
gcagcttactgttacatnctcacagcattccaagtggctatacagtctctgtgtatagctctccacaccataatctgccaggaaaaagtacccaacgggatttacactgtaaatcgcaacaggcagtgccattatctgattaactgagatgctcttagggtattcgactagagaagcttactgtaagtgagctccacaac

SEQ ID NO: 15528 - DNA, 282 bp, Zea mays
  unsure (1)..(282): unsure at all n locations
tactttgtcgaagcaacaacatctaccagcacagcaatggcagaccataccggtgacttggcccttngcatgcgtggggctagatatgagtggacctttcaagaaagctcaaggaggatacactcatgtactgtgagcaatcgacaaattcactaaatggatagagttcaaacccattgcttctttaacctcagctaaagccgtgaaattcatacaagacataatattcacggttgaataccgaacagtatcataaccgacttggggccaacttacaagttc

SEQ ID NO: 15529 - DNA, 150 bp, Zea mays
  unsure (1)..(150): unsure at all n locations
tagtgagtaccctaaccatgtctataaactctctaaggcgcttatgggctcaagcaagccccaagagcatggtatgaatgcctaagagattntcttatcgctaatggcttcaaggtcggaaaagccgatcctactctctttactaaaaca

SEQ ID NO: 15530 - DNA, 215 bp, Zea mays
acgcaacggggtgagcttcggatgtggtggcatcatcaagctcgttgatctttctcgagccttcgatcatgcgctcgaaacttacaaaagtcccgataactttctcgcgggtcactttagtatatctaggagtaccacgaattaattgaacttgagtatgggtaaagagaataagtgatcttataataaccttaaccacctcgtgggcatcccac

SEQ ID NO: 15531 - DNA, 297 bp, Zea mays
  unsure (1)..(297): unsure at all n locations
gtatccactcgacncgcgatctctgagtcacctgcggcatgcaagcttctgaacatacatgagttatggtatgagacanaaccctggggcatagatcagtatcacaaccaatttggctgctacagctntggtgctcggtctgngtcaagctgtcccgtgccgacctttcgaaagaggtggcctggcgactggatgtcagaatggttntatgtgaagaatgacttgacaatatgagaggatattaaagatatcattatgtgccctanttggcaacgcttcggccttcggaaatgaatg

SEQ ID NO: 15532 - DNA, 154 bp, Zea mays
cccggcgtgggggagatctgctactgtacgggtgggacccttgctgacacatggaccccctatcatagggacgggaaccccttactgatgggctgcaggtcaccgggctttgcatgtggggacctgggtgcagggtctgtgctgttacgtactc

SEQ ID NO: 15533 - DNA, 256 bp, Zea mays
  unsure (1)..(256): unsure at all n locations
attctggaaacggtgggcgcatgtaatcggatcanatatgaacggatattatnntatttatatttggtttcattttttgaattcagactgggatactgatattatcaagtcgtgtcggataagatttgaatagatatcgatatcttaaatatctatctttaagaatatggatacgtataanaatcgaatacagatcgaatactgagtactcggattagatataaatcggatctcaactcctttagataaatcgaat

SEQ ID NO: 15534 - DNA, 58 bp, Zea mays
atactagaaaagcaaggcacaactagggagttagaagaaccattctcacacaaaaggg

SEQ ID NO: 15535 - DNA, 117 bp, Zea mays
  unsure (1)..(117): unsure at all n locations
atgtcaagcanggaagcaagtngatgttcatcatccacacaagaacttatgacaccgacggccactcgagctactccacatggacctattcggcccgattgttacataagcatcggc

SEQ ID NO: 15536 - DNA, 161 bp, Zea mays
  unsure (1)..(161): unsure at all n locations
gcttggatacaactgacaatcccgtagcctctgcaatactntnctcaaattgtcttcatgcactttctcattctgggaatatatgaggatataatcaatgaacaccactacanattngtgagtccatgaacacgctattcatcaagtacataaagaaagct

SEQ ID NO: 15537 - DNA, 118 bp, Zea mays
aacttcatcgggtgcccattattcctcggctctcaaggttattcctcaacaaggagatagctctgcatatgatgtggccaaagaatggtgtacgtctcatcactgatccagacataat

SEQ ID NO: 15538 - DNA, 188 bp, Zea mays
ttaagaacagaagcacaagcattaaaaaaactggagtgaacaggaaagggagtctataacaaaggaacacataacctgactgtaaatgactttgaccgcgcattgaatgagaaaaatgtataggaactccgtatgggtttgagaagtaacagactacctctaaactaagagtactaggaaaagacaac

SEQ ID NO: 15539 - DNA, 127 bp, Zea mays
tcgaagtagtgcattagtttgcgcgaagccatgatgaccgcgtaggctatcttctctagctctatcatattgcacttggagctggtgagtacctcggagacaaaaatatactgggcattgctgggtc

SEQ ID NO: 15540 - DNA, 277 bp, Zea mays
  unsure (1)..(277): unsure at all n locations
gcttatgaagaatcttcatcccaacatgtgctattcggcggtgccagattcaacccatggtagncttagcaattaagcatgtgtcgagtttagctctatcacaatctaccaagtatagctgaccctctagcacacccttaaatgctattgaatcatcacttcttctaaagacagtgacacctatatcagtaaagagacagntgtagcccattttgcataattgagatacgtgaagcaaattggaatctaatgaatcaacaagaacaacactggaaat

SEQ ID NO: 15541 - DNA, 88 bp, Zea mays
cccgggtggatcttgtgtgtccaatgtgggttgcctggtcttctaagaaaaaagtgaccaccacaactactaaatacgtattttcaca

SEQ ID NO: 15542 - DNA, 234 bp, Zea mays
  unsure (1)..(234): unsure at all n locations
gaagccaatatattcttgcactangtccctagtgctgatgtgctctgcaataattctaaattcagctagagcaatnntgtgtgaccatctggtgtcatgttgcacggtggtctggtttctccgaagatcaactctagcagactctgcactagcttctccttctcttcgtcaactttgacgtagaaccattcagatttccagccagctggccacttgcttcggtagctgatcact

SEQ ID NO: 15543 - DNA, 246 bp, Zea mays
  unsure (1)..(246): unsure at all n locations
ctattcangtgatgtgtgtanaacanatatactatcttggtctgcattttcatcagatgttaacacaataatggcctgtgcttttanacagaacctgaaagggcaattatttgagatcttattgtggaatgagatgaaatcaaagaccactgcatattacatggagcaaggataacaataatttataaatattataccttcctcaagtatgctagaattagaggacccgcactcctacatattaca

SEQ ID NO: 15544 - DNA, 241 bp, Zea mays
  unsure (1)..(241): unsure at all n locations
agctngacattgcttcccttgtgaaaaccaatgccattcttaataccagtgtgtctcccattatagagcatgcttctagcnacattaaactnttcattntcaagttcatgctcattatatttagcagttaatttagctatgtgatcattttgttgttaattatggcaaggtgatcatcaatagcctcaacattaatatctctacatctagtgccaatggaaacatgctcgacaatagatgt

SEQ ID NO: 15545 - DNA, 136 bp, Zea mays
tattagtcttagcaattaagcaagtatcgagttcaactatattgaaatcaactaagtatagctgaccctcgagtactcccttatatgctactgaatcatcacttcttctaaagacagtgacacctatatccgtaaa

SEQ ID NO: 15546 - DNA, 294 bp, Zea mays
  unsure (1)..(294): unsure at all n locations
gcttaactctttgcatggattacttatctagtttatcatagatcaataatgcatgagtgaaattntaagaggttaaactatgtatgaagcanggataaatgcacaggacatgctttctctttcttttatacaagatatgtaaagaatgtataagaggaagattntaggtacatatgtcaataataggaagtggatttaccctttntgtacctttgcatagagatgctctcttcattgtgctttgtccttagtcttagatgcttaagacctataatgataatatgtggaaatact

SEQ ID NO: 15547 - DNA, 300 bp, Zea mays
  unsure (1)..(300): unsure at all n locations
gctttgatcttcctactactctngctggctcggtcactntagaggtcagtgatccgagtggtgatgatctgctgcacgctcgtgaagctaaagcccacttgtgtcgcttggcatgaattaatctctctaggctcagctgtctaatatgctcaccaggctcgcatttgaggccctcacacctccgctntgggatttctttgtcctttctaccttcngtgagtgatcctaccctgtttatcttcgcaatagataatcctttgtaattcttgattggcagaatgtctgagctctatgtcactc

SEQ ID NO: 15548 - DNA, 392 bp, Zea mays
acgacttacatatctgactatcctatatgtatatgcgtccagcatctattctagtagccatgaaacgacaggaaaatatttagattgaacaaacaggctatatataatttgaaacgaccatataaaaactactccctctatttttgtataaaacttgctagcaggagaatatatgtttcatcaactggaaacaggacgagcagatgcataccactatatgcatgtataaaatcgaagcaaaaagtaagcaaatcccatatccaaattaaccgatcagaggcatcacctttaggcaaccaccaagcccctggtgggcacacgacagcacaatcctgtacggatctataaaaaatccacaaatcctacaaccgaacgagtctctcagacctata

SEQ ID NO: 15549 - DNA, 507 bp, Zea mays
  unsure (1)..(507): unsure at all n locations
ggatcttaagcacctgagctgcagcttggacaagtcaccaaaatcaatgacattctttttcttgacataaaaaaggtcaaatatttgaggccagtttcatgtaaatttgagtgatgacaatagttcttaaagcacaatataatagtgatgaaattcaaatgagtatagntgtaagcagatgcatacccgattagtgaaaatattttatttcctatgattcttaaataatgctaaccggaattcttcatgtgcaatataaaattttatgtccacaaaattttagttctcagtggcagctccacatggtagagcttcagctcattntaaagttgagccagagctcaagaccaagaatgaaaatntgacttggatatacatctaanacaatttggttggagaacttggattaggttgaaataaaaaatactcaatgaactgaattggtaaccatgtgtggtggccagtgaatcaactggatcaattagaattgccaaaacacatacatgt

SEQ ID NO: 15550 - DNA, 432 bp, Zea mays
  unsure (1)..(432): unsure at all n locations
gcttcttcatgcgattctcacttatatgacctcttctacagtgccacatgtaggtaggacttaaatcattaggccgaggccttttatcactaatattacagataggtgcatcatcaagatttaaaatgaataacccattcataatggatgcaaaagccacaaacatgccattcttagagatcacacaaccattgttttcactcgcaaatgaataaccatccttcatcaaacatgaaggagacataatgtttcgactcatactatgaactagataacaattatttaactccaaaataaatcctgatgggaggtggagttgcatcgtcccgacggtcaacgcagcaactcttgcattattgcctacccggaaatcaacttctnctcttttcacgcttctacttctttatcattcctgcatcgaatngcaaatat

SEQ ID NO: 15551 - DNA, 401 bp, Zea mays
  unsure (1)..(401): unsure at all n locations
ttaagtcacctgcggcatgcagctgagagcaatgtgtanggagtcaacatggaaaggggtttaacaaacaactataattagttaatacattcactgcattatgtaccttgttgaatggacgacacccacaaaatagtacaacctctattttttatttgacgctggctaatgcaattntacactaaaaacggagggagtatgtttttatacagagttggccagatggctattggtgtgattattcatcattattctatataattatagggatgtaagaatgcatgagaaaaacacaactatgcaattttctattatgaacagttgtgacaataagaaacaaatataagaagtgatgaatatatatgtgaaaaaattatatgtacacatattttcaccaaaac

SEQ ID NO: 15552 - DNA, 314 bp, Zea mays
  unsure (1)..(314): unsure at all n locations
agcttctccgccgacaagcccgtcagcgctacccacggaccgacctctggctctntggctntaatgtctggntcacgtcccttgagtggggacgcgaacgagagccttctagctgcagcgtccgtcctgngaccatcgctgctgctgcagaggtcgctggcgagtcacccggagcttgtcgccctgcaggctctccggtgtggaggttgttcatacccgcgcaggcggaaccggagttccgtttgtaatggcaccttgagtgccggtgtcttgttcattgcggctgtcggggcctgaacatgtatgtatttttg

SEQ ID NO: 15553 - DNA, 472 bp, Zea mays
  unsure (1)..(472): unsure at all n locations
agctntaattgtgtcaaagttccgtgttgtatttacccaggttcaactnttccatttcttgacatatggtgatgtcaggggtccttattgtaagacaatgacaggaagctttgtgacttaatgcatctgccaccacattggcttntcctaggtgatagtggatttccaaatcataatctttaattagctcaagccatcttcattgtctcatattcagttctgacagggtaaagatatatttcagactttatgatctgtatataaatgacaagtatttcccaacagataatgacgccaaattgtgagggcatgaacaactgcagctaattccaaatcatgagttggatagtgttcctcatggccggcgcagtgtcttgaagcataagctatgactcgaccctctggcattaggacacaactgagtccactgtatgatgcgtcgcaatacacatcaaaaggctgttcgatatct

SEQ ID NO: 15554 - DNA, 397 bp, Zea mays
agcttaccgcattgaagcatgatcgctttcccttggtcttagtcttgcttgggtgtcccttgcgaccctttagtgccgtcttgaatcttttgatgatgagggccatctcttcatcattaagaccggtcgcctcaatttgcgccaccttgctgggtagcgcctccttgctccttgttgccttgagagcaatgggttgaggctcatggattgggccattcaacgcgtcgtccacgtacctcgcctccttgatcatcattcgcccgcttacgaattttccaagaatttcttcgggcgacatcttgatgtacctaggattttcacgaatattgttcaccaagtgaggatcaagaacggtaaatgaccttagcattatgcggacgacgtcgtgatccgttca

SEQ ID NO: 15555 - DNA, 476 bp, Zea mays
agcttacatagacgaacagcgagaacttatgctatatatcataatggttatgcacaacgattgtaggagactagtacgtgcatttgataaatctagtatagcaaattttccttcacacgaggttgaattatgagataatacacgtaatacatcggttaaaggttgtcacgaccagtcacaacccccttatgggatgccgatggacacgtaccctgagcaaacgcaaatcggcagtaaaccagccgatctacacatgttcggaccgttcgctcgcgagcgcagaccgtctgggtcagccacacccgagccaccacatagggcaccgaatttaaactatccagtcggacggtccgcatacaacgacggacgatccgcatataatcacggacgttctgggtacgtatccggacagtccgcgcatgagtcttttaagggggattattacctgaattctcgcccgtccagcaacacttcca

SEQ ID NO: 15556 - DNA, 285 bp, Zea mays
  unsure (1)..(285): unsure at all n locations
cacatagcggagtatggtattatgctccggtggcccgaaccactctaaatcctcgtgtgtacatgtgctcggagatcgcttancaagataggcaagacgcttaagcccctttctcatcttatgatttagggcgggtgcatttcgccacccggccggagaattccctctccgacatttggcgcgccaggtaaggggctaagcattaagttttttgcttgttccacactcagcatgatggcgcanatcgtggagcaccgcaccgagacttcaacggatttcctaatg

SEQ ID NO: 15557 - DNA, 466 bp, Zea mays
  unsure (1)..(466): unsure at all n locations
agcttgacaacaccatttgagatcttaaataatatttctgagatcaagtatgtttaattcattcctcaacatgcaaaagcgggttttatcaagtggcttagtgagaatattcgctaattgatcttccgacctcactccttctaaaataatgtctcctttagcaacatgatctctaaggaagtgatgacggatatcaatgtgcttggtgcgagagtgttgtacaagattattagcaattttaatagcactctcattgtcacacaacaaaggcaccttttctagaactacaccatagtctagaagagtttgcttcatatataaaatttttgtacaacaagcacccgcggcaatgtattccgcttcggcagttgacaaggcaacactattttgctttttggatgttcatgatactagagatctnccaagncaaatggcacccccagaagtactttttctatcaattttg

SEQ ID NO: 15558 - DNA, 385 bp, Zea mays
atcaccattcaaccccctcttaatcatgtctatacaaaacttcaacctagtatttttgtttccttcagtgagaaagggcttgatgctactagaatgatgcctaagtaaaccttttttcaaataccttagcaccttccatttactcatgtttagcttggcacatacatcctctaaggtcattctatcctttaaaggaatgttaagcaaaacttccaaatcaataggaattgctttacgaccaactcttcccttttttagactagcaaccacaatcggcatcgagcttgcaagttgtattttacctctgttccatacgcgctgcactgaccgaatgtggagaatcaaatggtcggcaacaatttgggtatctttcttgtggagtctc

SEQ ID NO: 15559 - DNA, 290 bp, Zea mays
cacttgatcagaacttcccacaccccccgattcagccttgcacggaggactttttctagtgtagggatgactctgccgttgaggagctcgggcagcggtataacttgggttggagcctcctctatgaatttcttgagtagagaaacgtggaacacatcatgtattctggcactgggaggaagttgcagcttgtaggagacagtgcccaccctcgatagcacttgatatggtccaaagaactttggcccaagcttgtggggtgtagcagaagtgacaccaactgctatgcg

SEQ ID NO: 15560 - DNA, 426 bp, Zea mays
  unsure (1)..(426): unsure at all n locations
ttaagtcacctgcngcatgcaagcttcggctcattgctcctcggcttcgtcattctgtacatatcaaagcgttataaggtagattcaaggttcaaggaaaaggtaagcacaaggtatgagtttattaccggtttaaggtgacttcgagcttcgtcaccagccaagtttcgcctgccctatgcccagatttgggtaatgaatctgtttccgatgcttcgggccaggtcagggatgtcatctaagtctcctggtgacaggctgaagtttggtctgtttacaatatttccatgcgtgcaaccagccttcatgaaagcaatagctgtgcctcgagaagctaccagagcacaaaagtcaccatgtccagctataacttcgtagagggcatcaacttcaccttcaatatgatcaaatgtgcccgacaggtct

SEQ ID NO: 15561 - DNA, 447 bp, Zea mays
  unsure (1)..(447): unsure at all n locations
gcttctcgaattcaaaaatacaaatactaaacgggtgtcaaaatatctgaggatctccctaatggatccatggcggaaaactaagaataaaaaacaaaactagagatatggttgggtgggagtagccctcttcttatttatagaggaggatttcacattgcctaactacccctagatatttagagcaaaccacttagctagaggcataatagtccaactcttaatttaatgatctgatggacatgcttccttcgcggatttgcttcacttgatgcaacctatgtgatggttttcacgtgccacctcggattccctatagaaccagctatccgattttgatgccaaatcgacaaaattgtcgctgtattggtttaaggatcaaccaccanatttgtgtatgtagccaactccatacatngtccctacatgatgaacatgtgttccatt

SEQ ID NO: 15562 - DNA, 524 bp, Zea mays
  unsure (1)..(524): unsure at all n locations
cggatcttaagtcacctgaggctgcaagcttgtagggtcttcctcatcctgattcttctctccattgctctgcctttgctaggagttgggtgatagattgcttgtacatgaaaattttacctgattatccttacgcaatcttgatatgcatttttggtagctagctttgcaaacactttgaaattgaatttttttaggacatgcattgcaagacatgatgtaacagatgtatgatatttctcactacaatgcactgctttttattgttgaacctatagcggttcaatcacatactcctgaggagaagcgtgtgttccatgatgctgaaactatattcaagagggcaataatcgatgtgcttggnggcaccattgntggtgcatacatatggttgtctactagaaaggaattgtgcagtgcatttgaggcaaatatggagtttctcatgctaacagtgaattgtatgtcatggagcagatacatgactatagaatggttgatgatcattctatagaacaagctca

SEQ ID NO: 15563 - DNA, 400 bp, Zea mays
  unsure (1)..(400): unsure at all n locations
agcttcttattngccaccctacacgatctagtttatgtataaaaaggtatgggttaggcattccatcaaacgggaagaggacagatgatcttgagtcagggttggacaactacaatcatcaaaaggtgaaatcaatacaggttcagagcacaatcctaccttgcagcagcatgagcagcatgacatgctggagccagtgataaatgatcatgtggagagagcagtaggcattataaatctcacgcccggtgcccacgtctggaaccacccgcaatatgaaccgcccacgatcgtcgtgcgcctgcgaagcgatgttgtatctaccatggtcaatttagatgacgacaaataagaaaagaaactaaaagtggtacgccttaccacttattcacaaactcat

SEQ ID NO: 15564 - DNA, 343 bp, Zea mays
  unsure (1)..(343): unsure at all n locations
agctngagtgggtttcttatgcctttgaaagtttacctggaacacttattaaactgatgaccccccaccacaaaatgactctttcgcgcagatgagaaaacacactacgccgcaagggattctatcacggccttgaagaagtacatcatagagcagaacctcgcaaccgaatccgagctgaagagcatcgagaagaagatcgacgatgtcgttgaggaggctgtcgagtttgctgacgcgagcccgcatccgccgcgcagccagctgttggagaacgtgtttgccgaccccaaaggctttggtatcggccccgatggtaagtacaggtgcgaggatcccaagt

SEQ ID NO: 15565 - DNA, 417 bp, Zea mays
  unsure (1)..(417): unsure at all n locations
agcttgtgaaggttcttcatccncacatgtgctaaactgcgatgccacagccagcccatgcaagtcttagcaattaagcatgcatctagaccgacctcctcttttgcaaaatcaactaaataaagtttgtcgtctagtacacccttaaaggctagtgaaccatcacaccttctaaagacagacatatctacatttgtgaataaacaattatatcccattttacaaagttgactaacggataacagattatatccaagcgactcaactaaaaacacattagaaatagagtgctcggatgaaatagcaatcttccttaacccttttaccttgccttggttcccatcaccgaatatgattgaatcttgggaatccttgttcttgacgtaggaggtgaacatcttcttctcccccgtcatg

SEQ ID NO: 15566 - DNA, 374 bp, Zea mays
  unsure (1)..(374): unsure at all n locations
agctngtcgtctagtatacccttaaaagctagtgaaccatcacatcttctaaagacagacacatctacatttgtaaacaaacagttatatcccatattgcataattgactaacagatagcaaattatatccaagactctccactagaaacacattagagatagaatgctcattggagattgcaattttacctagcccttttaccttgccttgattcccatcaccgaatattattgaatcttgggaatctttgtttttgacgtaggaggtgaacatcttcttctcccccgtcatatggtttgtgcatccgctgtcaataatccagcttgaacccccggatgcataaacctgcaaggcaaatttaggcttgggtct

SEQ ID NO: 15567 - DNA, 504 bp, Zea mays
  unsure (1)..(504): unsure at all n locations
agctntggtgagatgttcgtggagcattctttcgtttcatgaagcaggtcaagcatcggattaaagtagcgggggagatttgagaaatcgatttgcagaacaggacggaataggcattctagagaatagccccgcttttcttatgcatatgcatgtgccagactttctcttttaagaaaaaccctntttctctttcttttccttcctccgaacaagtcatcttcctcatccgaatgagaatttactgattgccaaaccacctaattatctctatgaaggacgcatgctcacacataatgggaattgcatatccttgggttttttggagaagagtcgcaactcgaaagagccaagaaggggagagagaggatgcgctaaaataaggtagaccggacgggagagagaagcgccatactcgcattagagaatcaagtcaggagagggaagtagacgacaatcatgaaatcgatatgcgggagaatacacaaaagataggcaatatac

SEQ ID NO: 15568 - DNA, 360 bp, Zea mays
  unsure (1)..(360): unsure at all n locations
agctngagcccgtgtggaggagcttatcatggtcattgataactngctatagaanttggattcacccnnctaggtacaagttagggttttctagggtttcttttatggttntgagcactctagggtttttgtgccactcaaatccatcaatcttgatttcttatgaatatttccaatgacttttgaggtattactcattttggtttactattacacacatgccctaatcctagggttgagtatcctaccctaggattaagaatacttcaaagcacctcatcatatttgttttgaaattttacctagtgaatgcattctangtgtaacaaacaacatgaaatgccaatgcatatgatgtca

SEQ ID NO: 15569 - DNA, 337 bp, Zea mays
atgtgctaagcggcgatgccacagccagcccatgctagtcttagcaattaagcatgcatctagaccggcctcctcttttgcaaaatcaactaaataaagtttgccgtctagtacacccttaaaagctagtgaaccatcacatcttctaaagacagacacatctacatttgtaaataaacaattatatcccatattacataattgactaacagataacaaattatatccaagcgactcaactaaaaacacattagatatagagtgctcggatgaaatagcaattttacctaaccctcttaccttgccttggttcccatcaccgaatattattgaatct

SEQ ID NO: 15570 - DNA, 340 bp, Zea mays
gcttacccatgatgagacatgtgaccagttaaatgtcctcgatcagcaagcctacatcgagacggtccttaatcaactcagacggagacactacaccgagactcccttctcgtgcaagtcaaccgcccggtctcagctttatcattcaaaacccaaagtttggtaccttgcagaggtacatcttttccgatgttgaacccatcaaggccttgatggatccaccatcacaagtttttctttttaaaaacattcccacccactgaagcatcacttttgttttaaaacaaaacatttttgtttgctaaagcaaggctaagcatcataaaattcttttcaaaaa

SEQ ID NO: 15571 - DNA, 354 bp, Zea mays
  unsure (1)..(354): unsure at all n locations
tgaggatgcagcttgccacagtgtgacaaccgtcatctcgtgtcttcttcttgntgccgacggcaccggcttgggcgcctccacggccaccaccctcagcttgtcctcgcgcctcgggctgagcgcctccgcgcggcttgtcgcgtttgtggccccgtgtcgaggacccccccttcttcttgtcaccttggcagggcctccactgctcccgagtgagatgtagcttcccgccgatggtgataggcccagagagggcctatggttcatcttcgtcgacgaccttgagacgaccaatcgcttcttcgatcgtcatcgtggagacggttagcagagactcgattgagcgagcgatct

SEQ ID NO: 15572 - DNA, 434 bp, Zea mays
  unsure (1)..(434): unsure at all n locations
gtctaccatctagagtttatggtgctactatgtgtagaacttcctgaggtgctcgacattccatccctactagagttaatagatatgacccaggcccagttacttctgcgatcatgaagggcccttcccatggtggtgatagtttgtgtcgtccttctcctgnatgtatgcgatgaagcaccaggtctcctactatgaaagtccggtgtcgtacagccgtatcatggtagcgcctcagggtttgctagtatctgaccgactgaatgacaacatttagacattcctcctctagcacatcgatttcctcaagccgggttgcttctgtctctgcattggttttaaaggttaatctangtgctccgaanaccaagtctgctgcagcactgcctctgatccgtataccataaagaaaggagtattcccatgcaaagctc

SEQ ID NO: 15573 - DNA, 452 bp, Zea mays
  unsure (1)..(452): unsure at all n locations
agcttccgcaaccgattggttctgagcgcctgtgcgttggcttcggcttcngccttcagacaacctgcctgcctactaccagtatacatggctccggtcattgcaaccccggcccgcccaacctgcctgactcccatcgaagcttggacgccaagcattgccgccgcgtcccctgtcaccggctcaccgcgcttgcctcccagttccacgatcagtgggcgtggataccaagtacatatattatgattaaacgctggacattactttcttcgcctgcatgtttgctgaacgaagggcgtttcgtttctagagaaagactatcgatgatgaaccttcgttactagtacatattactagtatataggagtatattacctcaacaacaaacacacgtcgaggtaatgacgcctctcttcatcatcactaactggagcaataattggagcaccaca

SEQ ID NO: 15574 - DNA, 430 bp, Zea mays
  unsure (1)..(430): unsure at all n locations
gctcatatgcgataagaagagtatcatgatcaattntaattttgtataatcctaatttatcttgacaagcctatcattagctccctatttgcttcacttaaattatcaattttttctttaacatctttaagggagatctttaactcatttctgcactgtatactgtactgcttgcagagtgaacgttgaatatgaatatgagtatgcgtaaactgctagagatagccttacatgtgtctagttcttatgattggggtatacctttggacatgttcagtgccttctaaataattgcactcaacatgtaagactcacacaagtcgcatagatacttgtagaacttaaaaccattattaagtgttacgaatttttattttaataatgataaaatcactttggaagttctctctatgtaactggcgtatgagta

SEQ ID NO: 15575 - DNA, 396 bp, Zea mays
  unsure (1)..(396): unsure at all n locations
gtcacctgcggcatgcagcttgtgaggttcttcatccccacatgtgcttatcggcgatgccacagccagcccatgctagtcttagctattaagcatgcatctagaccggcctcttctttcgcaaaatcaactaaataaagtttgccgtctaatacacccttaaaagctagtgaaccatcacttcttctaaagacagacacatctacagttgtaaatagacagntataccccatgttgcatagttgactaacagatagcanattataaccaagagactctactataaacacattagagatagagtgctcattagaaatgggaattttgcctacccttttaccttgccttgattcccatcacccgatataattgaatcttgggatgcttattttgacg

SEQ ID NO: 15576 - DNA, 286 bp, Zea mays
  unsure (1)..(286): unsure at all n locations
agcttatcgatgacttcatcgataatggagtccgccaggcttataatttccagtgcttccttcatttctggatcagctaggggatcgtacggcttcggaggcggngatagttcagctgaagtagaaaaacatgttagttcgaagccacaaagcaagtaccaaagctaaataatcaagaaacagtacctatacgcctttcgcgttctgtagcttcttcagcttgctttgcttctaccgggcatcgtgggattctntttcactcttttntataatctcatgggccagc

SEQ ID NO: 15577 - DNA, 474 bp, Zea mays
  unsure (1)..(474): unsure at all n locations
ggctgcagctatgaaattttcatccacattgtctttctgcggtgccagagccaacccatgttagtcttagcaattaagcaagtgtcgagttcagctctatcaaaatctaccaggtatagctgaccctccaacactcccttaaatgctattgaatcatcacttcttctaaagacagtgacacctacatcagtaaaaagacagttgtagcccatttgacataattgagaaacagaaagcaagttgtaatctaatgaatcaacaagaaaaacattggaaatggaatggtcaggtgaaatagcaattttacccaaacctttgaccaacccttgatttccatccccgaatgtgatagctccgtggggatctctgnttttctcatatgaagagaacatccttttctccccggtcatgtggtttgtgcacccgctgtcgagtatccaacttgagcccncggatgcataaacctacaaaaca

SEQ ID NO: 15578 - DNA, 469 bp, Zea mays
  unsure (1)..(469): unsure at all n locations
agctggtgaaggttcttcatccncacatgtgctaagcggcgatgccacaaccaacccatgctagtcttagcaattaagcatgcatctagaccggcctcctcttttgcaaaatcaactaaataaagtttgtcgtctaatacacccttaaaagctaatgaaccatcacttcttctaaagacagacacatctatatttgtaaatagacaattatatcccatattacataagtgactaacagatagtaaattatatccaagagactcaactaanaacacattagagatagagtgctcatttgatattgcaatcttgcctaaacctttcaccttgccttggttcccatcaccgaatatgattgaatcttgggaatccttattcttaacgtaggaggtgaacatcttcttctccctcgtcatatggtttgtgcatccgctgtcgataatccagcttgaacccccggatgcataaa

SEQ ID NO: 15579 - DNA, 345 bp, Zea mays
  unsure (1)..(345): unsure at all n locations
agcctgtggtcgatgatcaatggcaacacatctctccattttgtcgaaaatagccatgaacggccattttcaataatatcgaatgctaaaacctacggatatttgaccaagaaatcgtctccactagaaatccaaaaatacaatctatggcaaggaaacatatgtggggtgaggtgtacgagcctgtggtcgatgatcaatggcaacacaacccccatttttgtcgaatatagccatgaacgaccattntcaataataccgaaggctaacacctacggagttttgaccaagaaatggtctccactagaaatccaagaatgtgatctatnggcaggaaacatatgt

SEQ ID NO: 15580 - DNA, 307 bp, Zea mays
  unsure (1)..(307): unsure at all n locations
acatgagctaagcggcgatgccacagccagcccatgctagtcttagcaattaagcatgcatctagaccggcctnctctttttgcaaatcaactaaataaagtttgccgtctaatacacccttaaatgctagtgaaccatcacaccttctaaagacagacacatctatatttggaataggcagttataccccatattgcataattgactaacagatagcaaattataaccaagagactctactaaaaacacattagatatagagtgttcattagaaattgcaattttacctaacccttttaccttggc

SEQ ID NO: 15581 - DNA, 484 bp, Zea mays
  unsure (1)..(484): unsure at all n locations
gcttagcaagtgcgagttctggatcagcgaatttctgctcttgggtcacattataaaccgagatggactagatgtggatccaaagaaggtagcaataattctggactggaaagcaccaaaagatgtctgaggaatcaagagtttcattggaatggctggttattatcggtgtctcattgaaggtttctccaagattgctagaccaatgacagccttgctagcaaagaaggttgagtttgagtggaccctatcgtgccaggaatcatttatgatgttgaagaagaagctgacaacaacacgggtattggttctgccagacgttcacaaaccattctcagtatactgtgatccttcatacaccggtctgggatgtgtgttaatgcangaagggaaagtagtggcatactcgtcccgacaattgaaagttcatgagaagaaaatacccactcatgnattggagctagcagccgtggttcatgcactg

SEQ ID NO: 15582 - DNA, 161 bp, Zea mays
tcacaagaggaagagcttcgggaaaattaaaaaagtccacaacttcctcaaaaattgtggggaattcatcatcaaatggcaagggtacgttccacttgccagggtacacgtgacggagaagaagccggagctgctgaaaccactccgattttcgaagtgat

SEQ ID NO: 15583 - DNA, 405 bp, Zea mays
  unsure (1)..(405): unsure at all n locations
attatattgaccttgagattgataatttcaatagcacttgcttcactaacggcctccaggatacacccttgcttgctccaataatagatgtgtttgtgtctttacacatggtttcatacttctaatgggcatgcttatggaccgtgagcactaacattnttttctctattttctctctcttaagaatgaacttgtgattntataatagttctttaacatgagtggctttgtgattttatatagtcctatagntctactctagcaagtagtactaccttattatgtntattttaaaaaaaattatactactatngtactagcaccctactatttccattcagacatgtaaagaatagcaatcagtatgtgagttgtaactgtatgttcaacaaaatgttagtgcta

SEQ ID NO: 15584 - DNA, 450 bp, Zea mays
  unsure (1)..(450): unsure at all n locations
agcttcggggtctntatttgattcttcttcctaagcccctggtgtccaatcagcaatgaagtctgctaatgcctgggactgaattgaggatctatgtacataatctatactgaattcgttaagctccgcagcctattntccaatccttccaatagcttctttgttcctcattatgtcctttagaggttgtgatgaaggaacaattatgtgatacgcttgaaaataatgtcgaagcttcctggaggccattaacacaacatacaacactttctccaattctgtataatttttctttgataaacttagaacttcggaaatgaagtataatggcgcctgctctttgattngaccatctagcttctctagtacgagcgccgcacttactgcatagtgcanagctgccacatataagagcaatgcagccccttgcgaaggtggagtagtggtgta

SEQ ID NO: 15585 - DNA, 374 bp, Zea mays
  unsure (1)..(374): unsure at all n locations
ctggagtggttgtctgaagacttttgaactgcttgaagcattaatgtagatttggtgctttttttgactgatcaactctggagcagctagagtgatgtagttgtgggcttttaaactgcttcaaactggagtgatgtcgctgtggtgcttttgtgactgatcatctctggagcttttgtgaatgatctagctagctatctattgggaccatgcttcgtcgccgaaggtcctgcagaaagaaacagcttctgctgaagctgctcgtacgtgatgccgaaagtgccatttcgtgaagcttcggaattacaaaccgacttaaagatagaatgacattntaatccataagagtccgagtcattattgtanacttttat

SEQ ID NO: 15586 - DNA, 354 bp, Zea mays
  unsure (1)..(354): unsure at all n locations
agcttctatagggagaacacattntattgtcttcatatgttcatnttgagaaagacagggtttgtagcgcatgccatgcaggaaagcaagtaggagcccatcatccacacaagaacatcatgacgaccgacaggccgcttgagctactccacatggatctattcggcccgattgcttacataagcatcggcgggagtaagtattgtgttgtaatagtggatgattattctcgcttcacttgggtattctttctgcaggananatctcanacccaagagaaccttaagggattcttgagacgggctcanaatgaggtcggcttaagggatcagaaaataagaagcgaccacggga

SEQ ID NO: 15587 - DNA, 313 bp, Zea mays
  unsure (1)..(313): unsure at all n locations
agcttgaaactatgtccgtatccaatctgtctgatccataactataagcgctngccagatgcccncgttccggtcgaccacgaccaacacccaacataagacttccctagttatttagccaagaccagagccataatagttctcatggtagcactgttttctcgggtggtcactccatgttccaattaatatgcaataatcttgtttaaccaaaatggtaaacttaccattgtggaacattaatatcataagcgggagtgactgcataaagttaagtttgagcaatagcatagctacttggttaaatcataat

SEQ ID NO: 15588 - DNA, 453 bp, Zea mays
  unsure (1)..(453): unsure at all n locations
agctttagtgattagaaagagagnattgttgttttcttttgagctcttgcgcttggattgcttctttctctcactctttcttgcgatcaaactcatttgtaatcgaggcaagagacaccaattgtgtggtggtccttgcgggaactctgtgttccgattgattgagaagagaagctcactcggtctangtgaccgcttgagagagggaaagggttgaaagagacccggtctttgtgaccacctcaacggtgagtaggtttgcaagaaccgaacctcggtaaaacaaatcatcgtgtctcgctctttattcgctcacgatttgttntgcgccctctctctcggnactcgttatatttctaatgctaacctggcttgtagttgtgattaagtttgtaaatntcagattcgccctattcacccccctctatgcgactnttagagtcccactgacct

SEQ ID NO: 15589 - DNA, 311 bp, Zea mays
  unsure (1)..(311): unsure at all n locations
ttcttccgtcaccttgaatgcgacgggttgagccttggatgtggatggatcatcaagctcgttcatcttcctcgagccttcgatcatgcactcaaaacttacaaaattcccgattacttcctcgggggtcattttagtatatctaggattaccacgaattaattgaacttgagtagggttaaggaaaataagagatcttaaaataaccttaaccatctcgtggtcgcccactttacgctcccgaggttgcgcacttggttcaccaaagtcttgagccggntgtacatgtgttgtggctccttccctttgcg

SEQ ID NO: 15590 - DNA, 336 bp, Zea mays
  unsure (1)..(336): unsure at all n locations
agcttgtgaagccttggagaagcgtcgtctgatgcatgcgatggatggagttcccgtggagtcgtcgtcggagacgcctgacgacgacgacgatgatgatgatgacgaagacgacgacatggcggcccaactgggcctcagcctggacccgaggctgggccaagggtcgccgagccagcctccaagtgggccggcaccatcagtgcctcgggccgggacaccaagatcccggtccgaggaccagaggcaggccgagggggtacttgaccccttggccgagataattgnggtgactccaagaacaagcgcccgtgccggctgtacaggaggttggtc

SEQ ID NO: 15591 - DNA, 353 bp, Zea mays
  unsure (1)..(353): unsure at all n locations
agcttgntgatcttctttgagcccttgatcatacattcaaagctcacaaaattcccgataacttcctcgggagtcattagtgtgtatctaggattaccacgaattaattgaacttgagtgggttaaggaagatgagtgatcttataataaccttaaccacctcgtggtcatcccattttttgctcccgaggttgcgcacttgattcaccaaggttttgagccggttgtacatatcttgtggctcctccccttggcgaagacgaaagcgaccgagctcccnctcgatcgtttcccgcttggtgatcttggtgagttcatcaccctcgtgcgcggtcttgagtaaagtctaaatc

SEQ ID NO: 15592 - DNA, 345 bp, Zea mays
  unsure (1)..(345): unsure at all n locations
agcttgctctcggcttcccataatatcccatctttttcatcataaccatgtcgtctgctgtcacagtagatttctgaaagggaaatgtgcccttgggccatttctaagtattttggtgatttattgtccaacacaagtgccctagtgtaaaaaggtggacaaagtacaaatcaaggataaaggtatgtttctcagacttagtacattngtttattgactaatgtattgtgtctaagtgctggaaacagaaaaaatcgagttggagaaaagatggctcgagcagccaaagtctgctcagtctgggtgcaccggactgtccggtggtgcaccagacagtgtccggtg

SEQ ID NO: 15593 - DNA, 108 bp, Zea mays
gttatatactattaggcgtacaccagcgttaagcaccatactgctaaaaaatacccctgcctgcctatcgagtactgtgtatcattacatttgcgctggaagctccaa

SEQ ID NO: 15594 - DNA, 398 bp, Zea mays
tacctgtcaaacaacaacatcttcctgcacaacaactgcagaccataccagtaacttggcctttcgcatgctggggactggatatgattggacctttcaagaaagctcaaggaggatacactcatgtattggtagcaattgacaaattcactaaatggatagagttcaagcccattgcttctttaacctctgctaaggtcgtggaattcatacaagacataatattcagattcgggataccaaacagcatcataactgacctaggatccaacttcacaagttcagagttcttcgacttctgcgagcaaaaaagcattcaaatcaagtatgcatctgtagcacatccaagagccaacgggcaggttgagcgagctaacgggatgatattagaggcactc

SEQ ID NO: 15595 - DNA, 382 bp, Zea mays
ctttatgcattatttacctatctctctctaccactgcctaagcctggattatgggatgggaatcgaattgcatggtgagtatgagtgagcctgcattaactattactgtgattaaaagatatggggcaaatgaaaaaggtatagatggttcgtttttaaaaagagtgcgatgcagggtcttcaccctcatcacctgttggagtatgatgatcagggactccctggtttaagggagggcctaaggtgttggctcagctggtttaagcgtgaggagaaggatcgtcctctcatataaggtctggtttgtcatctttcattacctgtactctcaaaaagtacaaccaatcgaggctgtgtgggcagccactcaatctatactcgt

SEQ ID NO: 15596 - DNA, 352 bp, Zea mays
  unsure (1)..(352): unsure at all n locations
agcttattcanattcaaatcaggattcanattattgtgaataaagaaaaacagaaaataaaatcagagaanaaataaaaagaaaagggtgaaaccagcgcctgggccggctcaacctcaattcagcccacttcactgtcttccccacgcggnccatgacgctagcctcccgccgcgcgttgacgacgaggccctgtaacacccggttntaaaggacaaagccgggtgcatctcatacatgcgctaaagaagacaacatatataataacagagtgtatagagataaatgtcacanaacatcagagtatttattacatagcggaagacttattacaaaatataagtggtaacat

SEQ ID NO: 15597 - DNA, 384 bp, Zea mays
  unsure (1)..(384): unsure at all n locations
angctgcagctgtaagcatatgaaaatacattatgtataatgagagaagcgataaacaacaaagaaagctatagacccactaaccgatgttcgaggcttttagatcatctatttgcctctagagcaggagaggattccagtccagcaaggacaaaatctgatcgggaacaggagcaccacaagacctcaattgagccgacacagagctcagaacattctgcaaacacaaaagttagcaaaagagactggttgtcgacataagtaacgcagggcaaagatcagctcacctgaaggttagaaaggaacaaggaaatcctagagccagaggcatcgacgtgctatatgacggtggagtatcggcagaagcaatattgagagcagact

SEQ ID NO: 15598 - DNA, 430 bp, Zea mays
  unsure (1)..(430): unsure at all n locations
agcttggagaagcttcacagcctctcggggaagctatccacgggctacggcgaggctggggtagttagaaaagattggtcacgatggccgtgctcgggcaatgatggcgggcgatggcgctcgctttccacgatgaactccaatgatctctggctcgggcggngctttgggtgcgcgagtgcaaacgactaaggcctctgggggcacttataggcgagggcaaggtgcagacgcacgaggcggtgcgcgcgctgccgcgctcggccggtcaggcaagggatcgaacacgtggcctcgctcggtctggtcattttcaaacgctaactggctcgcgatcttctcgtaactctcctaaatccctacacacgatttcttccttgtcttttaactcttggttctcttacagcacatgagtggatttgatctcgga

SEQ ID NO: 15599 - DNA, 416 bp, Zea mays
  unsure (1)..(416): unsure at all n locations
agcttcttcatccgtagcttcgaaattgttttattcttctcccagaccgcgcctntcatgccgttcataccttcatctncaagccgaaagttcctgtgatagtatataatacttggaaagcatgttagtcgtgtttttgaggaccttctgaagacgaaggcccccaatagtagcccctcgcacgattaatttgttcttgtaataataaattcaaactgcgacgtgaacgaaggccttaagctgaaggtccgaaaaaacaccttcccttcgctagaatagtgaaagtcaatgacaaatgggacccgccaagttgcaatgcactgtgcgtataaatagaaacccgcagcagcgacatttgttacgccatttctggtgcttgcactattttctcanattaaattctcttgctgcagctc

SEQ ID NO: 15600 - DNA, 443 bp, Zea mays
  unsure (1)..(443): unsure at all n locations
ctctgagtcacctgcggcatgcaagcttggccaaaacaatntanataaaactccatacaagcttctcaagtggggactcaataaggaattctgaaattcagaattctgaatttcaaaccttgagccaaagaccaagcgtgttcaccttgatccctagctcaaatcctaatgaccccattgaaaaaaacgtgtctaactaacccctctgtcacatgccagaagatggcattgggacgcgagctctatacacgacaaaaccctagatttgcctcgggtttgagcagagagacagaccggatttctgggctccacaaaatcggtagcttgtagggaggagaagaggttntgtgcactgaccaaggcgagagcaggctcggatgaatgactacacgcgccagaacttgggcagaaggagcgggcacacgtgttcgaccctggtcggg

SEQ ID NO: 15601 - DNA, 438 bp, Zea mays
  unsure (1)..(438): unsure at all n locations
agcttgccttcgcctcagtctatcatccgcagtccaatgtggtcgtggaacgcgccaacgggaaaatcttcacagctgtcaagaaaatgctccttgatgaataaaagggcagatggaccgatttgttacctgaggcagtctgggcactaaacacgactgagtgcagggcgaccgggttttctcctttccgccttctatacggatcggaggccatgaccccgcaagaaataaagcatgggtccccgcgaacagttccgtcagccatccncgacgtggacgagccaacttcataggatctcattgacggagaccgagtcttcgccctacaggccctaaacaaataccaagcccagaccaaagcatagcgcgaccactcagtcattccgagggagttcaacgaggggacctcgtactcgtccgaacagctcggacggagtc

SEQ ID NO: 15602 - DNA, 374 bp, Zea mays
  unsure (1)..(374): unsure at all n locations
tattcatgaattgtatacgatacanaacccttgggtgaagagcaataccataacaactttggttgctaccacttcggtgctcgctctggatcaagctatcccgtgcccacctttctgaagagatggcccggagaatggatgaaagaatggttctatgtaaaaaatgatttgaaggttcgagaagatattaaggatatcatcatgcgccccatctggcagcggttcggactccggaaaccgaaggtagaaatggatgaagtggccgaagaatgccaacgggccttcggcgtagtctgctcttttatcgggacaagggagttgatacaagaacacatttgcttcagagtatggcctctttgcagatattgggaaat

SEQ ID NO: 15603 - DNA, 329 bp, Zea mays
tgagaagtggtctctcaagttccggtgatgaagcaccagaagaacaatcaatgaaggaatccatgtgggagttcgcaagaaaaaggtttgtgtgttggcatctatgctccttcaataagcaagctgccaaacgaaagctaaaagcctgaagatgatctttgagtagccagaatcagtgttttcaatcagaaaccagatgttcctcacaggccagactctgttgaagtttcatctcctcgaagagttgcaaagtgaagatatgtagctgaagtaaagctatacccataacccttctaaaccgaatctcgaggacgagattcctcttaagt

SEQ ID NO: 15604 - DNA, 402 bp, Zea mays
  unsure (1)..(402): unsure at all n locations
gaatcttgaatctattcttcaaggcaccgaaagctctctcaattgttactcggagggaagaatgccttagattgaagagttctcttggattgagtggatgatttcctccaccaaattctcttagatgatatcttgtgctacggtaaggaggtagaaatccaggtctaacagcataaccagcgtcaactaaatataattttcctagttcaaagaattctagttagtttgattgtgaagtaatttaaaatcatattcaaacatgtcatggaattacctggtggcacaatgaggccatcagatctttccaatggatctgatagaatcaaggcatcatgagctgaaccttcctagccagcaagaacataggtaaatctcanatcanaatcaacagctgctagaaca

SEQ ID NO: 15605 - DNA, 339 bp, Zea mays
  unsure (1)..(339): unsure at all n locations
tcaagcctagctacgggtgcataggtttcaccaaaatccaaaccttcgacttgtgaataccatttggccacgagtcgagctttgttccttgtcaccacaccatgctcgtctttggttgtttgcggaagacccacttggttcctacaacattttggttaggacgtggaactaaatgccatacctcgttcctcgtgaaattgttgagctcctcttgcatcgctatcacccaatccgaatcttgaagtgcttcctctaccctgtgtggctcaatagaggaaacaaaagagtaatgctcacaanaatgtgcaacacgagatcgagtggtacccncttatgaat

SEQ ID NO: 15606 - DNA, 335 bp, Zea mays
cccatggttcaagataatgaatgttacattttatatcctgctaattatcctgagcacaagattaggagaattcatgctaggaaacctcataacatttctcaccatgcatttatgtataaaaatgaggcttctagctctatgcattctactcatgttaaaatgcctaaaaagaaaactcctgctgcatcaaatgagcctaacatttcatttaagacttttgatgcatcttatgttttaactaacaaatcaggcaaagtagttgccaaatatgttgggggaaaacacaagagttcaaagacttgtgtttgggtacccaaggtgctcgtttctaacgt

SEQ ID NO: 15607 - DNA, 385 bp, Zea mays
  unsure (1)..(385): unsure at all n locations
ttaagtcacctgggctgcagcttgaggtgcgcaagatctgaagatagaagctcgaagcttattgaaaattagagagcagaataaaggagcaatcagatgcttttgagaaaaagaactttgagctccatgcagccgaaggttactggcggaagctgaagcanaaatatcagaactaaactcgaagcttcttcgncagtccgagcagttcgacgagaaaacaagatctcaatgaaaaacttgaagccggagctcagcagaattcagaattgagaaaactactgacaaatcttcaagaaaaatgcttggaatttatgcacaagtggcattcaacgataagaaagatttttactcggttggagctagcagcgaagaaattaccccctca

SEQ ID NO: 15608 - DNA, 417 bp, Zea mays
  unsure (1)..(417): unsure at all n locations
cgtgcagcttgtcaagcatatttggtctccatctctttatgtgtccattaagantagtcaaccaagatctatgaacccaaatgcccattgtgctaacacttgggtaactcattacctttctagcacaagttgcaatattgggttgcctatntacatacgaatcaattgacaagctgggagcagaataattactgttggtcacttgttctcaaatggtgtgaatcaacaacaaggcaacacaattgttaaagattagggaccttcatcgttcgaagcattatctcttccggatataatgatcttcatacgaaggtcatgaaggacagacctttcccattntatgagaatacaacatttaagagataatgaatggcattcattcattcattcatgcacatatctatatcataacatatg

SEQ ID NO: 15609 - DNA, 457 bp, Zea mays
  unsure (1)..(457): unsure at all n locations
tgcagctatgaaatcttatcccacattatctttcggcggcgccagagccaacccatgttagtcttagcaattaagcaagtgtcgagttcagctctatcaaaatctaccaagtatagctaaccctctaacactcccttaaatgctattgaatcatcacttcttctaaagacagtgacaccaatatcagtaaaaagacagttgtagcccatttgacataattgggaaacagagagcaagttgtaatctaaagaatctacaagaaaaacatcggaaatagaatggtcaggagatatagcaattttacccagacctttgaccaaaccctgatttccatccccgaatgtgatagctcgttggggacctttggttntctcatatgaggagaacatctttntctccccagtcatgtggntggtgcacccgctgtcgagtatncaacttgagcccccggatgcat

SEQ ID NO: 15610 - DNA, 378 bp, Zea mays
  unsure (1)..(378): unsure at all n locations
agcttcagatctttagccttgaactcttgtcatatgacccgaaacaacttgggaatcagttttaagaacaacccttctgattcccattgcttttagcttccgaagacccagaagcagggcttcgtactcggcaatgttgtttgtgcaactaaaatcaagctttgccgcataacaagttttaactttggaaggtgaaaccaacacagcagccgctcccgctccgaagattccccaggacccatcgcaaaacactggccatgcttcggtgtctttatttgcttcttcctcctgagcccctggcgttcagtcagcaatgaagtctgctaacgcctgggactgaatcgaagatctatgaacatattcaatacanaattcatt

SEQ ID NO: 15611 - DNA, 455 bp, Zea mays
  unsure (1)..(455): unsure at all n locations
agtcacctgcggcatcaagctntcaaagctcttatgggcttatcaatccccacgtgcctggtacgaaaggcttatggatttcttgctctccaaagactntaaaattgtgaaggttgacactaccctattcactaaaagaattggcaaagatntgtttgtttgtcaaatttatgttgatgttattatttttggatctactaatgaattgttttgtgaggagtttggataatgatgtcaaaagaatttgaaatgtctatgataggagaattgagcttctttctcggtcttcaaatcaaacaattgaaaggtggaatctttataagtcaatcaaaatatttgaggatatgctcaagaagtgtggctagagaatgcaagcctattaaactcctatggcaacaatggcatctagactagatgaggangactatggtgatcaaaacttttcgctcataatg

SEQ ID NO: 15612 - DNA, 284 bp, Zea mays
  unsure (1)..(284): unsure at all n locations
agctngtgagcaatacaagttcagaatggaaatatcttgttctgctgatccaccgaagcccatgctcttatgtgaggacatagcagagcagaaagtgttattgggatctcaactgtccaaagaacangagaaaaccttgataagggttttgttcaacaataaagatgtatttgcttggtcagctaatgatctttgtggagttaacatggatgntattgagcattcgctcaatgttgacccatccttcagacccanaaagcaaaggcttcggaagatgtctgatg

SEQ ID NO: 15613 - DNA, 449 bp, Zea mays
  unsure (1)..(449): unsure at all n locations
agctagtgaagccaatcacaagtttgttgaagtatgacatcaagttcaataggtcttctaagtgcaatgaagcctttgagcaactgaagacactattgaccactgctccggtattaactcaaccggacatcactaaaccttttgacgtatattgtgacgcatctggcagcgggctcggctgtgtactgatgcaagagggccgagtaattgcgtatgcttcaaggcagttgcgccgacatgaggagcactatccaactcatgatctggagttagctgctggtggtcatgccctatagatttggcgtcactatctgctgggaaatatctgtcacatatatacagatcatataagtttgaagtacatcttcacccagtcagagttaaatatgaggcanagacgatggcttgagctcatcanagactatgaactggagatccattatcaccca

SEQ ID NO: 15614 - DNA, 291 bp, Zea mays
  unsure (1)..(291): unsure at all n locations
ggagtttcggcaattttattcggagtagtgcttgaagactttattgtcttcaatacatccagtacattaaccatcctttttcttttgggggtcaatgctagacccttttggctttttggtacttcaacttgtgctgaaggacttaaaatttcagatgtccttgtttctttagcctttggntcttctattatctctatctccggcattatgaccgactcttcaatattcggcaggggagtcggctccttggctttcggggccgaagaggttcaccgacaaattcatgcacta

SEQ ID NO: 15615 - DNA, 284 bp, Zea mays
  unsure (1)..(284): unsure at all n locations
agctttcaagaagtttgtgtacatattggctctaagattcattntgcatcgggtaggcatccggagtcaaatggacttgtcaaaagagctaatggcattataatgacaggaataatgaagttaatcttctaccagcccatgggaaagtggccagacgaattaatcaaagtggtgtggagccacaacacaacaatgtcaaggtcaacaggctttacaccattcaaattgctgtttggtgacgaaacaataaccccaaaagaagctaaagcgggatcaataagaac

SEQ ID NO: 15616 - DNA, 354 bp, Zea mays
  unsure (1)..(354): unsure at all n locations
gcttacccttttgtgtaaatccgcctgtgatttgacagcaattgggccttagagtgcgaccctctgctgaggaagtcagtacttttgttgcttcactcggggcgattcctgatgatgaacggcaggtttattttgaagtgcctctgaaccccagtgatgctgacataaatgacatgcttgatctattagctgaggattcgtccgatgctgctcctgatggtaccttggcagtggtgccccttccagaggttgatacaactntggatgtcccgaaacctgtcagcactcgtccgaggcgccctagccgaaccagtcagcccgagccttctgctgatgagcaaaagaaaaagagaa

SEQ ID NO: 15617 - DNA, 416 bp, Zea mays
  unsure (1)..(416): unsure at all n locations
accgcttatcgtacaatagtttaaaggtgaaaaaatgagatctttgtattattccttgaaaccaatatttttcatttgcttaaacctattaacgcattttttgcagggccttatacttaacaatgccctcanggcacaaaaagatgccaaagacgaagggtgtaccatagccttgagcaaccttcgttccgaagtaattgaactaaggaacgaaggtctcgaaaaagataaaatattacactcgttggtgaataaaataaaagaagacgaagctgctttcaaagctcaagctgatgctcagaagcgcgaaatngaggatcttctgaaacagctagccagagctaaagaagagtgcacagntgaagaaacaaaacgagaaaatagtgaacaattggcanatcatttagagaaaaacg

SEQ ID NO: 15618 - DNA, 388 bp, Zea mays
  unsure (1)..(388): unsure at all n locations
atcagccgaagcccatgctcttatgtgaggacatagcagagcagaaggtattattgggatctcaactgtctaaagaacaagagaaaaccttgatcaggtttttgttcaacaacaaagatgtttntgcttggtcagctaatgatctttgcggggttaacagggatgttattgagcactcgctcaatgttgatccatccttcangccaagaaagcaaaggcttcagaagatgtctgatgacaaggccgaaggtgctcggaacgaagtgaaaagactcctcagtgcccgagttatcagagaagtaaaatatccacaatggttggtaacactgttatggtaaagaaagccaatggtaaatggagaaatgtgtatcgatttactgatctcaac

SEQ ID NO: 15619 - DNA, 445 bp, Zea mays
gcttatgaagattctatatccccacatgggcttgtttttatgccagagcccacccatgttagtgttagcaattaagcaagtgacgagttcagctctatcataatctaccaagtatagctgaccctctaacactcccttatatgctattgaatcattacttcttctaaagacagtgacaccaacatcagtgaatagacagttgtagcccatttgacataattgagaaacggatagcaagcttgaatctaaggaatctacctgataaacattggaaatggaatggtcaggagatatagcaattttaccaagacctttgaccaaaccttgatttccatccccgaatgtgattgctcgttggggatcttgagttttctcatatgaggagaacatccttatctcccctgtcattgtggttgtgcacccgctatcgagtattcaacttgag

SEQ ID NO: 15620 - DNA, 170 bp, Zea mays
  unsure (1)..(170): unsure at all n locations
gcttgcttaagccgagatgaaacttatacctggtgcttgccatctcttggagntactctttaccttatactgcttgtttggttgcacgataatggtgcccaagattgatgattcaaagcacattcccaaggctgctggagtgttggaacttgctctcgctcgcaaggggg

SEQ ID NO: 15621 - DNA, 396 bp, Zea mays
  unsure (1)..(396): unsure at all n locations
gtcacctgcggcatgcaagcttctaagggagaacacgtgatatttctatctaatgttcaattcgaanaagatagaccttgtgcagcttgtcaagcagggaaacaggtgggaggaacgcatcacagcaagaatgtgatgaccacttcaagacccctggagctgctgcatatggacctcttcggacccgtcgcctatctaagcatagggggaagtaagtatggtttaagtattgttgatgatttttcccgcttcacttgggtgttctttttgcaggataagtctgaaacccaagggaccctcanacgcttcctcaggagagctcaaaatgagtttgagctcanagtgaataagataagaagcgacaacgggtccgagttcaagaaccttcaagtggag

SEQ ID NO: 15622 - DNA, 449 bp, Zea mays
  unsure (1)..(449): unsure at all n locations
agcttcttcctgttctcctttgagggtggagatacctggagagcaacttgacgagctnnttacctcgttggttcctttttccttgtgatccatgtccatctttccgtangagaggtggtcagcggagtccttcgggtagtcggatcttctgcccccggctggtgggaggtagtcttcgctcagagcgctggaagttgcgctatttccggctttgctccgactttcctggagagtgttggggaaggcttcttctccggtggatctgcgatgcgatgtagagttccttcttcgtctgccacgaatgaaatagttccgaagcagagtacggatctatggcggaggatgatcttgtgctggaaagtggtaaccatttgactagcttggatcagcgacacaccccctacctgggcgcgctagttgtcggtggttgggcccgaccgcacacccgg

SEQ ID NO: 15623 - DNA, 472 bp, Zea mays
  unsure (1)..(472): unsure at all n locations
agcttatgaagattcttcatcccaacatgggctattctgcgatgccagagccaacccatgttagtcttagcaattaagcaagtgtcgagttcagctctatcaaaatctaccaagtatagctgaccctctaacacacccttaaatgctattgaatcatcacttcttctaaagacagtgacacctatatcagtaaagagacagttgtagcccattttgcataattgagatatagaaagcaaattgtaatctaatgaatctactagaaaaacattggaaatagaatggtcaggagatacagctattttaccaagacctttgaccaaaccttgatttccatccccgaatgtgatagctcgttggggatcttggttnttctcatatgaggagaacatctttttctcccctgtcatgtggtttgtgcacccgctgtcgatgatccaacttgagcccccggatgcatataacctacaaa

SEQ ID NO: 15624 - DNA, 366 bp, Zea mays
  unsure (1)..(366): unsure at all n locations
agcttatgaaggttcttcatccncacatgtgctaaacggcgatgccacatccagcccatgctagtcttagcaattaagaatgcatctagaccagcctcctcttttgcaaaatcaactaaataaagtttgccgtctagtacacccttaaaagctaatgaaccatcacttcttctaaagacaaacacatctatatttgtgaataaacagttatatcccatattacaaagttgactcacagataacaagttatatccaagcgactcaactaagaacacatttgaaatagagtgctcggatgaaatagcaatttttcctaaccctttcaccttgccttggttccatcaccaaatatgattgaatcttggg

SEQ ID NO: 15625 - DNA, 345 bp, Zea mays
  unsure (1)..(345): unsure at all n locations
tctagcacaacatctagcacattcgccatccttctcctcttatgagttgcggcggagcttttttgcatcttcggcactgttgcctctgttgaagggctcaaaacctctggcatttttggtatttcttctattntatcagccaccgtcgtctcaactagtttaactgaaggtaacttcggcattatagccggctcttccgtcctctgcgcataaggagcggtctcttttgttttggcagctgaagaggccccttcgttaaattcaagtatcgcggacggttcaatgtaacgcggccggtgagtcagaaccttcaactttnttcccttcagcacatgcctcattggg

SEQ ID NO: 15626 - DNA, 375 bp, Zea mays
  unsure (1)..(375): unsure at all n locations
atccacaaacaccctgaaatgctactaaactacacaactatcattcatatataaaattttgacagcatcttctttgaaaatttgcataaacgtggaagccacagagtataaacagatatcatgataagaaaacatactagacattaataatctgctagtaatgggaagataaccataacgtcataaactgaattaactagtgtgcacgactagttaaaaacaaacatccttgacaagaagtttctaattaaatcatggctgtgcctaggcagcattattatgagagtgacggtggacgtgctgctacttccctcattcccaacatgaatcaagtacctgcattgagtaatgcaagagtgagatgaanacatctca

SEQ ID NO: 15627 - DNA, 359 bp, Zea mays
  unsure (1)..(359): unsure at all n locations
agctntgaattcgatgtatgtgcttttgtattcttcatcgcatcattcaaaggaagggtgcccagatctatccatagggtttatcgaatcgcgtgctcagttttgtatgtgctgaagtttttttatttgattntgtctcttcacttgtttcctctcttctcctttgaattttggaagaatccttgatttcttgagntgggaattggtttagggattgtattgtggtaaaaataactctctaaaccactacaaccatcaggtttgaatagtttgtggttgtgatccgatctgaactcgttttcaaaaccccaactaaaccttggnctaatatgtngttttatctgtgaataattacaaat

SEQ ID NO: 15628 - DNA, 435 bp, Zea mays
  unsure (1)..(435): unsure at all n locations
gctttaagggagaacacgtgataggtctaactaacgtaactttcaaaaaagatagaccttgtgcagcttgtcaagtaggtaaacaagtgggaagctctcatcatgccaaaaatgtgatgacaacatcaagacccctggagttacttcatatggacctcttcggacccgtcgcctatctaagcataggaggaagtaagtatggtcttgttatagttgatgatttttcccgcttcacttgggtattctttntgcaggataaatctgaaacccaagggaccctcaagcgcttcctaaagagagcccaaaacgagtttgagctcaaagtgaagaagataagaagcgacaatgggtccgagttcaaggaccttcaagtggaagagtatctngaggaggaaggaatcaagcatgagttctctgctccctatacaccacaac

SEQ ID NO: 15629 - DNA, 346 bp, Zea mays
  unsure (1)..(346): unsure at all n locations
gtatatgacccggatagttgtcttctgggtgcctaagaagatcgtgttagaccgaggatcatagtttactttctggntttggaagaagttgcacgagtgcttagacacacagttgaatctcagttcggcctaccatcctcaaactaatgggcagaccgagagaaccaaccaagtgctggaggatatgttgagagcttgtgctcttaaacatggtggcaattgggataagagcttaccgtatgcggagttctcctacaataatagctaccaggccattgaggctctatatggcagaaaatgcgggactccactgtattgggatcaaactggtgaacgacagttcttt

SEQ ID NO: 15630 - DNA, 399 bp, Zea mays
tcttaagtcacctgcggcatgcaagcttgtgaacagtacaagttcaggagggaaaatgcatcttctgctgatcagccgaagcccatgctgctgtgtgaggatatagcagagcagaaggtgctattgggctcgcaattatctgaagatcaagagaaaaccttgataaggtttttattcaacaataaagatgtttttgcatggtcagccaatgatctttgtggagtgaatcgggatgttattgaacattcgctcaatattgacccatccttcagaccccgcaagcagaggcttcggaaaatgtctgatgacaaggccgaaggggctcgcaacgaagtaaaaagactcctaagtgcaggagttatcagagaagtgaagtatccagaatggctagctaacact

SEQ ID NO: 15631 - DNA, 511 bp, Zea mays
  unsure (1)..(511): unsure at all n locations
cttaagcacctgagctgcagcttataagggagaacacnatttgggactaacaaatgttcactttgagaaagacagggcttgtagcgcatgtcatgcaggaaagcaagttggtgttcatcatccacacaagaacatcatgatgactgacaggccactcgagctcctacacatggatctattcggcccgattgcttacataagcatcggcgggagtaagtactgtctagttattgtggatgactattctcgcttcacttgngtgttctttttgcaggaaaaatctcatacccaagagaccttataaggattcttgagacgggctcaaaacgagttcggcttaaggatcaagaaaattagaagcgacaacgggacggagttcaagaactctcaaattgaaggcttcttgangagganggcatcaagcatgagttctcttctccctacacgccacaacanaatggtgtagtggagaggaagaatagaactctagtggacatggcaagaaccatgc

SEQ ID NO: 15632 - DNA, 400 bp, Zea mays
  unsure (1)..(400): unsure at all n locations
tcgaccgngatcttaagtcacctgcggcatgcaagcttcatgaagcctgcgctactgtttcctttacacgagtttctagtcaaggttntgaagaagtttgaaattnttcttcatcacctcacccctgatgcattaatcaaggttggaattttcatttatgcaataaggagccagggattagaacctgatgttgattgtttttgtaatattcacgagttgtcctatcagacgaatgctactgngaaggagcagtatcataataacttcggatgctacacctttgtataccggtctaatgcgaggcatcttgtaccaacctttcagaaaatgaccaggctcataaatgaagtagtggttctatgtgaagaatggcctaagtgaaagaattacataaaatatg

SEQ ID NO: 15633 - DNA, 472 bp, Zea mays
agcttctaaagggagaacacattctgtgactttcatatgttcattttgagaaagacagggtttgtagcgcatgtcaagcatgaaagcaagttggtgttcatcatccacacaagaacatcatgacgactgacaggccactcaagctcctacacatggacctattcgccccgatagcttacataagcatcggcgggagtaagcactgtctagttattgtggatgactattcttgcttcacttgggtgttctttgtgcaggaaaaatctcatacctaagagaccttaaagggattcttgagacgagctcaaaatgagttctgcttatggatcaaaaagattagaagcgataacgggaatgagttcaagaactcttaaaatgaagggcttcctgaggaggagggcatcaagcatgagttctcttctcctacatgcacaacaaatggtgagtggagagaaaataaacttattgacat

SEQ ID NO: 15634 - DNA, 404 bp, Zea mays
  unsure (1)..(404): unsure at all n locations
ggatcttaagcaccgcggctgcagcttgtgaggttcttcatccncacatgtgctaagcggcgatgccacagccagcccatgcaagtcttagccattaagcatgcatctagaccggcctcttcttttgcaaaatcaactaaataaagtttgccgtctaatacacccttaaaagctagtgaaccatcacttcttctaaagacagacacatctacatttgtaaatagacagttataccccatatgacataattgactaacagatagcaaattatatccaagactctctactaaaaatacattagagatagaatgctcattagaaatcgcaattttacctaacccttttaccttgccttgattcccatcaccgaatacaattgaatcttgggaatccttatttttgac

SEQ ID NO: 15635 - DNA, 335 bp, Zea mays
  unsure (1)..(335): unsure at all n locations
agctggcaggcatggtagaattntagtgtcctaaccatagtacacattntagtccccggaggcccgtaagtctattttggcctcccgtgacacatgtttttgtcaccgaacagcgatttcgtgcctcccgttcgccacccatcatttgaccatagagactagtaaggctgttttggcctcccgtgagctatagcacacgttttcatggccgagcgagccattttacgttcgtgttcctccacacgtgtttttctccccggagcaccttanagcggttcttggcctcccgcgagctatatcacacattttcgtggccaaacaaccaattttatgta

SEQ ID NO: 15636 - DNA, 409 bp, Zea mays
  unsure (1)..(409): unsure at all n locations
agcttatatggtatatatttcgattaattactttatctatctctgacgatctatggttctagagttatcttggtcttgcagtcgggattgccataagactggtgtccacgctgatgtgagcggtacgggtgctgagtcccgacgggagcggtggaaccaccatccaagtgacgacgttccgcgcgctcagcccgcagcatggcgatctcagcacgagccctactcagctcgtctaatgcatggtccagctccgtgtttagcacggcggctaggttgactgtgctgctcaacctatgattgccctcaccgacaggtgagacaatcacgcctcctgtgctggcagatggacgactgnggtaatacttcaggtcaagaccatcatcttgcccaccgaaaaccgaacagtagt

SEQ ID NO: 15637 - DNA, 455 bp, Zea mays
acgcatacattggtgtcaatatgccttattactgatgatgtatcaaaatgtatgcattggtcagacatgcaagttgactgtggagtcttcaacctctgctaactctttggttcataaagttctggcatcgatcttaggttatgcacttatgcatgataatttatgtctatactcaactagatgataatgaatgtagacacacatatatataatacatgcatcaagtattgtacgaaaccactaaaaagctaaaaacaaattttattttgagacagaggagtatctatttctggctaaactacttatctttccctgactattatgagaaatatatttgtgtgttatcctgcaatatgctttttgcttacaatttgtgccgatgcatgcagatatgtggcctctgaccttgcaacagaatgtgtggtgcatgttcgtgaagaaaagtttacttacac

SEQ ID NO: 15638 - DNA, 346 bp, Zea mays
  unsure (1)..(346): unsure at all n locations
atacgaattgattctagcctaactacgggtgcataggtttcaccgaaatccaaaccttcgacttgtgagtatcccttggccacaagtcgggctttggtccttgtcaccacaccatgctcatcttgtttgttgcgaaagacccacttggttcctacaacattttggttaggacgtggaactaaatgccatacctcgttccttcgtgaagttgtgagctcctcttgcattgccaacacccaatcctttgaccaaaccttgatttccatccccgaatgtgatagctctttggggatcatggnttttctcgtaggaagagaacatcttcttgtcccctgtcatatgggtt

SEQ ID NO: 15639 - DNA, 326 bp, Zea mays
agcttgtgaaggttcttcatccctacatgtgctaagcagcgatgccacagccagcccatgctagtcttagcaattaagcatgcatctagaccggcctcctcttttgcaaaatcaactaaatagaggttgtcgtctaatacacccttaaaagctaatgaaccatcacttcttctaaagacagacacatctacatttgtgaatagacaattatatcccatattacataattgacttacggatagcaaattatatccaagcgactcaactaagaatacattagaaatagagtgctcatttgagattgcaatcttgcctaagcctttaac

SEQ ID NO: 15640 - DNA, 478 bp, Zea mays
  unsure (1)..(478): unsure at all n locations
ggaccttaagcaccgcngctgcagcttatgccctaagaaatagctaactttgntaatggcttagctcccattgttcacgataacgagggctatattttatatcctgctggttatcccgagcacaaaattaggagaattcattctagaaagtctcactccggttctcatcatgcttttatgtataagagtgagacatctagttctaggtgttgggggccttcggcttacgaaggtcctcanaaacaggattaacagtatttctggagcataatgtgtgaacaggtatcttcgaactcgagtcggaatcacagtaagagaagcctaaaataatacgaagggtgatacagcgccgaagatgtgagcgggaaagcttcggtgtgctagcagaaaatgaaaccgacttaaagatgaaaaggctattcagaacctcgtggattgctatnagaatattaccaaatgtaaagggcatgaatgtaat

SEQ ID NO: 15641 - DNA, 446 bp, Zea mays
  unsure (1)..(446): unsure at all n locations
agctnggaggacatcaccaacgcaccatatgcagatctgctctctattaattcaatgaggaaagtaaaggggacttataaattagtcttggcaaatggaggggaacgtctcaatgactgaggcacattttttcttgttagttagctcatggtacgttaaaaggtaaggacctcaatccaatgaccagaatatgtccatctttaaaaggtaagggaattggttaggcttcatattgtctctcttttgattggtatngtacatgattcttctccaaaaaacaaatgcataatcatgtgtttaacaacattcttgtttatccttgtcttcgaaaaaacagaacgcactaattttggccgacaccaagatcacttattggaataactttacttatgatcagtagcattacctttnttgatgtacaatatattggatgatcagtagcatgt

SEQ ID NO: 15642 - DNA, 480 bp, Zea mays
  unsure (1)..(480): unsure at all n locations
agcttctaaagggagaacacattntaggactaacaaatgttcattntgagaaagacagggtttgtaggcatgccaagcaggaaagcaagttggtgcccatcatccacacaagaacatcatgacgaccgacaggctgcttgaactactccacatggatctattcggcccgattgcttacataagcatcggcgggagtaagtattgtcttgtaatagtggatgattattctcgcttcacttgggtgttctttctgcaggaaaaatctcaaacccaagaaatcttaaagggattcttaagacgggctcaaaacgagtttggcttaaggatcaagaaaattagaagcgacaacgggacggagttcaagaactctcanatcgaaggctctcttgaggagganggcatcaagcatgagttctcctctccctacacgccacaacanaatggtgtagtggagaggaagaatcgaactctattggacat

SEQ ID NO: 15643 - DNA, 342 bp, Zea mays
catacgaagtttacttcgctcctcttgtgtcattctgaagctcttctgattaatgaagctactgtaatattcagtagtacgctgaaagcaaatggttagtcgtgttttgaggatcttcggaagaggaaggccccccaacagtagcccctcgcagtattaatttgcttctttgtgacaaattcagactgcgaaataaacgaaagcctttagccgaaggtccgaaaaaacaccttttcttcgctagaatagtgaaacattctgcattgtgggccccaccgcttattggagctttgtgtatatatacaaaagcttgcgctaagaatatttatcgcgctatctaac

SEQ ID NO: 15644 - DNA, 441 bp, Zea mays
  unsure (1)..(441): unsure at all n locations
agctggttatttagttcataatgatgaactaactaaaatatagtttagaaagagtttccattntgcaaagcaattnttcataagcttcttgagagctagctaactttactgaaagcggaagaaagttcacgcgatatcacttccattggccatcaggcatacatataggagagatacaatcgagggagagattacaggagagattgattgcatctgcctaatctagacttgccaattgcgctgacaacggcagcgcgtgatgcgcgggcgtccgtgcgcgtgggacgtgcccgtatatgtctaacactcccccgcagtcaaaacggtagatggtcgaacgttgagactggagcgaaattccatgaagatggatgtcggtagccctttcgtgaagatgtcngcatactgtgacgaggttggcacatgaaaaacacggacatg

SEQ ID NO: 15645 - DNA, 486 bp, Zea mays
  unsure (1)..(486): unsure at all n locations
agcttgtgttagcatgcanaanaaagcttgtgttttctcatacacctcagatttgttggcctgcttgtttgtgtttacctcatacacctcagatctgatgccacgcaaaactagatttacttgccagtagccttcacctgcttctgtatggtagaactaatctagttttacatggatcatttgatgcacctcagtagccggattcaatatattagaaattagaatgtgctcttcacctacttctgtatggtagacatttagactaacatgttgcagtgtgctctatcttgattcatgagctgtttgaatcctcctgtgttcagatgtttaactgttctagctgtaataaaacannaacaatttttttgcatcctcctgtgttcagatgtttcttcaggaatttgtaggcactattatactgctctagctcgtaaatatatatctgcttgtaactacttgtaagtaaatgcttaactgaatttgcat

SEQ ID NO: 15646 - DNA, 437 bp, Zea mays
  unsure (1)..(437): unsure at all n locations
agcttgaatatactntaactcctaggattctccttttatttatttcattaaatgaataaatcaacatatactttagtcctatattctaagtgtaaaattaaagtatacagattacagttggtcatattttatttgaacagagaataattttgtgaacattntgcaatttaaaccactaaatttggagttcatatgaaaaagatatganaataaacaagttttgaagtttgaaatgtgaaattagggctaaatctgtgaataaataaaagtacagggggttaattaaaacaaaccaaggggctcttaagcaaaactcacacgcgaaggggtatggggtaatctcggccatcggattagagatcagcggcccagattagatcgcgcgggcatgggagcgcggacacagctgacaaatggngccaggacgtcagcgagct

SEQ ID NO: 15647 - DNA, 476 bp, Zea mays
  unsure (1)..(476): unsure at all n locations
agcttcagcaggatgactgccaaagtcctccactatcaaatcggcgagaatatgctgacatatgttgatgatatcatagtcaaaagcacgaagcaagaaaatcacattgctggtttgcaagaaatatttgctaatttcataagggctggtctcaagttgaatccagaaaaatgtgtcgtcggagtgaagaagggaaaatttcttggttggttggtatcaacaaagggcatcgaagccaacccaagcaagatagagaccatacttcggatggagccaccaaagtcacaaaaaggtgcctagaggttgactggaaggctggcatcaataaatagattcatttcaagatcagcagagaggaacttgctattcttcgaagtactaaagtcagccgaaggcttccaatggngaccaactcaacananagccttcgaagaactgaagcagtattttgataaataacaacctaaccccacctt

SEQ ID NO: 15648 - DNA, 278 bp, Zea mays
  unsure (1)..(278): unsure at all n locations
agcttaatgcgcgcaagatattgtctcattatgtttagggcaagggctcccatggttcaggatagagggggttacattntatatcctgcgaactctcatgagcataagagtaggaaaatctatgctagaaaacctcacactatttctcaccatgcgttcttgtataaaaatggtgcctctaagtgtatgcataccactcatgtacaaatgcctaggaaaagaatcctactacatcaaatcagcgtaacgttgcttttcaaactttagacgcttcctat

SEQ ID NO: 15649 - DNA, 279 bp, Zea mays
  unsure (1)..(279): unsure at all n locations
aagctgcaccatgaatattggccttttttattttgaaagaatgggctagtggcataccgacttcagttacccgaaactttgtctgctgtgcataatgtgttccacgtgtcacaattaaagaagtgtcttcgggttcccgatcgaaccattaaagtgacagatgtttgtcttgaaccagacttgacatattccgaacatcccattcgagtcttggattagaaggacaggattacccgaagaanaactctcaagttttacaagatacagtggaaccaacat

SEQ ID NO: 15650 - DNA, 473 bp, Zea mays
  unsure (1)..(473): unsure at all n locations
tggatctctgagtcacctgcggcatgcaagcttgaaaatacctagacacagtccgaaggatcgaagctttcttcgaaggattttctgttaagaatatccctcgagggcaaaatgaacatgctgatttgttagccaggtctgcagcacaggggctgccgctaccttcggatgtattcttcgaaacaataaaggcaccttcagtagagttacttgaaagagcagttcttactatttctcctgtgtacagtgaagattggagaactgaaataatttcttaccttcagggcaacttcctatcagatgacgaagcttataataaaagaatagaggcaagagctcgtccgtatatcattatagaaggggagttatacaagcatggagtntgtgccccgctgctcaagtgcttgtctagagccgaaggtatagaagtgatgaaggagatacatgcaggcctttgtggatcccacatcgga

SEQ ID NO: 15651 - DNA, 488 bp, Zea mays
  unsure (1)..(488): unsure at all n locations
ttaagtcacctgaggcatgcaagcttataccatatgcccctttctttgatgggngcataggatccttagatggcatacacattccagctcacgtatgtcatgagtcgaggcttgaacacataaatagaaaagggtggcctagttataatgtattaagtatagtggacatggatatgcagttcacttttgtaggtgctacgttgtctggttcttgccatgacatggcagtgctcaagagttgtatgggagaagcgaactatccacacccaccagcaggtatggtggcatgcatgttatgttggcgccattgcatacattgtattcatgcattacgatctagtaaatctttttctgggtttatttgtttgtgtacaaggaggtattatctagtggatgttggttactcaattcacgaaggttacttgccaccatattggaatcagagacatcacttatgagaatttaatcaaatatgagtagagactatg

SEQ ID NO: 15652 - DNA, 257 bp, Zea mays
  unsure (1)..(257): unsure at all n locations
agcttccacgtgttcgacgcgagctgacatccggtggcgctctcanagcacgcccgtgcgcgaacccccgcgcgcccgcgggcgcccgtgaccacgcccgcgccacggctacaaagccccccccggtgctcggctgccttcccccgtgcctcctccgtacctcgcctgacttacccgacccagccattagctccggcgacactcccgcgacccgccggtgccgcccgagagcaaccaccgtgaccagccccttttcc

SEQ ID NO: 15653 - DNA, 439 bp, Zea mays
  unsure (1)..(439): unsure at all n locations
atccttgagtcacctgcggcatgcaagcttaccanaatcaccctacctaagcatgatgcccctgtgacagatggagtgattgaggagcctatgagagcccctccttagaaacaagtgtggattccgaaaccaaatcatctcaagaacacacttgatacccttcccgacatctctagtgatccccttcctagagtccctcagccatccaaaaagaaagctcccttgaaagtcccctttgtccaggaacaagatctagatgtcacctagaggggggtgaataggcgaataaaaaatatcactttaaaactagagtttcttacactactcgaatactggatcgcagaggaatgaaagacacttcgagtagatcacagcagaaattaagttcctgtctcaaaataccctgcacttcaaagacaccttgtaccatagataagta

SEQ ID NO: 15654 - DNA, 484 bp, Zea mays
  unsure (1)..(484): unsure at all n locations
cacctgcggcatgcaagcttagtatgatgattaaaaccctcggttaaaatttaacattctttggacattatntgatcccaaacccaaaaccctagcttcttaaggtaggatttgcctaaccctaatagaatactaacttaggaaatcctagtgactcaggtgaactgttaaggaaagttatattcaagacacaacttggtgtgttctattgtatttgcataattcatagcatcacatgagcattcatgtatatgtattgttatgtatagaaaacgaagaagaagcgatagtcgaagaanaaactgccccacaagctgaaattccacctgtcgggaacaatttctactntgacatttgtggaacagatcctgagtctcctacaacacaaagcaagccctggtgcatttacccttccttgttatttcaaactctntataactcgaaatgatgcattangtgacanngagtgcgggataaacaagtg

SEQ ID NO: 15655 - DNA, 486 bp, Zea mays
  unsure (1)..(486): unsure at all n locations
agctntatcatcagcatattgttatntatatatttttctattaggnnnaancgaaatctaatctcgacaaccaaacagtcattcaaaatatctgtatcaggatcgaaataaaactggtgggtgtgccttcaatgattgaatattggtagtaataactttatttgaattactactactaatttctgagcttggaagaacaataccgtgatagtgggaagatgcaagtgtgcaggtctggtgctgaaacctgaaagccttgtcgcatcaatgacaaatgtcgcccaaagtcgatttagaggatgctatgttggtgtaattacttcttcataccttataatattgtgtgaaattacttcttcataccgctttgtgtagttactgtaaaaaaattactacttgtcaagcttgcgatctgtgaccgtgttatactcctaaacaacacttattcgttatcctcttaanacagcacttattcgtgatcaaagt

SEQ ID NO: 15656 - DNA, 469 bp, Zea mays
  unsure (1)..(469): unsure at all n locations
agcttcgggaaatacagttgtatcagacttgctatataagagatttctttctttacgaagcatgaaaataagggaaggtgttttttcgccaaaggctaaaaaacggtatgtgtgtaaatttcacgcatcgtaaagaaatatactacaataatttacacgtctcgtcaattgttccatacaccaaatgttacaaagtatttttacaataaaagttgcaagtattattacaacaaagtctactcttctctaaggatcttttatgcggcttcgttcaataatttgtcgacaacttcgtcgataataagaattgcaaggctcataacgtctagtgcttccttcatctccggatcagccaggggatggtacggctccggcagcggtgatagctcagcttgtatagataaactattagttcgaagccacanaccaagtcccaaggtaaaattaaaaaacaatacctatgtgtctt

SEQ ID NO: 15657 - DNA, 494 bp, Zea mays
  unsure (1)..(494): unsure at all n locations
agcttatgaagatttttcatcccaacatgggctagtcggcggtgccagagccaacccatgttagtcttagcaattaagcatgtgtcgagttcagctctatcaaaatctactaagtatagctgaccctctaacacacccttaaatgctattgaatcatcacttcttctaaagacagtgacacctacatcagtaaagagacagntgtagcccattttgcataattgagatacagaaagcaaattgtaatctaatgaatctacaagaaaaacattggaaatagaatggtcaggtgatatagcaattntacccaatcctttgaccaaaccttgatttccatccccgaatgtggtagctcgttggggatcttggtttttctcgtaggaggagaacattntcttctncccagtcatgtggttggtgcacccgctatcgatgatccaactngagcccncggatgcataaacctacaaaacaagtttagttctttgaattag

SEQ ID NO: 15658 - DNA, 481 bp, Zea mays
  unsure (1)..(481): unsure at all n locations
agcttaaagccatggtaagtagcataggccaataatatacgaattgactcaagcctagctacgggtgcataggtttcaccgaaatccaaaccttcgacttgcgagtatcctttggccacaagtcgagctttgttccttgtcaccacaccatgctcatcttgcttgttgcggaagacccatttggtccctacaacattntggttaggacgtggaactaaatgccatacctcattcctcgtgaagttgttgagctcctcttgcatcgccaccacccaatccgaatcttgaagtgcttcctctaccctgtgtggctcaatagaggaaacaaaagagtaatgctcacaaaaatgtgcaacacgagatctagtacttacccncttatgaatgtcgccgaggatggtgtcgacggggtgatctcgttggattgcttggtggactcttgngtgtggcggccttggtcttcatcctnctttgtctgata

SEQ ID NO: 15659 - DNA, 480 bp, Zea mays
  unsure (1)..(480): unsure at all n locations
agcttagctgtgtcaggtctgaatcgactactgttgcccacggaccgacccggcacgacacgacttatatcgtgccgggcctgatccggttcctttcgtatcggaccaagtcgtgtccgaaccgggctggctcagcatgaacgtttggacatgtatagcttgcacatcatctgctgatggataatcagtgtgtagtgtgtagaagaagtttcacagacgcatgaacggtaaataaacgttctaatggtattccattgtagtgcgaaatcatgtgaatctttagccacaaaatctgtggagatatgctcactagtatantccaagtttcaagttgagcaatccacacccacacataanagaatagtacggcatttgatggatacttataaactcagctcatnccanactctccatttccaggcccccaatccaaccatttacgtacaatacatacaaaaacaacgtcccagtctccaaaat

SEQ ID NO: 15660 - DNA, 371 bp, Zea mays
  unsure (1)..(371): unsure at all n locations
agctntaaatggattttagaaaccttgggtgaagttagacatganttggacaatgtttgatacctaaatcccaaaaccctaatcttctaagtagtgcgtgcgctatgaactaaaatactaactccaaaaaccctagtttcctggagtaccgtgaaggaaaattgtattcaagatacaacttgataaactttttctattactgcattttcataagcattacataagcattcatggttatatatgattatatagagaacgaagaagaagtagtggttgaagaagaagttgcaccaccaccacctgaagacccacctgccgggagctgcttttatttcgatatttatggagcagagcctgactcttctacaact

SEQ ID NO: 15661 - DNA, 224 bp, Zea mays
ggaccttaagcactgggctgcagcttgtaccttgcggggtggcgtccctaccttgcaaatatctggggtctcctctttccctccacaaactgaccaaacaacagtttctgccctttattgagaaaattgcagatcttctcccaagctggaaggcagagctgttgaacaaagctggcagaagaattctagtgcagcatgtcctcactagtatggcaatttatact

SEQ ID NO: 15662 - DNA, 481 bp, Zea mays
  unsure (1)..(481): unsure at all n locations
agctngctctcgacttacatgagggntntgagggatgtcatatatagagaggtcaaaatcagtcagaacgatgtggccatcctcttggagcaaaatgttttctggctttaggtcacggtatattattcctacaatggaaacactgtataatcaccaaccatttatgtcaccagagaaatttaaacacattaaacacattacttctaaggaatatgaacacatggcacagatgatcttacttaaactatatntaatggttactcggctatntataantatttaatttgtatatatttgttagtaattaaacactacagcctggctagctattattaaccctgtngtgttagagaaatcatcaagaatagtgaaattttctagtctcagtaacaactgcaatctgcatactacaatngangaagacacttgtctagaaactaaatttataaaataagatcagtaccaaggcaatggagatact

SEQ ID NO: 15663 - DNA, 365 bp, Zea mays
  unsure (1)..(365): unsure at all n locations
agcttccactgcanatctacaagaactcttatgtctcacaagcctgccattggtcttcaaatggtccgccattgactttcaattggcatctttgagactacatttggtatcatttacatgtcttctccaacatttggttagactatatttcatatcttatacttcccttggtgctatacatgcataagttgttaactcatatctattacctatgcataagggaagtaagtctaatcaaatcatgtcttgcacctctattttttacatgctttttcctaagtagaagatctctatcagggggaatatttcttcgtctctaaagggggagaaaattctttccaaatagagaacactcatttatgggg

SEQ ID NO: 15664 - DNA, 522 bp, Zea mays
  unsure (1)..(522): unsure at all n locations
ggatccttaagtcacctgcggcatgcaagcttctttcatcctcctcgacctcatttgtgcttccgctatcattttcattagccatacaacatatgtgggaatcaaaattggaagacaaaccttttggagaggtggattcatcgtttggtctccatcgntcattntcttcttcttccttcaaagggttagtttcacaagaactaaaggaagtagaagcatcaaatgaactatcatgtttggacttatcaaacttaattttaattctagtccaaatatcatgcgtgtcatgaatagattcatcatatctcattatgaaggcacgataatcttctttgctaagagaattacttaagatgtcataagctagatagtttaagcgtatacatctttgatcttcctcggaagcgtttttcctatcataactagaaggtataatactcttgtctaacatttgntctaattgtgaatctacggttctaaaagcatntatcacactagtagaccatgaaacataattagaac

SEQ ID NO: 15665 - DNA, 475 bp, Zea mays
  unsure (1)..(475): unsure at all n locations
agcttctaaagggagaacacgtgataggtctaactaatgtttattntgaaaaagatagaccctgtgcagcttgtcaagcagggaaacaggtgggaggctctcatcacaccaagaatgtgatgacaacatcaagacccctggagctgctacatatggacctcttcggacccgtcgcctatctgagcataggaggaagtaagtatggtctagttatcattgatgacttttcccgcttcacttgggtgttctttttgcaggataagtctgaaacccaagggactctcaagcgcttcctaaggagagctcaaaatgagtttgagctcaaggtgaagaagataaggagcgacaacgggtctgaattcaagaaccttcaagtggaggagtttcttgaggaggaggggatcaagcacgagttcttcgtccctacacacctcacaaaatggtgtggagagaggaaaacaggacgctataatat

SEQ ID NO: 15666 - DNA, 467 bp, Zea mays
  unsure (1)..(467): unsure at all n locations
agctntatcaaatggacgtgaaaagtgcctttctttatggaccgatcaaggaagaggtctatgttgagcaacctcccggctttgaagatagtgagtaccctaaccatgtttataaactctctaaggcgctttatgggctcaagcaagccccaaaaacatggtatgaatgccttagagaattccttatagataatggctgtaaagtcggaaaggccgatcctactttattcactaaaactctcgaaaatgacttgtttgtatgccaaatttatgttgatgatattatatttgggtctactaacgagtctacatgntgaagaattagtacgattatgacacagaaattcgagatgtctatgatggcggagttgaagtatttcttatgatttcaagtaaaacaacttcaagagggcaccttcattagccaaacaaaatatactcaagacattgtaaacaagtttgggatg

SEQ ID NO: 15667 - DNA, 408 bp, Zea mays
  unsure (1)..(408): unsure at all n locations
agctngacgggatgagttgngtaggtatttggagtatgagttgattccaatcggaacagaaaaactttaatattcttgatttgtggaatgtggctggtacatgctatccaacattgagggaggtatcatgagatattnttgcaatcctagtgtcggtgtttcgagaccggggggtccctgngccgacgagtgagatgtcgccgcgtgccccagcccaaatgggtctgcgtgaggtctagcgcgaaggggggaagtgaggcggtcggaggcgggcgtgagagaggtggaaatctcgcggccttcgtgttcgtcccgcgcccaggtcgggtgcgcttgcagtagggggttacaagcgtccacgcgggagaagggagcgagcggctcacgcgagcgcctgtcccgtcctcg

SEQ ID NO: 15668 - DNA, 371 bp, Zea mays
  unsure (1)..(371): unsure at all n locations
agctntagtgattagtgagagagatttgttgtgtttctttgagctcttgcgctnggattgcttctttctttcattctttcttgcgaacaactcaattgtnaccgaggcaagagacaccaattgtgtggtggtccttgcagggaagtttgttcccgtttgattgagaagaagaagctcactcggtccgagggatcgtttgagagagggaaagggttgaaagagacccggtcattgtgaccacctcaacggggagtaggtttgcgagaaccgaacctcggtaaaaacaaatccacgtgtcacactctttattcgcttgcgatttgttttgcaccctctctctcggactcaattctatttctaacgctaacccg

SEQ ID NO: 15669 - DNA, 445 bp, Zea mays
  unsure (1)..(445): unsure at all n locations
agctntatgaatggtcacaaatttctagaagagttccattcacccaatttgttgtgaggagattgatctcaatcacatcctacacgccttccaaggttctcaaggttctttcccctgtcgctacgtaggtctccagctgcacacacgccccttacggaagatccatgttcaaccactaatcgaaaaagatcgaaaatcgacctgcaggatggaaaaggcatttgctaaactgtacgggtcgccttactctcgtctccttagtactcttgttcttgcctacataccacctctccatctacccccttgtggcctangctaggaaacgtatcgacaagatcagtcactccttcatttggaaaggtaaagcggaaacaaatggcggacactaccttgtaaagtggtcgctgattaacaacccanaaggcatangcggccttggaatcat

SEQ ID NO: 15670 - DNA, 458 bp, Zea mays
  unsure (1)..(458): unsure at all n locations
agcttaaaggatattattcaactaaagtaagatgtatgtgataagaggccaaggtatgaaaacttcctctccttcagttggtttagtattctatccttagtgggatgtaccatagtataggttaatttccttgcaatataaaatgttcaacagtgcatataactttgagatcaactatatgtgtgcactagtttaaaggaatttaatctatccttttgggtttcaagaatgatgattcattctccatccacatataaggattatcatttgtgaaaccctcccttggtnttctaatgctctcttttctaagtgtttcaataaaggtccttccaagtgttntcaagaatggattaaaatctatggatataagagtcttggntggttcaatcattgagtttcaatggatctcatatcaagtatgatcgaatcaagaaaagatgaaagaagttcaagatcac

SEQ ID NO: 15671 - DNA, 479 bp, Zea mays
  unsure (1)..(479): unsure at all n locations
agctntaacctgaatcatgcacatcagtatctgcttcttgcgctgatggggattaacagncgagtttaggagtggtaagggtacccctaattatggtacccgacatatacacatattgctttccccctctagctcgtgagctaaacgagtcggctcgagctcgtaaacgagccaaaccgattttatggatcngtggcttaacgagccgagccgaactggcttgatatccaaccataatctcaaatttctaattaattcctcatgattcaccattcgaaatgattgtgcgctactattccttggccaacaatttttttttatatccaccggttcccgaaccagtcatatgtgaagaccctacatctagagtgctaactcgataagtagtcccaacagctgtgttactggtaatttctgaaaataaaatagtaaataaaaaaaccagaaaatgcccgactataacgtcacacacacacaga

SEQ ID NO: 15672 - DNA, 450 bp, Zea mays
  unsure (1)..(450): unsure at all n locations
gatccttaagtcacctgcngcatgcaagcttctcctgaacgagtgctgcactcaccgctgtgtgcgtagctgccacatatagcaacagaggagcccctggcgttggtggagttagtgttgttaagtctatcaaatattgcttcaactcttcgaaggctctctgctgaactggtccccattgaaaaacttcggctgactttagcacttcgaaaaatggtaaatttctctctgctgatctagatatgaatctgttgagagatgccaatcttcctgttaatctttgagccccttctttgtacttggtggttccattcaaaggatagcttcaattntatttggattagcctcaatccctttttgtgaaattagacaaccaagaaatttccctttcttcactccgaagacacattnttctggattcaactntaaatcggccttgtctaaaatagc

SEQ ID NO: 15673 - DNA, 324 bp, Zea mays
  unsure (1)..(324): unsure at all n locations
agcttattgntnttctccaaggactccattntccttcaatgatactactacatataatagacttgaaaacaagtattagtctcaaagacttagattatagagtaacctctgaaagggaaatgtgcctttggaccatttctaagtattttggtgattgagtgcaaacacaagtgcttaaatgtgcccatggttgaacaaagtgcaaatcacaagtaaaggtatgtttctaagccttagtacattggttntgtgtactaatatcttgtctaagtgttagaaacaggaagaagaagaanagaaaagaagtggagagtggctgtgtac

SEQ ID NO: 15674 - DNA, 491 bp, Zea mays
  unsure (1)..(491): unsure at all n locations
agcttgaggaaggaggaaccgcaacaagggtcaaactccgttagaaagaagctcccaaggcaatcaacatgaacaaagaanaaggtaaagatccaattagtcatgttgtttgcactgatcatctctctatgttatccaagagcaaaaagagaagaggaaaaaggaggtgcttcaagtgcaatgagttaggccacctcattgcgtcttgtccatacaaagacaaggatgaagggatgaggagatgttntggatgcaattacaaggaccatatgatcactacatgtctgctcatgaagaatcaaacacgtgcaccctccaggatgaccctcactaagaaaaaagacaaacaacaagcgtcatgtcaggttgagcaacacttcagctacatgtgtggtgagcatggtcatctacctaaggtatgtaagaagggaagggntttaagcaagtaaattatctcaatgtattcgcttatgagacccanatatacactt

SEQ ID NO: 15675 - DNA, 416 bp, Zea mays
agcttcacgggctactggcggagctagccgaagcactggctcgacttgagggtggctggagtgggctggccacggtggccgaagctctggcggcaatggcgggcggaattgagctcgccggagctaaggaaaggtggctatccggtgagggtgagtgcggtgcgaaatgaggtgcgcccggggaggctttataagcgccggcgggcaccgctgaaggcgtgggcacgcggcggacttgaccggacgccggggtgagcgcgcgcgcgggttgggcgagctctggcgtgccgaccagggtcgaacacgtgtgcccgtgcgttctgcccaagttctggcacgtgtggtcgctcatccgagcctgctctcgccttggtcagtgcacaaaacctcttcttctcctatcagctaccattctt

SEQ ID NO: 15676 - DNA, 450 bp, Zea mays
  unsure (1)..(450): unsure at all n locations
agcttcgactgttgtttcaggagtgacttgttccttcttcggaggggtgcttgaagatntgatcgtttccatcacatctagcacattagccattctccttcttttcggagtcactgctggcacttttggattacttactgtttcaatgtttgccacaggactcaaaacttctgatgttttggagtcctcggttgcttcctttacctcttccattttttctgtgaatggcgcttcggccttctctttcgtttctgataacaaaatttttgattgctccaattttgtcttcgttggtatttcggctgtttctgtgacttctggcagcaaagttggctcggctggttnttcagcttcggtggccgaagaagtctctccggtaaactcangcaccgaagctggntcaatataacgcggtcgataagaagaaaccttatcttcttccttttcggt

SEQ ID NO: 15677 - DNA, 409 bp, Zea mays
agcttgtgacaagcacatagtgacacttgcgatactatgctatacatgatgctgctcatggagtccaagacgagtagctcgccactctgggagacctacctggagtaaggctcgatccccaacatgctgacagtgaataaccggctcatggagtacccatcctagtactgaaccattgacttgccctcgctcgctgctgcatgcaccccatgcagcatcatagaggaaaacacacatcgtgatcgatgaatgaactacacgacaaacagatggtaataatcacctatcgtgagggaggaatttagcgagagcaatcacagacgcttgacacagtcgacactgtgtaggataataacccgatcaccaccgctgtgatgggacgagacgagacacccatcaccataaatgc

SEQ ID NO: 15678 - DNA, 493 bp, Zea mays
  unsure (1)..(493): unsure at all n locations
agcttgtaaatatggtcaagaaataaatgatctatttaaacagcagtgtatgggtgatgcaatggtaagaaatggccgtattntgagaacttgtcgacgaccacaagaacacagtcggcgtggccagatttaggcaggcctgtgacgaaatccatagtgatggtgtgccaagctgctggtagaatttcaaggggctgcaacaggcctgggtagcgagagcggtctggtttgacttgttgaaaagtggtacacgttntgacaaaagaagcaacactggatttcataccaggccagaagaataactgtcggatacggcgaagagttactggtataccactatggcccccaacagccgtgtcatggaaagctgacacaatctgcgtatgaagggagggaactgccccatcatagatcttatccttgtaacgcagtaacccttgccgcanggaaaaatgtggtactgaatctgtgttaaccgacagagctgtcaaca

SEQ ID NO: 15679 - DNA, 462 bp, Zea mays
  unsure (1)..(462): unsure at all n locations
agcttatctcaacctgagaggaaagcttatcctattgggtgatgtgttagtttgagctctgccagtgtgatattcatatgcttcttacagtattatatgtgttgcatcatatgaactagtgtttccgctgcgatgaattattaattggcttctatagtgtaatagatagtcatgtggttaatggtgctttaagattgctttaaattggtatcttagtttacatcggtatcttaaaggtgaatagtggtaggttgatattcctgtgatatatccactaatttgaatggtgtttaactctgattatgtgcatttgtgtgttatagcatcatggtttgattcttgacacaatgcatcctaaaaagtgctaaggtgtagaaatgtttcgaattgctaagtatgtgcaaantggcgtctgaggcccaaatatgtttntgaagtagcacatattatggggagcattta

SEQ ID NO: 15680 - DNA, 435 bp, Zea mays
  unsure (1)..(435): unsure at all n locations
agcttcacatgtctcgtatgattcanaatcaaacgaagttaaaagcccatcagaatgaagcttcttcatgcgattctcacttatatgacccaaacgacagtgccacatgtaggtaggacttaaatcattaggccgaggccttttagcactaatattacagataggtgcatcatcaagatttaaaatgaataacccattcataatgggatgcaaagccacaaacatgccattcttagagatcacacaaccattgttttcactcgcaaatgaataaccatccttcatcaaacatgaaggagacataatgtttcgactcatactaggaactagataacaattatttaactccaaaataaatcctgatgggaggtggagttgcatcgtcccgacggtcaacgcagcaactcttgcattattgcctacccggaaatcaac

SEQ ID NO: 15681 - DNA, 350 bp, Zea mays
agcttcagacaaaatcttatgccaatgcttaggatgatcagatatcttctttttatcaggctaatcaatgtcctattactagactcggtatgtccattggcctgagcataatatggagatgaattgagtaacttaattctatataattcagcaaactcacatacctcctttgacataaaagaatccccttggtctgtagtcacagtccagggaatgctgaatctatgaataatatggtcagttatgaactcaattaccttcatgtgtgtcatgttcttcagagcaacgacttcagtccatttggtaaagtagtcagtggcaactaacacaagccaatgcccttttgatga

SEQ ID NO: 15682 - DNA, 398 bp, Zea mays
  unsure (1)..(398): unsure at all n locations
agcttngtgccttctatccgggtcaccatcactgtgaaatcgcagctccggccaggtgttcggcatggtcccgtcgtggaccaagaactgtgaagaaatagaattatggggggtttggcaattgtcagcgacacatagaaacagtgtgtgggttcttttctggtttttcaaattcctcggggcctttgcgcaaaatcgcatgggcgggcacgcgcgggcacgttttcgcctagacacgggccgacttgggctttgtttcagcccaacactgttcattattttcctttntccttttctgccagacttagggaatttatagaaaattcttngaaaatactaaaaatatgagaccaattntgccggactcctaaaattccctagtatttaatanaaatagt

SEQ ID NO: 15683 - DNA, 115 bp, Zea mays
  unsure (1)..(115): unsure at all n locations
agctntanngtatagaagcgacctacatcctatttatcttttatctaatatattttatttgcctgctacaccctacctcatgagcctcttgtgaaaataaattgttttggccagt

SEQ ID NO: 15684 - DNA, 442 bp, Zea mays
  unsure (1)..(442): unsure at all n locations
cggatccttgagtcacctgcggcatgcaagcttgtgaacagtacaaattcagaagggagaatgtcttttttgcagattagccgaagcccatgctcttatgtgaggacatagcagagcagaaagtgctgttgggctcccaattatcagaagaacaggaaaaaaccttgataaggtttttgttcaacaacaaagatgtttttgcatggtcaaccaatgatctttgcggagtcaacagggatgttattgaacactcgctcaatgtgacccatctttagacccagaaagcaaaggcttcggaaatgtctgaagacaaggccgaagagctcggatgaagtaaaagactctcagtgcaggagtatagagaagtaagtacccaaatggtagctacactgtatggaanaaaggcaatggaaatggcaatgtgatcgatttacagatctaa

SEQ ID NO: 15685 - DNA, 412 bp, Zea mays
  unsure (1)..(412): unsure at all n locations
atccttaagtcacctgcggcatgcaagcttcagctccatctatattatggattgcttnttagtctgttcagtttccctcggcccttctggcagcttcctgacttccatgaatagcaatgggtccttgatccgaaggtatcttcatgcaaaggtaagcaggatgaagaattgctttgaaagcattgagggtgccacgaccaataattgcattataagggtattccatgtcaacaatgtcaaacacaacttgctcagttctggtgttgttgatgaatccgaaggtcactggcatggtaatcttgcccagtgctacaatctgtcttcctccgaagccacagagagggtgtgtagcatcatgaatcttatcttctggctcttgcatttgtctgaaagccttagcaaatatgatatc

SEQ ID NO: 15686 - DNA, 443 bp, Zea mays
  unsure (1)..(443): unsure at all n locations
agcttgtgcaaagcccactcgaactgatcttcggtgaaactctacctcgctgcaacatgacacccgaaggtccaacacaacaagcaatgaatgaattcagaattattgcagagcatatcagcacaagggacctggttcaggagtttttggctttcaaagtttttcccagtttgaaagaatgggaaatgccgaagctacagggggaaaagaaagaaggtgaactngtacgtttaccttactatttcaagtttaaaaagtactttaaaacaccttgccgagagtggctagattcaattgaagtgatgtgcaatgaaatacttggtaattattccaaaacagaagatcaattgatgaccgcagccttcggcacccgtccgaagcgaaggtaaatcgagtgctggacgccttgaattttgaataccctgactatgaaaatctgaaca

SEQ ID NO: 15687 - DNA, 376 bp, Zea mays
atccttaagcacctgggctgcagcttcttgcggaaagtggttgccgagaagactcccgattgttgggagaccctgaaggtgaccatcacagcctctagcattggggggcaagcgcagacgggaagacagttgcaggaacccgtgctgtgcatcacggacagtccgccgtccagacgcggacggtgcgacgcttctccggacggtccggaggactcttgcggaccgtccgggcgtgcttatgacccccagcgaccacgtaccttttaaccacgacgacccgagatatgtacgtggaaaaccaatacatttaaagcagctggtcggctgatcaagcctggcccgactttcgatcaattgttgtctaaatacgtgaaaa

SEQ ID NO: 15688 - DNA, 484 bp, Zea mays
  unsure (1)..(484): unsure at all n locations
agcttcggaaaccccatacttctagccatctctctacagacggataattctttggtgtttgggaggcagtataagaaatcttcttcgttcgtcccattgaacactagtgcccccttcggatatttcaattctttggcatagtgattagcttcaaaaacttcttcttccgataacgttttccccgaagcatgtcgcacgatataatcgtatattttggaagatgcttcggnggcagcggtatcaatttcttcaaccaaagttggctctgacattttcattntttcggttgccttcgcaatttttgtttcttctgcttccaaaggtattaccttggttggttctgaaggcccggtttcaactccagtctgttgctntggagcttcagcaacggatacttcagcangcgcctcagaangttcagcagtcttctttggggtgtgctnggaagtnntaatgttccaaacattaacacataaccattctt

SEQ ID NO: 15689 - DNA, 486 bp, Zea mays
  unsure (1)..(486): unsure at all n locations
agcttatagtgaagtgctaaagatgaatgagatattcgtcgtgaactcaaaaaccatacaacggttgccaactctgtaaaacagttagttatctactacattggaaatgaacattaaatcgggagccaccaccaaaatacggtgtctccaaacaggagttggacttaaataatataaaatatataatggttgtgtcatgatattcggtgaactatggtattataaattgtagtttaaaaaaaacaatgttccgaagcagtcccttgtatgcattcgtcttgtttcataggatatgcggtgatgaaaaattccagtccaagtatttatctgactgtagagatgtcgagacggaccaggcttgccgggtggctcgaaacctagcacgggtttggtccggcacgaactcgacacgacacgtagtgaaatcgggcccgtgtggcctgtctggtntattttttctattttcatataatacatatatatatt

SEQ ID NO: 15690 - DNA, 441 bp, Zea mays
  unsure (1)..(441): unsure at all n locations
agcttagcaaaagaaatttctagaatctttaatattgagctcatgcctaagtctggtaaaagattgttcatcaagtggcttggtaaagatatcggctaattgttctttagtattaatgtaagaaatctcgatatcccccttttgttggtgatccctaagaaaatgataccgaatggctatgtgcttagtgcggctatgctcgacgggattgtcggcccatttgattgcactctcattatcacatagcaaagggactntggttaatttgtaaccgtagtcccgcagggtttgcctcatccaaagcaattgcgcgcaacaatgtcctgcggcaatgtactcggcttcggcggtggaaagagcgaccgaattttgcttctttgaagcccaagacaccaaggatcttcccaagaactggcaagtccccgatgtgctcttcctatt

SEQ ID NO: 15691 - DNA, 417 bp, Zea mays
  unsure (1)..(417): unsure at all n locations
agctggtttgtcgagtgttgtagtcctaacactcagtaaagaagctccctttgccgcgtgcctcctagcgcactgggcaaagaggcccaatgatgctccctttgccaactgccagataggcagacactcggcaaagaagctccctttactgagtgccagcttgcagctcaaggcacagaggctaccgtgtgggctaactgtagccttcttttgtgagcgctaggccagtaggcacttgacaaaggctccctctttaccgagtgccattgagtacacttggcaaagtctctatcaccatcgtcaagcactagatggcactcagcanagacttcgacaaatgcccgacaaaaagtactcgacaaagaagctattggccgtgtatagttcactaagtcctctataccgagagttacactc

SEQ ID NO: 15692 - DNA, 430 bp, Zea mays
  unsure (1)..(430): unsure at all n locations
agcttngtgttacaagaatgaaagtgggagcgctgttgtatttctgatcttatatgtggatgacatattattgattgggaatgacattcctatgctggagtccgtcaaggcttcactgaaaaagagtttttctatgaaggacttaggggaagcagcatatattttgggcataaggatctatagagataggtcgaagaggcttataggattaagtcaagatacgtacattgacaaggttttgaaacggttcaacatggaacagtccaagaaagggttcatacctatgtcacatggtaaacaccttagccagatgcaatgtcctgcaacggctaatgagcgggagcgcatgtgtaangaccatacgcctcagcaattggtcaatcatgtatccatgataagacaccccagatgttcatacctataagtctac

SEQ ID NO: 15693 - DNA, 348 bp, Zea mays
  unsure (1)..(348): unsure at all n locations
agcttgtggcgccctcgggcgtcttgtcgcagccgaagtaccaagtctcccacttggaagcctcggggccgaacccttcggccgtggtagcatcgcagggactgctgataccgcgccgagtgtagtaaggccacgtcccgagcctcttccagctggtccaacgaaatcttctcggtggtctgggtgctttggtcgtcgtaagcctttgtcctcggngaaccgtattctaagtccgtgggtaggatggcctcggccccatagactagaaagaacgacgagaaacccgtggctcggttcggcgtcgtccagagactccaaaccaccgagggtagctcttttatccaccac

SEQ ID NO: 15694 - DNA, 480 bp, Zea mays
  unsure (1)..(480): unsure at all n locations
agcttctaaagggagaacacattntaggactaacttatgtttatttngagaaagacaggatttgtagcgcttgccaggcagggaagcaagttggagcccatcatccacacaagaacatcatgacaacggacaggccactggagctcctacacatggatctattcggcccgatcgcttacataagcatcggcgggagtaagtactgtctagttaatgtggatgattattctcgcttcacttgggtattcttcttgcaggataaatctcaaacccaagagaccttanaaggattcttgagacgagctcaaaatgagttcgatttaaggatcaagaaaataagaagcgacaacgggacggagttcaagaactctcaaatcgaaggctttcttgaggaggagggaatcaagcatgagttctcttcttcctacacgcctcaacaaaatggtgtagtggagaggaagaatcgaactctattggaca

SEQ ID NO: 15695 - DNA, 330 bp, Zea mays
  unsure (1)..(330): unsure at all n locations
ctaaaattctaagagtataggtgttggctattntaaatactctataattccttanttggactaaaaatcataaaactatttttattaaatagtatagaattttaggagcctagcaaaattggttntgcatttttagcatttttctacaattttctaggaattctctaatcctgatagaaaaagaanaagganaaacatgaatagtattgggccgaaactggcccaagtcagcccatgcccaggcgaaaacacgcgcgcccgcgctcgcggtgccgactntgcacagaagaccctagctttttaaacaacccgaaagagtctgcgacacta

SEQ ID NO: 15696 - DNA, 447 bp, Zea mays
  unsure (1)..(447): unsure at all n locations
tggacgtgaaaagtgccttcctttatggatcaatcaaggaagaggtctatgttgagcaacctcccggctttgaagacagtgagtatactaaccatgtctataagctctctaaggcgctttatgggctgaagcaagccccaagagcatggtatgaatgccttatagactttctcattgctaatggcttcaaagtcggaaaagccgatcctacactctttactaaaactcttgaaaatgacttgtttgtatgccaaatttatgttgatgatattatatttgggtctactaacgagtctacatgtgaagagtttagtaggattatgacacagaaattcgagatgtctatgatgggggagttgaagtatttcttatgattccaaagtaagcaacttcaggagggaccttcattagccaaacgaagtacactcaagacatnctaaagcaagt

SEQ ID NO: 15697 - DNA, 253 bp, Zea mays
  unsure (1)..(253): unsure at all n locations
agctngatccaatatgatgtatcccatgacatacatcccaactttgccaagtctccaaattttttgacgtccttccgactactcacttctctttcgggatccaaaccttcttggtgcttttcatgggtgaaattatttcttttggcatccagatgtgtttggcccctttccctttgttggcttgcttggtggccttgattgctatcacctttctattctttttctttttgatcaaatatggtgtaactacctt

SEQ ID NO: 15698 - DNA, 420 bp, Zea mays
  unsure (1)..(420): unsure at all n locations
ttaagtcacctgaggcatgcaagctntccatgttgtgcttgaacattccaatccgtgcccgtatctgaccgtggtgaccgtcacaagttggtgttcttctgcagtccgaatccaccatgttcaaatccttttccctttcggtcttctccctgattcctaagcaaaacaagagtgcacgggtctccatggtctaaatatgatggacatgaactcaagagtgtaatcacctgatgggtgagttgacgagcacgagcgcgagtaatgggaccaagaaatggtacttgtattggtatagatgcatcagtagtgtggatgtcttcatcagctatgctcgggcgaggcgtgatcgagtcgctcgtacggactgatccctgacttaatcgcacccatcangcctctgcagctttatgctgatggggg

SEQ ID NO: 15699 - DNA, 489 bp, Zea mays
  unsure (1)..(489): unsure at all n locations
agcttgccccatggcaagacgcgccgctcatgctctccgctcaagggcgccttgtgcggaggccagccaaccggcctggcgcgccgcgacaccagctgcagaagctagttccgtcttgagggccttcctggggggcagactagttgagccctgcctccgcttgctgaaagaaagagagaagacaagatcaagacacacggagaaaaaaccaaagcagaggtatcctcggatacttacccgctccagaccagggccaatcgtgcctgcggngaggacccccgggcctcagccctcgcaggcgctgccgagggtagccccgctaccgactccggcgctgcctccacctcgggcgcccgaggcgccgaaggggcggcccgcccaggcgtcgtcacgacggccagaggaccaacttcctatgcagccggcacgggcgcttgctctttggagacatgcngatcgcgctgacttctcggagtcaccttaactacc

SEQ ID NO: 15700 - DNA, 437 bp, Zea mays
  unsure (1)..(437): unsure at all n locations
agcttgtgagcaatacaagttcagaagggagaaagctgcttcggccgatcagccgaagcccatgctcctatgcgaagacatagcagagcagaacatgctgttgggatctcaactgtccgaggaacaggagaaaaccttgataaagtttctgttcaacaacaaagatgtttttgcatggtcagctaatgatctttgcggagttaacagggatgctattgaacactcgctcaatgttgatccatccttcagacccagaaagcagaggcttcggaagatgtctgatgacaaggccgaaggtgctcggaatgaagtgaanagactccttagtgccagagttatcagagaggtaaaatacccagaatggctggctaacactgttatggtaaagaaggccaatggtaaatggaggatgtgtatcgattttactgatctcaata

SEQ ID NO: 15701 - DNA, 376 bp, Zea mays
  unsure (1)..(376): unsure at all n locations
ccatgctcttgtgtgaggatataacaaaacagaaggtgctcttgggatctcaactgttcgaagaacaggagaaaaccttgattaggtttttgttcaacaacaaaaatgtttttgcttggtcagctaatgatctttgcggagttaacagggatgttattgagcactcgcttcaatgtgatccatccttcagacccagaaagcagaggcttcngctgatgtctgatgacaaggccgaaggtgctcggaatgaagtgaaaagactcctcagtgccggagttatcagagaggtaaatacccagaatggctggctaacactcgtatggtaaagaaggccaatggtaaatggaggatgtgtattgattgtactgatctcaat

SEQ ID NO: 15702 - DNA, 366 bp, Zea mays
  unsure (1)..(366): unsure at all n locations
agcttttaccgatcaccaattgggagttatgtgatgaatgggtagaggtgaacattntctacgctatttaagcataatttaatttatgatgaaatggttgactaaaagaaatctaagaagttagtctgtgtaacaaccaaaggtttgctacagtgactcttatgccagatttggttaggggcattgttcacatgatccatgcataatgcatataagtaatgaacttttttttattactgggagaatcagatgaacattaactgcagaacctaggtcacagccaaaattttgttctgtaccactttcttattcatgttccagcttctaatcagaatagaacttgcaatntaagtctggtttgactca

SEQ ID NO: 15703 - DNA, 429 bp, Zea mays
  unsure (1)..(429): unsure at all n locations
agctngccagaagttntctcctcgctcgagcaactcttcgcagctcaccaagctgatcgcccacacatggccacttcaacgctgggggatggatattgtcgggccactacctatggctcaagggaacttcaagttcaccttcgtcgccgtcgaatacttcaccaagtggatcgaggccaggacagtaaccacaataacgttgaagaccgcccagaagttcttctggcanaacattgtttgttgattcggagtcccgtccgagctcacagttgacaacggcaaacagttcgacagccaggacttcagggacttctgcctctccatcggcaccaagcctgccttcgcctcggtataccacccgcaatccaacgacatcatcgagcgtgccaatggcaagaatttcactgccatcaaaaaaagagttctcga

SEQ ID NO: 15704 - DNA, 357 bp, Zea mays
  unsure (1)..(357): unsure at all n locations
agctctgatacacggactaaacatcgctatatcactgggtgtcaagagactgatggtgtacggagattctctggtagtcatcagtcagataaacaaggaatgggattgttcaagtgattcaatgggaagatactgcgccgccgtccgaaagctagaagataaattcgaaggtctggagtttcatcatatagaaagagatcggaacacggcggttgatgtactgtccaagcttggatccggtcggactcaagtcccgcccggngtcttcgtgcaagaaattctccagccgagcatctcgacggatcaaatagaagagtgcattatcatagatcaacccgagtcagactctgatgactg

SEQ ID NO: 15705 - DNA, 472 bp, Zea mays
  unsure (1)..(472): unsure at all n locations
agcttgccaaaaatgttttgaagaactaaaggaaaagctaaccacaacaccagttttggtaatgccagatattcacaaagggattgatctatactgtgatgcatcgcatctaggtcttagatgtgtgttaatgaaggaagggcaggtaatagcttatgcctcaaggaaattgcgaaggcatgaaaagaattacccaacacatgatttggaantaactactctagtacatgctttgaagaattggaggcactatatgattggaaataagtgcaaaatcttcaccgatcacaaaagtttgaaatacatattcacacacaaagaactcaacctaagacaacgaagatggcttgagttaataaaagattatgaattggatatgcaatatcacccgagaaaagcanatgtcgtggcagacgcttcgagtcgaaaggtcaagtaacattattatacctattgatgcacaagaatatgt

SEQ ID NO: 15706 - DNA, 473 bp, Zea mays
agcttcaagagtaatgaatccacaaagaactcgatgtagtaccaaaactcgatgttagcacatggtaatatagtttcaatttcaacacatgtgcacatgtgaggttggtatgatttcaaattagttaacacaacctcatgagccatttctaacatgatatgtgaatccataaatttattatgagagcacacaagcatatcatgtttttcttgcaaagctagattttcaatatttagcctttctatcgtgttcttgaacataacatttttattttctaattgagcaatatatgatgaatgattaacagctttaatttgctcaattgaaatgtcttcatacctttggaccaaatcatcatgagagcactttagcttctcatgctctttggtcaacttctctaagtcttcaatttttctgatgaggaagtcttcttgcttatgaagcatttcttttttgtcttccgctcttttcat

SEQ ID NO: 15707 - DNA, 419 bp, Zea mays
  unsure (1)..(419): unsure at all n locations
agcttatcaaaattcaaggactcatttttacagaatagcttacaagtagnggatccttatgccaaacttttacttcacaagttaagtgcttttcctgaatcttgatttgcctaatttagagcattcacttgtcctacactagcttcattntagcatctttagtttcacatgttatctacgatgaggtcgaagatctagtcttcatatccaagaagtacggcgatccgaatcaattaatacctagctggggatctccaaccacacgacatatgtagcacttaaccctttcgtatatcaactcgcacccgagtttcccaagtccagaatgggtccccgccaaccgagagctcagtaccccaccatccagcctcttgccaggtggatacacgatactctcgccatctcttcacttccattat

SEQ ID NO: 15708 - DNA, 416 bp, Zea mays
  unsure (1)..(416): unsure at all n locations
agcttcggnaattacaacttcattntcctcangggcaggtgtggcgttgtctccaccaactctcatgatagatgtatctcgaaagtaccttcctctcatgttgtcaagatgactgtttaattgttgattttccaaagattgtatggcttggccgccagggccgatcttcagaatcttcgcctccactttctatatcataactgtcgctgtcaccagtatcttcagataaacctttcagtatctctttagtaatcttctctgtgttggtctttgccattgattcaacaaatacagcaatataaggatccacaaccttcttctcctcgaacagcttcgtctcttcagtctgttttgtctccgcaacaaccttattttcctgggacatcttttcacgagacatgaaaaaatacgtcttt

SEQ ID NO: 15709 - DNA, 365 bp, Zea mays
  unsure (1)..(365): unsure at all n locations
atgcaagcttcgactcattgttcctcagcatcgtcatcctgtacatattaaaacggtatgagagaagtgcagagttcaagaagaaggaaagtaacaggcacaaatttcttaccggcttaaggtggcttcgagcttcgtcgccagccattnttagcccgccttttacccaaatttgagttataaatctatttcctatactccgagctaggctggggatatcaattaaatctgtcggtgataaaactaaaattggtctgttgacaatttttccatgttcacagccagattttatgaaggcaacagctgtgccccgagaagctagcagagcgcagaaatcagcgtgtccagctataacttcatcgagt

SEQ ID NO: 15710 - DNA, 423 bp, Zea mays
  unsure (1)..(423): unsure at all n locations
agcttcaatagaccagctagacccactccgtcgtgtttcagttagcagagtcagagctcctttcaggctccctcggttgcaagcaaccaaccgccagcaaatgcctgttggcactgcggagactccagtcacttcaagaacaactgcccccagttgaaggcatcaggacctgcttactccaactcggtgaatggccccaagaataccttagcacccgcccccaggcaccctcctccatcagccagcagaacaagacccagtatcaaggaagggcatgagtaaaccacgtcgatgctcatgaggctcagaaagctccaggagtagtgctcggtgagttccttggtgaatntactcccgctactgtactttntgattcaagagcatcctattcttttatagccactagntttgtggaaaagcatg

SEQ ID NO: 15711 - DNA, 483 bp, Zea mays
  unsure (1)..(483): unsure at all n locations
agctngatgtttagaatgacatcagcttctccgaaatctttcatttcgaaattgctcgatagaagcttttaacttcctcaatcacattgagatttgatccaaagatcaagatgccatcaacataaaggcacagcataacaaactcacccccaccatactgataatacacacatgtgtcagattcatatatagtaaaaccagtagttgtaagtgtattatcaaacttttcatgccatttcttaggtgcttgttttaggccatacaatgattntatcaacctgcaaaccttgttctcttgaccatccataatgaacccttctggctaatccatgtagatctcctcatccaactctccatttaggaaagttgtcttaacatccatctgatgaatgataagaccataagaggctgccacggctattaatgtgcgaatggtagtcaatcgagctactggtgagtaggtatcaaagaaatcttcactca

SEQ ID NO: 15712 - DNA, 482 bp, Zea mays
  unsure (1)..(482): unsure at all n locations
agcttctaaagggagaacacattntaggattaacttatgttcattttgagaaagacagggattgtagcgcatgccaagcaggaaagcaagttggtgctcatcatccacacaagaacatcatgacgactgacaagccactggaactcctacacatggatctattcggcccgattgcttacataagcatcagcgggagtaagtactggctaggtatggtggatgattactctcgcttcacttgggttttctttttgcaggataaatctcatacccaagacaccttaaaaggattcttgagacaggctcaaaacgagttcggcttaaggatcaagaaaattagaagcgacaacgggacggagttcaagaactcacaaatcgaaggtttccttgaggaggagggcatcaagcatgagttctcttctccctacacgccacaacanaatggtgtagtggagaggaanaatagaactctattggacatg

SEQ ID NO: 15713 - DNA, 417 bp, Zea mays
  unsure (1)..(417): unsure at all n locations
agctngcactctggtggactactttcaggccaagttgtgggagtgggttgaatcacttcagatagacgccagcgagacgttttccatctctgttcttgtaccggaacgggaaccacaacacatgatggcggacgccatcgctcttgcacaagaagctctgatatttccatccgcgggtgggttcctcgataaccttggctacaaccgtgctgtcttgatcgacatcccagcagtacacctggatatgttgccgctaggacccaacgaggctctatactacatcctgcgccagctcaaactcgagtctcagtcccatccgcaggataaatcaggccaaggggaggatgtcaatgatggtcttgattcctggcaaagttactgcagaanactgggcatctaaccatgaaaanagctcat

SEQ ID NO: 15714 - DNA, 388 bp, Zea mays
  unsure (1)..(388): unsure at all n locations
agcttaaagccatggtaagtagcatagacaagtaatatgcgaattgattcaagcctagctacgggtgcataggtttcaccgaaatccagaccttcgacttgtgaatatcccttggccacaagtcgggctttgttccttgtcaccacaccatgctcgacttgcttgttgcggaagacccacttggttcctacaacattttgattaggacgtggaaccaaatgccatacctccttcctagtgaagttgttgagctcctcttgcatcgccaccacccaatccgaatcttgtagtgcttcctctaccctgtgtggctcaatagaggaaacaaaagagtaatgctcacaaaaatgtgcaacacgagatctagtggttacccncttatgaatgt

SEQ ID NO: 15715 - DNA, 302 bp, Zea mays
agcttatgaagattcttcattccaacatgggctattcggcggtgccagagccaacccatgttagtcttagcaattaagcaagtgtcgagttcagctctatcaaaatctactaagtatagctgaccctctaacactcccttaaatgctattgaatcatcacttcttctaaagacagtgacacctacatcagtgaatagacaggtgtagcccaatttgacataatgggatacggaaagcaaattgtaatctaatgaatcaacaagaaaaacattggaaatagtatggtcaggtgatatagcaat

SEQ ID NO: 15716 - DNA, 388 bp, Zea mays
  unsure (1)..(388): unsure at all n locations
agcttgaagccatggtaagtagcataggctaataatatgcgaattgactcaagcctagctacgggtgcataggtttcaccaaaatccaaaccttcgacttgtgaataccccttggccacgagtcgagctttgttccttgtcaccacaccatgctcgtcttgtttggtgcggaagacccatttggttcctacaacattntggttaggacgtggaactaaatgccatacctcatttctagtgaagttgttgagctcctcttgcattgccaccacccaatccgaatcttgtagtgcttcctctaccctgtgtggctcaatagaggaaacaaaagagtaatgctcacagaaatgtgcaactcgagatctagtagttacccncttatgaatgt

SEQ ID NO: 15717 - DNA, 435 bp, Zea mays
  unsure (1)..(435): unsure at all n locations
gctgtggagattcttcattccgacatgtgctagtcagcgatgccagatccagcccatgttagtcttagcaattaagcaagtgtcgagttcagctctatcaaaatctactaagtatagctgaccctctaacactcccttaaatgctattgaatcatcacttcgtctaaagacagtaacacctatatccgtaaaaagacagttgtagcccattttacataattgagaaactgaaagcaagttataatctaaggaatctacaagaaaaacattggaaatggaatggtcaggagatatatctattntacccaatcctttgaccaaaccttgggttctatccccgaatgtgatagcttggtggggatcttggtttttctcataggagggagaacatcttcttctccctggcatgtgggttgtgcacccgctatcgatgat

SEQ ID NO: 15718 - DNA, 227 bp, Zea mays
  unsure (1)..(227): unsure at all n locations
ggatccttaagtcacctgcggcatgcaagctttngccanatcctcaagcaaaggagggagaatgactactagcctcgctccaagaaagtttgctacaagtgttgtaagcccggtcatttcatagctaaatgtccattaccaagtgatagtgacaggggcgacgacaagaaggggagaatgaatgagaagatgaagcattacaagaagaagggcggcgatgcccatgt

SEQ ID NO: 15719 - DNA, 479 bp, Zea mays
  unsure (1)..(479): unsure at all n locations
gatctctaagtcacctgcngcatgcaagcttcnggaggaagtgtcctcctttaaaaacctttttactgttaatcgggaggggtttttgcctcccacggttgtaataatattacttcagcactcttatattttactggtctgtaataataatactctttccatactttaatataaaataagttgttgtaactgctttcgcatattcgtacctccgacatgttgtaatatctgtgtggcgggtgaaacgctcttgggcaaggaaagaattcagatatcgaacttgtcaaatgatcaggtgcacctgcagggttgtccgaggtccgatggacaagggcaactgtatgtgggcccaatgacttgngaggttctgtcacagctggtatcggagcgaagccatccctgcagatgttatgaagcattnntcaaaagaattttcanagacttatctaagaagaattcctttcttcttatctaactac

SEQ ID NO: 15720 - DNA, 387 bp, Zea mays
agcttaaagccatggtaagtagcataggccaataatatgcgtattgactcaagcctagctacgggtgcataggtttcaccgaaatccaaaccttcgacttgtgaataccctttggctacgagtcgagctttgttccttgtcaccacaccatgctcgtcttgcttgttgcggaagacccatttggttcctacaacattttgggtaggacgtggaactaagtgccatacctcgttccttgtgaaattgttgagcttctcttgcatcgccaccacccaatccgaatcttgtagtgcttcctctaccctgtgtggctcaatagaggaaacaaaagagtaatgttcacagaaatgtgcaactcgagatcgagttggtaccaccttatgaatg

SEQ ID NO: 15721 - DNA, 493 bp, Zea mays
  unsure (1)..(493): unsure at all n locations
agcttgggctaccaccatgcaaccggagttcggtttatatcctgcgngaacatccatggaagtacaagagggagaccctgctcggacaccctcgggggctaggctatagtttgcgctacccacttgagccggatcatctccggcagtaccctcgggggctgggcagtggcttgcgtttcccacccgagccgagtcatccctggtaacattcttcgnggctgggcaagtgtcaacaccatccttgaggaccaagttctccgcagtagccgcctctaaggctgagggtccctcaattacttccatgggagcaagacgatccaagtcagtttcctgaccctcgagaccgcgctctaaggtcgacgaggcgcggtacgctgcccgggatgatcccaacccggcgtcgagcacgtcagcacataccttcatcacaccatcatcncgtggctctgatagcaggtcttctggaaccatatcttcaagagtctgatcaaag

SEQ ID NO: 15722 - DNA, 479 bp, Zea mays
  unsure (1)..(479): unsure at all n locations
agcttggctccaatccttgagtgctcctaaggtcttgagggtcctggaggctcctagcttataggatcctagagtcttggaggcacctagaggccaaaagggctctggacctccggtagccttgagggtatctcgagatttagttgtctaggccaaagggccttgaagaccaggagaactatatgatttgttcccccagcctagagagcatcagaggtgtggaggaccctggaatttagttggaaatgggtatggcctcctaagggcatgagccctagggtacgagggtggcatgaggttggttcactttaagttttcttttgctaatgatatctcatttaagacgtactactagtatatagcggtatggccttctctaacgctgacaactatattatntaccattatgtaacattcttgccctgctttccttanaagggtaactgtcaaaaantagttttgcatatgataatatgggt

SEQ ID NO: 15723 - DNA, 443 bp, Zea mays
  unsure (1)..(443): unsure at all n locations
agcttcatgcaactgctgccaaaaatgataggtgaactgagtgcctcgatctgatactatcttcttcggaacgccatgcaagcacataatccgagacatgtataattctgccaacaccgcactgttataggtggtcttgactgctatgaaatgggtcgcctttgtcaaatggtccactactacctagatggagtcataaccagtacgagtgcgaggcanaccgactataaagtccaacccgatctcatcccatttcaactatgggatctgcaacggctgcaacaaacctgcaggtctgtgatgttctgctttaatcttctgacaactgtcacatacagccacatactctgctatctcccttttcataccgtaccaccagaaatatttcttcaggtcttggtacatcttctcgctaccagggtgtatagaatatgctgtctcat

SEQ ID NO: 15724 - DNA, 442 bp, Zea mays
  unsure (1)..(442): unsure at all n locations
agcttgagccgaggcattgccacaccggagaggctgattcaccctcgctggacttcggtcgctcgccgccgtgcgtgggcagagcaaaccggtgagccattctctaattccttgcaccaatgttcttcttgacctctggcgaagctctctgaccggttcacttgcacaatcgcgccgtgagcaggtcgaattcctcgccgccgatgagcatctnncgctgcgctcgtggaccagccgactccgaccattcccgacggcgacccgcacatcgccgtgaccctcaggacctcccctacatcctcgaccacctcactggagcagtctcgccgccggtaagcccctccgcgcctttctttcttcgcgaccactgttccattagggaaggaccatgagttcgattnttcaaaaccctanggggttntctgcaaagcattagactcat

SEQ ID NO: 15725 - DNA, 343 bp, Zea mays
agcttcttgcatcaggcttcagaccttggcttctcgggcccacacgaagatatttagccttataattgcctcgggagtaagttgatgaagatagacttcgaagattttcaacacctccacgacgaagctactcaagggaaatcgtagcccagctttcagaaagcttcggtatattacgacttcattttcttcagggtgtggacaagtcttctcttcttcatcggccctcacaatggacaaatcccgaaaataccttcctctcatgttgacaagatgattctctttgatagttgatttaccataaactgaatggcttggtcgccagggacgatcttcggagtct

SEQ ID NO: 15726 - DNA, 382 bp, Zea mays
  unsure (1)..(382): unsure at all n locations
agctngcatagagaaactgatcataaaataatcaaactaccatacaatgttggcaaataaaagaaaatataaaacgaattatcaatatcgtccacatgactagcctgcaacaactaaaaattatgcatagcctttatggctattgaaacaagccatagaaggaaaacatgcacgacataaaattcacttgaaaccaccctatttattattaanaataaggttgcacataataagaaaacctatcaggtaaacatggttggacttatcaatctacgtcatcttacaaattcacttgagttctaccagtctcaagatttcatagacattacaacgttgcctttgctctatagagacanaaccaatttatactaagatcaagtta

SEQ ID NO: 15727 - DNA, 478 bp, Zea mays
  unsure (1)..(478): unsure at all n locations
aagcaccgcggctgcagcttattgcttaggaaaccctgnngtgacacagtccaagaattccatggtcctttcaagcgcattatccagccccatccggcggagcctgcaaccttaccacctaaagcangacggngatgcacggtactttccgaacggtgcaagccgcgatgtgaaccccacggcttcgaatgattcgtccatggacatgcactcggacagcccagctcatgactcctactgagcagctcccaccatggaaccagcctcaagaacagcacttcaagtggaagaagtctgctgtcacagcccttccaggcctagtagtaatattcaatttaacaccttccatagcctctcttacactaagcgngtgatgtcttgtggtgtactactacttaccacttgttgctttgcgagaattatgtaatttgcatgtactatactatactgtaccatttgattatctgtgcatattact

SEQ ID NO: 15728 - DNA, 471 bp, Zea mays
  unsure (1)..(471): unsure at all n locations
agctttgtcgtttatgtgtgggagccgaggggttttcggcaatgtacagggagtagtcgtgtcagcaaagatggcagtgtcaacctgctgcgtcccgaggaaaaaccgtgtcaacccatgtccatcggttgagattttcccccaaacttttccaggacatgcctaaggtaatttggcaccaatttagtatttggactttgtggatttgagctttggaaaatagagaacacatctgaactttgtgaaggggttaaaattcagattctgaatcttctgaatttcccattgagttctcacttgaggggttattttgagaatattgcagaacccttcttataaatctttcttactatactttgtagcctatttagtatactataactctgttattnnggcctcatcatgattntgtggttntcatgatctttcacaattttcccttttggacttaaatggcttatttagggtcat

SEQ ID NO: 15729 - DNA, 509 bp, Zea mays
  unsure (1)..(509): unsure at all n locations
gagtcacctgaggcatgcaagctttcttcggtggcatgacgaaggtcaatgcttgccgaatgtggtcgaaaagagatcactggaggtgggcgccaatgttggggacttgttctcaaatgctatgagttaagaacaaggcaacataaaaaatgttaaacgttaaagtccttcgtccttcgaagcattatttcccttgggatataatgattttcgaacgaaggttatgaaggacatatcttcatcagcacaacatgtaataatgaagaaggaatcatatgaatataaaagataacataaacaattatgtattattatcaactcatttcttaatttattattatggaaaaatagaaatgatatcaaattacaaatgtaccttcggcttgaaagaaagtaagagtacaagcgtgacgcanaagcaaatgtcaagtcagcatgaatagtacggggacactgttcatctatttatatgcacgggacgcagcccatgtaaaattacacttataccc

SEQ ID NO: 15730 - DNA, 483 bp, Zea mays
agcttgaaggacatattacaaagcaagccccagtatactttgtcttccaagatctaaggttatcaaacaaaaattatacagaattggagaaggtgttgcatgctgtcttaatgggctccaggaatcttagacattattttcaagcatttcacataaatgctccttgatcacagcctctgaaggatattatgaggaacaaagcaactactggaaggattggagagtgggctgcggaacttaacgaattcagtattgactatgtgcatagatcctcaatttaggcccaggcgttagcagacttcatcgctgactggacgccaggggcttatgaagaagaagcaaattaagactccgaatcttggacagtgttctgcgacaggtcctgtggaagcattagtgcaggtgcgagtgctatactagtggcacctttcaaagtcagaacatgctatgcaacaaggtttgatttcatctgtacaaataata

SEQ ID NO: 15731 - DNA, 203 bp, Zea mays
tctgctgaactattgctcaaggccatcatgcaccggctggagccgacatgaaatgtctcactttcttcacaacatagatggaactgatgcctcatcctatcgccataccatatacgtcttttcgaaaactcgaccaatctgctcacttatgtatatgaccagaccctgattgatggcatgccttccttatcaacacaaatgtt

SEQ ID NO: 15732 - DNA, 359 bp, Zea mays
  unsure (1)..(359): unsure at all n locations
agctnggatgaggggtcatcatcatcatcatccgagctatcatccgagtcccattcaactaagtaggctctgccatctttcttcttgttatagnatttctttttcttcttgtcactttcatctttgcccttcttcttcttgcttgggcaattcatggcaatgtgaccgggttccccacactcaaaacattttctatcattgaaagcatttcttctagatgtttgacctcttctaggttgacctcttttcatcttcatgaatttattgaatttccttacaaataaagccatgtcaccatcactttcactttcattntcttcatcattgctatcttctttttcaattgcctttgatgcctt

SEQ ID NO: 15733 - DNA, 365 bp, Zea mays
  unsure (1)..(365): unsure at all n locations
agctgtaccaaatggacgtaaagagtgctttcctctatggaccaatcaaggaagaggtctatgttgagcaacctcccgactgtgaagatagtgagtaccctaaccatgtgtgtaaactctctaaggcgctctatgggcttaagcaagccccacgagcatggtatgaatgccttatggatttccttatcactaatggattcaaagacggaaaagccgatcctacactcttcactaagactctngaaaatgacttatntgtatgccaaaattatgttgatattataattggatctactaacgagtctacatgtgaagaatntagtaggatcatgacacacaaattctagatgtctatgatgagggag

SEQ ID NO: 15734 - DNA, 439 bp, Zea mays
  unsure (1)..(439): unsure at all n locations
agctngcatgaagtattgtacataatgaatatattatatcaatgtaataagcaaataatattttgtaggattcgcataaaaccaggactggatgtgaacatgcgttaacaataataacaactggtaaccaggtacatattaaaataatattgtttatttgtctaaaatgaaaatatatatttatgctgcatgtaaatgttgatgtatttgggttgggctctaaaggaggacaacatgagaatttcacatgaggttggtgatacaagttctccgtgtcacgtagcacatgaacaaatagaacatattgctgcatcctcagaagctaaaaaggtgagcattgataaatgattttactgattggtataaatatatgtaaatatgcgtatactaaatagtaacgtctattattatgcagaggttgaaatttaatgtggatgta

SEQ ID NO: 15735 - DNA, 207 bp, Zea mays
agcttgtactcgtacatgaaaatactcattataaatttataacacattttagaatgcgagaggagattacccttctgaaacacaagcaggatccatcccagctcaaatccccaaccaatttcagattaatgagactacaaaaaattccccaaaaattatggttagaatatgaacttacagtatgggagaggaaagggaggggagggg

SEQ ID NO: 15736 - DNA, 428 bp, Zea mays
  unsure (1)..(428): unsure at all n locations
agcttgtaacccctactgcaagcacccncggtgcaagataatataagcctcatcccccctcttgtgttccatcttgcatcaacccagctggacaggggcacgcgacacaaaattcactagtcggtccggttgagggtcccccgggtctgaaacgccgacaatcaagtatgaggctatcttcatcaacgtcctctaaatttcgtcctttaaacgaatattatctgtcctttacagcacattctaaaaaatttcgntctctatatcttcatgatctccaacaacgccctctaaattatgcctctatatctcattcttcataatttcaccagatctctattaccagaaaatttcagattcataattacaaaacatttttaactgatctacatattatnaattgtttctaaaactggattaataaatatggt

SEQ ID NO: 15737 - DNA, 484 bp, Zea mays
  unsure (1)..(484): unsure at all n locations
gcttcgcacctctggactaactcggctgcatcgttcttcgncgtcggccaatagaatcctaacctaaaaacctttccgactagtgttctggatgctgcatgaattccacattgtcctgcatgaacctcctccagaagttgcttcccagtggacgggagaacgcacttcatgaggatgcctgatgcgcctcttctgtacaattcctccccaatgagtgtatagtgagctgactgtctggcaatgcactctgctgagttcttatcatctggntcttcttcattctttatatacttaataatcggctgtctccagtcatcagagtctgactcgggttgatctatgatgttgcactcttctgtttgatccattgagatactcggctgaagaatttcttgcacgaagaccccgggtgggacctgagttcgaccggatctgagcttggacagtacatcggcagccgtgttccgatctctttctatatgat

SEQ ID NO: 15738 - DNA, 453 bp, Zea mays
tattcagaaagaaggagaagacttctttgatacttactcacctgttgctagaatgaccactattcgagtactactttctttggctgcctcgtatggtctccttgttcatcagatggatgtaaagacagcttttcttaatggagagctggacgaggaaatctatatggaacaacctgatggatttgtagtaaagggtcaataaagcaaggtgtgcaagttattgaaatctttgtatggtctgaagcaagcaccaaagcagtggcatgagaagtttgacactactctaacgtctgcaggctttgccattaatgaggcagacaggtgtgtatattatcactgtggtgggggcgaaggagttatattgtgcttatatgttgatgatatattgatatttggcacaaacattgatgtgatcaatgaagtcaagtcttttctatcaaagagctttgatat

SEQ ID NO: 15739 - DNA, 425 bp, Zea mays
  unsure (1)..(425): unsure at all n locations
agctggtgatatctaacaaatctgaagctgacatgctgtntgtttggtctgttcacagggtttccatgtgtgcagccagccttcaaaaaagcagcagctgtgccccgagaagctaccagggcgcagaagtcagcgtgcccaccaataacttcgtcaagggcatcaacttcgccttcaatatgttccaatgttcttggcaagttttcagctgaaggtgtaatntcgaagagctagctccgacagagtgaaacacgtccttcagccgctgcacacatcggatgccgaagcttaagcatntttcctgaagttctgtaaaggatttctgtagatttgagtatttatccacttcagtcttcaggcttgcttcaaaatatatcttttcttgctcgaatttttctgagtgacggagcaattcattctttaat

SEQ ID NO: 15740 - DNA, 438 bp, Zea mays
agcttccttcgaaggagtttctgtcaaaaatattcctcgaggacaaaatgagcatgctgatttgctagctaagtcagcagcacaggggctgcccttaccttcggatgtgttcttcgaaacaataaaagcaccttcagtagaacttcttgaaagagcagtcctcaatatatctcctgtttatagtgaagactggagaactgagatcatctcttaccttcagggtaaattcctttcagatgacgaaacttataacaggaggatagaggcaagagctcgtccatatgtcatgatagaaggggagttgtacaagcgtggagtttgtgcttcattactcaagtgtttatctagagccgaaggcatagaattgatgaaagaaatacatgcaggtctgtgtggatctcacattggatctaggtcgttacttggaaaagattttcg

SEQ ID NO: 15741 - DNA, 242 bp, Zea mays
atcgtagagactgctgataccgctccgagtgtattaaagccacgtcccgaccctctttcagatggtccaatgagacttctccgctggcctggttgctttggccgatgtaagcctttgtcctctgggaaccgtattctaagtctgtgggtaatatagcctcggccccatatactacaaagaacggctagatacccgtggaccggctctgcgtccttctcatactccataccaccgagggtagc

SEQ ID NO: 15742 - DNA, 431 bp, Zea mays
  unsure (1)..(431): unsure at all n locations
agcttctagactgcggcgcggcgggtcgggtattgaacttgggcgggccagagctcggtgacctgcgctccgtagcgcttgcttgataagctgcggtagtttgtgcttctgttnttttaataaaataaattatacatggagagacggatacaagccattgccacccggggcatgatctaaactcattttaagccctttttaatgggtgtttgaatgcactgtagataatagttagttggctaaaaattactggtaaaattaactagctaataaataactagttgactattagctaatttgctaaaaataactaattgttgaagtattagctactgtttgaatgtatttagctaattatagcagttaactattagctctactgtcttctaagaaaacataaaaacacataactaatctacctcgntataatt

SEQ ID NO: 15743 - DNA, 448 bp, Zea mays
  unsure (1)..(448): unsure at all n locations
agcttgccttaggctcatcttccttcttcatgcatatttgatgatagcctgaatagcaatccaatagactcatgagctccaaagttgctgttgcatccataagggagtctattcttggcaaggggaactcaccctttggacacgctttgttgagatccgtaaaatcaatgcacattctccacttcccattagcctttttcaccatcaccgtattggctagccactctagatatgtcacctctctgattactctggcactcaaaagtctcttgacttcgtttcttgcaccttcgactatgtcatcggatattttccgaagcttctgcttccttggcctgatagtcggatctacattgagtgagtgttcgatgacatctctgttgacaccacanagatcattggctgaccaagcaaagacatcctttgtgtgaacaggaacttaacaaag

SEQ ID NO: 15744 - DNA, 461 bp, Zea mays
  unsure (1)..(461): unsure at all n locations
agcttctaagggagaacacgtgatatgtttgactaacgtgcaattcgaaaaagatagaccttgtgcagcttgtcaagcaggtaaacaagtgggaggagcacatcacagcaagaatgtgatgaccacttcaagacctctggagctgctacagatggacctcttcggacccgtcgcctatctaagcataggaggaagtaagtacggtttagttattgttgatgacttttcccgcttcactcgggtgttctttttgcaggataagtctgaaacccaagggaccctcaagcgcttcctcaggagagctcaaaatgagtttgagctcaaggtgaagaagataaggaacgacaacgggtccgagttcaagaaccttcaagtggaggagttccttgaggaggaanggatcangcacgagttctccgctccctacacaccacagcanaatggtgtggagagaggaagac

SEQ ID NO: 15745 - DNA, 433 bp, Zea mays
ctctgagtcacctgcggcatcaagcttcgatcgctgctagctttgctcaatgctcctcggcttcgtcatcctatacatattaaagcattataaggtaaattcaagtttcaaggaaaaggtaagcacaaggtatgagtttataaccggtttaaggtgacttcaagcttcgtcaccagccaagtttcgcctgccctttgcccagatttgagtaatgaatctgtttgcgatgcttctggccaggccggcgatgtcatctaagtctcctagtgacaggttgaactttggtctgtttacaatatttccatgtgtgcaaccagccttcatgaaagcgacagctgtgcctcgagaagctaacaaggcacaaaagtcaccatgtccagctataacttcgtcgagggcattaacttcaccttcaatatgatcaaatgtgccc

SEQ ID NO: 15746 - DNA, 321 bp, Zea mays
  unsure (1)..(321): unsure at all n locations
agcttgattcccttttattntataattctttttctttttcacttatgcttaaccgtacatagatgacttctcacggatcctcggaaggagggaacacacattcccacatggacagacttgcacgagagggttttccccatatcttgtgggaggtgcttcanggagcaggttacacgacacctccccagtacacggtgcagctgttcgagaagcaccgggtgccccgctatatggtgaggatgaccctggagcctcatcccttacagccaggctggcgtttgttggactccgagtctttcggataccgggctgaggatacta

SEQ ID NO: 15747 - DNA, 467 bp, Zea mays
  unsure (1)..(467): unsure at all n locations
agcttcggcgtaaagacaaatctcaagatgaatgttttatctctacttaaagatgaatngacttaaagacccatgatgttttgtgtcattactgtagtcgattgtaaaggatataaatgtaattttgcgcagggtgcatcctgtgcctataaataggtgaacagtatcctggcactgttcacgcgatcctgtaatcaccgacacattacgcttggattattgntttctgccaaggcgaaggtataaatgtgcctaaatatttacatgttttaatacttgtatattcatataataaaacatgtaaatatattttgtgttgatatttcacttctcattattgtcttaaaaatatgatcacgaaggtgaaaccttcgtgatactttatttatgaccttcgttcgaagctcattaaattcttgtggagataatgcttcagcggacgaannggcattatacttaacatcttt

SEQ ID NO: 15748 - DNA, 318 bp, Zea mays
agcttctaaagggagagcacatctcaagattaacatttgctctattttgagaaagacaggagaccgagcgcatgccaggcatggaagcaagttggagtccatcatccacacaagaacatcatgacgactgacaggccgcttgagctactccacatggatctattccgcccgattgcttacataagcatcagcgggagtaaagattgtcctgcaataggggaagaatatgctcgctccacttgggtattctttttacaagagaaagctcaaacccaagaaaccttatagggactcttgagaccggctcaaaatgagttc

SEQ ID NO: 15749 - DNA, 485 bp, Zea mays
agcttcccaagtccccgcacccgacaaatcctcatcggagaccccggatcaccctcgccggacttcggtcacgcgccgccgtgcatgaaccaagctaaccagtaagccattttccaattcctcgcacccacatcttccctagcatcccgtgaagctctctgacccgttcaatcggactattgcgccgtgagcaggccggattcctcgccgccgacgagctcgcccgcctgtgcatgtggaccgacctacttcgaccaccaccgctgacgatccgcacctcgacgtgatcgccagagacccccggacctcgcccaacccttcaccagagcaacctcaccaccggtaagcccctccacccttttctttcgtcgggtcactgttccattaagggaaggactgcgggttcaatttagcagaacccagcgggttttctgcagagtcatagactcagatgaatagtatactgaggacctgtatgtaataca

SEQ ID NO: 15750 - DNA, 355 bp, Zea mays
ttttgcatcagtcagacatccggagtcgaatggactcgttaaaagagccaatggccttattatgacaggaataatgaagttgatcttcaatcaacccagtggaaaatggccagatcagttaaccaaagtggtgtggagccataatacaacaacatctaggtctacaggctttaccccattcaagttactattctgtgacgaagcaataacttcataagaagctaaaaccagatcaataaaggtagtagcttcggcagaatcaggttccgaagctgattattctgtggaataagatgctttagaagggatcaggttgcaagccgcggaatacatcaacacatatcaagccgaaaca

SEQ ID NO: 15751 - DNA, 471 bp, Zea mays
  unsure (1)..(471): unsure at all n locations
agcttagacgcctctgcaaacggatcttgagatcttattaaaaaaacattaatcagatacaagagctcttccttccaggaagcgaggcattcttacagacccatacctggcgagttggagaacagcttcttgcgtgactttcgcttccaatcaaataggttgaagatcccgcctcctccttcaccgncgccaataaccttggctccacccttctcggaccccatagatcctagaatctctctacagctgaatcaaaactcctcgccgctccgcagcgtcggcaaaagaaggagaaaatcaccgatacagcatgctccagatcaaacaagaaaatacacctgcgcagaacagactgtcagcccatgaatcttaaggtcgatggcggcgtcctcgaaccanagcattcgtctactcgtgaagcgaatcgagagaggggaagtctggtgctactgtgcttactgacgtggtcta

SEQ ID NO: 15752 - DNA, 372 bp, Zea mays
  unsure (1)..(372): unsure at all n locations
agctttccctagcananatcttcaccgccgtgagctggccaccactccgacgacccccctccctttctctctgttttgcggctggcacgataagctcgccggtgaaccgccgcttcccggcatcgcgccgcgtggcctagctttctaccgtgtcgccgtgaatcccttgggctatcccatcatcgctggggagcttgccacgccgttggccacgtaactgcgcgtgccaggcttctttcccgtctccgaccgccgcgcgttgtcgctcgattcctcggccaccgacgttgagccctataaattgaagcccncactagcttcgcaacctcatcacccacctagccaccgtgaatcgttagcagtcgtgcatcg

SEQ ID NO: 15753 - DNA, 478 bp, Zea mays
agctctggatcccttaccttgctgcttttgttacatggccagaaataacttgggaatcagttttaaggattgcccttcttattcccattgcctttaacttccgaagccctaacagaagagcttcgtattcagcaatattatttgtacaactaaagtccagctttattgcgtagcatgttctgactttagagggcactactagaacagcagccgctccagcgtcgaaggttccccaagaaccgtcacagaataccgtccaggcttcggcatcttttgctgcttcttctccttgagcccctggcgttcaatcagcaatgaaatctactagcgcctgagattgaattgaagatctatgtacataatcaatggtgaattcgttgagttctgcagcccattttccaattcttcctgtagcttctctatttctcattatgtccttcaaaggttgtgatgaagagactattatatgatatgcttg

SEQ ID NO: 15754 - DNA, 365 bp, Zea mays
  unsure (1)..(365): unsure at all n locations
agcttgagaagagaggagtggtctttgctgcttgcttgctccatcatcactttgagcagagttatggattgacctaacatgcctcgggtgaaaacttcctctgaagcccttgggcactttacaaaacctgaatgcctcctcccttatttggcggaagtcattatcagctcgaatgtattcgtccatcttctggagcagcttctccaacgtgtgtggcggctttctggcaaagtactgcgctgatggccccggccgaagccccttaatcatggcctcaatgacaagttcattgggcactgttggcgcttgtgccctcangcgcagaaacctccggacatacacctgaaggtactcttcatggtcct

SEQ ID NO: 15755 - DNA, 388 bp, Zea mays
  unsure (1)..(388): unsure at all n locations
agctngaagccatggtaagtagcatatgccaattatatacgaattgactcaagcctagctacgggtgcataggtttcaccgaaatccaaaccttcgacttgagagtatcctttggccacaagtcgagatttgttccttgtcaccacaccatgctcatcttgcttgttgcggaacacccatttggttcctacaacattttggttaggacgtggaactaaatgccatacctcattcctagtgaagttgttgagctcctcttgcattgccaccacccaatccaaatcttgaagggcttcctctaccctatgtggctcaatagaggaaacaaacgagtaatgttcacaaaaatgtgcaacacgagatctattggtacccccgtatgaatgtg

SEQ ID NO: 15756 - DNA, 482 bp, Zea mays
  unsure (1)..(482): unsure at all n locations
agcttgcaaccgaagttganaaaagttcgaatttgcataaatccttgaaggagcttcaggacaaatgcctaaacttcggcaatcggtgcgtgcaacggctgaaacaggtcttcaactcagtgggagccagttctgaaaaaattgaaccttcggttgaagacctgtcaagtgatgaggacatcacttctatacatacaatgaatggaccgataacacgatcgcgtgcacgacagctaaatctccaggtatgttctaccctagtcaattgtgtttcagagcttacgcttggggccttggatgttttgatgattaggaaccttggagagaatcagcaaggacttgggaaagcccaaggtgttgaggaggaggagcaagggcgcccacaacaggaagcagatcaagtccgactcggctgcgactccatcttgnngtctaggaccagtctgcactaaaatggacgcccaagatgcatccggactccg

SEQ ID NO: 15757 - DNA, 385 bp, Zea mays
  unsure (1)..(385): unsure at all n locations
acaccttctctgagctcgttgtcgagaaaacgctcaatttcccagcgcgtggcggtcccaccttgcagagttactgtttgactctgcggtccaccacgcagcgagtgcaagcgggtatccgcctggtgtaaaaatactggcgcttcaccttcttacctgcagtactatataaacagacgagtaggtgtgaagttaccacagcattcattgctatttgcactgttttgctgccaaaatttttaaccgacgccgaagcttgactctcggaatcgaacgaagctccaacttgaagcctgcttcgtcagaagaaagaaaaacttgggaagaanaaagtattaaatnttcacacattcagaattaaatgggcagagtgcgttctaccgct

SEQ ID NO: 15758 - DNA, 445 bp, Zea mays
  unsure (1)..(445): unsure at all n locations
agcttgttaccttctggggtggagtccctaccttgcaaatacttgggtctccctctttctctccacaaactaaccaaacagcagctcctgccctttattgagaaaattgcagatcttcttccaagctggaaggcagagttgttgaacaaagctggcagaagaattctagtgcagcatgtcctaactagtatgacaatttatactgcaatggctattgattttcctaagtgagctntggatgcaattgataaaattagaaggggattcttatagcgaggcagaaaggatgctaaaggaggtcactgtatggtagcctgngaaaaggtatgtaggcctctacatatgggaggtctcgggatttctagcctgactaagctntgttgggctctcagaattagggctgggcaaaaaacccgtaacccgaaacccgaacccggaatacccg

SEQ ID NO: 15759 - DNA, 427 bp, Zea mays
  unsure (1)..(427): unsure at all n locations
agcttatgaagattcttcatcccaacatgagctagtcggcggtgccagagccaacccatgttagtcttagcaattaagcaagtgtcgagttcagctctatcaaaatctaccaagtatagctgaccctctaacactcccttaaatgctattgaatcatcacttcttctaaagacagtgacacctacatcagtgaatagacagttgtaacccatttgacataattgagataccgaaagcaaattgtaatctaaggaatcaacaagaaaaacattggaaatggaatggtcaggagatatagcaattttacccaagccttngaccaaaccttgatttccatccccaaatgtgatcgctctctgnggatcttggttntctcatatgaggagaacatctttttctccccagtcatgtggtttgtgcacccgct

SEQ ID NO: 15760 - DNA, 387 bp, Zea mays
  unsure (1)..(387): unsure at all n locations
agcttaaagtatatatgagnttatactttatctttcatttactgtatattggaggccattgcccaaatattatattgaataaacatttgtaatgtgtaatctatcatataatttgacatgttcactccacttacttttgataaaatagctactcaggtatacatagatggtcttgcttgtaaaacttgatgtgcttgcaggctagctacttacactattttgccggtacctcgtgttcagaggaaagaatgtgatgctgcccttgtcgctgcttttaagagggaacaggagaaggaagcagcacagttgaaggcaatgatagatgcacatcagattgctgaacagctggtctgtagctctttatgagtttgcatcactgatagtcat

SEQ ID NO: 15761 - DNA, 381 bp, Zea mays
  unsure (1)..(381): unsure at all n locations
gagctgcagctcgggatggntaatgatttatctcttcttctttggattgcacaatgagggagagagatgggctccaaaacctaagacctttctagagaaggcaaaggaaagggcaaacacacacactggtgattggtgtgacttacagtcagggacatgaggtattccttcaagctggtactacttccgacggcgagtcacaaaagtcgaggaagcatgtgggtggccttatatgactttgccatgtactttgtggcgcaacccaggcagtaccattttccatgttctcatctaatcgcagctggttcgacctccaactttgacttagagaggaagatacctcaagagtttactattgacaaactagtgttgacttggagt

SEQ ID NO: 15762 - DNA, 451 bp, Zea mays
  unsure (1)..(451): unsure at all n locations
agcttcgcacctctgaactaactctgttgcgttattcttcgctgtcggccaatagaatcctgacctgaagacctttccgactagtgtcttggatgctgcgtgtattccacattggccggcatggaccttatccagaagtcgtttcccagtagatgagagaatgcacttcatgaagacgcctgatgcaccccttctgtataatgtctccccaatgagtgtgtagtgagccgactgtctggcgatacgctcggctgcatttatttcatctggctcctcttcattctttatgtacctgatgattggccttctccagtcatcagagtctgactctgcgtgattcacgatattacactcttctgcttgatctattgagatgctcggctgtagtatntcttgcacaaagactccaggtgggacctgagttcgactggatcctaccttggacaataca

SEQ ID NO: 15763 - DNA, 408 bp, Zea mays
  unsure (1)..(408): unsure at all n locations
agcttaaggaaaattaggcgtccatgatgtccctatatctagcctggngnngtgggggtccttctgaagtaaaaaatcatcttaattaaaggtggaaaaagcaaactggtgatggtcgcgactgcacttgatggagacggtcacgactcgcgggcgtattagcgtattttgcgcagcgtgacgatgaacatccaaataataatgtccacaccatgtaaattcgatgacgatcggtgtaaaagtaagaaaaaggattagtcatgttacatacttacatggtaaaaataatataatacttgattcgaggactatgactagcaccgcgctcgcgtagctcccacgcggggcgacaccggcggctcccaagcccaccgccgctttccctctcttcttctcttctgccacgcc

SEQ ID NO: 15764 - DNA, 467 bp, Zea mays
  unsure (1)..(467): unsure at all n locations
agcttatgaagattcttcattccaacatgggctattcggcggtgccagagccaacccatgttagtcttagcaattaagcaagtgtcgacttcagctctatcaaaatctaccaagtatagttgaccctctaacactcccttaaatgctattgaatcatcacttcttctaaagacagtgacacctacatcagtaaatagacagttgtagcccatttgacataattgcgatacggaaagcaaattgtaatctaatgaatcaacaaaaaaacatttgaaatggaatggtcaggagatatagcaattttacccaaaccttttaccaaaccttggtttccatccccgaatgtgatagctcgttggggatcttggttnttctcgtaggaggagaacatcttcttctctcctgtcatggtggttgtgcacccgctatcgacgatccaacttgtgcccncggatgcataaacctac

SEQ ID NO: 15765 - DNA, 320 bp, Zea mays
  unsure (1)..(320): unsure at all n locations
gagcttgtgcagaggccactctaattaatcttctgagaaagccgacctcgctgcagtatgagaccccgcagggcctacacccaaagcaatggaagaattcacaattattgcagagcatattagcaccagggacctgggtcaggagtttttggcctctcaaggttttccccgcttaaaagaatgggaaatgccgaaactaccgggggaaaagaaagaangtgaacttgtacgtttaccttactactttaaggttaagaaatactttaaaacaccttgcccagagtgggtggataccattgaagcgatgtgccatgaaatac

SEQ ID NO: 15766 - DNA, 451 bp, Zea mays
agcttgagctcggtctatctgttatgtctaatgatgatcttgcagacagccttgcttataatagcttgaaggtatatatactcttgctgcgaagtagtctatgtttgtaggttttcttgctatcgttatgttctcacatatatattttttgtttttagggattaattctaagtaaagctttaagggctcaaaaagaagtagatgacgaaggctgctagatagctcttggaaatcttcgattagaagtcatcacactaaggaatgaagcttttgaaaaagataagatattgttttccttattggacaagctgaaggcttgcgaagccaagcttgttgctcaagacgaagcccataaagatgaagtcgaagatttgaagaataaactttgcggaatgaatgaaaatttcgaacgtgcaaaggcttatgcagaaataagcgaaatggaagatct

SEQ ID NO: 15767 - DNA, 465 bp, Zea mays
  unsure (1)..(465): unsure at all n locations
agcttgaagccatggtaagtagcataggctaataatatacgaatngactcaagcctaactacgggtgcataggtttcaccaaaatccaaacctttgacttgggagtatcccttggccacaagtcgggctttgttccttgtcaccacaccatgctcatcttgcttgttgcggaagacccacttggttcctacaacattgtgattaagacgtggaactaaatggcatacctcggtcctagtgaagttgttgagctcctcttgcatcgccaccacccaatctgaatcttgtagtgcttcctctaccttgtgtggctcaatagaggaaacaaaagagtaatgctcacaaaaatgtgcaacacgagatctagtggttacccccttatgaatatcgccgaagatggtgtcgacagggtgatctcgttggattgcttggtggactcttgggtgtggcggacatggttcttca

SEQ ID NO: 15768 - DNA, 392 bp, Zea mays
  unsure (1)..(392): unsure at all n locations
agctgtgaagattcttcatcccaacatgggcttgtcgacggtgccagagccaacccatgttagtcttagcaattaagcaagtgtcaagttcagctctatcaaaatctaccaggtatagctgaccttctaacactcccttaaatgctattgaatcatcacttcttctaaagacagtgacacctacatcagtgaatagacagttgtaacccatttgacataattgggaaacagaaagcaagttgttatctaatgaatcaacaagaaaaacattggaaatggaatggtcgggtgaaataacaattntacccaaacctttgaccaaaccttgatttccatccccgaatgtgatagctcattggggatctctggttttctcatatgaagagaacata

SEQ ID NO: 15769 - DNA, 434 bp, Zea mays
  unsure (1)..(434): unsure at all n locations
agctntctcgactgagtcggagacagggcctcattgacggtctattgtacgcgtaagcggcaaggccgaccgagccgagggactcccacgcctctgagatacggatacctcactcgtcaccttccgcgagaagcaactctcgcccacgcaaacatccctgttaccgacgagaaagtccagatgctcgaaataagaggaaaggagacgcggctttacaacgcagcgagggtgtgttttctggcctcggcggccgcagaaggcacacgctacaagacaatctgatcctgcaggctcgggtcttcacgctgaagggggctgtagcaccctcggcatcgacgacaccttcagcgaggtccgacccagcctcggacggcgatgcgatccanggacttctccgggaatccggcccgagcaggcgggctcggtcggtaccc

SEQ ID NO: 15770 - DNA, 478 bp, Zea mays
acctgaggcatgcaagcttggacattctttattagagaagcaagcaaattcttattatatataaaagagtttcttcacgaagcatgactagaagggaaggcgtcttttcgacgaagcctcaaaaaatggtatgtatgcaaagtctcatgcttcggggagaattcaactatggatggattgtatgttacatttaaagttacaatatattacacatttttacatttcaaatgattctaccatggcattcaatcctctttaagcactatttctgcagcgttcgtcaatagttgggtgacaaccttgtccataatggcttcggccattattctaatttcatcgaccccctttgggtgggggctcggagatgcctcagtagcttctgagggaagaaaagatactgctatattactattacaaaccgagaacggagtttggagataaaaatacagcgtgataaacaccactaattaatacctat

SEQ ID NO: 15771 - DNA, 482 bp, Zea mays
  unsure (1)..(482): unsure at all n locations
agcttctaaagggagaacacactttgggactatctcttgttctatttgagaaagacagggtttgcagcgcatgtcaagcaagaaaacaagttggtacccaccatccacacaagaacatcatgatgaccgacaggccgcttgagctactccacatggattcattcagcccgattgcttacataagcatcggcgggagtaagtattatcttgtaattgtggatgattattctcgcttcactttggtattctttttgcaggagaaatatcaaacccaagagactttgaagggattcttgagacaggctcaaaatgagttcggattaagaatcaagaaaataagaagcaataatggaacggagttcaagaactctcaaattgaaggctttcttgaggatgagggcatcaagcatgagttctcttctccctacacacctcaacanaatggtgtagtggagaggaagaatagaactctattggacatg

SEQ ID NO: 15772 - DNA, 403 bp, Zea mays
  unsure (1)..(403): unsure at all n locations
aaatcactcagccaatgacgatgtttgtctataancccccctcccgaagaatgtgcttctgcggtgggcaatcccgtcactttattgcccaacgtccatatnctaatgaaagtgatatggatgaagaccacaagaggaatataaaggtgaagaagacatacctacccacaaaaggcggcgaggcacacatggggcgggaatgggactcctactagagctccaccgacgtcctcctctaacaaggagaccaccaaccatcccgtcaacaaagggcttctctttcccaacgttgtccacaagtgtctcatggctaaggatggcaacaacaacaatgtacactctatagccacctccaaatataccacatctagagtacaaggttgatctagcgcaaacgaagatg

SEQ ID NO: 15773 - DNA, 248 bp, Zea mays
gacctctaaacgactgcagcatcaagcctgaatttctggaatgaatcaatactgatctctctgcttctataggcaagctgggaaatctgactcttctatatgccaggagagctgggcttactgcgaatattcctagagaaccttggaaccgccaaaagcttgtgtttggtgattagaaccgcgactccttttctggccctataccccaagaacctgcggggttagaagccacttgcacgttagatgtg

SEQ ID NO: 15774 - DNA, 481 bp, Zea mays
  unsure (1)..(481): unsure at all n locations
agctntatataaaacaacagattaagccttgccttataatcttcagntcataaccagttattagcctattcgttctgcctaccaaataattttccttgcaaaattatcgtaccatatgcttctaactttgatggtcaataccaggaagggaggattactatgcaacaacagaacaaaaatgaatcctccaaatcctccaccggctagaaccgatccagtggttgccgctcaaatattggtactacaacaaatgacaaacatggtgaacgaaatgcaaaatcagataaggcaagaacgccaagaaatacgtcaggatcgactggagatgcgtcaagaaatgaggcaagcacagttggaaagacaacaacaacaacaatcactaccttcaccatgtcacacccggttttagaaggaaaccgaatgcaatcatgtcatgccaggatcagcaactcacgtacacagtagtacataactggacata

SEQ ID NO: 15775 - DNA, 448 bp, Zea mays
  unsure (1)..(448): unsure at all n locations
agcttcaccgctgtttctcagacatgtgttaattttattaattatcttatccctatttgattctgctgttactttgtcataaacttacaaccattctgtatgtaaaaaaatgatccttctgtttgtgtttttttcaagtaacattgatcaatgatatgacggttaatttctctagacggtgntatttcattatgttatttgcatttttgaactcttcaagcattagaggattctagttagtttaatatttggtacgacttgcatttaactcggacacaatcttctcatcttgatgntctatatttgttctncttggttttgtagcattggctggattgatattttctctgtgcaggagatgttgtaactctctttactggtgtgaatggctcctcactgcaacctctcgttgctcacagagtaaaaaaaaatactctcatctgtgtgc

SEQ ID NO: 15776 - DNA, 443 bp, Zea mays
  unsure (1)..(443): unsure at all n locations
agctntcgaggagctgaagcaatatctgatcgatttatcaacattaactccacccgtgctaggggctccattgctattgtatgtggcagcttcgcactctgcagtgagtgcggcacttgtacaagagaagctcgaaggacaagctaaaaagcaagtcccagtatactttgtctccgaagttttgagtttatcaaagaaaaacaatacaaaattggagaaggtgttgtatgttgtgttaatggcgtccaggaagcttcgacattattttcaagcatatcacataattgttccttcatcacaacccctgaaggatatcatgaggaatagagaagctactggaaggattggaaaatgggtcgcggagcttaatgaattcactattgactacgtgcacagatcttcaattcaatctcaagcgctagcagatttcatcgctgattgga

SEQ ID NO: 15777 - DNA, 361 bp, Zea mays
  unsure (1)..(361): unsure at all n locations
agcttcggtgtgtacgaaaagaaaggaacgtgtttttcgtcttcngctcacaatactggtttcgtccacatcaaagcgcttcaagcagagggtaagaatacattgcaaggtatgtacaaagttccttgaagatagtctagttgtatttacaaggattgttacaaaaatatcctgagttttcctacagtacacttctactgatcttcattaagttttagcttcgacgacataatttaggcatcatcttcaccttcgtcatcctacataaattgagagattatgagtaanaatcaagagcaaaggaaaaggtaactccgaagtatcatttcttactggttcaagatgacttcgtgcttcatct

SEQ ID NO: 15778 - DNA, 417 bp, Zea mays
  unsure (1)..(417): unsure at all n locations
agctcgtgaggttcttcatccncacatgtgtctttgcggtgatgccacagccagcccatgctagtcttagctattaagcatgcatctagaccggcctcttcttttgcaaaatcaactaaataaagtttgccgtctaatacacccttaaaagctagtgaaccatcacttcttctaaagacagacacatctacatttgtgaatagacagttatatcccatattgcataattgactaaccgatagcatattatatccaagagactctactaaaaacacattagagatagagtgctcattagaaattgcaattttacctaacacttttaccttgccttgattcccatcaccgaatataattgaatcttgggaatccttattcttgacgtaggaggtgaacatcttcttctcccccgcatat

SEQ ID NO: 15779 - DNA, 480 bp, Zea mays
agctggcacgacaacatcactgtataagagcagcaaagtgcctgagattggctcaccattgatcataaacgctaagtggcgcagaaccatcacaaataccaaaccagatgcccaaaagttgttagtggagctactcaaaagcttatccagcttcaggctcatattcttagaaagctgtagaaaagaccattaataaccaaacaaaaatgcactattttgacatgtgactttaaaaaggaagcatacctgttgacatgcagactcaactaaatgaacgtatactgttagaataatacaatcatgtctaatatgattttctatatcagtagggcatgtcatctcagccttttctaatgtgggtttcttcaactggctccttcaaatggacacttcaagttcaagttcggatgccttaccaacgacaatgttgagttgtgagtgtcacaatctgcaacaaagctggtaaatgggtctttctca

SEQ ID NO: 15780 - DNA, 474 bp, Zea mays
gcttatgaagattcttcatcccaacatgggctattcggcggtgccagagccaacccatgttagtcttagcaattaagcaagtgtcaagttcagctctatcaaaatctaccaagtatagctgaccctctaacactcccttaaatgctattgaatcatcacttcttctaaagacagtgacacctatatcagtgaatagacagttgtagcccatttgacataattgagaaacagaaagcaagttgtaatctaaagaatctacaagacaaacattggaaatagaatggtcaggagatatagcacatttacccaatcctttgaccaaaccttgatttccatccccgaatgtgataagctcgtggggatcatggtttttctcatatgaggagaacattcttttcctcccagtcatatggtgtgtgcacccgctgtcgagtatccaacttgagcccccggatcataaacctacaaacaatt

SEQ ID NO: 15781 - DNA, 388 bp, Zea mays
catgcaagcttattatacgccggcgaacaaagagagagatgtgtcatatgttatgaatggaagggggagtctcgactcgagagcgcaagaccggctggtggacggcgtgcaataaactaaccggcgcgggtagttaggggcaccatgtgccaaacgacgcgcgacctggcccacctggggatcttgtcatcggctgagcaagtagcttgtcctgccgtcgtgatctcttgcttcacggaagttcagcctcacaagcataagcatgtataacctcatttaaacatggagtctaagggtttacaaaagggcacttatcttggtacaagcatgcaatcaagcgatctggtgtatccgatctagatctaatgatgactgttattttatattt

SEQ ID NO: 15782 - DNA, 327 bp, Zea mays
taaaggtggaatgcacgatatataaaaaaaggtgagccattgcaaatatactataaatggtcgataaatatgtaaatttatgaatacatatcatacatgtatgtacataggataatggtgcaactaaataaccaatttccaattatgtagtgccataagcaaccgcctagatcggtcctctgtgggttatatgtctgcgagttcatgagacagaacgaacgatgcatcaagaactctgataaggtatcattagtaatagtcatgtatatagttctatcattaaagatgcaaatgtattattgagtgtaaatatattatgtttataaa

SEQ ID NO: 15783 - DNA, 470 bp, Zea mays
  unsure (1)..(470): unsure at all n locations
agcttcgtcacttgaaagacaattgccttgaatgaaagatattatttcagttctccagtcttcactgtgtactggagaaatagtaagcactgctctctccatgagctcaaccgaaggtgcttttattgcttcaaaaaatacttcggggggaaggggaagcccctgagccgctgatttggctagcaaatctgcatgctcattttcacctcttggaatattctttacggaaaaaccttcaaaggaagcttccaaccttcggactgcatccagatatttttcaagcttcggatcctgtgccttgctgctcttatccacatggccagcaataacttgagaatcagtctttaggatggcccttcttattcccattgcccttagtttccgaagccccaatagaagtgcttcgtactcagcaatattgttggtgcaactaanatgcagtttgactgcaaaacatgttttgactcttg

SEQ ID NO: 15784 - DNA, 402 bp, Zea mays
  unsure (1)..(402): unsure at all n locations
atgcaagcttggtcattttattgctaactgtttctcccatgatagtgatcangatcaagggaacaagagggagaagaagaagaactcttataatgcgcagggcgaggaacatcttggcgaggagtgtgattcggattgcttctcctccgactccgacaatgaaggactcgccgccatcgccttcaacaagtcatctctctttcccaacgagcgtgacacatgccttattgcaagggagaagaaggtatgtactccagactctacttatgcttcttcaagtgaggaccaatctattgatgaggatgaaatagattattcatgtttatttaagggcctagatagaacccaggtagataaaaataatgaattgattgatgccctgaatgataagaatacgctttt

SEQ ID NO: 15785 - DNA, 385 bp, Zea mays
tgcagcttgtaagggtcttcatccccacatgtgcttagctacgatgccacagccagcccatgctagtcttagcaattaagcatgcatctagaccggcctcctcttttgcaaaatcaactaaatagagtttgtcgtctaatacacccttaaaagctaatgaaccatcacttcttctaaagacagacacatctacatttgtgaatagacaattatatcccatattacataattgacttacagacaacaagttatatccaagcgactcaactaagaacacattataaatagagtgctcggatgaaatagcaatttttcctaaccctttcaccttgccttggttcccatcaccgaatatgattgaatcttggggatccttgttcttgac

SEQ ID NO: 15786 - DNA, 423 bp, Zea mays
  unsure (1)..(423): unsure at all n locations
agcttatcaacaataggggttaacgttgagcatttcttntaataagttggtcaaattttattagcagttactaaatgtaagtatataccaaaccataataaaataatagaacaaaattaataacaaatcccatgcaatgcaaatgacagattgaatttagttccataatttaattatgcaagagtcctgagctgctcttggccgtgagctcggctagtataccagttttacactctgcagaggttgtaccctgtacccacaagacgtgtatcccatgtcgccagggttagccagacccttagacactaccgaggtgaatggatagagatccactacaaggcctttacaaagttccactagctgtcgaaaacccgctacagtttatgggaagagcacttgcaagaatctctcgtctaaccacca

SEQ ID NO: 15787 - DNA, 418 bp, Zea mays
  unsure (1)..(418): unsure at all n locations
agctggtggagggtcttcatccncacatgtgcttagcggcgatgccatagccagcccatgcaagtcttagccattaagcatgcatctagaccggcctcttcttttgcaaaatcaactaaataaagtttgccgtctagtacacccttaaaagctagtgaaccatcacatcttctaacgacagacacatctacatttgtaaataaacaattatatcccatttgacataattgactgacagatagcaaattatatccaagactctccactaagaatacatttgatatagaatgctcatttgaaattgcaattttacctagcccttttaccttgccttgattcccatcaccgaatataattgaatcttgggaatccttatttttgacgtaggaggtgagacatcttcttctccccgtcatat

SEQ ID NO: 15788 - DNA, 413 bp, Zea mays
agctctgttaacaagacttgggtgtatgatatcattgtctgactatcattgcgggtgctgggtgaatatcttctgctctgggatcaggtggacaatgtggagctgtaacaaaatgcccctgatcttaacaggtggaaactagcacaatctggcacttatctgagcaaatcgacctatggtgcgtttcctaggctccatacagtttggtccttggaaagaatttggatgacctacgcgcctatgtgttgctggttcttcaaatggttggcaatcaacaacagatgctggaccgcggaccgacttgctaagcgagggttaccacactcggatgtatgtactctccgtgaccacgacaaagaatcgatttagcactttctgatctcgtgtatcttcactcggcacggttgacatat

SEQ ID NO: 15789 - DNA, 350 bp, Zea mays
aaagattgtctaactttgttaagggcaaagctcccatggctcaggataacgagggttatattttataccatgtcggttatcccgagcacaaaattaggagaattcactctaggaagtctcactctggctctaatcatgcttttatgtataagagtgaggcatctagttctaggcaatcaatccgtgctaaattgcctaagaagaaaactccaattgcatcaaatgaacctaacatttcatttaagacttttgatgcatcatatgttttaactaacaaatcaggcaaagtagttgccaaatatgttggggccaaacacaagggctccaagacttgtgtttgggtacccaag

SEQ ID NO: 15790 - DNA, 475 bp, Zea mays
  unsure (1)..(475): unsure at all n locations
attttgagcccctcaagcattcgaagataacaatatgtaccactgggggttatgaagctggtctttggctcatcttccttcttcatccagatttggtggtagcctgaataacaatctagcagactcatgagctctgacgaagctgttgcgtccactagagagtctattcttggtaatgggaactcatcctttgggcaagccttgttcagatcagtaaattcaatgcacattctccatttgccattggcctttnttaccatacagtgttagctagccactatgggtatttcacttctctgatgacaccagcactgagaagtctttntacttcgtttcgagcaccttcggctntatcgtcagacattntccaaagcttttggttcttgggtcggaaggatggttcaacattgagtgaatgctcgataacgtccctggtgacaccacagagatcgttggctgaccatgcanaaacatc

SEQ ID NO: 15791 - DNA, 440 bp, Zea mays
  unsure (1)..(440): unsure at all n locations
atcaaagcgacgttcgttaatgttcttaagctggtgtttgcataaaatcccagcttatgcaaattggagtttgcatgaatatgtgtgatggattgagtgttattaattgaagggagcaataatagtagatatctcatgggtggaagaattgattgttataatgtagtgttaggaagctaaaagaacattttcataataatggagtgttagagcttgtccatgcatttcactacatgcatcttataccttgtatataccagcagtcgctgaaagcatgttcatatttcttgaagtgtgttgttgaaagttgacctctaaggctgtacaattgtttctgccttaataattntaaggcgaacttcttggtgatactacataaatatgggtttgataataaaaatataagtggctgaaatgtgggatcctcacttcgaaagcta

SEQ ID NO: 15792 - DNA, 456 bp, Zea mays
  unsure (1)..(456): unsure at all n locations
agctngngttcgcccctcgtggaggagtgcggtgcatttatgaaacctaacgggcggctacagccccggngagtctttgtaaaggctatgtagtgatgccctactggaccacctaggtagtggtcaatggggagtagctctctccgggcagaaagggaatcacggcttgtgggtaaagtgcacaacctctgcagagtgtttgaaaactgatatatcagccgtgctcgcggttatgagcggccaagggagctccagtgattagtggtacttgatcagagacattttggtttacaggtggcaatgagattgatggttctggttatgactatggtgctggtaagtggtattctttccgtttggaaaggggacatcgggctaataacttgngttaatgctaaaacctggctttctattagtaaataataatttgaccaactaaaagcaattgcttgactt

SEQ ID NO: 15793 - DNA, 464 bp, Zea mays
  unsure (1)..(464): unsure at all n locations
gcgacctgcggcatgcaagctagttgctgtcgtctattgctgtttgctctatgcttgatccggnctctccttttataatcacggtcaatgtatattctgacaacgcacacggggttcaacgagaaaaatccattgagagaagctggtggcccgctatggaaaaaaataataaataaataatactctagtatttataaaaccagttgcgtagcggttggttgtaggagcagaattcagatcatgaaggtcattgtaatacctaaatttgtaactcatatgaagagagaatatttcctttatctatatgtgtaccatctctagttaatatcacatgtgaataaacaccatctaaagggggattgaataaccaataacatctaaataaaccatgcatcatgctgaggtttacttgagtgtgcatgtgtggctaaaaaatataggtgattgtaatatattaatagaca

SEQ ID NO: 15794 - DNA, 431 bp, Zea mays
agcttcaacaacaatccaaaacacagtggagttttgtttacgctccggcggcctgaaccactctaaatcctcgcgtgttcatgtgctcaacgatcgcttagcaagataggcaaaacgcttaagccccttcctcatcttatgatttagggctggtgcactccgccaccccgccggagaattccctctctgacaatactcatgatcatatctcgagcaccatgattagtaacccatgcatatgcgtttgttagatgattgcaacctcgctgacgaagaatatgtgcggatcccgaaatttatggaaggaccacaggaggttggcccgattctcactgaggagccaactgcagaagatccaccctctgaccctacacaagaaggtaagtcccagttttatgcacattatattataccttattttcttgcaactc

SEQ ID NO: 15795 - DNA, 458 bp, Zea mays
  unsure (1)..(458): unsure at all n locations
agctatatcacacacgagtgctacctaaggtactctttaactctttctctaaagtgtccccaaattccttgagaaggtcatcaaggctggccagggacatgtcctcggtgtcggactggttcctgggagggatttcttcctgccgctcagtctgacatcctgngcttttggtcttcttgcggattttccttgcggaggcgagcttcttcagtaccttgtcgtagtccattttgagggtgcggtaggcttcacgggtgttggtctcttcgccttcagctaacgagaggctctcttggagggacgctttctcttctgaaagttccctgactttctgctccaggctttccacctgggaggttatggaggtgcactggagggcgaggtcatcatattgcgtatcaatggtatgaaggtatccagccatgtagacaatggtgcgatcattctcaataggatct

SEQ ID NO: 15796 - DNA, 432 bp, Zea mays
agcttcgtcatgatgaagcatgaaggcgattcttggagaaagtgttgctcaagttgttgattacaaatgataatgttgtccctgtgacatttgtaaaccttgtatgtaattattgagggtatgaatgtaataacgtacgaagttgtacgagtgcctataaatagatgaacagtaccctatactgttcaggctggattgtaatcgcactcgcgtcattaccttcaagcaagatgaaggtatcgatgtaatacaaactttgataatatcaatatattcattatgaagtaaatatgtgacatgatattacacttgtaattatatttttatatttataaatgatgagggctcattctttatgatcttggtctaacactagtacaaagaagctctatagtgacggttgtgaacctatcttcactggcgtttcttaca

SEQ ID NO: 15797 - DNA, 428 bp, Zea mays
agcttcatgaagagggaccttcggccatcttatacaaacagcttcagccgaaaaccgtttcttcctagaagaccttcagcgacgaagcataggcccaacagctgacatccgggggcgcgctcagagcacgcccgtgcgcgaacccccgcgcgcccgcggtcgcccgtgaccacgcccgcgccacggctataaaacccgccccagtgctcggctgtcttccccgttgcctcctccgtacctcgcctgacttgcccgagccagcccttagctccggtgacctccccgcgacccgccagtgccacccgagagcaaccaccgtggccagccccattcccgtcctcctccgttcgatccaagccttcaggtagcttcctggtgagggcgtgaagcttactcaagcttgaaccgaggacccgcgtcaccggaat

SEQ ID NO: 15798 - DNA, 438 bp, Zea mays
  unsure (1)..(438): unsure at all n locations
tggagtgaacgctgntgaccttgatacagcagtgttgtgactccaaatcacctttattaattcgtctggccactttcctttaggctgattgaaattgacttcattattcctgttattatgatgccatttgccctttctaccaacccatttgactcaggatgccttactgatgcaaagtgttttttgtaccaatttggctacaaaaagctttgaaagtctcagcatcgaactgagttccattatcaacgatgatagccttcggcacactgaagcgacaatcgatgttttgccagaagaacttttgtactgtggccgaagttatggttgccaaaggctttgcttcaatccatttggaaaaaatattccactgccaccacaacatatttcaagttgcccagtgccggtgggagtggtcctaatagatccaaaccccatctt

SEQ ID NO: 15799 - DNA, 485 bp, Zea mays
  unsure (1)..(485): unsure at all n locations
gcagcttgtatgaacatcttgcatccattactaaattaaatgatgaggtggcaagtcttaatgctcaatttaagacttgcaagggtgattttgataagttaaaatttgctagggatgcctacaccattggtagacacccctcaattaaggatggacttggctttcgaaaggaagccaagaacttaacaagccaaaaggctcccattgccaacaaggagaaagggaaggcccctatggctagtggtactcaaaggaatcatgctttcatttataatgatagaaaattttctagaaatgctcattataataggagttatgatcatgatgcctttaattcacgtgctgtgattgcatctagctctacttttgtgcatggtaggcctangaaaagtaatgttgtgcatcatttgcctatgagagtatgtaatgaaccttctaccatttaccatgnttgcaatacttcatttacgctcttatgtaaaaat

SEQ ID NO: 15800 - DNA, 368 bp, Zea mays
  unsure (1)..(368): unsure at all n locations
tgcaggggaggctgcgaaaatgtcgtcgagcactatccgcaaggccctgggcgcggtgaaggaccaaaccagcatcggcctcgccaaggtcaccagcaacatcgcgcccgagctggacgtgctcatcgtcaaggccaccaaccacgacgacgagccggccgaggagcgccacatccgcgagatcctccacctcacatccggatcccgcgcccacgtcgctgctgccgtggcaggctgctcccgcaggctctcccgcacccgcgactacgtggtcgcgctcaagtcgctcatgctcgtgcaccgcctcctggccgatggcgacccgtcctttcaccgcgagctnctccacgccacacgccggggcaccc

SEQ ID NO: 15801 - DNA, 442 bp, Zea mays
  unsure (1)..(442): unsure at all n locations
agcttgtgattntaccaattgaaagagcacaatatctacttatgaatttccattaaatatcttaaaagagattgtattagtaacacaagcaatagtttcctatttagcaacctctagtatatgaatgacaagaaggttactaaaacaaggaaacctcatgatatgaactaaattacccttacaagcatcatgcataacatcaattgtaaaaaagatgaaagtagcatgattatttaattaagtttacatggcaagtttaattcatagcatggtgagtgattaatgaagaagactcataaccaatttaaacaaggatgaatacatcacatagtattggttcgatcttctttgaatgttgaatggcacactccatttgggaaacacattctcatgttgtgagactacataaacacttagatagaaacattagtctcacaactct

SEQ ID NO: 15802 - DNA, 387 bp, Zea mays
agcttgagcaagactcactgtttcaccatgaatctctctgagggcttggatcgaacggaggaggaccggagaggggctggccactgtggttgctctcgggcggcactggcgggtcgcggcgaggtcgccggagttaatggctggctcgggcgagtccggcgcagtaccgaggaggtaacggggaaggcagccaagcactagggcgggctttatagccgtggcgcgggcgtggtcaccggcggccgcgggtgcgcgggggttctcgcacgggcgtgctctgagcgcgcccccggatgccagctcgcgtcgaacacgtggaagcttgcttctgccatggttcaacggccgattagagcgccatagcgtgcgtatcttggcaaagtcact

SEQ ID NO: 15803 - DNA, 367 bp, Zea mays
atatgatatcagctgtgctgcctgtatcgaccaaaacattatggactagaaatcctctgatcacacacgagataaccatagcatcattgtgtgggtaatccttgagttgaagatcctcttgggagaaggtaattggaatgtgagaccatcttgacttgatgaagggtgcttgtccccccacatgttgtacccttctctgtgtttacttcttctgcttcttcgtggctggctctgaccatgaaccgcctattatcgggagtaccagcttttgggccgaagcacctctatcttgatctttgaacgaagacattatctttgaaaagtggtagtgagttgacctgaggagggcgcctatgttggggacttg

SEQ ID NO: 15804 - DNA, 359 bp, Zea mays
  unsure (1)..(359): unsure at all n locations
gagcagctgcaaaagggagtcttttttcattgtaataatacagatccttgaagtttacaaaaataccctgtgcggtctctggtcgcatatacctattttcgccacacaaaattgaaccttnttagccaatcaacacaaaaggaacataaccacagagagaatggagatattctcaccccacgctaagaccagtggggccaatagatgtctggaacataagattgaatgggtagggatcagaaagtggattctttgtatcangggcaacaatgccgcattccttaatctttgcaccaagttcctctgctgagaggtcatccataatagcaagaatacgcttaaattcatcaaccttctct

SEQ ID NO: 15805 - DNA, 475 bp, Zea mays
  unsure (1)..(475): unsure at all n locations
agcttctttgaagcacgcaactccttgatgatataatccttggaagacaacagcttaccaagtcgagacacttcatactgngacgccctcagttcatcccgatgatggtctatgtcagacatggtgaagcgatgactcctctccagaatagtcaaggaattgctggcgtcgcgatataatctgtccagattgtcgcgagaagcaatgagcgttcgtctctccttctacaagcaagaacaacagtgagcatcanagcatagaaagcaaagcagaagcagtaaagaaatnttacttcataattcatcttctcagagtcaagttgagcattcaaagaagaattcaatgtgcgggcactgtccaagaaggcagagacttggttcangtcagcctggctctgggtatgcttctcctcagcattggagcaccgctgagtcaaagctggtaaagcagtagagaaaacacaagatatgagata

SEQ ID NO: 15806 - DNA, 443 bp, Zea mays
  unsure (1)..(443): unsure at all n locations
tgcaagcttgcgcatagtccactccaacttatcttctgtgaaacccgacctcgttgcaacatgacaccagaatgtgcaacacaaccagcgttgaacgaattcagaattatcgcagagcatatcggcacaagagacctggttccggagttttcggctttcatggattttcctacttttaaagaatgggatgctgcccaagctaatgggggagaaaaaagaaggcgagcttgtgcgtttaccttactatgtcaagtttaagacatactntagaacaccttgccaagagaggctggatacacttgaagtactgtgcagtgaactactcgtcaagtactcccaatcataagatcaattgatgactgccgccttctgtacccgtcccatactaatactgagataagtgctggacgccttgagtttgaatccctgctatgatatctgat

SEQ ID NO: 15807 - DNA, 399 bp, Zea mays
  unsure (1)..(399): unsure at all n locations
agctctacactaatcatcctattattgtcatgttctagatatagagagatattccatattcttaaaagaataaggtgtcacgtaaggaattcaattcctaggacacttataaagggaatctctctttatatctagaaatcgtgagactaatgtttttgtctaaataacctaagtagtctcacatgtagagaataagtttctctttggagatgcgtaatctaacatgaaaagaaaagtcaatccaatgatttatgttgttttgcctcttgcttaaattggatatgattcttctatatttatcgctctccatgttatgaattagatntattcccataatcctaaaagaattatctatgcttgttttgtaagcaaaattaagcatacatcatggaataacct

SEQ ID NO: 15808 - DNA, 386 bp, Zea mays
  unsure (1)..(386): unsure at all n locations
gcatatgcaagtaatataccaattgactcaagcctagctaccggtgcataggtttcaccgaaatccacacctttgactagtgaatatcctttggctaccagtcaggctttgttccttgtcaccacaccatgctcatcttgctttttgcggaatacccatttggttcctacaacattttgattaggacgtggaactaaatgacatacctcatttctcgtgaagttgttgagctcctcttgcattaccagcacccaatctgaatctcttaatgcatcctctaccctggatggctcaatagaggaaacaaaagagtaatgttcacaaaaatgagcgactctagatcgagtggctacccncttatgaatatcgtcgaggatggagttcac

SEQ ID NO: 15809 - DNA, 344 bp, Zea mays
  unsure (1)..(344): unsure at all n locations
atgcaagctaatcctgagaagtgtgtcttctgggtgccctgatgcatgcttctagggttcatcgtctccgagcgaggcatcgaagccaacccggagaagattgcggccatcaccagcatgggacccatcaaggacttaaaaggggtacagagggtcatgggatgcctngngggggtgagnntgttnttttcncgcctccgccccccccccccctccgccctcctcccccganngnnaatgttttnttggannttgagtcgaggaaccctctgaacctgaagcgctcttacaaagccctgtttgggccgcggcggatgagaaccctctggttacgtcccgaacca

SEQ ID NO: 15810 - DNA, 292 bp, Zea mays
  unsure (1)..(292): unsure at all n locations
ggagatttagatagccaaataaaagatcatgccacagctcttggaaagaaagaatntgaactttcaacagtggagggtttactggaagaagcttaagcccatacttgaaaattgaatagtgaacttctcttcaagtcagaaagcttcgaacaagaaaagcataaatttgatgcgaaagttgaggcttgagtcgaatagagtttaaatttgcagaaattactgaaagagcttcaagataaatgtctagacttcggcaaccgatgcgtgcagcggctaaagcaggttttcaact

SEQ ID NO: 15811 - DNA, 354 bp, Zea mays
gcttgtgcaaagccactcgaactaatcttcggagaaacccgacctctctgcaacatgacacccgaaggtccaacacaacaagcaatgaatgaattcagaattattgcagagcatatcagtacaagggacctggttcatgagtttttggctttcaaagtttttcccagtttgaaagaatgggaaatgccgaagctaaagggggagaagaaagaaggtgaacttgtacgtttaccttactatttcaagtttaagaaatactttataacgccttgccaagagtggctagacacaattgaagtaatgtgcaatgaaatacttggcaattattccaaaaaagaagatcaattgatgact

SEQ ID NO: 15812 - DNA, 381 bp, Zea mays
  unsure (1)..(381): unsure at all n locations
catcataagaaaagagtatagaattcttccacaatactgaacagatggacatcttcactgatttccaacatagcttctcagataaaaaggaaagtggaataaaaagcttcccaactagatagctaacttcattaacatttaacgataaaccaaggtgcaggggatgcccacactctggtgacagtcattacaaagatccaaatccaacatagttcatcatgacaaacataaaagcacaggataatcaaactaccctatctaactaagactaactaaaagtaagactgatgctaagactataacttctatatatatntttagagtaattacaagatctgacgctgacgagctatggntctaaatttatcttggtcctacagt

SEQ ID NO: 15813 - DNA, 423 bp, Zea mays
  unsure (1)..(423): unsure at all n locations
gcttatatctcaacctgagaggaaagcttatcctaaggggtgatgtgttagtttgagctttggtgatgtgttagtttgagctttggtgatgtgttagtttgagctttgctagtgtgttattcatatgcttcttgcagtattatatgtgttgcatcatatggactagtgcttccgttgctataattaattggcatctattgtgttcattctgaaatagtcagtcatgttgataatgatgcatatggtttatggtgcttaagattgctntaaattagtatctgagtttaaattggtatcttaatggtgaatagtggtaggttgatattcctgtgagatatccactaaattgaatggtgtttaactctgattatgtgcatttgtgtgttatagcatcatggtttgatctntgacacaatgcattcc

SEQ ID NO: 15814 - DNA, 75 bp, Zea mays
cttggttgtctcataccctagggtcttttatatccccaagcactataaccatggagccaacaaggaagctatctg

SEQ ID NO: 15815 - DNA, 401 bp, Zea mays
agcttccttttaccccgaaatgtgatataccctttctcggtgagactctgaggtagacataatccccaactagaaagtacaagggttttcgtccgttgtctgcataactcttcttacgagcttgagcttctttcaaattatgaattatttggtgaactttctcttctgtctcttttaccatatcaggcctgaagaaacttctttcacctggttcagaccagtttaacgaagtacgacaccgtcgtccatacagggcttcaaagggtgccattttgatactctcttgatggctattattgtatgagaactccgctaatggtaacagtcatcccatttctatggaaattctagagcacaagctcgcaacatgtcttcaagtatattggtcactctctcattct

SEQ ID NO: 15816 - DNA, 414 bp, Zea mays
  unsure (1)..(414): unsure at all n locations
catgcaagcttgatcaacgatttctcaaagctcttgaatatatcactatctattcacgacacgcaacagagacgaacagacacaagcgaacaaacatacacatgcataagaacattacaccttatgaagggaaacattattaaaatgtgcaatataaaatagagctcgcttctacggtcatgcgagaaaaagaaacgccgagatcgaagctacgattgagaagtntatcacgtttgtgttatacgaatatgaactagaacatttaactcgtcataaacacattagtcgacatttatcaaatgttgattagagctacttatcactttcaattaatttgctacaccaacaactaccggttaaatatgtaatntaattaatatgagccagtctaagtgaggagaataacgacgcccg

SEQ ID NO: 15817 - DNA, 322 bp, Zea mays
  unsure (1)..(322): unsure at all n locations
agcttataacaagaggatagaagcaagagctcgtccatatgtcatgatagaaggggaattgtataaacatggagtttgtgctccgctgctcaaatgcttatccagaaccaaaggtatagagttaatgaaagaaatacatgcaggcctgtgtggatctcacatcggatctaggccgttactcggaaaaattttccgtcaagggttttattggccgaaggcagcttctgatgcagcagaattggttcanaagtgcgaaggttgtcagaaatgtgcaagagatcaaaaacaaccttcgtccttaacacagctcatacaacccact

SEQ ID NO: 15818 - DNA, 347 bp, Zea mays
agcttgataatgaagagatggcgctcatcatcaaaagcttccgtcaaatcctcaagcaaaggaaggggaaggattacaaaccccgctccaagagggtgtgctacaagtgtggtaagcccggtcattctattgctaaatgttcaatgtctagtgatagtgacaggggcgacgacaagagggggaagaaggagaagaagagatactattagaagaagggcggcgatgcccacgtgtgtcgagaatgggactccaatgagagctccaccgactcctcctctgacgaggatgccgccaatatcgccgtcaacaaaggccttctcttccaaacattggcacaagtgcttcat

SEQ ID NO: 15819 - DNA, 331 bp, Zea mays
  unsure (1)..(331): unsure at all n locations
agcttatgtccgacggctatcagacaagccgtcngacataagcttattatgtctgacggtctcctacgtggccgtcggaactaatggattttaatcgacccctgcggccgtgtcggtttcatttctatctctctcccgctcgcatgcgtagccgccgccgccgcctagccaaggagccgccgccgtcgcccggcaccggccaagtctcttccggggacctccagtctcgtcccgacgcccagcccgctcccgatcctctatccacgtcgaccggcaactccaccaccggccaagcgacaccgaagccgccccgacgccgctctggagcctc

SEQ ID NO: 15820 - DNA, 493 bp, Zea mays
  unsure (1)..(493): unsure at all n locations
agcttctaaagggagaacacatgataggtttgactaacgtgcaattcgaanaagatagaccttgtgcagcttgtcaagcaggtaaacaagtgggaggagcacatcacagcaagaatgtgatgaccacttcaagacccctggagctgctgcatatggacctcttcggacccgtcgcctatctgagcataggagggagtaagtatggtctagttattgttgatgacttttcccgcttcacttgggtgttctttntgcaggataagtctgaaacccaagggaccctcaagcgcttcctcaggagagctcanaatgagtttgagctcaaagtgaagaagataaggagcgacaacgggtccgagttcaagaaccttcaagtggaggagttccttgaggaggaagggatcaagcatgagttctccgctccctacacaccacagcanaacggtgtggtagagaggaagaacaggacgctaatcgacatggctaggactat

SEQ ID NO: 15821 - DNA, 497 bp, Zea mays
  unsure (1)..(497): unsure at all n locations
gcttgagctacccacaagtttaatggtacaatctatgttctttatggaaatatattntacaaagaaaggaaattattcttaaggtatactctaactaattntctttgggagaaaatcccaaagtaggattttgggtgttataggatccaaataaaattactattcgaacttaaagcctctagccaactctagctaaaatcaattttttggtctcttgcaggcaaataaaatcaactctatctcttctgatgagatattgtaggaaatcaaatnttttgctttaactaatccttggtaattccaaatgatctgtttcattcggatatagcttgatccanattcaaaaacttctaaggcctccctctattaggtgtacacctaaccttggtgggctcttctttntttcttcctaccaatctttntcttaactggttttccttttctattatctaggggaccacaatcatcaactttaaaacaacttgctaataaatcat

SEQ ID NO: 15822 - DNA, 455 bp, Zea mays
  unsure (1)..(455): unsure at all n locations
gcttgtgaagattcttcattccaacatgggctagtcggcggtgccaaagccaacccaagttagtcttagcaactaagcaagtgtcgagttcagctctttcaaaatctaccaagtatagctgaccctctaacactcccttaaaagctattgaatcgtcacttcttctaaagacagtaacatcagtatcagtaaacagacagttgtagcccattttacataattgggatacggaaagcacattgtaatctaaagaatctacaagaaaaacattggaaatagtatggtcaggtgatatagcaattttacccaaccctgtgaccaaaccttgatttccatccncgaatgtgatagctcgttggggatcttggttnttctcatatgaggagaacatctntttctcccctgtcatatgggttgtgcacccactgtcgagtatccaacttgagccccccgat

SEQ ID NO: 15823 - DNA, 401 bp, Zea mays
  unsure (1)..(401): unsure at all n locations
agcttgcaacatcttagttgactctctttctagaggtgcttattttgccatcatgagtagtgatagtgatttattgatgctcatgatatatggactagaattaaaataaaatattctgagtccaattgtactacttctactccctatgttgcttgtggtactaacctttcaaagggagatgaaaaacgatggccaccaaacgatgaatccacctcaccgacagggtttgcttccactagntataaatgtcttattgctaacaatgatagtggagacgaaagcgatgatgaggaggaatatgaggatgatagcgaggatgagtcttcatcaccacaaggtacattntcctgtattgcttccactaataataatgacagggaaaatgagaaccgtgatgtgga

SEQ ID NO: 15824 - DNA, 464 bp, Zea mays
  unsure (1)..(464): unsure at all n locations
taagtcacctgcggcatgcaagcttgttgcgaaagctctcttttgggcttggctacttcaatcagcataacatcatctgccccactcggtctaacctcatacaagcggntatagatgtcgttgaagagggtaatcttccagatgttcgtcaaccaccgatcctttagatatttggtggtacaaggacgaggagcttctatgggtaagntataggtggtgtctatttagccccagaaggccgacctatngttttcattgacatcaatgggacccaccaagtgcattagccacacatggacctaaggaaatatgaaccatatgaagggggaagagtatatggaggaggagcaccaaataggggagaaaatagaggaggagcaccatatggagcattatatgntagagaagcaccatacgattcatataaaggagcatcatatgaatatccatattgatatggataa

SEQ ID NO: 15825 - DNA, 344 bp, Zea mays
tatcagtcgctacccactactacatatcggcggaagtttattctattccaatttcaaggtaaaaaatcttcttcgactcttcattatttttaacaacgaaggtattttctaacgaaggttgcttctgtacagagtatgttattgagcaaagctttgaggatgcaacaggaccttgaagataaaaagcacgaagttataattgaagggttagaaagcaaataaaagatcaaaccgctgctcttgaaaagaaagatgtcgaacttcggacaatggaaagtttactggcggaagctgaagccaacattgcaaagctggataaggagcttctctcagaatcaaagagt

SEQ ID NO: 15826 - DNA, 405 bp, Zea mays
  unsure (1)..(405): unsure at all n locations
tgcagcttggccttggcaccaatacatggaattctntgtggcttcnacctctccacaagaagccctttcgaatcttgtcaatagctttcaaagcccattgaggaaggtcaatggccatggccaaataaacaatcattcctgtaagaacagactgcaccataactcttctaccagccttgttcattaaatctgccttccaccccggaagctgagctgctaccctatcaatgatagattggatggccgatctcggaagcttcttcaaggaggcactccgagatatttacaagggaagcttgatatctcacaaggcaacatctcctgtaaggtctcaacctcagattgaccacactaaataggaaagacactactcttctgaacattattttgaagtccagaagcatc

SEQ ID NO: 15827 - DNA, 338 bp, Zea mays
  unsure (1)..(338): unsure at all n locations
gcttcggcgacggttaaaaaatttggcagcaaaacagtgcaaatagcaatgaatgctgtggtaacttcacacctactcgtctctttatatagtgctgcaggtaagaaggtgaagcgccaggatttttacaccaggcggacacccgctcgcactcgctgcgcggtggaccgcagagaccgaacagtaactctgaaaggcggggccgctacacgctgagaaattgaatcgtttctcgacaacaagctcagggaaggtgttttttagaccttcggtgctccgaagcttaagagactttnttcacggatcaagctcgttacgaaaaacgatctatcaccgcg

SEQ ID NO: 15828 - DNA, 353 bp, Zea mays
  unsure (1)..(353): unsure at all n locations
agcttcgatcgctaaaagatantntggtttctccttttctatggtctggctataagcaaatttcttatggcctagagtgtcctataggagaaccatgccatggtcaatcccaattttgtgaagatatcgttgcattacgaaaaanagcaatggggagaagaccgaaatgttgaataccttggccgaattatatattatagtcatggatttcaggttgtgtgacgtcatggtcttggagtaccattttatcgaagaggaaggattgcaaagttctgtgtataaacaagttaggaagagatcaaagaggagaatattangattgatctcatctgactcaaccaaggggttaatct

SEQ ID NO: 15829 - DNA, 426 bp, Zea mays
  unsure (1)..(426): unsure at all n locations
agctngccgnggatgatatggtcttgaatgtaattattgtgtatgccccttaaaattggccgcaatgcttgctaagagacttttttgggaagactcagatgccatggttaaaactatacctatttctgagaagcttttcataggaggaggtcttaatgggcatgtaggtacaacaagtgtaggtttcgaggcggttcatgaaggttttgatatggtagtgggaatcatgagagagaagccttggactttgtgngcagctttgacttngtgatagccaacacttcctttaggaagagaattccatttagtaacctatagtagttgccaacactctagtcagattgactttgtccctcacaggaagagaggataaacgagcatgcttggatntaaggtgatacttgnngagcgtgttgtctcttaaca

SEQ ID NO: 15830 - DNA, 427 bp, Zea mays
  unsure (1)..(427): unsure at all n locations
agcttctgtactataacgtatccgaagactaaagatctaaccgacttaaagatggaatgacttcttagtccataagggtctaagtcataattgtaatcttttgtaaggggcatgattgtaatttctcacacgctgcgtcctgtgcctataaatagatgaacagtactcctttactgttcacgcaatcttgtaatcgtcaacgcattacactagaactattgntttctgccaaggcaaaggtataaatgtacctaaatattatgttttaatatttaggttcatattaaaaaataagtgaataatgttattcattcttggtattttataatgttttatattntatattcatttcacattgttttatgtctgaccacgaacgtgtgaccttcgtgatatattgcccatgaccttcgtccgaagctcatta

SEQ ID NO: 15831 - DNA, 397 bp, Zea mays
  unsure (1)..(397): unsure at all n locations
agcttgttattgtgtccatgggactccatactactacttgcttgcattggacctgaactacaaatgtatatatatgagcaagctacaggttgtactaggctgctaggtggtggtccacatccgaatacacttgcattagtttgttagtgagcttcacggttacactctgtgtatcagcatcttcaacagtaaactgaaagtgctcattccagataggattcagatcgttgttctataaagtagtatagggaacacgacacccagttatctgctacaaaaattaatgtattgccaaacctcaagagntgttgaaatttcaggtacaacaaanatttcgccactaatgatcttcagtctgaaatctcagcttttctgacatagcgcattgattgagaaa

SEQ ID NO: 15832 - DNA, 464 bp, Zea mays
agcttcaatcttcacactcttctttcttgaatctgaggaaatacaatcttcgatacatgttgaaatgaacaatacgagaatgatcatttgttttataaggtggttccccatttctattacgtgcataatagaaatacagcacaggctaaagtatcataccatgattacaaatcagacttaaacgacacatgcagctgaacatgttgcgcaacctactggactaacaaacagtgttttcagccaggcacgcaggcctgattcagaaggcctggactaacaaacagaaatgatcaaatatttcggagaataataataccttgctgtatgttgaggattttctgcctcctcatacgatgcagcacgagcagcatattccttcctgatgcgctccagatcagcgatgctcggtgccgcacagactagctctagctcctctctgctgagccacgtagcaatgttcatct

SEQ ID NO: 15833 - DNA, 413 bp, Zea mays
atactctatgatagagtacagataactcttcgtccggcttgatctcggacgcagcctaacttttcatcgtcaacaccaccgaagagtagcgcccctggttgatatccgcaggatatggcatatccttataactactctttctgagactttgtcaactctagtccaactaagatttaaaagttgaaaatttcctcttctgaagcagcttcggctatttgcttatccttctcaggcgctatggccatggattcttcggaggctgcagcagattcttctgcggccatgtctagaagtatcttatcaatattagaaagcgtgctttctatatgtacatatttggccgtggcagcttcagcagtgcagctttggccggtgcacctcgagaggtgagcgctctcaacagctggtgctta

SEQ ID NO: 15834 - DNA, 346 bp, Zea mays
  unsure (1)..(346): unsure at all n locations
ctgcaagcttganggaaatggatcagggagttgccctacgtggtctatagcctaccaactcaaccctatcgagcattgtagggaaatacccctttcttcatggtatatggatcaaaagcagtattgccagcagacctagccttcagggcacccaggctaaccttaaacagcatcgaggaagcagaagttacccgactcgagcaaattgatgtgctagaagaagaacgactaaatgtagtcattcagtcggtcagataccagcaaacttgaggcgttaccatgacaaggctatacgtcccctagcattngcagtaggagatctggtgctccgctgcatatatctgag

SEQ ID NO: 15835 - DNA, 246 bp, Zea mays
  unsure (1)..(246): unsure at all n locations
gcagcttgagcgngactggcttcgtctgaaagccttgttatctggttattttcatatccttcagctnttgccatgaggtgattgttcctggcctaagggaggagtaccaagtttgtgcaacgctcctgacagccatgacgaaggactttgccatgaccgctgtgttttcaccatacgaagatatagttgcctcatagctcattcaaaattgcttcgggtctgcatgatcgtcgtacatggggagct

SEQ ID NO: 15836 - DNA, 459 bp, Zea mays
  unsure (1)..(459): unsure at all n locations
agcttcngcatctatcgggtgtactntntatgagcccctggcgtccaatcgacaatgaagtctactagtgcttgagattgaatcgaagatctatgaacaaagtcaatgggtgaactcgtcagctctgtagcccacttgccaacccttcttggagcttctctatttcttatgatattctttagagttcgggacgaaggtactattatatggtaggactgaaaataatgctaaagtttcctggaggccatcaatacagcatatagtaccttttccaactctgtgtagtttcttttcgaaggacttaatacttcagagacgaagtaaattgggacttgtttctttgcttgttcatcttggctttcttgaaccagcactgcacatgactgcagtgtgggaagcagctacatacaataacattgnggctcctgatgaatgtggagtcaaggttgtcaactgtat

SEQ ID NO: 15837 - DNA, 437 bp, Zea mays
  unsure (1)..(437): unsure at all n locations
agctngaattgtctgtgaatgtaggtgaactacattaccggtgggagccattgggttattgacagtggatgcacacaacatatgacaggcaacccacggatgttcacctcattagatgagaatgttgatggtcaagataaaatcacatttggagacaactcaaaaggaaaagtacaaggacttagcaaggtggcaatctcaaatgacttatcaatatcaaatgttctcttagttgcacctttgagcttcaatttattatcagtgggacaactctgtgatcttggacttcaatgcttattcactccatcagaggttattgtaacaaaaatggatgatgaatcaatgctattcaagggttttagatacaacaacctctacttagtggatttcacttcagaagatgcagacttaagaacttgcctcttcaccaaagcttc

SEQ ID NO: 15838 - DNA, 418 bp, Zea mays
agctgtgaaggttcttcatccccacatgtgctaatcggcgatgccacaaccagcccatgctagtcttagcaattaagcatgcatctagatcggcctcttcttttgcaaaatcaactaagtaaagcttgccatctaatacacccttaaaggctagtgaaccatcacttcttctaaagacagacacatctacatttgtaaaaagacaattatatcccatattgcatagttgactaacagaatagcaaatgtaaccaagagactcaactaaaaacacatcggagatagagtgctcattagaaattgcaattttacctaacccttttaccttgccttgattcccatcaccgaatataattgaatcttgggaatccttattcttgacgtaggaggtgaacatcttcttctcccccgtcatatg

SEQ ID NO: 15839 - DNA, 414 bp, Zea mays
  unsure (1)..(414): unsure at all n locations
agcttgtgaagattcttcattccaacatgtgctanactgcgatgccagagccagcccatgttagtcttagcaattaagcaagtgtcgagttcagctctatcaaaatccactaagtatagctgaccctataacactcccttaaatgctattgaatcatcacttcttctaaagaaagcaacacctatatccgtaaaaagacaggtgtagcccattttacataattgtgaaactgaaagcaagttataatctagagaatctacaagaaaaaatattggaaatggaatggtcaggtgatatagcaattttacccaatcctttgaccaaaccttgattcccatccccgaatgtgatagctcggtggggatctgggttnttctcataggaggaaaacatcttcttctcccctgtcatgtg

SEQ ID NO: 15840 - DNA, 304 bp, Zea mays
gagatacacatacatagaacagtattctatgttttcacacaatggctcaatgtaattggtttcaaagatggtcattacatcgagaacctcttgttttgtggcattgtcatgagagattcatctgtatcaatgtttcatataaattttgtatttccgtcgcaacgcacgggcacatacctataacaatataacacacatatgaacataagttatcgtgttattatacggttccgttgcaacgcacgggcactcaactagttactccttaagagcacaaagagggcgtgcacacccaccctcaccg

SEQ ID NO: 15841 - DNA, 478 bp, Zea mays
gagcacggcattggatgatcgactgggagaaatgccagacgccatgaggatgagctttggctgggaaggacggacacggagctctgagtatagagaggtccggccggcggctgcctaacggaaattcagctggacgccatgggagggagtctgctgtgggagcagagcacagaccggtgtccagggaagcatgagagctcggtgttgaagactggcgtgagctccatggcggctggatagatgtcctgagggagcacggatgaccgacgacgtttgggagctggttcctatgcacacgggataaggagcagaaactgcgtacgaaaggataagaagacgagtctaacggtggaggataacgagccgagcgacttcaacaaatatctatggagattatcctgacaacgagagaaagaatataatacaactgataacggatgttgttatgtctcggtcacacattattttataagacata

SEQ ID NO: 15842 - DNA, 353 bp, Zea mays
  unsure (1)..(353): unsure at all n locations
agcttcccaacccaaacctttcccggcaagcaaatataatagaatcctatcctatgaaacaagcttctactattcaaatcaaacctcagagtcttcggatgcacgtgctttgtgaacattccatctcctgcacaagacanactcagctgtgaaggaatgaatgggaatgggcttgtcggctgtgaagactatcatctgtaggcgagcgaagcaaagccctagttcaatctagaggccgtcacgaagggatccctcgggtcaacaagcaaggggatgagcgctntgttgctntattatcacattagagaagcggaacctncaagctcagacatctcgaactcagaaactaccct

SEQ ID NO: 15843 - DNA, 392 bp, Zea mays
  unsure (1)..(392): unsure at all n locations
agcttagatcttcgtactaagatntcaatagatattgctagatgacatataataaaagggtcaaaagaggtagacaagtcatagacgaattatattatattttcttaatatatccaatcattgaatacaataatacctctgccttgacaaaaggttgaattccagaatatgcgattgcagttactagaatccgtgaacagtaaaggaatactgttcactatttataggcacagggcgcagcctgtgagggattacaagtatgccccttataaaagtttacaacattgactcagacctttatggactaaaaggtcattctatctttaagtcggtttgtaataccgaagcttcatgaagagggaccttcggccatcttatacaaacagcttcag

SEQ ID NO: 15844 - DNA, 433 bp, Zea mays
  unsure (1)..(433): unsure at all n locations
agcttctaatgggagaacacgtgataggtctaactaatgttcatttcgataaagatagaccttgtgcagctcgtcaagcagggaaacaggtgggaggcactcatcacaccaaaaatgtgatgaccacatcaagacccttggagatgcttcatatggacctcttcggacccgtcgcctatctaagtataggaggaagtaagtatggtcttgttatagttgatgaattttcccgcttcacttgngtattctttctgcaggataaatctaaaacccaagggaccctcaagcgcttcctcaggagagctcaaaatgagtttgagctcaaggtgaagaagataaggagcgacaacgggtccgaatcaagaatcttcaagtggggagttccttaggaggggggatcaagcacgagttttcgctcctacacacctcaaca

SEQ ID NO: 15845 - DNA, 403 bp, Zea mays
agctttgtgcacgtatttgaagttcagttcaacttatcacccgctgaccgacggtcagactaaaagaactaatcagattctggaagacatgtttgagagtttgtgcattgcaagataagtcgggatgggataagaagttaccttatgtgaaattctcctataacaacagccaccaggtcagcttgaaaatgtcactgtttcaggcactatacgaaagggagtgtagaactccactgctctatgatcagcctggagaaaggcaggtgttcggtctcgacattttgctcgaagccgaagagaacatcataatggttcgaggaaatctaaagatagcccagtcaaggctgtgcagttatgctgacacaagaagagaacttgagtttggagtgagagaatatgtcta

SEQ ID NO: 15846 - DNA, 319 bp, Zea mays
  unsure (1)..(319): unsure at all n locations
gatcacccttcttggcgatctataaattaagttacaactgtttgagttaggatctctgaatctgtcccaatttggacagcagagcctttctcatattttcttaccttgatatatattaaattaacctgngatattcataaatgaattgtagataattctattagctttctaaaaagtctaggatcaccttatttggatgtctgaaactccagttatgaatttttgaagtaagtagtcgaattctgtccaaatctggacagaatttacggttagcattgtttgaccattctaagtgtcaagtctcactgtgatgataata

SEQ ID NO: 15847 - DNA, 494 bp, Zea mays
  unsure (1)..(494): unsure at all n locations
gcttgtgaacagtatatgtacagaagagtatattctgctttggctgatcagccgaaacccatgcttctatgtgaagatatagtaaagcagaaggtattgctggggtcccaattatctgaacagcaggagaaaaccttgataaggtttttattcaacaacaaagatgtttttgcatggtcagccaacgatctctgtggtgtcaacagggacgtcattgaaaattcactcaatgtcaatccatccttcagacccaggaagcaaaagcttcggaaaatgtctaacgataaagccgaaggtgcttggaacgaagtaaaaagacttctcagtgctggtgtcattagataagtaaaatacctagaatggctagccagcactgttatggtgaagaaggccaatggtaaatggagaatgtgcattgattntactgatctgaacaatgcttgtccaaaggatgagttcccattaccaagaatagattctctagtagatgtagt

SEQ ID NO: 15848 - DNA, 486 bp, Zea mays
  unsure (1)..(486): unsure at all n locations
caagcttataagtggcgaaggaacaatccatataatccaagcatggcaacaacatataacttgatattctttttgacatagttntccaacacagacaaggaaaatgaaatacttattacaaatatgactggatattgctgatagcagcagagatatagcaatacccgaactaacctctccaacattgctaaatgcatagcaaactgtcctgaaaatagcgagtcccattgcatcaggtaacctacatatgtaaaagttgcggctatctggaagtcagcgcattgcatcaggtaacctaggctgtaaaatgatttttgctagtttcatctagtgatgcttctaataagtagatttgcatgcttataattacaggcaaataaatggatgaatgaaacaaactganactatnttttgtngatngaagcacgtgattgcatgacacagcacacaaggcccanatgatgccggtgtttagaacatatgtgt

SEQ ID NO: 15849 - DNA, 500 bp, Zea mays
  unsure (1)..(500): unsure at all n locations
agcttctatcctacactcatagatccatctcatctcaaaagatcctaacttatcctaattaaaatatatctagcttaataaatctatcttatcctacaagattctcgcttatcttaatagattcaacttatcttaaaagagttgtcttatcctaaacactttacttatctcatcctagagtaataaatatggtctaattcaaattaattagatcttatttagtcaaatctagttacgctaaactaatatagnttccatctaatctaaactaacctaatgtaactcactcaaataggtgagttaatacttgcgaaatagattagaccctatccgcatgttttaacctagttcaccctacactaaataaagaatgacagaccaacccaaccaatagagttatgatgggatgcataatctgcctatccccacctatcatcaaacaaacctttgacctacatcatgtaggctatctcattcatatctatcttaaccatattccc

SEQ ID NO: 15850 - DNA, 285 bp, Zea mays
  unsure (1)..(285): unsure at all n locations
ggcttgatacttggctctattcctctcctctctacaatggaagngcagtggtgtaggtcccaccagtttgctactttgctgagcaagctgagaaacgatccagaaatgattactatgcgtggtggaagagcaacgcgggctggcaaacagtgtggggctggcgtgcgggtggcgctggctggctgcgcggcacgcgagctatcgcgtggagtagaagcactgagtggcaatgtgcggcgcgcggtggctatgcaaggcgctctggctggcggcgggcgcgagttg

SEQ ID NO: 15851 - DNA, 439 bp, Zea mays
  unsure (1)..(439): unsure at all n locations
agacttggcgcggtggctggactgatcagtttcaaatggtggctcaactggtggtcagtttcaactcgcgcaggcataataattaataatttttgctggacacctgcgtgtacggcctgtgggggcagaaccagagccatggcagaacaagtcaatggcagactactattacttacttaataagtagtagagatttattacacattntaaactttattgctcccaatttatttggtgctttcaatttaatttgagtctagtcttatttcattgataattttgtatttgatgcatagacaaaagaaatacagcatgatgcatatttttancgtgttttatttagaaatttatttgaaataacatgtgtctcatgcataatcacttcatcccaagagatccttcattaattntaatgacgaggtcattagtgggctatact

SEQ ID NO: 15852 - DNA, 490 bp, Zea mays
  unsure (1)..(490): unsure at all n locations
gcttaactgacaggtcaacaatgcaatgaatgccttngaagttatcatcttgcctcattgcatcaatataattattaagctgcaactcaagtttcagcaaatcattcccaaatatgtcattagggtaaaattcagctagtcttcgtatcttctgcgcatcanaggaagcaaatgaatcagaaggatctaaggctgacatacaagaaagcaactccatattgacctcatcgaaccggttatcaagctcttgactaatttgatcaatgacaccaatatatatttctcttctgaagtgatcatcatttgtttggtttcgagtgtatcgtgctgattntccataaggcacataattatcctccatagcaggaacttggatgccatattgattgcaaaacaatgtaaccctttgtaggaattgatcccaaccattagacctcaattcttgcattctgctctntgccacattaacaagtgagatngcattgatgat

SEQ ID NO: 15853 - DNA, 431 bp, Zea mays
  unsure (1)..(431): unsure at all n locations
agcttctaaagggagaacacatnttgggactaacatatgttcattttgagaaagacagggtttgtagtgcatgtcaagcaagaaagcaagtgggttcccatcatcctcacaagaacatcatgatgaccaacaggccgcttgaactactccacatggatctattcggcccgatcgcttacataagcatcgacgggagtaagtattgtcttgtaattgtggatgattattcttgcttcacttggggtattcttttgcaggaaaaatcacaaacccaagataccttaaagggattcttgagacgagctcaaaacgagttcggattaaggatcaagaagataagaagcgacaatgggacggagttcaagaactcttcaattgaaggctttcttgatgacgagggcatcangcatgggttctctttctcctacaca

SEQ ID NO: 15854 - DNA, 211 bp, Zea mays
tttagaaagacaggatatatagcgcatgtcaagcagggaagcaagttggtgttcatcattcacacaagaacattatgacaactgacaggccactcgagcttctgcacattgacctatttggcctgatatcttacataagcatcggcgggagtaagaactggcatgttattgtggatgacttttcttgctccacttgtgtgtctcttttgca

SEQ ID NO: 15855 - DNA, 410 bp, Zea mays
  unsure (1)..(410): unsure at all n locations
agctttattgtnctttattgtctctattgtcaaaagtnggcttcttgtggggagaactgcagaatatgggacatagggggagtttttgaaatctttgatcaatctcttttggaacgactctctttatgcctcaacatgtgtgttcgacatagatatagagatttgagtttgatttgcacaaacaaaccaattggtggccaaagatgatccatatatgccaaaattgaatataacttaaagcccgtctctatttgatgtgatcttgcacttgttctagcagctttatgtcgtgttggcataaatcaccaaaaagggggaagatgaatgggaaacgtgcccttgggccatttctaagtatttcggtgagtgagtgtaacacatggcttaaatgttaataatgcacatggatg

SEQ ID NO: 15856 - DNA, 402 bp, Zea mays
gcttttgagcaccacatcctctaagcattggtacttctatcttaccatgcacttgctaatgtcatcaagtactcaggaatcgaactccagtttgtggcttgaagattactagttagtgttagactgggggtggataatggctatttcgttatctgtaacctccccctacctaaccgaattggcctgttcttggctagaacacctaagacccggatgcattcaaagttgggctaatactgtcaacatctaggtcatgtgtgtgcgaaccgagaaaccctcggcgcatcaagaattgtcgcgagaagcgtggattatccatctgggactacatctaacatttttcattgatatgcacgagctctccaacatcgtgatgctgatgtcgtaaggcattcatctttg

SEQ ID NO: 15857 - DNA, 189 bp, Zea mays
atgtcggagcggcaaaggtgatgactagtgaatctaggtattgagtgattccttgaccacttggctcaagatcaagcagagtcttgatagaggagcaagtgagagcattgtgaaagcatctaggccccttggtggttctagtgattaatgatgtcggggaccataattgtggcagaaccacccgaatta

SEQ ID NO: 15858 - DNA, 393 bp, Zea mays
  unsure (1)..(393): unsure at all n locations
agctntcctatgtctcggacccggcagatactttctggaagcccgagatcgtcctcgccggacttcggtcgcccgccgccgcgcgtggaccgagctctccagtaagccattttcaaatgccttgcacccacgttttccctagcacccagtgaagctctctgacccgtatgattgaactattgcgccatgagtaggccaaattcctcattgccgacgagcatcttcggctgcgcacgcggaccgaccgactccgaccatccccgaccgcgacccgcacattgccgtgatccccgagacctcccctacatcctcgaccacctcaccggagcagcctcgccgccggtaagcccctccggccttttcttcaccgcgggtactgttcaaatggggaca

SEQ ID NO: 15859 - DNA, 440 bp, Zea mays
  unsure (1)..(440): unsure at all n locations
agcttaatgcccctactagaagaatgtctatctttgttaatggcaaagctcccatggctcatgataacgagggatacattntgtaccctgccggctatcctgagcacataattaggagaattcattctangaagtctcactctagctctcatcatgctttcatgtataagagtgaggcatctaattctaggcaatcaacccatgcttaattgtctaaaaagaaatattctattgcatcagatgatcataaccatttatttaagacttttgatgcatcttatgttctaactaacaaatctggcaaggtagttgccaatatgctgggggcaacacataggctcaagacttgtgtttggacccaaagttctgtttctatgcaaacgaccaaactcgttggacctaaacaaaactaaatgtttgaagtttgcttcgggcacagt

SEQ ID NO: 15860 - DNA, 376 bp, Zea mays
  unsure (1)..(376): unsure at all n locations
agaacacgtgataggtttgacttacgttcttttctaaaaagatagaccttgtgcagcttgtcaagcatgtaaacaagtgggaggaacacatcacagcaagaatgtgatgactacttcaagacctctggagctgctgcatatggacctcttcggacccgtcgcctatctgagcataggaggaagtaaatatggtctagttattgttgatgactttttccgcttcacttgggtgttctttttgcaggataagtctgaaacccaagggaccctcaagcgcttcctaaggagagctcaaaatgagttngagctcaatgtgaagaagataaggagcgacaacgggtccgaattcaagaatcttaagtggaggagttcttga

SEQ ID NO: 15861 - DNA, 388 bp, Zea mays
  unsure (1)..(388): unsure at all n locations
agctntatatcatagcatgatgcatatgcgagtatgatacggatggcttccagtcgagcaaccggtgcaaaggtctctccaaaatctaagccttcaacttgagagaatccctttgcaacaattcttgccttgttccttacaatcacgccttgatcatcttgtttgtttctgaacacccactttgttccaatgattcttgcatcttgtgggggcttctctagggtccaaacttggttacgagtgaagttgtttagttcttcatgcatggcgttcacccagtccggatcctgtagcgcctcatctatgcatgtaggttcaacacaagagacaaaggagtgatgttcaataaaataagcatgtttatgtgatcgagtaataaccccttgtg

SEQ ID NO: 15862 - DNA, 448 bp, Zea mays
agcttcttctcagcaggcactgtgggccctgcctctgtttcagcctgtgttattgtagcttcaacttctatttgcttagtatcagccttgggttgtgttttgtcagctttggcaaccttccctgtgggagcgggacttatggagtcggttgtttccaatacatctaatacatttaccatccttctccttttaggagtcacgatagaacctgttttgtaccttggtactgtcgcccttgttggagcgctcaaaatatttggcattttcgttatttcttcaatttctagttcatcaaccttatcaaccttcgtttcaacttccttggctgtaggcaccttcggcattacagccggctcttcagtactctttgtagttgaagcagtttcttttctttcggcagcagaagatgtccctgcgccaaactcaagaaccacgacaggttcaatgt

SEQ ID NO: 15863 - DNA, 353 bp, Zea mays
gcttctaaagggagagcacattttatgactaaccaatgtttattttgagaaagacaggatttgtagcgcatgccaagcaggaaagcaagttggctctcatcatccgcataagaacataatgacgaccgacaggccactagagctcctgcacatggatctattcggcccgatcgcttacataagcatcgacgggagtaagtactgtcttgttattgtggatgattattctcgcttcacttgggtattcttcttacaggaaaaatctcaaacccaagagaccttaaagggattcttaagacgggctcaaaatgagttcggcttaaggatcaagaaaataaaaagcgacaacggga

SEQ ID NO: 15864 - DNA, 484 bp, Zea mays
  unsure (1)..(484): unsure at all n locations
gcttggagccaccactcagtgagaataacatctggccttggtgtttgtgttgaaatgtgaaattataccaatgtcttcttgaaattgaaaatcctcgttctttgtaactacagtacgcttgaaatgtgaaatgccatgcttaattctttctgtagtgggattatgcattgatttcttataaaatcaacccaatagcattgtgatgctattacttttctgtggaaccatgcgatcggacttctcaaacccagtcatctggcagntaactctgggctttcgctgctcgttagttgcatgatggcttctagcttttctgatcgaaattctttctattgggcaggcgcagcatatccaaattctacaatgtgtaatccaaatcatttgtgtgcctgaaagaagctataacattttcaggctctgcanagacattctaagtcgagaaggctactcagaaacggagatctcttgctacatatatgatgga

SEQ ID NO: 15865 - DNA, 351 bp, Zea mays
  unsure (1)..(351): unsure at all n locations
agcttccacaaagcatccatcaggataatctccaatggtgatgaagatcntgcttgagtacgccttcacctcagtctttgggatgtctacgatagtggatcgagagggatcatccaacctatcgtactcccaacgatagttggtcttctcttttaatggggaactcagcccgaatccaatcgtcggccacatgcatgctcaagagccccagggttntcatatcaactatcttctttgtaacaactaccacgacatcaatgtacttgggggctangtcgctcatacattccaagcgcaaggctgggcattggccaaggaacttgggtaattntggagtatggctaatgatat

SEQ ID NO: 15866 - DNA, 352 bp, Zea mays
  unsure (1)..(352): unsure at all n locations
nncagcttttatgttgtgtggctacaacacttttgtttgtaccctgaaacaggggtaccccttactacagtatgaagacgtggtgcccgcgcggctatctttagtcgcgtggtaaacagcacccgaccccaccacgtggacgactccgaggccgccacgtggccagagaagatgatataccccaaggtatcaacagtgggtccggaccctcatgggaatgtgttcggaccctatatgcagaccggaccttcgggagaggttcgggaccaccacaggcgcataccggacccctaggatgtgttctggacccctctgtgtggggtccgggccactcacagccgggtcccgggac

SEQ ID NO: 15867 - DNA, 421 bp, Zea mays
  unsure (1)..(421): unsure at all n locations
gcttagccttttgtcagtgaagtatataaccatgtctctgtgtgggggctgcctagagacaggcacaaatttaggattatgaacagntctaatgtagtggtcaaatgcagcattttcacccaaactaataggaatttctagcctagcaagcaatcgaaccaattcattacgtgcaaccataggacaatacttccagatacgcatactaccatcaggattaaaagatatctgagactgagacatgcaggttttttcacgcctcctgggacatctatccctatgtcgggtgaggtggccagtgccaccactagagagagcagaatattgcttagagcaatgtatgcacttagctgcataccttaccttcttaccattcacgaatttgaaaagtttctcgaaatctaaccacactgcagaagta

SEQ ID NO: 15868 - DNA, 365 bp, Zea mays
  unsure (1)..(365): unsure at all n locations
agcttgtaacccctactgcaagcaccccggtgcatgataatataagcctcatccctcctcttatgttccatcttgcatcaacccatctggacaggggcacgcagcacaaaattcactatttatatgatcaaggacaaggcaacacaattgttaatcatcaaggaccttcatccttcgaagcattatctccttgaagatataatgcttatcgagacgaangtcaataaggacttaccttcatcatattaatgcatagatgagaatacataacgatgaatattataactatgttataataattcatttattcttgcatttcataaaacatatattaatatcaataatatcaatattacattgatact

SEQ ID NO: 15869 - DNA, 473 bp, Zea mays
  unsure (1)..(473): unsure at all n locations
agcttatgaagattcttcatcccaacatgggctattctgcggtgccagagccaacccatgttagtcttagaaattaagcaagtgtcgagttcagctctatcaaaatctaccaagtatagctgaccctctaacactcccttaaatgctactgaatcatcacttcttctaaagacagtaacacctatatccgtaaaaagacagttgtagcccattttacataattgagaaacggaaagcaaatggtaatccaaagaatctacaagagaaacattggaaatggaatggtcaggagatatagcaattntacccaatcctttgaccaaaccttgatttccatcccgaatgtgaatagctcgtgggggatcttggttnttctcataggaggagaacatcttcttctcccctgtcatgtggtttgtgcacccgctatcgatgattcaacttgagcccctggatgatataccctacaaaca

SEQ ID NO: 15870 - DNA, 385 bp, Zea mays
  unsure (1)..(385): unsure at all n locations
agcttagcgacgccatggagagtgatgagctgctcaagccctcgtacagcatcatccatttcgattacaactttctggcagctgacctgtgaaagggaaacgatgagccaacagtcaattaaggtagcgtgcttactgtatcgttggttgttgtttattaagccactattctgtctgatgacggcatggggggaggttgntaccttttgtcttctgcacacaaggacgtattcatctagtttctccttcacctccgctcgcaccttctttctgtattcgntgacccgttgtggattcaccgtgctgtgatgaacttttgcccccactggaaagaacagagtaagtcctgtcaactctgaaccctcaaggcagtgcatcatgaact

SEQ ID NO: 15871 - DNA, 389 bp, Zea mays
  unsure (1)..(389): unsure at all n locations
tgtatctatgtcggtgcacaaaatcttaatcgtcttacccttcggnacaacagagatcgctgaagcagcagcttttctttttttnccctgggtttatgagggatagntataatctgggtatacaaaaccaataacatcaaaaaccctgtttaaccttttcttgcctcgtcctccgaaggctaaggtcatggcatcatcttcggcccttgtatatgccccaagcagttcgtcgctagtttcctcaacactagttagtcagtcatcatttggctcatcaaactgctctctgtatctgaaggtatatttaaaccaaaccgccttgagtagactcgacagcagtcttcttcagcatctaccagtcattcacaagaggccacactcangctatg

SEQ ID NO: 15872 - DNA, 415 bp, Zea mays
  unsure (1)..(415): unsure at all n locations
agcttacctaaagatattgaaacaatgaacaatgatctcactgcaggcagcacagatgcaccagatgaaggtggaggagtccaagaagtaccaagaactacggaattcagaagaggaagctcttgcgctagttgaaatggagaaagcgaagtgtagagctgcacttgaggcagcagaagctgcgcagaaaattgcagagctcgaggcgcagaagagattgagagcanagtggaaggcaaagagggaggctgaggatatgaagaaagcaactgatgcactgaacaaaaatgatatccggtacaggagatactccatcgatgacatagaggctgctactcataagtttgataaggcgctcaagataggagaaggcggatatggaccagtatacaaagcagtactggatcataccaat

SEQ ID NO: 15873 - DNA, 437 bp, Zea mays
  unsure (1)..(437): unsure at all n locations
tgaactnttaactcacgaaatgagaagcgctgttagtccttatgcaaatgcaactacttgatgctctatgaggcactaagttntacacagatctaagtcattgacccctcttaatagtacggctatctagcctactaatccggtcaggtatcttctctaaactcctcaagaccggcaaaagtaaaacctatattatacctttgccttcatctgatccacaaccaatgcgtatgactcttcaacattcttatttctatgtggtccaaccctgcattcttatttctccaagaatcgttagtccacaagtagttgtcattaattactaaaacattaccaaaggggcctagatgattcacaatctccccctttntggtaattgatgacaacaccacatagtatattaaagagaagtttagtttctccaaatctctctcata

SEQ ID NO: 15874 - DNA, 453 bp, Zea mays
  unsure (1)..(453): unsure at all n locations
agcttcattagtattcattgagcttcagtttcggcttctgctttcgttaagcttcggcttcatcttcttactctttagcttcggcctcggcttcgtcatcctgtacgtattcatgtattgtaagcaaaattcaagttcgaaggaagaggtaagcacaaggtatgattntgttaccagcttaagatgactccgagtttcatcactagctttgcttcgtccaccctttgtccatactagttntataaatctatttgctatgcttcgggcaaggttcagaatattatccaggtctgctggtgataaactgaaattgggtctattgacaacctttccatgttcgcagccagatttcaggaaggcaacagctgtgcctcgataagctaccagggcacanaagtcaccatgtccagcaataacttcatcaaggtcatcaatttcaccttcgatatgatc

SEQ ID NO: 15875 - DNA, 93 bp, Zea mays
  unsure (1)..(93): unsure at all n locations
gaaatntctagaatcaagaatattgagcttatgcctaagtctgggtaaagaatgttcatcaagtggcttggtaaagatatcggctaattgatc

SEQ ID NO: 15876 - DNA, 489 bp, Zea mays
  unsure (1)..(489): unsure at all n locations
ctgagcatgcagcttcngnttacaaaccgacttaaagatagaatgaccttttttttcatagaggtctgagtcaatgttgatagcttttataaagggcatacttgtaattcctcacaggctgcgtcatgtgcctataaatagtgaacagtattcctttactgttcacgcattctggtaattgccaccgcatcattcggaatccaactattgccaaagcagaggtattattgtattccattgatcaatatatcaagtaaatataatataatataaattcgctataagttacatatcctctttatatataccccttattctacattcgcctataataattattgaaatttaatacgaagactagagctcgaatcatactctcgttaccttcgcccaagccattatcctcaaggaaaatgctcatgacgaagacgttatattaacacttatgttgcttggtctaatcaaacattgaagcaatcccacattgcc

SEQ ID NO: 15877 - DNA, 425 bp, Zea mays
  unsure (1)..(425): unsure at all n locations
gcagcttgtcaccacagcaactgcattctacctcgactttctnttcatacggggaagagttgaatcgtcttccatctccgacgacgagccgaccgtgcctgaggaagaacccctctgcgagaagctcgccgacggaggaacccacgccggaatgttcggcgacattatgaagctggagaacgagacccggcgcagcctgtatctcgagatgagatctcagaggcgggagaaacccctaacgaacgagtcttcatggataggaggaactcccgccgacgtgatcgacggcaggctcaagagcaagctgaataggatgcgaggctacgccgagagaaccctctcttcgcgcgaaacctgaaccctgaattccccgcgccatgaacacaccgagtgaggtcggnggagtattggctcggatagccgat

SEQ ID NO: 15878 - DNA, 386 bp, Zea mays
  unsure (1)..(386): unsure at all n locations
catgcaagctttgattccctcttattatataattctatnttctttttcacttacgcttaaccatacgcagatgacttcttacggatcctcggaaggagggaacgcacagtccccgtatcttgtgggaggtacttcatggagccgggtacacgacgccttcccagtacacggtgccattgttcaagaagcaccgagtgccccgctgtagggtaatgatgaccctatagcctcatcccttacagccaagctggcgttcgttggactccaagtctttctgataccgggttgaggatactatcgaggcgattgctctccacgggctgaccaccttctgtggtttcaccccttggagctgctactcatcccgttggcttgtacccacggag

SEQ ID NO: 15879 - DNA, 224 bp, Zea mays
  unsure (1)..(224): unsure at all n locations
agctntntcatgcatgcttgtaccatgggcattttctcaatcttgcaggttcctggtgttccaatcatgtacatcacaagacatatgtattccatagaacgctcctggagccacaattgtggaggtatgtgatatcttcatctgacaaacttatgtactgtgttctctcttgtcctaacttatatcctacaatcacattagaatgcgaaactttgatgcttttt

SEQ ID NO: 15880 - DNA, 366 bp, Zea mays
agcttaatcccgagaaatgtgttttcggtgtaccattatgaaagttgctcgggtttatcgtcagctaccatggaattgaggctaatccggataagattgaagctatcatgaagatggaagctcctcgatcacaaaagaaggttcagcgacttactggatgtatggcagctttgagcagatttatatccaagctgggggaaaaggtttgccattttacaagctactcaagaaggtggataagtttcaatggacttcagaagcacaagaatctctagatgcactgaaaaaattcttgacaacaccaccagtactgaagccaccccggcgagctacatcaactcaaccagctgaagattgctactgata

SEQ ID NO: 15881 - DNA, 405 bp, Zea mays
  unsure (1)..(405): unsure at all n locations
agcttatcaagtctactttcatatggatccggaattatagncatatctgttctgaggccgccgtaatcattgttttcttaccgagacatttcctgccttttctgcccatggtgctgcgtcaccctattttggcccaatgggtcgtgtatcaagttaggtccattagggacgcatcctatggttgcagcacgaccccaatacccttgtggtcgtcctcccatgtgtataaaccccctagccgccaccaagaacagcgggttttgttagatcaagtttagctctcgctacttgcttgcaagcgcgcgtgctagttcagccgcccgtcttcttgtcttcggaaccccaccatattgtagtttgatctctaaacctacatttagatctgggaattcagacttgttctac

SEQ ID NO: 15882 - DNA, 417 bp, Zea mays
  unsure (1)..(417): unsure at all n locations
agcttagccatggcaattctatatgaatttagtgcttatccaaccattttagccaaaagggtgaactaacaattaattgagcacatgcagatttttaggacagcagcacagcagttattagttttaatcatatctcttcaaatattcatccaaaaatagcaaactatgattttctggaaagcttaaaaagtgaactataactttggtattttcacctcaacctgattcaacacatagcaaggtcaaatagtgcaatcacagcagctctgtccagatttggacagattcagacttgcaacttcaaaaattcacaactagagattcagacatccaaataagtggatcctagactttctggagaggtattaanaatgtctacatatcatttataaacatctcaaggtgaattcaatatta

SEQ ID NO: 15883 - DNA, 494 bp, Zea mays
  unsure (1)..(494): unsure at all n locations
agcttgacattgtctccctggtggaagctaacgccatccttaatgccagggtgtctcccactatagagcatgcttctagcaaattaaaaattntcattttctaagtcatgctcattaattttggcactaagttgagctatgtgatcattttggtgtttaattaaagctaggtgatcatgaatagcatcaataatatctctacatctagtgcaaatagtaacatgctcaacggtagatgtagaggggttgcgagtatttaattcaacaatcttagcatgtaaaataacattctcatctctaagattggaaatagaaacattgcanacatttaaatctttagccttagcaattaattnttcattctcaattttaaggcttgagagagatgcattcaatttgtcaatcttagcaatcaaattagcattatcatttctaaggtntgatagagaatcatcactatcatttaatttctcaaccttagcatcatttatcat

SEQ ID NO: 15884 - DNA, 439 bp, Zea mays
  unsure (1)..(439): unsure at all n locations
tgccgcatgcaagcttaacaggctaatggcgaagctaaccaagtggttggctctgtttgtaaatgaccggagggagctggtcactgtggcctacgctctaatagctcggtcggcggtgtgacgacgtgctccgagcgaattacggtgatccttatctcgggcaagacttgttagcacgcggggaggtatggtcgatgctagaggctgctttataagcactgcgcgtngcaccgtcaatctttgacctgcgaacacactctagcgtgcactgtggagcgctggtgcgccaacttggcgtaaccgcgggtgttcaccaccggactacacgtggaaccgttgcttctgaccgagttctaacactggttggtgcatatcttcccaatttagcgagatcgctggaaggatttgtcccctgcaatgcctttcttttgtgatggat

SEQ ID NO: 15885 - DNA, 392 bp, Zea mays
cttaccgcatttgaagcatgatcgcttacccttggtcttattcttgctcggctgtccattgcgaccctttagcaccgtcttgaagcgcttaatgatgagagccatttcttcatcattaagcccggccgcctcaatttgcgccaccttgcttggtagtgccttcttgctcctcgatgccttgagagcaatgggttgaggctcgtggattggaccgttcaacgcgtcatcgacgtaccctgcctacttgatcatcatccgcccgctcacgaattttccaagtacttcttcgggcgtcatcatcgtgtacctggggttctcacgaatattgctcacgagatgatgatccataactggtaatgacctgagcattatgcggacgacagtctgatccg

SEQ ID NO: 15886 - DNA, 415 bp, Zea mays
  unsure (1)..(415): unsure at all n locations
agcttgggtttttgagaaatggcaaccgaagtaactcaactttatataaaccgaacctcattaatcaatgctagttgggtcaactaattcagctttttggtaaatcaattgacatcggctcagcaaggcgggtcaaacacaacactggcacatctactgacctcatgaactattcaaatttattcaaggaaaccgtataggtaattaccctcttagtggaagaagtgttagcttgtttagcataagcacttccaccaaaccattacatttcactaagcataaggtatcttggcaagaagaggaatccaatgggcaatatctggtgtgagtcgctgaacgcctgagcccgcatctggcttcatttcttctgtatccttcttagnggaagaaagaatgacagtttgctttctttgca

SEQ ID NO: 15887 - DNA, 183 bp, Zea mays
agcttatcaaaagaaatttctagaatcaagaatattgtgctcatgcctaagtctgggaaaagattgttcatcaagtggcttggtaaaatatcggctaattgatctttacaattaatgtaagaaatctcgatatcccccttttgttggtgatcccttaaaaaatgataccgaatggctatgtgc

SEQ ID NO: 15888 - DNA, 330 bp, Zea mays
  unsure (1)..(330): unsure at all n locations
agcttgtacagagtccgctcgagctaatcttctgataaacccgaccccagtgcagcatgacaccagaaggtccaacccaaacggcgttggctgaattcagaattattgcagagcacattggcactatggatttggtgcaggaatttctggctttcaaagtatttccaactatgaaggaatgggctatgccgaagcttaaaggagagaagaaagagggggagcttgtccgactaccctatcattatanattcaagaaatatttcaaggcaccatgccaagaatggctcgaaacaatcgaaataatgagtactgaaattcttggaattactc

SEQ ID NO: 15889 - DNA, 414 bp, Zea mays
gcctgtcccgtcctcggtcccgcgcggtcaaccttttttaagaaggccctggtcctcccttttatagtcgtaaggagaggatccaggtgtacaatggtgggtgtagcagagtgctacgtgtctagcggagggagagctagcgccctatgtacatgccaatgtggcagccgaagagatctgggcaccctgctggcgtgatgtcgtggctgtcggaggtgcggcggagcctgtccgagggacagcttgtggagcggtcgagtccctgctgacgtcgtcctgcttacgtagagagcatggggctgccgtcgtcatagagcttgtggagcgccatcattgccccttcggcggagctggccggatgggacgcccgtcttgttcttcgtgacacgagtcgattcggggtatgatgatgat

SEQ ID NO: 15890 - DNA, 336 bp, Zea mays
  unsure (1)..(336): unsure at all n locations
agcttggaggcgtcgatgggaatcctacttggcatatgttccttcttttcttcttctattgccttgaatgcgacgggttgcaccttgggtgtaaaggtgccgccttgctccaagatgacgatatgtttggagccttngatcatcaactcaaagctcacaaactttcctatcacttcctcgggagacattagcttgtatctaggatcaccacgtattaattgaactcgagtaggattacgaaatatgagtgatctaagaataaccttgaccatttcatggtcatcccatttggtgctcttgagggtgcgcactctggtgactaanggtttgagccgg

SEQ ID NO: 15891 - DNA, 403 bp, Zea mays
  unsure (1)..(403): unsure at all n locations
ttcaagtggggactcaataggaaattctgaattttagaattctgaatttcagaccttgagccaaagatcaagcgtgttcaccttgatccctaactcaaatgctaatggccccattaacaaaaatgagcatatctaacccctctgtcgcatgccagaagatggcattgggatgcgagccctagacacgactaaactctggttntgcctcgggtttgagcagggagacagactggatttccgggctccaaatctttgcacccagtaggcaaaatcctatgaccnccacacaagatcggtagcttgtatggaggagaagaggtnttgtgcactaaccaaggcgagagcaggctcggatgggcgaccacacgcgccataacttgggcacaacgcacgggcacacgtg

SEQ ID NO: 15892 - DNA, 341 bp, Zea mays
agcttgtcccttgctagataatctttatgagaggctttaacgataactaggggaagcatgagcatcttgatgcctccataaaaatataagagttatcgacatgaattagcatctctaccttgattaagcttccacactttatttatttgttagcaaggttgtgttcttatttcctagtttagcttgctatgctagcatagatatggaatataagttgcgtaacctttttatggtagtgatagaaacacacctagcaaccgtaggttcacatctaaatagattacattcttgcttgtgtttgactagaaaaaattaaggccttttttaagaagagaatttta

SEQ ID NO: 15893 - DNA, 321 bp, Zea mays
  unsure (1)..(321): unsure at all n locations
agcttgcacatagtctcgangatgtatgcctctattatttccaagncttctaaagctattactttttgtgaaaccgcattgaaaaagtaacacaagcgtgtgatgacaactttgacatgctctgtttcgagggctcttaccgcaattgggaggaacaccgtcatcatcacatggcagtcatgagagttgtcgccaaatagagacaaatccttcatcctgactagtctgctgatattggatgagaaacctgtgggcactttgaccccacgcaaacatttccaaatctttggtctctcctcaactgacaagttgtagctagct

SEQ ID NO: 15894 - DNA, 371 bp, Zea mays
  unsure (1)..(371): unsure at all n locations
caactctngttgggtcctacaaggttagatacaacaacttttggaggccaaatacaagtcttgtcttccttgcatttagatcccaattntctaacaactactttggcatttttacatgagaatacaaaagaagcattacatgcatgataaacagtagtaggaccagtgcatgctctcctaggcgcatgagatacaacatcattacgcctaggcctatttctaccataagcatatgtagagctaggtgcaaccaaagcatgaggattaaatgcagcattatgagaaacaatattatcatagcacctatcattatgagcatgactagtaaatttcttatcatagagataggcatggttcttttgagaactact

SEQ ID NO: 15895 - DNA, 363 bp, Zea mays
  unsure (1)..(363): unsure at all n locations
agtggacagctgcagactatgctaagctagagtcctcagacgatgaagacacttcgttcgacatagctgctcggctagggtcccaaatcgaggctgctccaatcctatacagagtggtacgaagttgtttactcaatttaattatgttatttcgatacaatatgtcctttttgtggatgctaatgttttaacttttgaatagggaaactctatggtcgtatctatgggtgaacttgagtgtatctcatggagaacttcagacaccacaacgcgttactatcagtgagtatgaatgtttagaagcnaaagcgaatcatttattngtatattctaacctatgtgtgtaactaaactgtcaattac

SEQ ID NO: 15896 - DNA, 331 bp, Zea mays
  unsure (1)..(331): unsure at all n locations
gagcttgtcctcttgtggcaccggacagtccggtgccacaccggacaggtgctattcactatccggtgcgcctctgactctgcggcattgttcataagagtcagcggcttttgcagtcgaacgccgcgcgatggaaccggtgctccgctggtgcaccggacagtccggggaattatagcggagggcgcctgtaaaaacccgatagtggctgtgttgagctgaacggtgctgccacagcgaacactgtccggtggtgcactggacagttcggtgcgccgntactcagaacactcaaagttctttgctcctttgaaattgatctctaacttga

SEQ ID NO: 15897 - DNA, 108 bp, Zea mays
agctgactcaacaaatataaagtattgaagagcagtcaacataacttaattgtcatcagcatgggacgattgtcgaatcataacatactgaggacaagtagaggatga

SEQ ID NO: 15898 - DNA, 435 bp, Zea mays
cgctagttatagaagcagatggtggggtaactttgttacaatcccattatgtggaaaaggtgatgagtcgctttggtgctagagactgagatcctgctacaacaccttatgaccacaatgtgctattaagaaagaatcagagaatagcaatggatcaattgacatactcccagatcattggctcgctcatgtaccctgcaagtgcaacaaggccagacatctcttatgctgtgagtaagctaagtccgtttgtgtctaaaccaggagatgatcactggcgtgctcttgagagagtgctgcggtatttgaaaggtactatgacatatcgcgatcattatacccggaaccacaaagtgctggtaagctattgcgatgccaactggatttctgatgctgatgatcttattgccacgagccgatatagtgttctgtttg

SEQ ID NO: 15899 - DNA, 465 bp, Zea mays
  unsure (1)..(465): unsure at all n locations
ggatccttgagtcacctgcagctgcagcttctaagggaaacacatttaggactaacaaatgttcatcttgagaaagacaggatttgtagcgcatgccaagcaagaaagcaagttggaacccatcatccacacaagaacatcatgacgaccgacaggccactggagctcctgcacatggatctattcggcccgatcgcttacataancatcggcgggagtaagtactgtctagttattgtggatgattattctcgcttcacttgggtaacctctgtacaggaaaaatctcanactcaagagaaccttaagggattcttgagactggctcaaaatgagttcggcttaaggatcaagaatataagaagcgacaacggaacggagttcaagaactctcatatcgaaggctttcttgaggagganggcatcaagcatgagttctcttcntcctacacgccacaacaaaat

SEQ ID NO: 15900 - DNA, 400 bp, Zea mays
gcaaggataattgatgctcaaaaggataatctgggtatgaagcacatatgagagaagataagggctggagtgcccatattttttgcagacgatcaatgtgtgctatggtctaataaccgcataatagtgccaaagaatgaagaactccgccagcaaatcttatatgaagcgcatcttagtcgctattctattcatccgggaagcactaaaatgtaccaagacttaaagcaacattactggtggacaaagatgaagattgaattgcacgttatgtggctaaatgtgacacttgcagacgtgtcaaagccatacacatgaagactgtcggtccattacagtcgctaccaataccaacatgtgaatgggaagacataagtatggactttattcgtggattgcc

SEQ ID NO: 15901 - DNA, 449 bp, Zea mays
  unsure (1)..(449): unsure at all n locations
tgcttgcacacatagctcacttaaatacctttgatcatatctcttgtatatgctatgactaatgtgttttcaagtcgatttcagaccaagtcataggtatattgaaagggaattggagtcttcggcgaagacaaaggcttccactccgtaactcatgcttcgccatcactccgagcaactctcttgtctttgggggagaaatgagcatcaaggaaaaggacttcatccttgggggagagagtaaaagctcaaacgcaaaaggacttcgtctttggcataatcttaactcatttatttatgaccaaaggggaagattgacttacagggctctaatgattccgttcttggcgattcatgccaataagggggagaaatgagcccaaagcataatgaccgcaccaccaccaccatatncaaaaacttagtgcgttcaaaagtctctatcattg

SEQ ID NO: 15902 - DNA, 430 bp, Zea mays
agcatgccaatacttgtcaaagcaacagtacttgccaacacattaactacagaccataccagtgaggtggcctttatcatgctgcggactggatactattggacctttcaagacagctcaaaggggatatactcatgtattggtggcgattgacaaattcactatatggatggagttcaagcccattgcttctttaacctctggtaaggccgcggaatttatacaagacataatattcagattctggataccaaacagtatcatcactgacttaggatccaacttcactagttcagaattcttcgacttctgcaagcaacaaagcattcagatcaagaacgcatctgttgcacatgcaagagccaacaggcagtgtgagcgagccaacggaatgatattggaggcactcaggaaaaaggtcttctgatag

SEQ ID NO: 15903 - DNA, 362 bp, Zea mays
  unsure (1)..(362): unsure at all n locations
nagcttgaatggtcttgtataagttactctaataactcctgtaatgacttgtacaaaatatgatgtaatctgagtattactttgtaatataatcttacttttccgaccatgtatgaaatgctttggtgtggacgagattaatacttttgagccataagcgaaaaacacctttccttctttgcgtacacaacgaagcatataattgcctttcttttgagaccgaagcatgttagtcgttatgctgatgatgatcctatgtatgtctaagtgaatgtttatgaatgcatatgtcatgatgtaatgtatcgcgcacatgaatgttcaaatacatattcgaaagcatattcccttgagaatgactc

SEQ ID NO: 15904 - DNA, 330 bp, Zea mays
  unsure (1)..(330): unsure at all n locations
agcttgtgagattaataataggtattacataagttcatcgntggtctaagatttaagtcataataaaataaattgatctatgattatgtacttgtaaataacacttacggaaataataatctattttcaaataaagttaatgtatgccataagttatgttatactctgaattcattatcccttatataggaatgtgactctttaagatgtgttccaatgattgtacatgattggtatgatgttcatttgcactttccaaatgtattgaatgcatgctcgctttatttagacaacgagcagtccgaagttcctgagtgtgttgttggagac

SEQ ID NO: 15905 - DNA, 418 bp, Zea mays
  unsure (1)..(418): unsure at all n locations
agcttctaaagggagaacacattctgggactaacaaatgtgcattttaagaaagacaggatttgtagcgcatgccaagcagggaagcatgttggtgttcgtcatccacataagaacatcttgacaactgacaggccactcgagctcctccacatggacctattcggtccgatcgcttacataagcatcggcgggagtaagtactgtctagttattgtggatgactattctcgcttcacttgggtattctttttacaggaaaaatctcaaacccaagagaccttaaagggattcttgtgatgggctcaaaatgagttcggcttgaggatcaagaaaattagatgcgataatgggacggagttcaagaattcacaaattgaaggcttccttgaggagganggcatcaagcatgagttctc

SEQ ID NO: 15906 - DNA, 320 bp, Zea mays
  unsure (1)..(320): unsure at all n locations
agcttcggctatgactaanattttggtagcatatcagtgcaatagcaatgaatgttgtggtaacttcacacctacccgtctgtttatatagtgccgcagatgggaaggtgaatcgtcaaggtctcccacaccgaacaaacagtcacccgcactcgctgaacggtgggccgcatggtccgagaaggtgaatcggtggggcgcgcgtaactgctgcaagaatgggccactgcgcgcgcgatgatatattataatcgttctcgccaacagctcaaggaaggtgttttgaatcttcngcgtcccgaagcctataagatttttta

SEQ ID NO: 15907 - DNA, 454 bp, Zea mays
  unsure (1)..(454): unsure at all n locations
agcttcaagtgatttaaggtcccatgttgaatcatttctaggttcaacttctccatctttggcaaaatgtaatgtcagaagtctttattgtaagacaatgacaggaagccttgcgacttaatgcatctgccactacgttggccttgcctgggtgatagtgaatttccaattcatagtccttaatcaactcaagccatctcctctgcctcatatttaggtctgactgtgtaaagatgtacttcaagcttttatgatctatatagatatgacagatattccccagtagataatgacgccagtatttcagggcatgaaccacagcagctaattccaggtcatgagttggataatgttcctcatgccggcgcaactgtcttgagtcatatgctacgactcggccttcttgcatcangacacaacctaagccactgcctgatgcgtcacaatacacatc

SEQ ID NO: 15908 - DNA, 323 bp, Zea mays
agcttcggggagccgaaggtccaaataacaccttctctgagctcgtagccgagaaacgatttaattttccagcacgcagcggtcccaccttgcagagtttactgtttgtccctgcggtccaccgcgcagcgagcgcaagcgggtgtgcgcctggtgtaaaaactctggcgcttcgccttcttacctgcagcactatattaacagacgagtatgtgtgaagttaccacagcattcattgctatttgcactgttttcctgccaaatattttaaccatcgccgaagctttgccgttagacacgaacgaagctccagtgtgaaacct

SEQ ID NO: 15909 - DNA, 458 bp, Zea mays
agcttctgatctagaaaccacccttggtgatattgataacatgcttctaaaaatggctgatgaagaagctgctgcgacctcggtggacacaacaattgagaaaggaaaagaacaaattgaagatacttcggaagaggaaaatttcaattttcaagatatactagggcaagagttatcagaaactgaaaaggaagaactgaagaaatatgatgtatcctgtgggtacaaaccaggggctttgctgtttggcggagttaatgaagggaaattgaggtgccttcggaatcgaaccgaggcaaaggtcgttaggactttctcgaagaatgttggcctgccgaagattgaggcggacctctgcaggtaccggcgatagcatatcgccggtagcttgttctatgcttaatttaagggaaaactcttaaacttttatttatttttgaattaagatgttctctgac

SEQ ID NO: 15910 - DNA, 353 bp, Zea mays
agcttgagggtctcggcgtagatgatgttgatgcagctgccctcgtccatcaagaccttggtgagcctgacatcgccgacaacagtgtcgacgacgagctggtatttccccgggctcggcacatggtctgggtggtcggcccggtcgaaagtgatgggcttgtctgaccagtctaggtagactggcgccgccaccttcaccgagcatacctcccggcgctcttgcttgcggtgccgagccgaggtattcgccgcatgccctccatagatcatgaagcagtcgcggacctcggggaaccaccctgctgggtgtacttcggtcttgtcgacgtcgtgggccctgccaccctctgc

SEQ ID NO: 15911 - DNA, 446 bp, Zea mays
  unsure (1)..(446): unsure at all n locations
cgcttctccagaacatggatgaatacattcttgccgacaatgatnttcgccaaagaatggaggaggctttcacgttttctgaaatgaccaagggcttcggagggaggttttacccgaggcatgtgagatcaatatacaattctacacaaaatgatgacagaggaagccaacatcataggccacaatactcttgacacgcttatggacaacagaaaagctccttccggccaccagctccaatatgcaaaggcgccatgggcttcggaggaagatttggcgatcaaccgagaagaatcttttgcttattctgcggngagaacaaaggccatactaccaggatgtgccatgttactatacagaagcataatgaaatagctgaaacagcagcacaacaagcccagccgaagcaggtcatgcatacagcttcgtatcattcgccctacatc

SEQ ID NO: 15912 - DNA, 469 bp, Zea mays
  unsure (1)..(469): unsure at all n locations
agctntatgcaacggctgccagaaatgataggtgaactgcattcctctgcctgacactatcttcttgggcacaccatgaagacaaacgatccaggacatgtacagctccgccaatattgcactgttgtagctagtcttgataggtatgaagtgggatgacttggtcaagtggtccaccgctacccaaatggaatcgtagccggctcgagtgcgaggcaagccaactatgaagtccatcccgatttcatcccatttccactgaggaatttgcaatggctgcaacaacccagctggcttttgatgctccgccttgatcctccgataactatcacacataaccacgtgatctgcgatctcccttttcattccgtaccaccagaatttcttcttcagagtcggatacatcttctcacttncagggtgtatggaataagctgtcttatgaagcttcttgaagatcaactccccg

SEQ ID NO: 15913 - DNA, 407 bp, Zea mays
gcttgtcaatttctgacatagtaaccatctatttttcagcttctgcttcgcgggtatcttcggcaaccgcaggaatagctacttttgtcgctgaagccgaaggcggtgttcgttcaatggcttgcagtatgttcacaattcatcgtttcttcttgcctttcatcctctcttctggaaccgaaggcgtgtcgttctctgtaaaagtttggcaattccaatcccagaggacttagcaactttgagggcggagaatcagtcattaccttcgaaatttcatcacttctgcagcaattggcgaacggagggttttctctactgctgtatcgaccctcggctcaatagaaggtgcttggtccagcttttgctctaagaaattgctgcctttggcttaacattgatttggtttc

SEQ ID NO: 15914 - DNA, 435 bp, Zea mays
agcttgacaatgaagagatggcgctcgttattagagctttcgccaaatcctcaaacaaaggagggggaatgactactaggcccactccaagaaggtttgctacaaatgtggtaagcccggtcattttattgctaaatgtcctatgtctagtgacagtgaccgaggcgacgacaagaatgggagaagaaaggagaagaataggttctaccataaaaaaggcggtgatgcccatgtttgtcaagaatgggatttccacgaaagctctagcgactcctccgacgacgaggacgccgccaacatctccgtcccaagggactcctcttcccaacgtcggcccaagtgcctatggcaaggaccgcaaaagaagaatgtaaatccaactctcactaatatgaacctctagtatgatatgctatgatgagaaataattgcgtc

SEQ ID NO: 15915 - DNA, 166 bp, Zea mays
cttaagtcaccgggcatgcactgccgggtgattggctttattattagtggctgccctaaaattggccatcgtgttataactttttgggaaactctatccatgggtaaactatcctatttttaaagctttcttggagaagtcttatgggcatgtagtccacaatgta

SEQ ID NO: 15916 - DNA, 425 bp, Zea mays
agcttcgggagtcgaaggaactatgctttttctttgccagcagtgttgtgagaaattgaagagtatgattgctcacgttggtgccttttctagtgatgaaaagtttgctcacggtgatgtcgacggagcaatagaatggatagaaggtgaaggttatgccttcgacgaagtccttatcggtcgaggagacttttgcgcttgtatgggtgcatggcgaatagcctcgttgcttgcaaaggcttgtcgcgagcatgtgaagattgtgattcgaccagagtttaagggttctgctactgatattaatgacccttccaccgaagtagttgaaatggtaagaaagtttcattatgacctctggcttgctacgggaaagcaaatgcagaagaagttgtagatatggtagggaaaggtttcttttggatgtg

SEQ ID NO: 15917 - DNA, 434 bp, Zea mays
agcttgtagatatgattgtgttgttatagtaaaatagtttctatataatgtgatggtggatatggatgtcgattaaatgtgattgtcggccatcgtgccgttgatatatgtgtggatgtcagccattgtgttgtcagttctatttgcaggttttggaaacctccccgtgcaggggaggtgctgccgaaattttttattgacatgcttgtttatttttttgcagaggtcttcctagccgttgtgggtctgcctgcaccgcgtcgcgtcgccactgcaccaacccgccacaggcccgctagcctgactccaccgtcaccctaggtataacctcaatttctgcatcatggtcgtagatcacgtaacccaattagttgtctcccgtttgaaaggatacaatgtatatatgcagatctttgcatatctacaaatgtatc

SEQ ID NO: 15918 - DNA, 279 bp, Zea mays
aattatggaacctactctgaggtccgccatgatacacactagggagatccatacttatacctcactgagaatttataaatgggtatgcactaatgaacacagtctgaatctaaaaagtcaagattcaaatgaagataaatcacgggaaaaataagcctgcgacgacgggaggaaattgaaatgagtacatcattagagtggaatgtctactacctgctgacccgaagaaggggctacacaacgactatgaatggcacatatacagcgccacttgcgttg

SEQ ID NO: 15919 - DNA, 426 bp, Zea mays
  unsure (1)..(426): unsure at all n locations
agctntacatgtgccaaaggttctcaacaaactaattaaatgaccaaganagggttcanataaaaagagcaaaagaccaccgaagtgtgccctggtctggcgcaccagactgtccggtgtgccaccggacagtgtccggtgcaccagggaaccaaactctgaacttgccaccttcaggaattctgggagccgcttcgctataattcaccggactgtctggtgtagcaccggactgtccggtgtgccagcggagcaacgactacttcgcgccaacggtcgtctgcaaagagcagttaatgcgctacagtgcacgcagaagtcatagcagagccagaaggcgtatcggacagtgaacagtgactgtcctgtgcaccaccggactgtccggtggcccagaagttagaagctccaatggtcgaaccctaa

SEQ ID NO: 15920 - DNA, 453 bp, Zea mays
  unsure (1)..(453): unsure at all n locations
agctntaccaaatggatgtgaagagagcctttttctttgttccaatcaaggaagaggtctatgttgagcaacctcccggctttgaagatagtgagtaccctaaccatgtgtataaactctctaaggcgctttatgggctcaagcaagccccaagagcatggtatgaatgccttagagaatttcttatcactaatggattcaaagtcggaaaagccgatcctacactctttaccaaaacacttgaaaatgatttgtttgtatgccaaatttatgttgatgatattatatttgggtctactaacgaatctacatgtgaagagtttagtangatcatgacacaaatattcgagatgtctatgatgggggagttgaagtacttcttgggatttcaagtgaagcaactccaagagggcaccttcctaaccaaacgaaatatactcaagatactctaaa

SEQ ID NO: 15921 - DNA, 447 bp, Zea mays
  unsure (1)..(447): unsure at all n locations
agcttctaaagggggaacatattntaggacatgattttgtttgcatgtcaagcagggaatcaggttggagtttatcatccacacaagaacatcatgacgaccgagaggtcgcttgaactaatccacatggatctattcggcccgattgcttacataagcatcggtgggagtaagtattgtcttatagttgtggattattattctcgctttacttgggtgttctttttgcaaaaaaaaatcacaaacccaagagacattaaagacattcttaagaagagctcanaatgagttcggattgagaatcaagaaaattagaagcgacaatggaacgaagttcaagaactctcaaatcgaaagatttcttgaagaggagtgcatcaagcatgagttctcttctcctacacacctaacaaaacagtgttgtggagagaagaataaactcttttg

SEQ ID NO: 15922 - DNA, 373 bp, Zea mays
  unsure (1)..(373): unsure at all n locations
agcttctaaagggagagcatattntgggactaaccaatgttcattttgagaaagacaaggtttgtagtgcatgtcaggcagggaagcaagttggtgtccatcatccacagaagaacatcatgacgaccgagaggccacttgagctactccacatggatctattcggcccgatagcttacataagcatcggcgggaagaagtattgtcttgtaattgtggatgattattctcgcttcacttgggtattctttttgcaggataaatctcacacccaagagacattaaaaggattcttgagacgggctcaaaatgagttcagattgagaatcaaaaagataagaagcgacgacagaacggagttcaagaactctca

SEQ ID NO: 15923 - DNA, 389 bp, Zea mays
  unsure (1)..(389): unsure at all n locations
agcttatgttntcttttaggataacatattgtatttgtattgtctttgtacatttcagtggacaagtttacaagggttttaggatgacattaattaccattattcattttcctttctttaatttccatttagggtttctagggtaggtttgaactatgacagtgttttaaaaatttccagagattcctgttaaaattacagtgggttgtcatttgctattctagcctgttttaagaattttgaggcttgagtacaaaagctaagctttaaacaaaaataacaatagttgggaaaaccggccactttacactacaccttctaattaggggtaagttctgtcctcaaggtcatatatgctggcatcctatagtaataatacgcctctatgc

SEQ ID NO: 15924 - DNA, 464 bp, Zea mays
ggatccttaagcactgcggcagcagctttgaatcccaactcctaccttcttcggagacagaaagtctttggtgcagggaggcagtataggaagtcatcttcgtcggtcccattgaacactagtgctcccttcggatattttaattctctggcatagtgattagcttcgtaaatctcttcttcagataggttcttccccgaagcatgtcacacaatgtaatcgcgtatgttggatggtgctttgggggcagcagtatcaatttcttcaaccgaaattggctctgacatttttattttttcagcttccagagctgcctttgtaacttttggttcttcggtttccataggttgttccttggtgggctctgaaggtccatcttcagcttcaagatgttgcttcgaagcttcagcaacaaatgcttcagcagacactccagaaagtcaacaggtctctttggagtatgc

SEQ ID NO: 15925 - DNA, 426 bp, Zea mays
  unsure (1)..(426): unsure at all n locations
agcttgagcaatntgctattatgtttgcttggtttatgtcccagaacttggtagggggcctacatcaatctgctccccttcctcttcaccttcatcaccatccgaagtaatcacaaccctcatgttccttctcagataagtgtgcatctcctttgaaaccacttctggtactctatcacacttcatggtgtcaccaaacccaccggctagatgctgcttaaacctcttgattccaaatggcacaatcttcttacagaagacacactgaacaaaatccttctttggtgtgtctggccaccacccaaactgccactctgngtcctgtgaccttgcctttctcttgaggtcatttgcttgtgcactaaggtcaagagggagtgctgcaattgccttttcagcaatgggtttacaatctgcagcagctga

SEQ ID NO: 15926 - DNA, 315 bp, Zea mays
  unsure (1)..(315): unsure at all n locations
agctggacattgtctccctnttggaagccaatgccatccttaatcccagggcgtctcccactatagagcatgcttctagcacatttaaattttccattttctaagtcatgctcattaattttggcactaagttgagctatgtgatcattttgttgtttaattaaagctaggtgatcaagaataacatcaacattaatgtctctacatctagtgcaaatagtaacatgctcaacggtagatgtagagggtttgcaagtatttaattcaacaatcttagcatataaaatagcattctcatctctaagaatggaaata

SEQ ID NO: 15927 - DNA, 414 bp, Zea mays
  unsure (1)..(414): unsure at all n locations
agcttcggtatccttgcctgttccttcttcgtgagcccctgtcgtctagtaagcgatgaagtctgctagcgcctgtgattgaattgaagatctgtgtacataatcgatgataaattcattgagctccgcgacccactntccaatccttccagtagcttctctgttcctcataatatccttcagaggttgtgatgagggaacaattatatggtaagcttgaaaataatgtcgaagcttcctggaggccattaatacagcatacaacaccttctccaattctgtataatttttctttgaaaaacttaatacttcagaaacaaagtatactggaacttgcttcttaatttgtccttcaagcttctcctgacaagcgccgcactcactgcagagtgcgaagctgccacatacaatagc

SEQ ID NO: 15928 - DNA, 401 bp, Zea mays
  unsure (1)..(401): unsure at all n locations
agcttgcattgcatgtttaaattacttgtattgcatctagggcttgtctaacctagttgagataaccgccaacaaagcgagtgagaaagcttaactcgggtcaaacttgacaagtcttagttttaagcttttagcacttaaattcttactttatatgcaattgttggttcttgaaatatgcacgaggtactgcacttagggggagtattcaaaactcacatcactcatgaaaacccctaatgcaagccaaaatgcaaatttcaccatttgcctattttctctaaaaattatctagcctatggcaaaatattgtgaaaagtatatgagggtgccaatacctgtcccaacaagtggttatttgtgtgattataagtngtgatttggtttgtttgaaattagat

SEQ ID NO: 15929 - DNA, 432 bp, Zea mays
  unsure (1)..(432): unsure at all n locations
agctgcaagcttcccctaaaaattctccccttagctataatgatggtttntgcaaatgcctattaatttccccctttttattaatttctccttctttttgtttgaaaatgtttttagaaaacaaggtggtggcgtggtccttttgctttggcccaataatttctccccctttggcattaatcgccaaaaacgaagaaaactagaggccttgtacaatatatgaatgtaaatacatgagtagggcagagaaaatatgataccgatagagttgtagtggaagccttgcctttgccgaatattccatttccctctcaatctaagactaagcatagaaatactcttggaaacacattaatcttagctgtggcacaagaagaataataaatatgcaggtgtacgatatgaaaaagacatgatcgaagatatataaag

SEQ ID NO: 15930 - DNA, 453 bp, Zea mays
  unsure (1)..(453): unsure at all n locations
agctntacaaaacacttagagagtttagagtattataatgaagcacgattaaggaaaccaagcaacaagagcaataaatgaaactcaaatcactctctctcaagtcactaatcactaatgatcacttgtctcaattgtggaacttggagagattggaagctttgaatgtgtctttgaatgaattgctagctcttgtattgaatgtgtatgagtggagtgcttgggtgtcatgaatggaggtggttggggttgaatttatagcctccaaccacttcctagccgttgctccttttctgccgaccgcggacagtccgcgcccctggtctggacggtccgcccctgcatatcaacgactgaaatcgcaacgatcagcagtaacggctatatcaacggctatagagcatttaatgcgtcgtcggatgtcangtaaagcagtcgcggacggtctggtcg

SEQ ID NO: 15931 - DNA, 387 bp, Zea mays
  unsure (1)..(387): unsure at all n locations
cagcttgatgagttgactaaagaacatgagtgtgtcttatgtgctctcatgatgatttggtccaaaggtatgaatctattacaattgagcaagataactctttattttgtatcgctcaattagtaaataggaatgccttacttaaggaccaagtagaaaagctaaatgttgaaaatctaacttttcaagataaatatgatatgcttctatattttcatgaaaatcgtatggatgatcatatcatattaaacattgctcatgaggttgtgatagaaaactgtgatagtcgcctagaggggggggtgaatagggcgaaactganatttacaaatataaacacacctacacaccggggttagcgttagtaataataaatgagtccgcaag

SEQ ID NO: 15932 - DNA, 435 bp, Zea mays
  unsure (1)..(435): unsure at all n locations
agcttctaaagggagaacacgcgataggtttgactaatgtgcatttcgaanaagatagaacttgtgcagcttgtcaagcaggtaaacaggtgggaggagcacatcacagcaagaatgtgatgaccacttctagacccctggagttactacatatggacctcttccgacccgtcgcctatctaagcataagaggaagtaagtatggtctagttattgctgatgacttttcccgcttcacttgggtattctttttgcaggataaatctgagacccaagggaccctcaagcgcttcctaaggagagctcaaaatgagtttgagctcaaggtgaagaagattacgagcgacaacgggtccgagttcaagaaccttcaagtggaggagttccttgaggaggaagggatcaaacacgagttctccgcttcctacacaccac

SEQ ID NO: 15933 - DNA, 408 bp, Zea mays
  unsure (1)..(408): unsure at all n locations
agcttgggccctatgcctgacatatgtntcatgtattttatgacttctcagatatacacttgactntgtttgtgttgtgctagcgctctatatgtacattgtacaaacaatgctgttgtttacccaacgggggaaaaatggctttgttagctgaacatggccttctncgaagcttaatactcgtatctcttccaatgcttttacagagcgcacgcagcgctactgcctactgatgaagctcagagttctgcaatgaaccaaagacagagctagctgacaattaacgcgtnttctcaaggttcattgcatcggccaaaggcaaacgaaattgtcgatacaagcgacaaagttacgctggacaatgaactttgaggcgaaccatgtctgttgcgggattattacgtactc

SEQ ID NO: 15934 - DNA, 463 bp, Zea mays
  unsure (1)..(463): unsure at all n locations
agcttaacaagcttctccaaatcgatcttatattatgacttcttaggatcaaggcaagcataaccaactagcaactcacttgaaactctactgaaccgatggcacaactctgtattggttntatcaagaataacaaaaaatttctcggtgcggtagtagtgaagaattgtgactgtgaatccatctcaccttgatccacctctaataagtacttctgcatccatgtctaccataggaatacccttattagcacaaaattccttcacatcttcaaagaatgactcccaaccactatttgtcctcatcatagccattccggctttaacaacatcaagtaacttcatggcaagaacaatatcaacactcttcctttgcaacattagagagagctcatttgtgattgcaagcacgttcaatatcaattttagaatgaatgcaaattcgaaactctccatctcttcta

SEQ ID NO: 15935 - DNA, 445 bp, Zea mays
agcttgagctctaggtggatttgaatttgtttctcaccagaactggggatatctgtggcatgattcgatttaagctattgtgattgtagtacatttggccaggggataaagcattttttgttacaggctgcatgaacaggctctatgcattgtttttcaagcattactatcagtaatactatttcaactgagtaatatggtttttgtgttagctttgggattttgtagtgggaagtgagaaccaaatagtcaattatgctggtgttcgtgccatggacatgtggtttagtcttgatttattccatatattcatattaactgtggttggttccttctgttctgcagtatcattccatttctggttgtttacttaattatgtttagatgctggcttggtctgatactattctcatgttgcaaacccaacatcgcaaatatatcttga

SEQ ID NO: 15936 - DNA, 264 bp, Zea mays
ttatatcgactgctgcatgcaagcttataaagggagagcacattatatgttctttcaatcgtctatccgagaacaacggcgtcgcagcgcatgtcaaggaggaacagcagttggtggtcatcattcacccatgaacatcatgaagaccgacaggtcgcttgagctactccacatggacccattcggcacgatggcttacatacgcatcggcaagagtcagtaccgtctaattattgcggatgatcattctcgctctcactgggc

SEQ ID NO: 15937 - DNA, 444 bp, Zea mays
agcctgattatgaatagcatctctatataaagcatgatttctaaaagattagtctatatcatttacttcagcttttatagatcttctctgaataaccagtctgtagagtgatgaaacggttttgctagctgttcataccaaatatacgggtgaagcagactaacacctaattattagaattgttatgtgagagtttctaaatctgaatttgaatagaatctcaaactgatttaatgggaactaacacataggtggaaatttctgaatatgactggcatatgatggttttgacagtacaatggttgtttattaccagcgaacacgggccgatggcataaaagaagtgatcttgtctcatgcacatgctttgtcccttattgcacgcggagaaggtaattcttcttaatggttaattctgatttatttcagtattctggtatcata

SEQ ID NO: 15938 - DNA, 345 bp, Zea mays
  unsure (1)..(345): unsure at all n locations
agcttggaggcgtcgataggaatcctactttatgtagactcctctttcttctcttncgacgctttgaatgcgatggagtgcaccttgtgtgtggaggtggcgccttgctccaagatgacgatgtgtttggagtctttgatcattacctcaaagctcacaaacttaccaatgactttctcgagagacattattttatatctaggatccccacgtattaattgaacttgagtaagattacgaaatacgaggggtctaagaataaccttgaccatttcatggtcgtcccatttggtgctcccgaggttgggcacttggttcaacatggtctttatccggttgtacatt

SEQ ID NO: 15939 - DNA, 441 bp, Zea mays
agcttgaagcggatatcagccgttaccgtcgacagcatattgtcggcagtttattctattctaatttcaaggtaaacatgttgtttctaactcttattacttgtggtacgaaaatattttctaacgaaggctatttgtgcatagagcatgcttttgagcaaggcgttaaaaatgcaacaagatttagaggataaaaggcaagaagttataattgaaaatttagaaaacaaaataaaggagcaatctgctgccattgagaagaaagacctcgagctacaaacagccgaaggcttattagtggatgctgaagcaaaaataacagaattaaattcgaagcttctttcccagtcagaagattttgaacaagagaaactaaaacttgatgcaaggctttgaagccgaaactcaaagaaacttggaatgaaagtatctttgaaaatc

SEQ ID NO: 15940 - DNA, 296 bp, Zea mays
  unsure (1)..(296): unsure at all n locations
aaaaaaaaaaaacaatagacaaaaaacaagaggaactgactganccaaacaaaaacacacaacaaaaaaaacacaatatctcaccaaaaccccaaacaaaacaaccaaccaacccccaacaaaaacacaaaaaaaaccaaacctaactcccaaaaaccaaaccccaccaaccccaaaaaaccaaacacaactacaaaaaacaacccaaaaaaaaaaaacaccaaaaaaacaaacaaaccaaaccaaaaacaaaccaaaaaacaacctaaaaaaacacaaaacaacaacaaacacaa

SEQ ID NO: 15941 - DNA, 425 bp, Zea mays
  unsure (1)..(425): unsure at all n locations
tagcttggagaaggaggatttggtcctgttatattgtatactaactttcactactgtgaatggtgtttgatgtacacatgattntatgttaatatttggcttaatgataatgaaaatcatgaaccactacagggaactttaccttggggagaagtacctgtgaacaggctttgtatgaatncacgtcaaggccttgaaaaattcaagaatgaggtcatacttaatgcaaagttctagcaccgcaatcttgtaagattactagggtgctgcatacagagggaagagaagatccatgtgttcgagtacatgcctagcaagaagctagatgcattcctcttcagtatgtgtccttcactattcgcgcatctcatttctcaatatgaacggacaaatatgtngattggttctgaccactgtggtgaaca

SEQ ID NO: 15942 - DNA, 121 bp, Zea mays
agcttgtgagacatgagagaactaaagtcatttcttaatccattgaaccaaatggatacactgcttagagatagaatcgataaaatggtgtcatgattattggaggaagagcatgagatcg

SEQ ID NO: 15943 - DNA, 324 bp, Zea mays
  unsure (1)..(324): unsure at all n locations
agcttcggcgatggttaaaaaatttggcagcttatctgtacaaatagcaatgaatgctgtggtaacttcacacctactcgtctgtttatatagtgctgcaggtaagaaggcgaaacgccagaatttttacaccaggcggacacccgctcgcactcgctgcatggtggaccgcagagaccgaacagtaactctgcaaggtggggccgntacacgctgggagattgaatcgtttctcgacaacgagctcaaggaagggtgtttttagaccttcggcgctccgaagcttaagagacttttttcacggatcaagctcgttaccaaaaa

SEQ ID NO: 15944 - DNA, 451 bp, Zea mays
  unsure (1)..(451): unsure at all n locations
agcatggaggcgtctataggctgacgtctcggtgtanactcctccatttcttccgacggcttgaatgcaacgggttgagcttcggatggctcgccaagctcgttgagtttcctcgagccttctatcatgcactcaaaacttacaaaatgcccgatgacttcctcgggggtcattttagtatatctaggattgccacgaatcaattgaacttgagtgggattaagaaatataagagatcttaaaataacatttaccacttcgtggtcgtaccacttcttgctcccgaggttgcgcacttggtttatcaaggtcttgagccggttgtacatgtgttgtggctcctccactttgagaagcggaatcgaccgagctcccgctcgatcgtttcccgcttggtgatcttggagagctcaatctcctcgtgctcagtnttgagcacatcccaaatctc

SEQ ID NO: 15945 - DNA, 392 bp, Zea mays
  unsure (1)..(392): unsure at all n locations
agctgatggccagaggatgctatcctatgtttcatataccntctcagagcttggatgtgacttatcttcaaccaggaacttgtgcatcctaccatctaactcaataaagctggacccagcagaattctcgcgatctttctcctttagcagcttccacacccgggcaacaccgctccatttgccacatgacgcgtatatattccagagaatcactaggttagctgtatcgtgcggctccaagggcattagatgttccaccgccatctccgctaggtcaaagtagccatggaagctgcaggctccaagccaggcctcccaaattacggcgtcaggctccattggcatgctcgcgatcagactgtcagctcttttaaaagccacacgccccacca

SEQ ID NO: 15946 - DNA, 453 bp, Zea mays
  unsure (1)..(453): unsure at all n locations
gagcttatcacaagagatttctagaatctataatattgagctcatgcctaagtctggtaatagattgttcatcacgtggcttggtaaagatatcggctaattgatctttactattaatgtaagaaatctcgatatcccccttttgatggtgatccctaagaaaatgataccgaatggctatgtgcttattgcggctatgctctacgggattgtcggccattttgattgcactctcattatcacatagcaaagggactttggttaatgtgtaaccgtattcccgcagggtttgcctcatccaaagcaattgcgcgcaacattgtcctgcggcaatgtactcagctacggcggtagaaatagcgacctaattttgcttctttgatactcaagacaccaaggatcttcccaagaacttgcangtccacgatgtgctcttcctatagatttgcaccc

SEQ ID NO: 15947 - DNA, 370 bp, Zea mays
  unsure (1)..(370): unsure at all n locations
agcttctaaagggagaacacattntaggattatcatatgcttcatttgagaaagacaggattngtagcgcatgccatgcacggaaacaagttggagtccatcatccacacaagaacatcatgacgaccgacaggccgcttgagctactccacatggatctattcggcccgattgcttacataagcatcggcgggaagaagtattgtcttgtaatagcggatgattattctcgcttcacttgggtattctctttacaagaaaaatcttaaacccaagagaccttaaagggattcttgagaccggctcaaaatgagttcggcctaaggatcaagaaaatataaagcgaccatgggatggaggtcaagaactc

SEQ ID NO: 15948 - DNA, 370 bp, Zea mays
  unsure (1)..(370): unsure at all n locations
agcttcggctatggttaaaaaatttggcagctaaacagtgcaatagcaatgaatgctgtggtaacttcacacctacccgtctgtttgtatagtgccgcaggtaagaaggtgaaccgtcatgatttttacaccaggcaaacagctgcttacacccgctgcgcggtggaccgcagagaccaaatagttaccctgcagggtgggacctctacgcgcttggaaactgaatcgtttctcgacaacgagctcagggaaggtgtttttcggaccttcggcttcctgaagcctaagagactnttttcacggatcaagctcgttacgaataacgatctagcaccacgaaggcgctactgttgggaccatgcttcgtcgt

SEQ ID NO: 15949 - DNA, 442 bp, Zea mays
  unsure (1)..(442): unsure at all n locations
agcttgaggctatgcatagattaccgcccacttaatgcggtgactatcaagaacaagtatcctttgcctcgtattgatgttcttttcgataaattggtcggagccaaagtgttttccaaaatagaccttcgctccggctatcatcatatcaggatacgagcaaatgatattccgaagactaccttctcaaccagatatggactgtatgaatatttggtgatgtcatttgggctgactaatgcgcccgcatacttcatgtatctgatgaactctgtcttcatgcctgaattggacaagttcatggtggttntcatcgatgatatcttggtgtactcaaggaacgaagaagagcatgccggtcatttgcatgtagtgcttcaacgtctgcgagagcaccgtctttatgccaattgtcaaatgtgatttttgctaaggaaatcaa

SEQ ID NO: 15950 - DNA, 459 bp, Zea mays
  unsure (1)..(459): unsure at all n locations
agcttcttcaccacgcgtctatggatatcttgatgaggttgagcaatgtgtcttctccttagttgctttgctttcttgttcctttcttttgatcctgcagcttgatgctcattcaaaaatttgctttcttttgagcaacaggggttagcacatggtgatatattatctaaatgtgcacatgtgcaagaatgaggttcacatgaatttaagtttgcaattacaacctcatgagcaacatcaagcatgatatggtcatcaactaattcattatgagaataagatagcatatcatatntttcacttagagcaagtttttctaaatttatcatttctacttgactcttaagcatagaattctcagttttaagttgagcaacatcagataatacatcatgattatttcttngctcanataaaatagattcataccgttggaccaaattatcatgagagcacttt

SEQ ID NO: 15951 - DNA, 356 bp, Zea mays
taatgactgagctgcaactgtcacacccggtttagaagtgatctctttgctaaccatgtacgtgccaggatcagttatgcacgtacacaggagttacataacatggacatcatcacacagtgctcaaaatagtactaagagggaaataatagccgattacatcatacgtctgagacgtccatatagtcctgacaataaagcaaagcgcgaaaacgaaacgtatataaccgcggccttcacaggcagacgagtggggggggccgtaacccacacctagaactcgtcggagactgggaacgcctggaagacttcttccacagcttcatcttcgcctgaacagtgtgtgcatgctgaca

SEQ ID NO: 15952 - DNA, 438 bp, Zea mays
agcttcgactccatctatgttatggatcgccttctaatccgttcaactcccttcagctctcttggcagcttcttgactcccatgaacagtaatgggcccctattccgaaggtatcttcatgcacaagtacgctgggtggagtatggcttcgaaggcattaagcgtgtcccgaccaatgattgcattgtatgggtattccatgtcaacgatgtcaaagacaacttgttcagaccttgtgttgtggacataaccgaaggtaactgacattgtcattttaccaagtgctacaatctgtctccctccgaagccacaaagagggtgagttgcatcatgaatcttgtcctctggttcttgcatctgtctgaaagcctctgcaaatatgatgtccgctccactgcctgtgtcaaccagaacattgtggactatatatcccttgat

SEQ ID NO: 15953 - DNA, 417 bp, Zea mays
  unsure (1)..(417): unsure at all n locations
agcttagccatggcaagtctatatgaatntagtgtttaccataccattttagccaaaagggtgaactaacaattaattgagcacatgcagatttttatgacagcagcacagcagttactagttttaatcatatctcttcaaatattcatccaaaaatagcaaactatgattttctggaaagcttaaaaagtgaactataactttggtattttcacctcaacctgattcaacacatagcaaggtcaaaaagtgcaatcacagcagctctgtccagatttggacagattcagacttgcaacttcaaaaattcacaactagagattcagacatccaaataagttgatcctagactttctggaaaagtaataaaattgtctacatatcatntataaacatctcaaggtgattcaatattta

SEQ ID NO: 15954 - DNA, 433 bp, Zea mays
agcttgccagtacttgtcatagcaacttcatttaccagcacagcaattgtagaccataccggtaacttggcccttcgcatgctgaggactagatatgattggaccttctaagaaagctcaaggaggatacactcatgtactggtagcaatcgacaagttcaccatatggatagagttcaaacctattgcttccttaacctcagccaaggccgtggaattcatacaagacataatattcagattcggaataccaaacaatatcataactgacttgggatccaacttcacaagattagaattcttcgacttctgcgagcaaaagggcattcaaaacaagtccgcttctgagcgcacccgatggccaacggacaggttgagcgagctaactggatgatactggagacactcaggaaaagggtcttctaaagaatga

SEQ ID NO: 15955 - DNA, 438 bp, Zea mays
agcttgatagacaattcctcgaagcttggattcttttcgcgatctaatcgcaacgcgaagcgaagacgaacaggcacaagcaaacaaacatatacatatgcataagatcatgacaccatacaagataagacatcatacaaacaagcaatataaaatagagagggctcatacggttatgcgaggataagaaacacgacggtcaagctacagtcgagaagttatcgcgtttacgtcaaacaaagattaactataacatttaattcgacatgatcaactataaataatcgctaccacttagattcgattaatctgttacactaacagctatcagttaaataagtaatttaattaacacgagagagtctacgcgaggcgaatttacgaacacgaaacacacgacagcgatagacgaccgcggcatgacaacaaacatgctaa

SEQ ID NO: 15956 - DNA, 354 bp, Zea mays
  unsure (1)..(354): unsure at all n locations
agcttgtactagccttgtcctcctctttcatgtatatctggcggcagcccgagaagccaacaatgagggacatgactttgcagcctgctgcactgtcgacaattttgtcaattcgtggcagagggaaattgtccttgtggcaagccttattaaggcttgtgaagtcgatgcacatacgccatttgttgctcttttctgcaccatgaccacgttggcgagccatgttggataagcgattggctcgatgaatttggcttccaacaagcgatgcacttcggccttggctgcctccgttttctcgtcggacanttttcgtaaccgctactttttctggcgcaccgagggttcgatgcc

SEQ ID NO: 15957 - DNA, 370 bp, Zea mays
  unsure (1)..(370): unsure at all n locations
agcttctaaagggagaacacantttatgattatcaaatgttcattntgagaacaacaggatttgtagcgcatgccatgcacgaaagcaagttgggactcatcatccacacaagaacatcatgtcgaccgacaggccgcttgagctactccacatggatctattcggcccgattgcttacataagcatcggcgggagtaagtattgtcttgtaattgtggatgattattctcgcttcacttgggtattctttttacaggaaaaatttcaaacccaatagaacttaaagggattcttgagaccggctcacaatgagttcggcttaaggatcaagaaaataagaagcgacaacgggacggagatcaagaactc

SEQ ID NO: 15958 - DNA, 421 bp, Zea mays
  unsure (1)..(421): unsure at all n locations
agcttactcctttctgggaggagccattcatcatcgccaagaatttgaagcccgaaacatacaagctggccaacaatcaaggcgaggtctacagcaacgcttggaacatccgacagctacgtcgcttttacccttaagatgttttcaagtcattcatatacctcgttttctatacatacacaaacaaagtctaaccgtccaggaaaggtcagccttgcctcggcaaagcccgaccctccctcgggggctagaagggggggaccaactctgcgtcaaaattttcctcggaaaagtttctaccaaacgactttcatgctttccactatatcgataactgaatcccgctatacgaacaatagcgcactgtagctgcaatgccgaccgagccganggactcctatgcctccgggatacggatacc

SEQ ID NO: 15959 - DNA, 458 bp, Zea mays
  unsure (1)..(458): unsure at all n locations
agcttcagctccatctattattatggatgctcttgagtctgtccaattcccttcggcccttctagcagcttcctgacttccatgaatagcaatgggcccttggtccgaaggtatcttcatgcagagataagctggatgaagaattgcttcgaaggcgttaagagtgccacgaccaatgattgcattgtaagggtattccatgtcaacaatatcaaacacaacttgttcagtccttgtgttgttgataaatctgaaggtcactggcattgtgattttgccgagtgctacaatctgccttcctccgaagccgcacaggggatgtgtggcatcatgaattttgtctcccggctcttgcatctgtctgaaggccttagcaaatatgatatcagctgcgctgtctgtatcaaccataacattatggaccaggaatcctgngatcacacaagagataaccatat

SEQ ID NO: 15960 - DNA, 447 bp, Zea mays
  unsure (1)..(447): unsure at all n locations
agcttgtatatatggtttaaaaatgacacaatggtattattgtcttctatctatatcatcttgtcatcataatcttgtaaacaccttcttccgacctcgnttgaattctatcttcgtcttcccgtcagatggcacatcggacaatccaatgcccgcctaaaatagaaagtgaccaatcagggatatgttgaccgttgcactgtgcagtgtccggtgcgccatcggacagtctggtgcacccgcagactgggaaggctaggagatttcaaatgaagctccaacggctcttaagtcccttgnggctataaaaggaccccctatgcgcatggagctgttacccaagcatacttcgagcataccacaactctgaacctctatgaccatgctattgattgttagagagagatttgagcancgtcttgagttgtgactntgtcgttttattcg

SEQ ID NO: 15961 - DNA, 460 bp, Zea mays
atctgtaagcatgcaagcttcttgcgtcaggcttcagaccttggcttctttctgtctacacgaagatatttagccttataactgcctcgggagttagttgatgaagatagaactcgaagattttcaacacctccacgacgaagctgctcaagggaaatcgtagcccagctttcataaagcttcggtatactacgacttcattttcttcagggtgtggacaagtcttctctccttcatcggccctcacaatggacaaatcccgaaaataccttcctctcatgttgacaagatgattctctgtgatagttgatttaccataaactgaatggcttggtcgccagggacgatcttcggagtcttcgctaccgctgtccacatcataactgtcattgtcaccagtattctcagacaagccttctagaatttccttggtgaatgtttccgtgtttgtcttcgacat

SEQ ID NO: 15962 - DNA, 448 bp, Zea mays
gttacctgctgcatgcgagcttacacactcgctacatgctcggttagatgtttggtgcctgccgcaatcaaacgtgacgcatcttttttgagcaagacgatgcatggacagccccatggaatgtgaaaaaaccctcgcgttcctctctttttacaactcccaacagactagcatgggaagcgatcacagtcttggcttagttgaacgagagatgttcaccatggcaagccaaattgttaggtacttctctctccatcttagaccttggtcgtttacaccaatcaagatctagattaatattgattggaggtaaatccatatcctaaaataattcaagacactcgactcttttatctggttaaacctatcgtagatataacacaaggttttgggagtgtttacactatgaaagacatgaattctatccatagcttataacggatggaac

SEQ ID NO: 15963 - DNA, 399 bp, Zea mays
agcttctccacgctaaagctcgtgctcttctgctgctcgccagtcgattgccgattgtcgtgctcgctcgacgttgtccgtgtagccgtgctgttgtgctccttcgccgtctccgcgccaagcgtcgatcccacgccgaacgccgttgctgaccctcgttcgccgaagctcgacgatcatcaatgtattcctggtgtttccttctacctgttggcctggtgtgagtggttgatctagtagttaagaaccaagatctattcctatccgtggaagaaccttaagttttcgataagcaaggcaagtggacttcctcctctgcatactctgtttgatcccaaacaatacatttaatacaggctattcttgttgatatatatgcgtaatttgacgggttaccta

SEQ ID NO: 15964 - DNA, 458 bp, Zea mays
  unsure (1)..(458): unsure at all n locations
agcttgtaaagattcttcatcccaacatatgctagtcggcgatgccagagccaacccatattagtcttagcaattaagcaagtatcgagttcagctctattaaaatcaactaagtatagctaaccctctaatactcccttaaatgctactgaatcatcatttcttctaaagacagtaacacctatatccgtaaaaagacagttgtaacccattttgcataattgagaaactgaaagcaaattgtaatctaaagaatctacaagaaaaacattggaaatggaatggtcaggtgatatagcaattttaccaagtcttttgaccaaaccttgaatttccatccccgaatgtgatagctctntgaggatcttcgtttttctcgtaggaggaagaacatcttttctcccctgtcatgtggtttgtgcatccgctatcaatgatccaactngagcccccggatg

SEQ ID NO: 15965 - DNA, 444 bp, Zea mays
agcttacacaagaataagaattaaagcacaatttttgtattctaagtttatagaatgctgcccctaaatatgtgcttacattaaaatcttaactttggccttaaatgccaaaatgcacatacttaggctaattcgaagcattgctacaccttaacacctatgggatgcattgagtcaagaatcaaatcgtgatgcgtataacacacaagtgaacagaatcagagtttaacaccaattaaatggatataccacaggaatatcaacctaccactattcaccattaagataccgatttatagcgccagaaccacatgaatatctatcacaggataaacacagtagataccaattgattcatttcaacggaagcgctaattttgcattatcaccatataatcatcaagagcatatgataagattatcaacaactaaacatttttctta

SEQ ID NO: 15966 - DNA, 321 bp, Zea mays
  unsure (1)..(321): unsure at all n locations
gcaagctntaacaaggatgaagaacaacctccttttttgaaataattgtcaagagaaaaatatcaactccaaagcgaatactatccgaaggagaggggacccccacaccaccttttaccagcgacgtggaggaaattctaaaggtaatgactgaacccatgcccacgaagctaagtccattatggcctcgactgacgaagctttttcaaaggtggcggagccggaaaatacgaagataaccaaagcanaaaggcaaagaaatattgccggtacagaaattattgacaagacgccaccgagagcatcaattcagaaaacagc

SEQ ID NO: 15967 - DNA, 439 bp, Zea mays
  unsure (1)..(439): unsure at all n locations
agctntaatgcctctccaaaccttgcactatcataagtcttgtacaattggtggtgggtctatgaaattagggtgccaccagttttccttgactaaataggtttgtatcggatacgaactgcagatagggttggttaacttaaacaaagtcagcttaatggttaaggactctgaggcataaggttgggagccgagacatagagatgtcacccaacaacaggagtcatatatatgatatgattagcaaggagttgcttaccgatctaccttgtcttctatcggtgatgctaaagctcactagtagacttgttagttgtgggttctgaatcactaagtatcaatcgatggatatcgattttagtgggagtagactattaaatggttaatatgatctactctgccatggatatttttgcctagtattttgcataatttgttg

SEQ ID NO: 15968 - DNA, 441 bp, Zea mays
agcttgtattaaatacataacatcttttgatattcatatcttagaatctataactccaaaattaatgattcctgtttctaggatcttattttaatgtgtagatttctattatgtattttgtcaacatgtttggtgttatgttaattttttctttatactatgtatgtttgtactgatgcgagtagacgagcaagtcactgaggatcctggtgcctaacaagtataagttgctgagcaagagctcgctgaaggcaagttgtgcccttgatcactatctttttacccagtcatgttcttattaatcataatgatctgcatacgttaatattgatgggatccaataggttaccctagttttggctatctttataccttgttttaccactgaatattttcggtagatatgctattgcttatgtggtttgggtatgagaatacata

SEQ ID NO: 15969 - DNA, 240 bp, Zea mays
agcttctaaagggagaacacgtgatattgtttactaacgtgcaattcgaaaaagatagaccttgtgcagcttgtcaagcaggtaaacaagtgggaggagcgcatcacatcaagaatgtgatgaccacttcaagacccctggagctgctgcatatggacctcttcagacctgtcgcctatctgagcatatgagggaagtagtatggtctagctattggtgatgacttttaccgccttactt

SEQ ID NO: 15970 - DNA, 452 bp, Zea mays
  unsure (1)..(452): unsure at all n locations
agcttgtgtcctctncataataaattatggattcacatatcatgttagaaacggctcatgaggtcatgttaactaatttgaaatcataccaacctcacatatgcacatgtactcaagtagaaactatattatcatgtgctaacaaatgttgctctcaagatagccaatcttccattgagctagagatttcaggaattagtgatatttctatcacacaagaaaataaagagctcaaggaagaagttggaaggctaagaaggagcttaactctcttgaagggaaagtgtcatgctcaaccttctcaagataaccgtgataatatggtgaaaaagcttgagaaggggacaaccgtagcatgcataaaacctcttcaaagaataccaagctcttcaagaagggcacgagcaacatccatggtgagagaataatgctacatgatttgtctaacaatg

SEQ ID NO: 15971 - DNA, 354 bp, Zea mays
catgcaagctcgacaacgacagaagacgacaatggcggttccactatcggcagcgcaccaagcggcgtcaggtgtatcattggccagagcggcagcgccagtaatgggacgacgaggccgcccgtcgacgcggccgagaggttggcgtaagcctgggagggagcaaccagcgggtgccacatcgccaatggacaaccatgaactggcagacataagcgcagcagcagcagcggccatagagaagagcgaagacgcggatgcggggacaaaccgcgggtgcgcctatagcggcgcaaacgacgctgctgaaccgttgccaacaccggcgcaaaccggcaaggactccggcggcga

SEQ ID NO: 15972 - DNA, 348 bp, Zea mays
  unsure (1)..(348): unsure at all n locations
cgcttgagcaaggctcgcggcttcaccaggtttctatctggtgctngaatcgaacagaggaggacgggagatgggtcggccacagcggatgctctctggcggcactggcgggctgacgagaggtcgccggaggcaatggctggctccggcaatacaggcgaggtacggaggaggcaatggngaaagcaaccgatcgctggggcgggttttatatgcgcgaacgcggccggggcgtcagttcgaccgtttggcgcgacgcgggcacgccgtgcgcgcgcgggcgtgccctggcgagctcaaggcgcgtcgaacacgtggcgcgttgcttctggccgtgttcttcgctct

SEQ ID NO: 15973 - DNA, 460 bp, Zea mays
  unsure (1)..(460): unsure at all n locations
agctcttatattacataacatgtacctccacacttctttgatgtagaagctttacgagaaaccttcttttaagcagctttagataacatcaaaactttgagagaacctcttgtgaacatcatatctattatagagaatcaccagcaaaaaagaaactatgaacaacatttctacttttatggccatagtaaaaaaacataattattccttgatcacaaaatatccattacaaaatatccattacagaaatgacatttattgatcacacaatatccattacagatatgattcactgatttctacgttgctcataatctgcccacatatgataagctatcatatctcttaaggtattccttccatattcccttcatcatttncatggtcactatcgggtaggctgaccaaactttacgggttgatatttccntgatcattttctagccatctctcatcacca

SEQ ID NO: 15974 - DNA, 331 bp, Zea mays
  unsure (1)..(331): unsure at all n locations
agcttggtggcctgcactggtaatggtgcctgcgccttcacgggagagctcgacacattgtaggggaggtcgtgatgggcgtgtgggcggccatgggtggcacgactggttctccgcgagccgactgacaaagagaaacataaagcgtgcaacaagggcanatttgtctcctcttgtacaaaatacatagagatttagactttatttcatattataatctgacgatattatataatccagcgcaaattattngacgggtaaacaaacacctatattatagatcccaattatataatctaatgctcaaattatgatactctcataatatcat

SEQ ID NO: 15975 - DNA, 239 bp, Zea mays
catctcgacccgtgaccttagagtcacctgcggcatcaagcttagaagatctacaccgacttgttctttgcgccgtccattaccaaccaaactatgttatccaccatgcctgtggaatccctactctataagatttaccccctatcctgacccttatctctgcgttcaaagcgtcgagtcaacttgagtcacttacagtacacctacgtgtgctgtcactggtgtatcccatatgcata

SEQ ID NO: 15976 - DNA, 449 bp, Zea mays
  unsure (1)..(449): unsure at all n locations
agcttgcatgacaaaaacatgaatgccatatatctgactcatcagaaaaattaacagaattcaccagtttattacacacatcatgcggtgataagcggaacaagcctccgcagtcatatcctttaccaacaaaaataccatgtttagacacaacacatttattagactcaagaacaactttgtatccatctcgacatagcatagacgcgctaacgagattcttcttgatagagggcacatgctgcacgctcttcaatggcaccgtcttttccgaagtaaacttcagaatgaccgtaccaacaccaaaaacatgagcacgcgacccatttcccattaacaaggcgccagacctcccgacctggtatgaatngaacatagaggcatcagcacacacatgaatgtttgcccacttgtcaccaccactctgtgaatacagactgaagaacaat

SEQ ID NO: 15977 - DNA, 454 bp, Zea mays
  unsure (1)..(454): unsure at all n locations
agcttgccgcaactgagcagaaggctgattattaatctccagatattagcgtagctctggagaaaaatgtggccaaagaagccaaatcccctgctcccgaagcattgtccgaagatcttgactatattattcaacatgcttcgggaaaaagattatccgaagaagaagtttttgaagccaaacactatgcccgggagctgaagtacccgaagggggccttagtgtttaacagcacagacgaagatgatttcttgtactgcctcccggacaacaaagagttatccgtctgtcaagagatggccaaaagtatgggatttccgaagctggcctctacgccatgacgaaggctgacctcatggacaacctcacatacaatagtctgaaggtacagaagtgaactntgaagattatggactcggaaatgaagtcttttattctcacgctaatcctttat

SEQ ID NO: 15978 - DNA, 433 bp, Zea mays
agcttaatgccggaattgccatcaagtgtttctccctcactcttctcatgcacccattgtctcatggctaagggagatgctaaggtaaaaatcatcaccgatttaaatgatataaaagatgatgatgatatcgatgatgttgatgatgatgactattcatatgatgatcttgttagaatgttatgtgaggccgatgactacatgcataaagaaagagaaaaatttaagaccttgaaggaattgtataaaaacctccaagtgtctcttgaggagctcaagacctctcacaatgacctaaaagaaaattgtgagaagcttgcggatgctcataaatcatctattgtgcatgaagttgaggtggtcactaaggatgttggagtcacttgtgacttacttgatagtcttacaagtgaaccactacctactaactcta

SEQ ID NO: 15979 - DNA, 260 bp, Zea mays
agcttcgaatataactctaatattttagcctcagtttcagccagcaagccttcggtcgattggagctcgaagtctttcttttcaatgatggcaaattgctcttttattttgctttccaagttttcaattatagcttcgtgctttttgtcctccaagtcttggtgcatcttcagagctttgctcagtagcatgctctgaacagaaacaacttatgttaaagtatattttcattgttaaccgcaattaaaaccagagaaaaa

SEQ ID NO: 15980 - DNA, 394 bp, Zea mays
  unsure (1)..(394): unsure at all n locations
agcttaagtcctaatatttttagaacgacctctgtgctctcggatntttatgtccacagtccataatcgctggaggagtacaagatgtaaaatataaaatgatttctagaatgaaaacaattacataaacttggttaattcataactaattcattttaactgcattttgacccattccaattgcattaattttataataatattgtttatcacctagtaactttggtttaacatggaagccacattagaattgatcactcaattaatattttttaccaagaacataaagacttcgaaaaaccataacttcttaaacgtagctccgaatttagtgattcttgctcctacgatcttgtagcgacacgtagattattattacgcacgttattcttat

SEQ ID NO: 15981 - DNA, 448 bp, Zea mays
  unsure (1)..(448): unsure at all n locations
acttacgaccaaaccgcacccacatctatatcacattcaatggctcaacaatagcggtaaggtcaaggataccaagttggtaccaaataattttgctattggttcatatcgtgatgttgctgactgcgatgctgtgcctatggatgctcgctatattctcgctaggtagaccatggcaatttgattcacaatgcatgcatcatggtagatcaaatcaatattctctcatacaccatgataagaaaattattntgcttcccatgtcccctgaggctatcgtgcgtgacgatgatgctaaagctaccaaagctaaaactgagaacaacaagaatattacaactgttggtaataacacaaatgggataaaattgaaaggacattgtttgcttcnacacaaactgatggtaatgaattaatttgcttcactactgttgcctacacctgtatg

SEQ ID NO: 15982 - DNA, 462 bp, Zea mays
tgcaagcttgtgtgattagaagaaggctctatgaggtgttctatgctcacccgatgggagatgcaaagaacaacacatgtagaacaaggtgtgaagagtgccaagtgagagcacctagagggggggtgaataggtgatcttgtaacacttcaaaacttaagccacaaaacttggttaattgttagcacaaaaaattgccaagtggctagagaggaattctcaacaaaacacaataaccaacaaagatcaatcccagagatggcacggtggttatcccgtggttcggccaagaccaacgcttgcctactccacgttgtggcgtcccaacggacgagggttgcaatcaacccctctcatgcggttcacagacccacttgaataccatggtgtttggtttgctttactcaatcccgtttgccaagaagtctcacaatatggagcctctccccttaacctaaagtt

SEQ ID NO: 15983 - DNA, 119 bp, Zea mays
gaaacaatatatgagtctgcgctggggctatagaactaggaatattcgtcatctttggcccactcaaggtaaaagcatatcatcactatctgacaaatcccttttgggcggtggcagaa

SEQ ID NO: 15984 - DNA, 459 bp, Zea mays
  unsure (1)..(459): unsure at all n locations
agctngntcactcncgcagtggtgttatcctaatgatggtgggtntgtttggctttgcctttattatcatacaaggccttaccaaggcaagccacttcttgcttcaacaacttattttccaaagcaacctcattgaaacatgtttcgataacaacattctttacaacgacttggttgcaagggttagaatcatcaattaaatctaagcatgacgtagaagcatctttcttatacaatttaggaatgtcaacaagagatgcttatggngcactactgatgctttctagtttagtagttaccacattattatatatgctaagaactttcattttctctagcaaattttcaatagtatcctgagagctcgctaacttatctttaagttgttcttaccacattattatatatgctaagaacttccactttatctagcaaacttttcatagtatcctgagagct

SEQ ID NO: 15985 - DNA, 397 bp, Zea mays
  unsure (1)..(397): unsure at all n locations
agcctgtcatctaatacatctttaaaagctaatgatcctgttcttcttctacagacaattacatctaaatatgtgaactagcgattgtcacccatatgacaaagttggctaacataaagcaaattagaactaagtgattctaccaaaaagacattanaaatggaatgcttggttgtaattgcaatcttacctaacccctaccctgcctggtcccacttcaaagagaatcggtatggaatactgtcttactatgaaaaaatttcttctcctctattggagttgccccgcttcaataattcacttgacccctgatcataaactgcagaaatttagcttgggttacgtactaactaatgttggtcctatcagttagtacatgggatttggtaccaaatgc

SEQ ID NO: 15986 - DNA, 215 bp, Zea mays
tcgaaaggaagcggtaggtcaccgcatgtcaatcgaggtacaagcctcaagaatgtaaccgatccaagcagaaaaaaagtatcagaatacacggacaaagaacatctcctcgagcgccctgtaccgccatccacactcataacataaaatcaagggctaacattcaaaagccaccctaacacaacccctatagaaggggcaagcgaaaacactct

SEQ ID NO: 15987 - DNA, 404 bp, Zea mays
  unsure (1)..(404): unsure at all n locations
agctcgagactctgggtaataaatattgctaatgacaacatgtatagagagtcgcgaaaagctcgtctcttgtatttattccacttagcctcttaaagaccccctcaagagactccactaactgccgcattggcctagaatcaagcatagcctctagctaccattgaggcattgactgtgcactacattgatcactancggtggtaggtagagagggctaattagtagcagacctacctgcaaaaagacaaaggcacagctagcttctcattctcaacaaaaaatgggtttaatctacaggtgcctctctctctctctctctgctatggaagagtccttcgcacaccatgaaaccacgtactgtattatgccacaaaatccagaggttcttctacccaatctac

SEQ ID NO: 15988 - DNA, 452 bp, Zea mays
agcttgggggctacaccttggtgcacccaatgtatcatcatcctcgaagaagcaaaatgctgacctctaaagcacaaggcaaagttaagacaaggctgacctctgataaagcacgagtggaagatgaaagtggttactgataatacctgaagtgaagaccttcgagtggattgtttgcaaaaatccactcgaagctcgggggctacacccacccaatgaaacccgaagtccaacagtgcaaaatgctgacctccgaagcatgaacctgagacagaataccaaacttcgaggaataatagcagaagaagacagttaaaagaaaacgtgttaaccggatcactcataattcagaagcagtggcccgacagacttctttccaaaaagcatttcctgttaaaatcaaatactgcaagatggacctaagatctttgggccgtttattccaaaatcag

SEQ ID NO: 15989 - DNA, 445 bp, Zea mays
  unsure (1)..(445): unsure at all n locations
agcttagccccacctgtaggctcgcattctcttctgatgtgggcctgggggccactatcggtaccttgaaactagggtaccccttactactgtatgaagacccagtacccacgcgactatctntagtcgcgtggtaaaggagctgtacgcgggaccagaccatgactcgccccagcctcaggcgattactctatgccagcaacagcgcctgacccgaccacgtgggcggctacggtgccgccacatggccagagaaagtgatatactccaaggcatcaacagtgagtctggacccccatgggaaagtgccggacccctggatatacagtccggacctcccagttggtccgggacccccacgtgtactgaccgaacccccacgcgtacggaccagacccctatgatgggatcccggaccccacagtattgtcccaagaccttactt

SEQ ID NO: 15990 - DNA, 416 bp, Zea mays
  unsure (1)..(416): unsure at all n locations
gcaagcttctaagggagaacacatttaggactatctaatgtttactntgagaaagacaggatttgtagcgcatgtcaggcaagaaagcaagttggtattcatcatccacacaagaacatcatgacgactgacaggccactcgagctcctacatatggacctattcggcccgatagcttacataagcatcggcgggagtaagtactatctagttattgtggatgactattctcgcttcactcgggtgttttatttttgcaagataaatctcatacccaagagactctaaagggattcttgagaccggctcaaaatgagttcggcttaaggantcaaaagattagaagcgacaacgggacatagttcaagaactctcaaattgaacgcctccttgaagagaagggcatcaagcatgag

SEQ ID NO: 15991 - DNA, 297 bp, Zea mays
  unsure (1)..(297): unsure at all n locations
tacacctaatcatacatctcgtggatcagataaaaatattaaggccactatatttacatcatatgttntagttggagcgatacctgggagtattaaaagggtatgtgccaaatcgcgctcacccagagggttcaatcatggagggatacactacagaagaaatgattgagagctgtatagattacatcagtgatagaacaatgataggtgtgcctgtacctaaacatgagggtaaactatgtgggagaaggagaattggcaggaaaacttttcgcgttgaggattacaagctagtac

SEQ ID NO: 15992 - DNA, 476 bp, Zea mays
agcttcattcgcgtggcaaatatgcgacacgtttatgacgcctgcgggattactctgacaattcatcgttatagaagcacgagaatacattccatctcatttatccgtttaggtggcctaaataatcgtgaaatcttgtgatacacaaaatagttcgtacttctggttcttaccagatatgcatacaaatacagatagatggggaactgttaattgaaacgggaaacatatatcatattcgtaacaaacgaacacaagtgtctaaatagccatcccagcttaagctggttgttttttcagttattgaataattacaggttctgtttaagttattcattcttgtgttgattatatattgatattctaaactgtgtgggcatctttaagggaggcagcgtttctgttttattgttaccttaccaagaatgaggagctattattggttcattcttatcttcatcttcacaattcacatt

SEQ ID NO: 15993 - DNA, 220 bp, Zea mays
ctggaggttatcccagggttaataatcccacagccatcttttaaataacgtgctgacggccctttttgaataattaaaaatgtgctataaccttaagcctggactccctttttaacaaacttaactggaaaacaattatcccatttaaattggttccggtacaattattcccggcttccaaaaacttaaaggggggctttagaatggatttgtaaactta

SEQ ID NO: 15994 - DNA, 496 bp, Zea mays
  unsure (1)..(496): unsure at all n locations
agagtnacctgangctcgcagcttncaacccactggtacacgtanaatatgcttgtatctgatgtgaatcattgtaacaagatgatgttcataatctgtcagaaatctgtgatgcctcgttttgggactaaaggccttacacatcatatgggtgctcgaccaccccttggccaccgtctgattcgaggatgactcaaattcaagtgggggaggataatgaggacatcactcccatagaaacaatacatgaactgacaacacgaacgcgtgcacgccaattaaatctctatgttcgttataacctagtcaattatatattagagcttacgcttggtgccatggatgttttgatgattagaaaccttggagaggaccatcaaggacttgtgaaaggccaagatgttatggaggagaaactacgatgttcacaacaagagaaagtctagtgcgactcaagttcgtctccacctcagagacgaggactagtcttcactaa

SEQ ID NO: 15995 - DNA, 282 bp, Zea mays
catgcagcttggctccacctgcaccggttgctttgctaccccatgaacgcctggaagtcaagagggagaaccccggtcggacatacttagaggctgggtcatagtttgcactagccatgtgagcctggtcatgcccggcagcaccctccggggctcggcaagcgtttgttaatgccagcctaaccaagtcattagcgacaacatactcgggggctaagcacctgtcaacaccatcctttgggtgcgagttgtcttgagagccacctctaaagttgatgggcc

SEQ ID NO: 15996 - DNA, 341 bp, Zea mays
  unsure (1)..(341): unsure at all n locations
gctnganatcgagcacacatgcatacactatttataacantcggcctagatgccgtaatataaagcaaactaccaattattgaacgataaagttttggatcaactatagtacctccttcatctaagtctagatgaccatttgtggccattgaagtcttaataggctaaccatttcttaaaccaaacttttggacatggtccctgatatatttggatggactaataaaatttcctcttttcattggttggattgaaggcgcaagaaagaagcttaatttccctataatagactatttatatcctttcacatcatttttccagacccctcacaaaattatctt

SEQ ID NO: 15997 - DNA, 476 bp, Zea mays
  unsure (1)..(476): unsure at all n locations
agctngccaatacctgtcaaagcaacagctcatttctacacagcagctacaaaccataccaataacttggcctatctcatgctgaggattggatatgattggacctttcaagaaagctcaaggaggatacacccatgtattagtggcaatagacaaactcactaaatggatagagttccagcccattgcctctataacctctgctaaagccgcggaattcatacaaagcataatattcagatttgggataccaaacagtatcatcactgacttgggatccaacttcaccagttcagaattctttgacttctgcgagcaaaaaagcattcagatcaagtatgcatccgtagcccatccgaaagccaacgggcaggttgagcgagccaacggaatgatattggatgcacttanaaagaggatcttcgacacataccaaaaattcgcaggaaaacggattagagaattgacttatgttg

SEQ ID NO: 15998 - DNA, 331 bp, Zea mays
agctttgacacgggtaataatgataatgtatattatgaaataagacctatcttggcattattaatgaaattggtgaactaaactatcaccacaaaggtacggacaagcttttcaaatgagattgggttgacaaccatgtgtagaacaagtgggagaatactgaccacttaagtatcacaactgtcaattttaagcacttgatcaatacacgtgaaaaactatcagacgagcctttcattatatcattacaagcgagtcaagtatactatgttcctgaatcaattgatattgagagggctgctgttgttcaatctaaagcaacagatgtgta

SEQ ID NO: 15999 - DNA, 442 bp, Zea mays
  unsure (1)..(442): unsure at all n locations
gctttaagggagaacacattntgggactaactaatgttcattttgagaaagaccaggtttggtgcgcatgtcaagaaaggaagcaagttggcgttcattattcacacaagaacatcatgacgaacgacagggcggttgagctactccacatggatctattcgggccgatagcttacataagcattggtgggagtaagtactggctaagtattgtggatgattattctcgcttcacttgagtgctctttttgcaggataaatctcaaacccaagagacctataagggattcttgagacgggctcaatatgagttcggattaatgatcaagaaaataagaagcgacaaccggacggagttcaagaactatcataatgaatgctttcttgaggaagagggcatcacgcatgagttctctttttcctacacaactcaacaaaatgg

SEQ ID NO: 16000 - DNA, 419 bp, Zea mays
  unsure (1)..(419): unsure at all n locations
agctntggctgtcttatgcggatattatatcttatattaattcctaacatttaacttggtcataaagtctaagtgccatgtgtgtgttgaatcaaaacaaccccacaagcctcacaaggctgctgaggcgaggcaattggcacctctagaacttgttcattctgatctatgcgagatgaatggaatcttgaccaaaggtggtaaaagatactttctcacttttatagatgactccactagattttgttatgtgtatctcttaaaaacaaaatataaagcgttcaattattttaagacctataaagctgaagctgagaaccaactcgagaagaaaataacatgtttaatgtccgatcgatgtggagaattattctctaatgtgttcgatgaggtctgcgtggaacatggtattattcatg

SEQ ID NO: 16001 - DNA, 355 bp, Zea mays
  unsure (1)..(355): unsure at all n locations
agcttctaaagggagaacacgtgatatgtttgtctaacgtgcaattcgaaaaagatagaccttgtgcagcttgtcaagcaggttaacaagtgggaggagcgcatcacagcaagaatgtgatgaccacttcaagacccctggagctgctgcatatggacctcttcggacctgtcgcctatctgagcataggagggagtaagtatggtctagttattgttgatgacttttcccgcttcacttgngtgttctctttgcaggataagtctgaaacccaagggaccctcaagcgctttctcaggagagctcaaaatgagtttgagctcaacgtgaagaagataaggagcgacaacgggtc

SEQ ID NO: 16002 - DNA, 437 bp, Zea mays
  unsure (1)..(437): unsure at all n locations
agctngtcattgagtccnctcataaaacaattctttntcttcagatctgtattcacctggtcaatggcatactangagatatggttgaatntattgagatactgcattacagtatctccccttgctttaaccggataaactcttcttgtttcatatgaagcactccctctggaacataatgctaccggaacgctagcttgaattcctcccaggtaatctgatgcccagcaggttggattgctgaaaaatttgcccactaggtgctggcaagccctcttagatgttgtgcagcaaacagtggcttttgtgtctctgtgcatcgaattaaccaaacttctctttcatcactcttacccattcatcggcttctaaaggttcttctactttgatgaagagcggcgctcgagtctcagagaattccaaatatgtattatcac

SEQ ID NO: 16003 - DNA, 476 bp, Zea mays
ggaacctaagcacctgaagctgcagcttataaatggacgtgaaaagtgtctttctcaatggaccaatcaagggaagaggtctatgttgagcaacctctctgctttgaagatagtgagtaccctaaccatgtttataaactcttaaaggcgctttatgggctcaagcaagccccaagagcatggtatgaatgcctacgagatttccttatcactaatggcttcaaagtcggtaaagtcgatcctactctctttactaaaaccattgcataagaattgtttgtatgccaaatttatgttgatgatatcatatttgggtctactaacaaatcaacttgtgaagagtataataggatcatgattcaaaaattcgagatgtctatgatgggggagttgaagtatttcctatgatttcgagtcaagcaactctaagagggcaccttcatcagccaaacaagatacattcaagacatacttac

SEQ ID NO: 16004 - DNA, 432 bp, Zea mays
  unsure (1)..(432): unsure at all n locations
agctntatacaagtttaaacagttcaaggctgttgtatagaatcaacacgactcgaagataaagattattcgatcagatcgtgggggggagtactatgggcgccataccgagtatggtcaggtcccaagaccttttgcgaggttcctaagagaaaatggtattgttgctcagtattcaacacctggcgaaccacaacaaaatggggttgccgaaaggcgtaacacaacgctaatggatatggtaaggagtatgctaagttactctaacctaccattgtgtctatggatggaggctttaaaaaccgccatgcatatactcaacagagttcctagtaaatcagtggctataactccatatgagttgtggactggcagaaaacccacgctcaactacttccatatatggngttgtccagcagaagctataatatt

SEQ ID NO: 16005 - DNA, 144 bp, Zea mays
  unsure (1)..(144): unsure at all n locations
catgcaagcttgtgcctgtttggagagatcatcatatanattatttgttgccggtcgcggnacatataatactcagtcagggctgctcccgttcacgagcgagatattgtattgtagcgggtgaatacgccatttcagctacta

SEQ ID NO: 16006 - DNA, 449 bp, Zea mays
  unsure (1)..(449): unsure at all n locations
tagcttctaaagggagaacatgtgttatgtctattctatatnctgttttgaaaagacataccatggacaacatgtcaagtagagaaacaggcaggaacaagtcatccaagtaaaaatctgatgacaacatcaagaccattagaactcctccatatggatctcttgagggccgatgcttatctgagcatcgatggaagtaagtatggtttagtaattgttgatgactattcctacttcacttgggtattctattcatatcataaatctgaaacccaagaaactctcaagcactttctaagacgggctctgaaacaccctgaattgtggggataaaaatatgtttgctctgtactcaaaaatcaagtgttaccctttccttacttcgctttacttgtgcctttatcaaaacaacagaggtatttagttctatgtttggctgagccctcaaa

SEQ ID NO: 16007 - DNA, 473 bp, Zea mays
  unsure (1)..(473): unsure at all n locations
agcttatctatgctatgcttngtgccccagtatgttgcatcactattttcaggcacacagggtcgtggtggtgacctccttcccgttaagggccattcttcacaactctaacgccacaggcaacatcgccaagtgggccatggagcttgctgagttccaactggacttccagccttgccacgctgtcaagatccaggttctggctgacttcatcgtggaatggaccccttccccgagtactcctaggggtccggatcccgatgcgaacccaacaacaacggaacctatggctttcgttttcatcgaagcccactagacgctcttctttgacggatccacccgccaacaaggttgcggtgctggagtggtcctcttccacgcaagcggagaacaagtgaaatacatggtgcaccttgagttcaaggccacccacaacatggtagaacatgaagcactgatcttctggttgtctg

SEQ ID NO: 16008 - DNA, 463 bp, Zea mays
agctagacattgcttccctagtaggaactaatgtttattcttaatggccaggcatctcccattataaagcatgcttctagcaaatttaaacttttcattttcaagttcatgctcattaattttagcagttaatttagctatgtgatcattttgctgcttaatcatagcaaggtgatcatcaatagcttctacattgaaatttctacatctaggacaaatggaaacatgctcaacaatagatgtagagggtttgcatgcatttaattcttctatcttagattttaacttagcattctcatctctaagacaagaaatagaatcattgcaaacattccatttttcaatcttagacactaaactagcacttctcattttaagactaaaaatcgaatactgacaaatgctaagctccttatataaatttcacatttttctattactgagcatagcatatttcaattaa

SEQ ID NO: 16009 - DNA, 411 bp, Zea mays
  unsure (1)..(411): unsure at all n locations
aagctncaaagttgttcctaacggaatgcacaggtaaaatatcaacacctagtaaaggtgaaaaagccctaaagtcattcctaagggaatgcagagctaaagtatcatcacctagtaaaaggggaaagttctccaaagtcgctcctaagggaatgcagctaaaatatgaacacctagtacatgtgaaaagtgctctgaagtcattcctaatggaatgcataacttaaccgtgaccacttacgatccataaggacaaaggtaacgagttaaaagtaccaggctagcgtaatgcagaagaccatatctatggttactattaaggctaatcttccaacgctctgtttctagtgaaaagaaaggaaggtgttnttcaccttcggctcaaaaaaacagaagattggttcacacaca

SEQ ID NO: 16010 - DNA, 452 bp, Zea mays
  unsure (1)..(452): unsure at all n locations
agcttcagtattacagcatattcgaagatgaatggtcgaaccgacttanagatagaatgaccttttagtccataagggtctgagtcaacgttgtaaactttttatgaggggcatgattgtaattcctcacaggctgtgtcctgtgcctataaatagtgaacaatattcctttactgttcacgcattcctgtaattgcaaatgcatcactcgggaattattgtttgtcaaggcaaaggtacaaatgtacctaaatattatgttcaaacatcttagattcatatagtaagatatataaatgatgtcatttatttccgatatatttatctttaatgtttcacattttatattactttgtattattcttggtaagttaattacgaacgtgagaagcttcgaatatttcgctcgtggtcgtcgttcgaagatcattaaatcctctgggagataatgc

SEQ ID NO: 16011 - DNA, 452 bp, Zea mays
  unsure (1)..(452): unsure at all n locations
agctcgtgagaagagtatctctgttctaagagttgctgcgataattatcttggtccttgcagcattttcatctcctcatcttagaccttaagagcagttctctgaacaaactgttgcagtggtatttccttgttgatttccttcatatatttccttggttgttggcagaccgcagcctgcanggcagctacctgtgcccatgacttnggnttnnccgccacagaatactaacatcagccgcagtacaaccatgatgcagacgccaactgatgctggaaactgtactttacagaggttagttttttcgctgcgcgtctcgtgtcttgtatacgctgtagatcaggttagattcacaagacaactcttgaactacaccgagagaagttgatgatgtgaacgannnnnngngatagtgagagagtatactcttggtctgaagatggaactcaaga

SEQ ID NO: 16012 - DNA, 466 bp, Zea mays
agcttgtgaagattcttcatcccaacatgggctattctgcggtgccagagccaacccatgttagtcttagcaattaagcaagtgtcgagttcagctctatcaaaatctaccaagtatagctgaccctctaacactcccttaaaagctattgaatcatcacttcttctaaagacagtgacacctatatcagtaaaaagacagttgtagcccacttgacataattgagaaacagaaagcaagttgtaatctaaagaatcaacgagaaaaacattggaaatagaatggtcaggagatatagcaattttaccaagtcctttgaccaaaccttgatttccatccccgaatgtgatagctcgttggggatcttggttttctcatatgaggagaacatccttttctctcctggcatgtgggttgtgcacccgctatcgagtatccaacttgagcccccggatgcattaaccta

SEQ ID NO: 16013 - DNA, 415 bp, Zea mays
ctgaccacaaatcgcggtgaggggcatctcgagcgcgcattggtgccttgctatatagatgatgctctcgcgcagatccggcacgagaactaaacacaaggcgagagggggtctccctgcctaaccacgcgctcgcaatgaaaaagtttccctgggacgccattaaagaagaccgacgacgtgccagaccaaagaatatacctcatccaactcatccacctgcgctccaaaactctatgcgacatcccctgaaaaatcaactcatgctcaagagaatcaaaggccttttcatcatccaatttgatcaccaatatgtctttttttgatatatgtgtaagatgaatatattcctatgcccagtgccagcaaaacttaatggttcttcctttgataaagcatattgaattttgggaac

SEQ ID NO: 16014 - DNA, 412 bp, Zea mays
  unsure (1)..(412): unsure at all n locations
agcttatacaggaggatagaggcaagagctcgtccatatgtcatgatagaaggagagttgtacaagcatggagtttgtgctccgctactcaagtgtttatccagaaccgaaggtatagagttgatgaaagaaatacaagcaggcctctgtggatctcacattggatccaggccattacttggaaaaattttccgccaaggattntattggccgaaggcggcttcggatgcagcggaattagttcaaaagtgcgaaggttgtcagaaatgtgcacgagatcaaaaacaaccttcgtccctaacacaactcatacaacccatttggccattgcaaaggtggggccttgacttgtaggtccgttccaccggcccaagggaacctaagatatgttgtagtggcggggggaatattt

SEQ ID NO: 16015 - DNA, 361 bp, Zea mays
agcttcagcagaatgacagcaaaggttctccattctgagataggcaggaatgtactaacttatgttgatgatatcattgtgtagagcatgaagcaggataaccacattgctgatttacaagagacctttgctcatgttagacccgctggtctgaagctgaatccagaaaaatgtgtcttcggagtgaagaaggggaaatatcttggttgcttagtttcaacaaagggaattaaggccaagccaacgtaaatcgaagctatacttcgaatggagctcccaagtacaaaagaggaggctcacagattgcacgaaggtggcatctctcatagattctatgcagatagcagaaaaaacttccatt

SEQ ID NO: 16016 - DNA, 489 bp, Zea mays
ggaccttaagtcacctgcggcatgcaagcttacaatgaatgggtaccttgcacctttattcaagaacgtagcccacactcttttctttatgactcacaagggtctatcacgattcacacacgaatggctagctctatggttaattccctcttttggtcacttgggatgcttttatttctttgggagtcttgctctagtgtattagagttattgatcagcttctgcgtattgaatgtgttggttggaagagtatttatagccattagacatccactgcaaaatctgcactgttgccgggtgcatcagacctttcattataacagttctagtgcacaccaaacctcttccaccctgctcgttcagtgtcctttctataaaaattgtcatgtgtttgatggcatcagattggtctggtgcaccactggaccgcaccacgtcagtcgactattaagctgttcaatccgatcgttgggagaagacacgtcacat

SEQ ID NO: 16017 - DNA, 281 bp, Zea mays
atggtggcggaccgctctgattatctctcctctatttctctcgcgacagaggtggctaagcttacgtcgctcgaggatggcttgattcaaggaatccaaggacacgggaggggaagctttatatcccaagtcggcgtaagccatcccacccacaccaaaattggagcggacgcgtatatctcgcaacctccatgcgaaggcaacggacttgtgtgcgtgaaactgggggaaagaactggcaaacgggccccacaataccaagagtcacgcccgcggctgtg

SEQ ID NO: 16018 - DNA, 371 bp, Zea mays
aagaaaactccggacttggtgaacagttagtgggggtttccactccacaatatctatgaccttgctaggatctaccgcaatttctttaaccaataacacgtgccccaaaaattgaatttctttcagccagaacgcgcacttgctgaactttgcatataaatgaagttccctgagcgccgtcatacaatcccgagatgctgagcatggtcctcttcattcttagaatatatcaagatatcgccgatgaagactaccacgaatttgtcccactcgggcatgaacaccgactttataaataggtgaagtggccagagctctgttagcccaaagacttaccagaattcaaacaatcatttccggtataacccggc

SEQ ID NO: 16019 - DNA, 466 bp, Zea mays
  unsure (1)..(466): unsure at all n locations
agcttggaaattgaaactaggtgttcactacattcattaatgtcanaatctttacacctagtacaaatntcaacatgttctacacaagaattggatttatttgctacttctaatttagcatttaaatcattgttgacacctttcaaagtagaaatggtttcatgacaagtagatagttcaaaagaaagcatttcatttctcttaacttctaaagcatatgattattgtgcctcaacaaatttatcatgctcttcatacaacacatcctcttgcttttctaaaagtatattcttttcattcaaggcatcaattaattcattaattttgtctatcttagatctatctaagcccttgaacaaacatgaataatctacttcatcctcatcactagattcgtcctcacttgaagagcatatgtagagttgcgagtacataccttcttcttcctttgccataaggatgtgtg

SEQ ID NO: 16020 - DNA, 369 bp, Zea mays
  unsure (1)..(369): unsure at all n locations
agcttgccttcgcttcagtctatcatccgcagttcaacggngtcgtggagcgtgccaatgggaaaatcttcacagctgtcaagaagatgctcctcgatgaanaaaaaggcagatggaccgatttgttaccggaggcagtctgggcgctaaacacaactgagtgcagggcgaccgggttcactcctttccgccttctatacggatcggaggcaatgaccccgcaagaaataaagcatgggtccccgcgcacagatccgtcagccgtccctgacgtggacgagccaacttcaaaagatctcattgacggagaccgggtcttcgccctacaggccctaaacaaataccaagcccagaccaaagcatggcgcg

SEQ ID NO: 16021 - DNA, 473 bp, Zea mays
  unsure (1)..(473): unsure at all n locations
agcttgtgaagattcttcattccaacatgggctattctgtgatgctagagccaacccatattagtcttagcaatcaaacaagttttgagctcagctgtgttctcattaaaatcaactaaatatagttgaccctctaacactcccttaaatgctattgaatcgtcacttcttctaaagacagtaacacctacatctgtaaataaatagttgtagcccactttgcataattgtgaaacggacagcaaattgtaatctaaagaatctacaagaaaaacattggaaatagaatggtcaggtgatatatcaattntttccaaacctttgaccaatccttgatttccatccccgaatgtgatagctcgttggggatcttcgntttactcataggaggagaacattcttntctcccctatcatgtggtttgtgcacccgctatcgatatccaacttgagccaccggatgcataaacctac

SEQ ID NO: 16022 - DNA, 471 bp, Zea mays
  unsure (1)..(471): unsure at all n locations
gtcacctgcggctgcaagctgaactgggggtctgaatgtcgaaattcttctntgcagacagtcttgcttacaatagcctgaaggtgtctatatttngatctggtgtgctacaatgaactatttctatggtttttcttaccttcattacatgctcattcttcatttttagggcttgattctaagcaaggctttaaaggctaaaaaagatgaataggatgagagctatcaaatagctcttgggagccttcgttcagaagttataacattgagaaatgaagctcttgaaaaggatatgatattactctccttactggaaaagctgaaatctagcgaggctagtcttactgcacaagccgaagctcataaagccgaagtggaagaactgacaaggaaggttgttgaagcaaccgaacacattgaagttgaggtagtgaagcatgccaattgcgagatcgacaggtcaagagcaca

SEQ ID NO: 16023 - DNA, 388 bp, Zea mays
  unsure (1)..(388): unsure at all n locations
agctncttaagggagaacatgtgataagtctaacttttgttcttttcaaaaagatagaccttgtgcagctagcaagcaggtaaacacgtaggaggagcgcatcacagcaagaatgtgatgaccacgtcaagacccctggagctgctgcatatggacctcttcggacctgtcgcctatctgagcataggaggaagtaagaatgggttagttattgttgaagacttttcccgcttcacttgagtgttctttttgcaggaaaaatccgaaacccaagggactctcacacgccttctcaggagagctcataatgagtttgaactcaaagtgaaaaagataagaagcgacaacgggtccgagatcaagaaccttcaagtggaggagttccttg

SEQ ID NO: 16024 - DNA, 414 bp, Zea mays
  unsure (1)..(414): unsure at all n locations
agcttccaccgagaccgaccatggcggcctccttactttcggcagtgccacgaccgcccatggatgaccggttntccccacgtccgagtttgactgatggtccatggaatcgtagaggtgacaacggattcgagctggaactacttgtcactaaccatcccgagctgaggccgttttaccgcgtgcgacggcgacctcgccataccgacaccgacgataggtgccccaacacacccgaagcccgattgacaaattccgagaacgctacactatgcgcagagcatcacgaatcgctaggtagagcacctacccgagatagaggtacaaaatcacgtgcccacgtagaccaccgcacagcggcagaatccctgctccgtcgagcaattgccggtgaccaagcttccaccgatgggt

SEQ ID NO: 16025 - DNA, 350 bp, Zea mays
tgcgcggcacacctgcggcggacgcaggctccgcggactgccaagtgactccacgacgaccggagaatctccctagcagcctagcagatgcaagccgacaaaaacggaacattaacaggcagaaagtgcccgtacgtgccgggtagctatggtagctcggggctgactggctgaggagggcgagccatcacccttccacctccagacttcagacgagcggcgacgcaagtcaccgacaggaccaccagatgccggcggacgcccgaccgagatgtagcgcggagttgcccgagatcctggcccaacctggaatggaaacatgtagccctcccataatgcatcgaacttca

SEQ ID NO: 16026 - DNA, 477 bp, Zea mays
gatcttaagtcacctgcggcatgcaagcttctccaccatgtcgctgctagcctatttgttgcagctacctccatcaatgatcaaacgacatgaacgctccttaatgacacactttgtttgaaacaacgtatgtcgctgattctgctctgccttctccatttgtgcactaagcacacgctgtacaatgaggctctcataatgctctgcatcatctgcaccaatctgttcttcgggtggttccttagtgcctgcatcatcagccgcaagcaaagcaagtgtagcttcatccaaatcactagcagaggaatacccaccatcgtctttaccaccaaaacacgctgattaggacaatcacgctgcacgtgtccatagcccttgcatcgataacacagaacatctcttgttctacccgtggaggctactgaagaggcaatacctgctggtttctgggcagatatggctgtcgaaattgtggaa

SEQ ID NO: 16027 - DNA, 324 bp, Zea mays
  unsure (1)..(324): unsure at all n locations
aactcacaaagtggaagtgagttcaccggacgtgggcgccaacgtaggggacttgttctcacatgctaagagataagaacacggcaacatataaatgctaaatgataaagtccttcgtccttcgaagcattatctcccttcagatataatgaatcctcaacgaaggttatgaaagactagctctcataagcacaatcaacaatggagaaagactcatacacangatatgagaaataatataaacactgtagacattgtcagtaactcattcttattcgccgtactgtataaaccataacaaattacaaaagtaccttccgctcg

SEQ ID NO: 16028 - DNA, 381 bp, Zea mays
  unsure (1)..(381): unsure at all n locations
agctnatatataccacactcgtgtaaccttcatgatctataccaaagnaattagatattgtgtagtctaacctggcgatacctatctaatctaatatgaacccatctaaagcgagttatttaatagattagttagcactagtgaaatagattaaacctcactcctataaaaacgtcttaagctaaatccggtgccctagattaacttgaccatatacaactacctaatcatatgcaactaccttaaccatccgatagttgcataacccctcccgcttaacctaacagggattctagcatatcctaataatatggtatcctacactggataatctaatcgacttaaactagtctaatctattcataaccaacttaatctaag

SEQ ID NO: 16029 - DNA, 444 bp, Zea mays
  unsure (1)..(444): unsure at all n locations
agcttgacaatattttgcgatggatcttggtttccttctgtgcacaaacagcagctgtcttagtcgcaccctctatagtcagaacatattatgcaataaagttagacttcagttgtacaaataacattgctaagtacgaagctcttcttttggggcttctgaagctaaaggcaatgggaataagaaggacaatccttaaaactgattcgcaagttatttctggccatgtggataagagcagtaaggcaagagacccaaagcttgaaaagtatttggatgcagtccgaagattggaagcttctttcgaagttttttctgtaaaaaatatcctaaggggagagaatgagcatgaagatntattatctaaatcagcggcacaagggcttccttttgtctttgaaagtatttttgaaacaataaaagtaccttcaatcgagctcatgg

SEQ ID NO: 16030 - DNA, 397 bp, Zea mays
ggatcttaagtcacctgcggcatgcaagctttggatctagtcacgacagtttattccggctccaatcttcatttatggctgtccttctccccgtgatgacctttaccacagctacaccccctccacacacgttcccgcactagcgctcgtcgctctggagtttctagcgatggtgacagtggttctactaccctcgttggcttttcctctccccacaactgatgtctcctccccacgatggtgatactcactttggaactggtcgagatgacaggctacaactccggtcatcatgggttcccgctttggaatttcgcacaactggcatcccctccatgcttctccattcactggcactcctccatggtaatgtcatgtgtgagtagcctcttttaac

SEQ ID NO: 16031 - DNA, 345 bp, Zea mays
  unsure (1)..(345): unsure at all n locations
agcttcggctttaaggacacattntcgccatttttgaagaaaagatgtctcaagacaaaaaacttgttgctgagacgaagctgagcgaagaggagaagctccttgaggagaagactgctggatttgttgaatcaatagcaaagacaaatacagaaaagattactaaggagattctagaaggcttatctgaagatactgatgatagcgacaattatgatgcggaaagtggaggcgaagactctgaagatcggccctggcgaccaagtcatgcagtcttcgggaaatcgactatcaaacagagtcatcttgataatatgagaggaaggtattttcgagatatgtcta

SEQ ID NO: 16032 - DNA, 394 bp, Zea mays
  unsure (1)..(394): unsure at all n locations
tgcaagcttatacaagaggatagaggcgagagctcttttatatgtcatgatagaaggggagttgtacaaacatggagnttgtgctccgttgctcaaatgtttatccagaaccgaaggtatagagttaatgaaagaaatacatgcaggcctgtgtggatctcacatcggatctaggccgttacttggaaaagatttccgtcaagggttttattggccgaaggcagcttcggatgcagcagaattggttcagaagtgcgaaggttgtcagaaatgtgcaagagatcaaaaacaaccttcgtccttaacacagctcatacaacctacttggccattgcaaaggtggngccttgacttgttaagtccgttaccaccggcccaagggaacctgagatat

SEQ ID NO: 16033 - DNA, 397 bp, Zea mays
  unsure (1)..(397): unsure at all n locations
ttccgctgcaagctactcgagtcaacttcattccgccgggatccaaacttcgagtagtgtaagttctaagttttcagtattattttttatttgcctattcaccccctctaggcgacatctagatcattgttctcgggcaaagggaattntcaaatgcagtcatattttgaactagttggtaactctagttgcctctatagagctgaccattgaaactgttggacagtgagccacctttggttctaatatatggaatttagacttcctcgcatactttgtcgcctcctctataccaaacacatgcctccccctcttctctccaatatccatcaagggtggaatgccaagacacagatgcacaacatgcacgaccagttgtctcccttcggtgatggta

SEQ ID NO: 16034 - DNA, 331 bp, Zea mays
cagaatgaagcttcttatgcgattcttacttataagacccaaacgacaatgccacatgtatgtaggacttatatcattatgccgaggccttttagcactaatattacagataggtgcatcatcaagaattagaatgaataacccattcataatggatgcaaaagccacaaacatgccattcttagagatcacacaaccattgttttcactcgcagatgaataaccattcttcatcaaacatgaaggagacataatgtttcgactcatactaagaactagataacaattacttaacttccaaataaatcctgatgggaggtggagtagcatc

SEQ ID NO: 16035 - DNA, 315 bp, Zea mays
accataaaatttgaagaacaaaactcatttcttaagaatgcatgtgaacaacaaaaatatctactttatgttataaggtggtcacatgaggagctaaaattgactcatgagaaacttaatgttgctcatgaaaatctaatataagaccatacttttatcactaacaaattttccaatatataaattaaaactagtgagaaatcatcacatgaattaaatgattaattgcagatgaatatcaaaacccacaaagtagtatctagacctatatattccttctagtggtatttacatgtgatgtctaagacaagatac

SEQ ID NO: 16036 - DNA, 240 bp, Zea mays
  unsure (1)..(240): unsure at all n locations
cttgcccgaagctgggctccaacgaggcaagatcgtgtccctcgagtggactgaacctagaccttaatcgcgcccatcaagcctttgcagctttgagctgatgggggttaccagctgagatatgactcttgtgggacccctagntatggaccccgacagtagcttccgagcctcaaagggagtgttgatactcgcttggaggctcttgtcgcacttttctgcaaggtgaccaacctttct

SEQ ID NO: 16037 - DNA, 445 bp, Zea mays
agcttcagccacaggggctgccactctgttctttctggatcccaatcaggatgtcctctctcttagggaggcccaaagccagaagaggaaggccaccagtccaacgcctccggaggacgacttggatcaagaaatccaaaacttggagatgctccatcaataggtccaacggaagaaggaaaagacggctcgtctagctgacctacaaaggcagatagacgaagcctcttaagaagttcgtcatcttgctcaagatgaccagaaccaaaggcctccgcgcagagagcttcatcaggagggcttctacaacgaggacgactggtatgaagatttccatcacggaaattttgcttttgatgatacttctcctctatcaacagaactgtaggctacaccttggccccagtcttacaagccaccccagctcctcatgtacgacggtcat

SEQ ID NO: 16038 - DNA, 384 bp, Zea mays
gatcttaagtcacctgctgcatgtcagcttgcaatatgtgaagtgaggccacattattttatcgatgactaaggaaccttctggatgacaacagatgtcattgatgtgggcgcaaaggtggtgggtgataaacccttcacccaagcaaacacatcaacatcaagtcatccaatccttgatgaagttcatcaaccacaagagttgccaacaattttggaagatgaacctgaagtagctgttagtgaagttcctcttgatcaacatgatgatgattgaaagcaaattcaaagacaaccatcactgcctcatcctcgagttcaccataccatccaaagagatcatccagtggacaacatttttggtagcattaaaagaggggtaaca

SEQ ID NO: 16039 - DNA, 419 bp, Zea mays
  unsure (1)..(419): unsure at all n locations
cagctagtgaaggatcttcatccccacatgttctattctgtgatgccacacccagcccatgctagtcttaactattaagcatgcatctagaccggnctcttcttttgcaaaatcaactaaataaagtttgccgtctaatacacccttaaaagctaatgaaccatcgcttcttctaaggacagacacatctacatttgtaaatagacaggtatatcccatatgacataattgactaacagataggcaattatatccaagactctctactaaaaatacattagagatagaatgctcattataaatagcaattntacctaaccctcttaccttgccttgattcccatcaccgaatataattggaatttgggaatccttattcttgacgtaagaagtgaacattttcttctcccccgtcatat

SEQ ID NO: 16040 - DNA, 437 bp, Zea mays
  unsure (1)..(437): unsure at all n locations
agctngtgagcaatataagttcagaatgttgatttctgcttcngccgatcagccgaagcccatgctcttatgcgaggacatatcatagcacaaggtgctattgggatcccaactgtccgaagagcaggagaanaccttgataaggtttctattcaacaacgaagatgtttttgcatggtcagctaatgatctttgcggagtcaacagggatgttattgaacactcgctcaatgttgatccatccttcagacctagaaagcagaggcttctgaagatgtctcatgacatggccgaaggtgctcggaatgaagtgaaaagactcctcactgccggagttatcagagaggtaaaatacccagaatggctggctaacactattatggtaaagaaggccaatggttaatggaggatgtgtattgattttactgatctcaaca

SEQ ID NO: 16041 - DNA, 330 bp, Zea mays
  unsure (1)..(330): unsure at all n locations
agcttccaccatgggcatgccttttgtctcctcttcgcctgatgagcctctccatcctcctcccccggagatcaatgagtggcaccagcaggcctacggngtgccttttatgtctgcagacgatgaagaagaagaagcctatgttgatgatcgcgaggagtttgccccgcctccctaccatggggatccgggtcaaacatactcccaccctccgactccttacccaagaccgggacccattcctggtgaccctaagccatccggctctggttaccaccaccacccttcacctactcctgatcatcgtacatcttcggcaatctgtatttc

SEQ ID NO: 16042 - DNA, 349 bp, Zea mays
tttttggattaatattctatgagttatgactaaaacaagtaactactgtgctattgttctaaacacgttagttgtgatcgattgttccactccagtgtgtttgtcttgagtcgactgcttgtttgttttgggttttgattgaacgaagtaataataatagtaaatattataatggaggatatatatatataagtaactaatacacgtctcactatgttagtgaactaattttgttaaggtctgataagtagcttatcttaatcaacacttaacaagtgtagttatatgttcgaagaaacaagatgactaatgtactctctttagctttttgctaggcctggatactact

SEQ ID NO: 16043 - DNA, 476 bp, Zea mays
  unsure (1)..(476): unsure at all n locations
agcttgtctttgttagctcgatctaacgatgttgtgatggtcgccttgcaggaggtagtcgattctttctctcttactcagagagtaaagaaaaataatgttgaccttgccgagcagaagatttgtgccaggagaaccgataaggatgaagataccatgatcaaagcacaacgcttggctgccaagcgcaacttggaaacaagtgagttctcctttattacttacaaacccaaaacgattatttctaacatgaaaaatattggggtcaaacttggcaagaatgagaaagaagtgttacaatcagtggttgcgattaagaatatagagattgatagacttgcagttgctgcaaattcacctcccccccataaaattacagaaatagaggatggngaagacgaggagatgatagtcgcctatagggggggtgaatatggcgaaactgatatttacaaatatatacacaactactagcc

SEQ ID NO: 16044 - DNA, 449 bp, Zea mays
  unsure (1)..(449): unsure at all n locations
accttgattcccaacaaattagcatgctcttgttagtcttttctttagncaggtcagtcttgctgagtaatttcatactcatggttttattctcattggtgctgcagaagagactattaacacctttgagttttgttaaactcacaatggagactgttgcttatgttgattatgtgtgtgctgcgggaaggtggttntcttcctangtatacataatgcttggtttgtatatttaaacgtttgctaatgtatattatcttattataaagtattccgctcaactcctgtgtttaaagtctttattcatgtcggtttattgtaatatttgcaactatgggtgaatggtccttggaaatgaacgagttcatcgaaactcggcaccccgagtaagttatctgattcacttacatatctatccgacgctttgatggcaaggatgagtgtacgtg

SEQ ID NO: 16045 - DNA, 434 bp, Zea mays
  unsure (1)..(434): unsure at all n locations
agtcacctgcggcatgcaagcttgtgaattgtgataggtggtggattaggttcttcttgctataatcttgaggataccatgttagcctgttaagtacaagttaagtttagggttgatgattgatgagtgttgacgaanaagtgtttcttttgcgtaagctgctgatctttaacaaaaaaaatgtgtccgacaacttttaaacttatgaagctatgaattatgatatcttaaactcttaatattgtagtttacttagtggtggtacgaaattacatattccgcccaaagatttcgattattattngtttctgttgtatgttcgcttgttttaatccgcttttgtgtaacattaattctcacaaccgttcctgtttccgactattctactcccgttttcggtaanaaatgatgatgggaatatgtgagggattttt

SEQ ID NO: 16046 - DNA, 438 bp, Zea mays
agcttctaaagggagaacacgtgataggtttgtctaacgtgcaattcgaaaaagatagaccttgtgcagcttgtcaagcaggtaaacaagtgggaggagcgcatcacagcaagaatgtgatgaccacttcaagacccctggagctgctgcatatggacctcttcggacctgtcgcctatctgagcataggagggagtaagtatggtctagttattgttgatgacttttcccgcttcacttgggtgttctttttgcaggataagtctgaaacccaagggaccctcaagcgcttcctcaggagagctcaaaatgagtttgagctcaaggtgaagaagataaggagtgacaacgggtccgagttcaagaaccttcaagtggaggagttccttgaggaggaagggatcaagcacgagttctccgctctctacacaccacagc

SEQ ID NO: 16047 - DNA, 465 bp, Zea mays
  unsure (1)..(465): unsure at all n locations
agctntgttccagtgcacgcaagatcacgaaatttatcttaggcgtatgtccgaagggttttgcgtctgatggcacaagcgccaacagtgcccaatgaaattgtcattgaggccatgatcaaggggcttcgggtgcataggtaagtaatatgtgaattgactcaagcctagctacgggtgcataggtttcaccgaaatccaaaccttcgacttgtgaatattctttggccacaagtcgggctttgttccttgtcaccacaccatgctcatcttgcttgtagcggaagactataagtgcaatcaaccccaagtgagggttttggtgatttaatgacaaaacaaataagggtactaacagtttttgttctcagtgttngattagaagggaacaggaacttaaggaagcaccaaggactctatgcaacagacgtataaaaatttatgtacaatcttgcgttgcatgat

SEQ ID NO: 16048 - DNA, 409 bp, Zea mays
  unsure (1)..(409): unsure at all n locations
agctnggtgccaatggagnaacagaaattcttttatcttgattgtcaaactgcttgccgttgtcaactgttagctcggacggtactccgaagcggcaaacaatgttctgccaaaagaatatttgggcagtctttgatgtgattgtggacacagccctcgcttcaatccacttggtgaagtattcgacggctacgaaggcgaacttgaagttcccctgagcggtgggcaagggcccgacgatgtccaggccccatcgctgaagaggccatgtatgggcgaccagctttgtgtattgcgaggggttgcctgaccgaagagagaacttctggcatgcttcgcaggatcttgcgacccgatttgcggcgcacatcattgcatgccaataaaaccctcgtcggatcaccttaac

SEQ ID NO: 16049 - DNA, 288 bp, Zea mays
attcatcgagccagtggcttaccccacgtggctctccaatgttgtgatggtgcagaagaaaagcggaaaatggcgcatgtgcatagacttcaccagcctcaataagtcctgccccaaggacaatttcccgttgccacggatcgacaaaataatctataacgcggccggatgcgaggtcatgtccctcctcgactgcttcttcggctatcaccagatatacatgaaggaggaagacaaggctatcaccagctttattacacccttctgcacttattgctttgtcagaat

SEQ ID NO: 16050 - DNA, 387 bp, Zea mays
  unsure (1)..(387): unsure at all n locations
caagctttggaaaaggccaaggttactcttgtgtttaaacaaagacaacgtaacgcccgaattatggcgagtaaagaaaataaaanaatcaacttgcaaataccgtgcgatacatacctatcccccttaaaagaatctcgccctcgagattcacggatggctagcaaagagctcatggtacttatccatcatatcatcttcacgctcccaagctgcttcttcctcacaatagggactccatctgactgtgcacattctgacggacattcttctggcgactctatatgccacctcaatgatctgagctgggctctcaacataggacaacggctcctggacttataaagcttctcctggcaactgctcttccttcacacgcaagctctt

SEQ ID NO: 16051 - DNA, 482 bp, Zea mays
  unsure (1)..(482): unsure at all n locations
ttaatcacctgagcatgcactatacacaacctactaatttccttctatctggaaacgcnctccagcctcagaaacacctatagtactcctcaccacctacaacaacatgggttcgaaaaccctgagtacggagtgtactttcgcaagtcttacccgactaagaaaaaatgactctcaaggatatgctggttaaataggaatcaaggaacagtctttagcaagaatcaacttaaatacttttgcagaaatagcttactaaagtgagtccttactttcaatattttaacgccagattaaatattaatagactctggtagcatctagtctaatttcaccatctcatcaatacaacatcatttttattcataatgtttacatcctgacttacgttgtaaggcagcgatcaagtctccactctccgtggatataaccgcgatccgaaacgaattactcagctgaggatctctaaccacacgacatat

SEQ ID NO: 16052 - DNA, 393 bp, Zea mays
  unsure (1)..(393): unsure at all n locations
agctnttatgctctggatgcccaatccgcccctggggttctgtcggcgaaattcacggcagggagcaggttgttctcaacaaccccggcttcgcggagacgaccggtgacgtgggacccactggcagggagccgactccaagcgaaatgtgcacgtcagaatgacagtgtggggacgggatgtccgcgccgcgcggtatgaagatgacagcgcccgcgaatggatgactgggaggacccacacgacagagaccccagtgaagcgacacggaagaagggctgatgggctgcgcggtggtaaatcggagttgggcccacaaagggtttagtcggcccatgatggcacagtttcgttnttcttttattctattccgaattttcccctttttatatt

SEQ ID NO: 16053 - DNA, 399 bp, Zea mays
  unsure (1)..(399): unsure at all n locations
atcttaagtcacctgcngcatgcaagcttataattntcaggtttcgcctattcacccttctctatgtaactttcaatcgataatcttcattttctcattcgtgaatttccatgagtgcatcttcgcaatgcccccataccctttcttggtggggctcctttactactacgatctagctacaccatcataaccctaatgaggttcagcatatggccgccttattgaccttgtgtgagggataccttgggttgtcccccattttcgcctctggtgccacttctcggctaaactgttcatgtgtggatagcgccagacgctccaatggatgggtatatccagctatggatgtgcttgtcaaacaaaggctagcgtgaccagtggttctatctgcacaacctc

SEQ ID NO: 16054 - DNA, 418 bp, Zea mays
  unsure (1)..(418): unsure at all n locations
agcttatatatgtatctgtaacataccattttatgtgtatgtatcgnattgacatctttcatcccatcgccagcaatatttctattcaattctacttcctggtacacataacatgttactatgcataatttatgttacaaatagtataacacttacacaactggaatattattaccttgtcttcctcatcatcactaacatctgatgactcattacatccaatatctggctctaatcggcatagaacgacatcgagctcattcaacacatacattgccttaatctaccctgctgttgacatacacgcctggcacactactttcattggtttcgttaacaacaatttctgtctggatgatttaataactacatcctctcccctgaagctcttacaatcctttcaaaggaacatcttttt

SEQ ID NO: 16055 - DNA, 371 bp, Zea mays
acctcttctctctggccaagcttttatttagcaaaacataaaagactacttcttccttctgccgcagcttgtacatagcaaaacataatagactactttttctttctgccgaagcctttacatagccaaacataaaagactacttcttctttctgccaagcttttacttttacacaacgattctaaaaaaccaattctcttttttgccgaagcaacccacttggtgcataaatgctatgaatgaatgcttatgtatgccaatgccctgatgtatggtatgtgcacatgaatggtcgaagcgtatgtccgaaggcacactcattcatcactttcttaggaacaaaacacacctcagctctgcattccttagg

SEQ ID NO: 16056 - DNA, 406 bp, Zea mays
agcttcgggaaccccatacttctagccatctctcggcagacagataattctttgttgtctgggaggcagtataagaagtcatcttcatctgtgtcattgaacactaaggcccccttcggatacttcagttcttaggcatagtgattagcttcaaaaatctcttcttcagataatgtcttccccgaagcatgtcgtacaatataatcacgtattttggaagatgcttcgggggcagcagtgccagtttcttcactcaaaatttgttctgccatttctgttttttcagtttccaaggatttcaccttggcgggctctgaaggcccggcttcagtttcagactgtggctttgaagcttcggcgtcaaagggttcagtgtgcacttcggaagttttagcaattttctttg

SEQ ID NO: 16057 - DNA, 373 bp, Zea mays
  unsure (1)..(373): unsure at all n locations
agctntatcaaatggacgtgaaagtgcctttctcttggaccaatcaaggaggaggtctatgttgagcaacctcccggctttgaagatagtgagtaccctaaccatgtttataaactctctaaggcgctttatgggctcaagcaagccccaagagcatggtatgaatgcctaagagaatttcttattgctaatggctgtaaagtcgaaaaagctgatcctactctctttactaanacacttgcaaatgatttgtttgtctgccaaatttatgttgatgatatcatatttgggtctactaacgaatctacatgtgaagagttagtacgatcatgactcacanattcgagatgtcaatgatgggggagttgaagta

SEQ ID NO: 16058 - DNA, 489 bp, Zea mays
  unsure (1)..(489): unsure at all n locations
agcttctaaagggagaacacgtgataggtcttacttttgttatttctgaaaagatagaccttgtgcagcttgtcaagcagggaaacaggtgggaagctctcatcacaccaaatatgtgatgacaacatcaagacccctggagctgctacatatggacctcttcggacccgtcgcctttctgagcatatgaggaagtaagtatggtctagttatcattgatgacttttcccgcttcacttgtgtgttctttntgcaggataagtctgaaacccaaggaaccctcaagcgcttcctcaggagagctcaaaatgagttngagctcaaggtgaagaagataatgagcgacaacgggtccgagttcaagaaccttcaagtggaggagtttcttgaggaggaagggatcaagcacgagtcctctgctccctacacaccatagcaaaatggtgtggtagagaggaagaacaggacgctaatcgatatggcgaggac

SEQ ID NO: 16059 - DNA, 496 bp, Zea mays
tgcaagcttgacattgtttccctgttggaagccaatgctattcttaatgccagggcgtctcccattatagagcatgcttctagcaaatttaaattgttcattctctatctcatgctcattaattttactagtcagttgtgctatgtgatcattttgttggttaattaaagctaggtgatcatgcatagcatcaacattaatatctctacatctagtacaaatagaaacatgatcaatactagatgtagaaggtttgcaagaatttagttcatcaatcttagcatgtaaaatggcgttctcatttctaagattggaaatagaaatattgcaaacatttaaatctttagccttggaaattaatttgtcattttcaattttaaggctagcaagcgattcgttcaatctatcaatcttagcaattaaactagcattatcatttttaagattgacaagagaattatcacaaacatttatcttctcaaccttagcaagtatc

SEQ ID NO: 16060 - DNA, 480 bp, Zea mays
  unsure (1)..(480): unsure at all n locations
agtgacctgaggcatgcaagcttcggcgatggttaaaaagtttggcaggtaattagtgcttttagcaatgaatgctgtggtaacttcacacctactcgtctgtttatatagtgctgcaggtaagaaggcaaagcgccagagtttttacaccaggcgcacacccgcttgcgctcgctgcgcggtggaccgcagggacaaacagtaaactctgcaaggtgggaccgctgcgtgttgggaaaataaatcgtttctcggcaacgagctcagggaaggtggtttttggaccttcggctccccgaagcttaagagacttttttcacggatcaagctcgttacgaaaaacgatctatcaccgcgaaaggggctactggtgggtctatgcttcgtcgccgaaggtcttcaagggagaagcggcttataatgtgtgagcaggtatcttcggactcgtatcagaaaggganaagctacaaagggtgacac

SEQ ID NO: 16061 - DNA, 497 bp, Zea mays
  unsure (1)..(497): unsure at all n locations
atcttaagcgacgcggctgcagctttccttttttttcttttgtgtatttctgaccngcagnnnnaantaattactaaagcgaataataacaaaaatctccaactgttaaaattcacaaggcagaaagagacaactctggaaacacacaaatataatagaccctcagccnccaattcattcatccatatatagtatatatccggaaatgcaaagcatttatttgtaacgtgcaaattcccacaaatataacgcaactgtttgtagagtatttcactcggccacaccaacatttattaaatgatttgccaacatctcttctggggacggattaaataatacgagatagcccattcaaacgtacccttcaacgagatggaccaaattatacaagtttctgtctttatattgatataccatacattaaggccttctacgactttaatttgtggatggagtaactgatatagaaatgtaacacccaatttggtacctataat

SEQ ID NO: 16062 - DNA, 419 bp, Zea mays
  unsure (1)..(419): unsure at all n locations
acgagatcaccccgngaacaccatcctcggcgatattcaaaagggggtaactactcgatcttgtgttgctcatttttgtgaacactactcttttgtttcctctattgagccacacagggtagaggaagcacttcaagattctgattgggtggtggcgatgcaagaggagctcaacaacttcactaggaatgaggtatggcatttatttccacgtcctaaccaaaatgttgtaggaaccaagtgggttttccgcaacaagcaagatgagcatggtgtggtgacaaagaacaaagcccgacttgtggcaagggatattacaagtcaaggtttggatttgataaacctatgcacccgtactaagctaaataattccatttacttgctatgctcttccatggcttcagcttataaatggcgtg

SEQ ID NO: 16063 - DNA, 377 bp, Zea mays
  unsure (1)..(377): unsure at all n locations
tgcatcagtcacgcatgcggagtcaaatgggctcgttgaaagagccaatggcattataatgacaggaataatgaagttaatcttcaatcaacccaggggaaagtggccagatcagttaaccaaagtggtgtggagccacaacacaacaatatcaaggtctacaggctttactccattcaagntattattcggtgacgaagcaataactccggaggaagctaaaactggatcaataagagtagtagcttctgcagaatcaggttctgaagatgcttattctgtggaaaaagatgctttagaagggattaggcttcaagctgtggagaatatcaataaatatcaagccgaaacaatcaaatggcgagatagaaaggttc

SEQ ID NO: 16064 - DNA, 452 bp, Zea mays
  unsure (1)..(452): unsure at all n locations
agcttctagtagagtatatgaagccatcttttcttagatcaagaacattccggtagtatgtgagtttccagatgtatttccggaagatatgcctggactgccccctaaaagagatgtagaattcgtaattgagctaaagcccggtacggctcccatctcccgaagatcgtaccgtatgccccctaatgagttggcggaattgaagattcaattacaagatctactaaataagggattcatccggccaagctcgtccccatggagttgccccgctatttttgttaagaagaaggatcaaaccttgcgaatgtgcgtggattatcgacccctgaatgaggtcaccatcaagaataagtaccctattccaaggatcgacatcttatttgatcaactgactggggcgagggtattntccataattgatctcaggtcgggctatcaccaaatacgta

SEQ ID NO: 16065 - DNA, 284 bp, Zea mays
tcccgctttgaagatagtgagtaccctaaccatggttataaactctctaaggcgctctatgggctcaagcaagccccaagagcatggtatggatgccttagagaatttcttatagataatggcttcaaagatccgaaaggccgatcctactttattactaaactttgaaatgacttgttgatgcaattatgtgagatatatattggttactacagctacatgtaaagttatggacatgaccaaaatagatgttatatgggagtaatattttagattcagtagca

SEQ ID NO: 16066 - DNA, 482 bp, Zea mays
  unsure (1)..(482): unsure at all n locations
agcttaaagggtcataagtctagtatctattatataccactagaagccccgcatgactaagagaaccctaagttacttcttaacttagtttctttagcttaatgttcttaaatcttgcataatcatgacatacatgttcattgcatttcgatagactgtaatcttgctgacggagagtacatcctcatgccggagcaaggagctgctcaggaggtagccccagatccagcacccgagcctgcaccagaggacctgcctgccactgctttggaaggcaagccccggttttatgcataacctgttatttatgctattntccttcacttaatgattgtangattgattgtgcacttacgtgtangaattgtttgaaaccctagttgcatgatctcaggaatcctttngagatgaatactagtatgacaggtcgagtagttgctttacttaattaggatctcggtagaagacgagtgatatttcta

SEQ ID NO: 16067 - DNA, 256 bp, Zea mays
gcccatgcaaagtttagccattaagcatgcatctagaccggcctcttcttttgcaaaatcaactaagtaaaagttgccgtctagtacacccttaaaagctagtgaaccatcacatcttctaaagacagacacatctacatttgtaaataaacagttatatcccatattacataattgactaacagatagtaaattatatccaagactctccattaaaaacacattagagatagaatgctcatttgatattgcaatc

SEQ ID NO: 16068 - DNA, 454 bp, Zea mays
  unsure (1)..(454): unsure at all n locations
agcttctatagggagaacacantttgggactatacttatgtcattntgagaaagacnggatttgtatcgcatgtcaggcanggaagcaactcggtgttcatcatccacacaagaacattatgacgactgacatgccacttgagctcctacacatggacctattcggcccgattgcttacataagcatcggcgggagtaagtaatgtctagttattgtggatgactattctcgcttcacttgggtgttctttttgcaggacaaatctcatacccaagaaaccttanagggattcttgagacgagctcataacgagttcggctttaggatcaagaaaataagaagcgacaacggaacggagttcaagaactcacanatcgaaggcttccttgangaagagggcatcaagcatgaagtttcttctccctacacgccacaacanaatggtgtagtgga

SEQ ID NO: 16069 - DNA, 428 bp, Zea mays
  unsure (1)..(428): unsure at all n locations
catgcaagcttaccacatttgaagcatgagcgcttcttctttgtcttggtcttgctnggctggcccttgcgacctttaagcgccgtcttgaatctcttgatgatgagggccatttcttcatcattaagtccggcggcctcaatttgtgctaccctgctgggtaacgcctccttgctccgtgttgccttgagagcaacgggttgaggctcattaattggaccgtttagagcatcgtccacgtacctcgcttccttgatcatcattcgcccgcttacgaattttccaaggatttcttcgggcgacattttggtgtacctgtgattctcacgaatgttattcaccaaatgaggatcaagaacggtaaatgaccttatcatcaatcggacgacgtcgtggtccgttcatcgtgtgcttccgtagctccttat

SEQ ID NO: 16070 - DNA, 484 bp, Zea mays
  unsure (1)..(484): unsure at all n locations
agcttanggaatgaaaggggatatcgaaattgtctatgttagcacccacaaccaattagccgatatcttcaccaagcccctagatgaaaagactcttagcaagcttatgaatgaactcaataacctcgattctcgaaactttgactgaaatcttgcacacattgctcatttatatacctttgattatgtctctttcatttggtacaaatgcatattnttattcttcttgtatcaaggctaagactaatgtgcttccaagtatatttctatctttagtcttagattgaaagggaaatgaagtaataggcaaaggcaaggcttccactacgactctgtcagtatcatatttcgtttgccctactcatgtatttacatccatatcttgtacaaggcctctagttctctctaattttggtgcttaatgccaaagtgggagagagtaataggcccaaagcanaaggaccgcaccaccaccttgttttct

SEQ ID NO: 16071 - DNA, 454 bp, Zea mays
  unsure (1)..(454): unsure at all n locations
acatgacaatcaaagctgatgcttataataatcttaagctaagcggaacacttaaagctcttcgggataaatgtttccgctgtgcaacacaatgtactgctcggttaaaaagtatcttccattctatcggagctatgtctaaagaagccaacctttctaccgaagatatcccatgagcactcgaatggattgagaaggagattgatgatcttgacgaagtcatagttggtcatggtgatttttgcgcgctagtgcctacccgtgggacaactgctactttcgccaaggctgtatacaaacatcttaagactgttaatacaccaaccgtcggccttttgtcatcagacttagtcaatatcccggcatgcatcctttntatgtaaacttcatcgtccgaacgatagttgccctagaggaaagatacaatntctgttctcaatagtcgctatgtata

SEQ ID NO: 16072 - DNA, 332 bp, Zea mays
  unsure (1)..(332): unsure at all n locations
gccttgggcaccttcacgggcaccaccctcagcatgtcctcgcaccccgacctgagcgcctncacgtggcttgccgtgtttgcggcctcgtgtcgaggaggactcccccttctttttgtcaccctggcacgcctcccactgctcccgagtgagatgtagcttcccgccgatagtgataggcccagaggaaacctgtggttcgtcgccgtcgaccgccttgagatgacctatcgcctctttcattgtcatcgtagagaggtcgagcagagactcgatcgagcgagcaatctgcttgtacttctcggggatgcaacataagagcttctcaacag

SEQ ID NO: 16073 - DNA, 465 bp, Zea mays
  unsure (1)..(465): unsure at all n locations
gcttgtgaagattcttcatcccaacatgtgttattcggtgatgccagagccagcccatgttagtcttagcaattaagcaagtgttgagttcagctctatcaaaatctaccaagtatagctgaccctctaacactcccttaaatgctattgaatcatcacttcttctaaagacagtgacacctatatcagtaaatagacagttgtagcccatttgacataattgagaaacagaaagcaaattgtagtctatagaatctacaagaaaaacattggaaataaaatggtcaggatatatagcaattgtacccaatcctgtgaccaaaccttgatttccatccccgaatgtgatagctcgttggggatcttggcttttctcgtaggaggagaacatcttcttctcccctgtcatgtggcttgtgcacccgctgtcgatgatccaacttgagcncccggatgcataaacct

SEQ ID NO: 16074 - DNA, 216 bp, Zea mays
cattggcacaagagacctacttcatgagcatcttgccttcaaggtatggccccctgcgtgaaaatgggaaatgcctcatgaaacctctaccttaaccgtcgaacgttgacttatcaggttgaaccacactttcaaattcgtagataaatgcgacgacccagatgatgaccgagtataaagtattgttaatttctaaaatgaactgcttggggctta

SEQ ID NO: 16075 - DNA, 459 bp, Zea mays
  unsure (1)..(459): unsure at all n locations
agcttctacatgctngcccagtggtcatctattcatgtctgaatggctctctggtaagtcgctccagcgtttttgaggccgaacgacatggaggtatagcagaaagctccaaacggggtgatgaatgctgttttttcctcgtcttcttttgccaggctgatctgatgatacccggagtagcaatccaagaaggacaacacagaacacctggcggtcgagtctaccacctggtctattctatgaagtccgaagggatccttcggacagtgtttgttgagatccgtatagtcgacgcacatgcgctaatccactttattctttntgagtacaagaataggatttgctaaccactcaggatgtagtacttctctaatgaatcctgtcgcgactaagcgagccagctcagcacggacggcttctctcntgtcaggcatgaaacgacgcagcttctatcggatc

SEQ ID NO: 16076 - DNA, 405 bp, Zea mays
  unsure (1)..(405): unsure at all n locations
cttcatccccacatgtgcttatcggcgatgccacaaccagcccatgctagtcttagcaattaagcatgcatctagaccggcctcttcttttgcaaaatcaactaagtaaagcttgccgtctaatacacccttaaaggctagtgaaccatcacttcttctaaagacagacacatctacatttgtaaaaagacaattatatcccatattgcatagttgactaacagatagcannatgtaaccaagagactcaactaaaaacacattggagatagagtgctcattagaaattgcaattntacctaacccttttaccttgccttgattcccatcaccgaatataatngaatcttgggaatctttnngtttgacgtangaggtgaacatcttcttctcccccgtcatatg

SEQ ID NO: 16077 - DNA, 484 bp, Zea mays
  unsure (1)..(484): unsure at all n locations
agcttcgatactataacgtatcctaagacgattgatcaaaccgacttaaagatggaatgactntntagtccataagggtctgagtcataattgtaatcttctgtaaggggcatgattgtaatttcttacaggctgcgtcctgtgcctataaatagatgaacaatactcctttactgttcacgcaatccggtaattgctaacacatcactctagaattattgttttctgccaaggcgaaggtataaatgtacctaaatattatgttttagtatttaagttcacattataaaataagtgaataatgttatttattcttggtattctataacattttatattttatatttcatttcgcattgttntatctttgatcacgaaggtgtgaccttcgtgatatattattcataaccttcgtccgaagctcattaaatcctttgggaaataatgcttcagcgaacgaagggctntaacatttaacattcta

SEQ ID NO: 16078 - DNA, 301 bp, Zea mays
ctgcagcttcaacaagaaggaagaatttgatgctaatcttgtagccgaagtcgagaaaagttcgaatctgcaaaaatccttaaaagagcttcagaatatatgcttgaactttggcaaccgctgcgtgcaacagctaagacagatctttaaatcagtgggagccagctctgaaaaatttgaaccttcggttgaagacttgccaagcaccttcgagcatattgaaagcgaagttgagacgcttgacgaggtaatagctgggcatggcgacttatgtgccctgcttgcttctcgcggcacagct

SEQ ID NO: 16079 - DNA, 491 bp, Zea mays
  unsure (1)..(491): unsure at all n locations
gcttgcacccaggtacattggtccatntctagttcttgagcaatgtggaccagtggcataccgacttcaactacccgaaacattgtctgctgtgcataatgtgttccatgtgtcacaattgaagaagtgtcttctggttcccgatcgaaccattgaagtaacagatgttgtccttgaaccggacttgacatactctgagcaccctattcgagtcttggatcataaggacagggttacccggagaaacaactctcaagtttataagatacagtggaaccagcattctgaagatgaagctacatgggaaacccaagacttctagaataagaatntcccaggctttctagcctcatgtaatttgtaaagtgtatatagttattgaataaaggaatgaaccnccacatcacccctgccttgtaccagaaataaagaaatgaaagtattccgcgtttccttttccattacttaccctangactttaatctcgggac

SEQ ID NO: 16080 - DNA, 483 bp, Zea mays
  unsure (1)..(483): unsure at all n locations
gctctntgacaataagaccactttatcttttntaacaaagatgcaataatgcatgagtgagaatttaagaggttaaactagatatgaagcagggataaatgcaagggacatgctttctcttccttttatacaagatgtgcaaagagtgtatataagaggaagatttacgtacatatgtaaatgataggaattagttgtacccttttgtaccttcacatagagacgctctctccattgtgatttgtccttagtcttagttgcttaagacctgtactcaatgacaatatatggaaatattttgcacaagagagagttcttacaactagtgatctttttcaagttattgttagcataaatcanatggatcacaagttgcaaagatgaatcatgaattctcctttttccttagtgcatatcaagatagaggtcaattcaatggaaagntcaaatgaaattacacgaggcactaagaagtataagtga

SEQ ID NO: 16081 - DNA, 391 bp, Zea mays
  unsure (1)..(391): unsure at all n locations
tattccaaccagctcattaagaatagattcaaagaactctagtcattcaaagttatatttgggtttttgatgagctcaatacttgaagtcacttgaggttgatgaattaagagaccattgtaccaaattcgcaagcactctatcgtttgatgactcatgtgatgtcaattcaaataaatctcgtttcatacttagttctatgtggttgactntatcagataaaccaatatctaccatggagatttttagcatgccagagatgtagattgttatcctaatattttctattgcttatcaaatcttatttgccttacatgttaatgtcgatagaacacgaacactcacagcgatcagacgagctcgcatacactcacagcgaacggatgaactg

SEQ ID NO: 16082 - DNA, 479 bp, Zea mays
  unsure (1)..(479): unsure at all n locations
agcttctccagaagatggatgaatactttctttcttgcaatgacttccggcaaagaatggaggaagcatatatgtattctaagatgactaggggcttcagaggaagacttcaccctatgcatgtcagagctatccacaatcccaatgcatacgatgacagggccaacataacttagagtatccagcacagctcacagtcttcgggcatgcaacaaactttctacaggccaccagcctcgagagcagatgggggagaagcttcngaggaaggtttgataataagcccaggaaactgtattgcctattctgtggcgaagacaaaggacacactacaaggacatgccaagtcacgatccagaagcagaaggataccgctgaagccaaagcaggtcttgcatactgcttcgtggtactctctgtatatctcagagtacgtaggcgatcaacaacctatggcttctttcgcttccgcaagtcat

SEQ ID NO: 16083 - DNA, 435 bp, Zea mays
  unsure (1)..(435): unsure at all n locations
ccgagcatctcaacggatcaaatagaagagggcattatcatagatcaacccgagtcagactccgatgactggaggcaaccgattattaaatatataaagaatgaagaagagccggatgacaagaactcggcagagcgcattgccagacaatcagctcactatacactcattgnggaggtattatacaagaggggcgcgtcaagcgtnctcatgaagtgcgtactcccgtccaccgggaagcaacttctggaggaagtccatgcanggcagtgtggagtacacgcagcatccagaacattagtcgggaagggtttcaggtcacgattctattggccgacggngaagaatgatgcagccgagttagttcaaagatgcgaagcttgtcaatacctgtcgaagcaacagcacattgcagcgcagcagctacaaaccata

SEQ ID NO: 16084 - DNA, 406 bp, Zea mays
  unsure (1)..(406): unsure at all n locations
agcttgagaaagaacatcttgccactattgttttntatttcaacaaaggccaataccttcaaaatgagttactcatgagcactgtcatgaaaaataataagagtggtattggatacaattcttttgtgcaaaaaaagcaacaagtcaatacaaggcaaaacaaactcctaagccaatcaagtgctacgagtgtggaaaaaaggacatttcgcccacaactgcaaagccacaccaccaactcccttgccaaagcactcaagaccatttgcattcaatgttcactatgtactaagaaaagttgcaaatggaaaagtcaaagtaacattcttatgtccaccaagcaagagtagacctagacaattttgggttgcaaagtccttgattgagaaagttattggccctatgc

SEQ ID NO: 16085 - DNA, 478 bp, Zea mays
  unsure (1)..(478): unsure at all n locations
agcttatcccagggggaactacatacattctctttatcagcttacacgagcatggacacgcgactttattacataagcaccacgcaggatcagtacacgacgaaacaacagacttgggctcgtagtggtcaaaccagagacaacaagcaaggtgggtgccgtcttggataagctcangtccatcctaggcgtagatatttggaaccttaatacactcgcttacccctggtgccaaaactcacccacattccaatctaaccggcagcaactggaacatagcagtagtggataagctccgtactggtctcttcttagatcactaaaccaagctccaaacctaatgagtttgaactcacactgaccacctgcacctttccgattcactcccctttatcttactantttcaaaggcaacaggtcaaccaaggctaacanagtatgctcacaaaacanaactctaccaactcactatagaaat

SEQ ID NO: 16086 - DNA, 409 bp, Zea mays
agcttatgaagattcttcatcccaacatggttttttctgtgatgtcagagacaacccatgttagtcttatgtgaaccgcaaaattctaaatttgggattagtataagaaatcagaacaaagtacccttgataaataattaaaaccctagaattcacccttttaaggtaaatggtcataataaaacaacgatagttaaattaaatgctaataaagattagatattggaaaatgtacctatcaaaaaaaggggagaactgtaattcaactacacactcagaataataatatattgaaataatgaggtgtgtgtgtgtttcatgctgaagacatcgcctatataaaataataatggtaaataaaataactaaatacaatggttagtgtaaattatacctacaccatgttgga

SEQ ID NO: 16087 - DNA, 375 bp, Zea mays
  unsure (1)..(375): unsure at all n locations
cgaagtagaggagtagggcttggtccaaatccgacgacatgtcatatccttcgggatcccttctcctgcactntcacaaacgcgacaggatatcacaactgctctcgttttctactgatgatgagtagntggtacggtcccgcaagtttagctagattcagtagattaaggaagtaagtaggtcgaagatagtatatagattgcatcgacaggatcggatgaactaatccactttcctactgtaggttgttcacccagctgaggcctgagggcatcaattatttgtttgggaatatagcatatcatcaaagaataatcggttgctctccaacaggaagaactaagaagaagcgtgagaggggagggtaagcttat

SEQ ID NO: 16088 - DNA, 432 bp, Zea mays
  unsure (1)..(432): unsure at all n locations
agctctnggtggtgagctggacctctttatgtcctctccctctatgaagctggtcgacgaatggtctcctacgcctaacagcgaagctacccaaagtgacaaaaagcaggaatagtatagtatagaagtagtactattgtgtaataggtggtgtaatcctattgtaaagtacaaatctataacattacctttttaagtaatgcgaaatggatggtttgtatgacatatcatattgctccaaatgttctttgcctcagatgctttctaggactcgcgctcaggatggtgttggtaactcccgtgggagggaagcgaccccgaatccacctctggtaccttcgacacttgccaaggccatcgctgccttggtaaatgctacagcagataatacccgcttcctgcangagatggcaggtcaacaactccaactac

SEQ ID NO: 16089 - DNA, 198 bp, Zea mays
  unsure (1)..(198): unsure at all n locations
gactcaagcctaactacgggtgcatagggttcaccgaaatccaaaccctccacttgggagtataccctggncacaagtcgagctttgttccttgtcaccacaccatgctcgtcttgtttgttgcggaagacacacttggtctctacaaccatttgattatgaagcgcaactatatgccataccttatccctagtgaat

SEQ ID NO: 16090 - DNA, 507 bp, Zea mays
  unsure (1)..(507): unsure at all n locations
gtcacctgangcatgcaagcttctgctcatctcccgacagacagaaattttctttctgtcggngaggcaatacaagagatcctcttctccactgccattaaatatcaacgccccctttggatatttcaacttttgggcatagtgttgagcctcttgttcttctttttctgttaattatttccccgaagcatgacgaanaatataatcacgaattttggatgcttcgggggtaacaacaccagttccttcagcaaaagttggctttgttatnttttctgcctcactttccaagggttttgcctttgagggctctgagggcccagcttcggcttcagtatcttgctttggagctntagaacccgaagcttcggctgttgtttcaagagtgacggcagccttcttcggaggggtgcttgaagaattgatcgtttccagcacatctagcacattagccattctccttcttttcggagtcactgctggtactttttgattacttactgtttc

SEQ ID NO: 16091 - DNA, 338 bp, Zea mays
agcttgccaagccctctgacccgaccggacttcatctgttgtccgagatcaacctcactggacttcggtcttccgccgccgcgcgtggaccgagctatccagtgagtctccgcccgattcctttcgctcatgtcttctctggcatcccgtggacctccctgacctatttgattgaactatctcgccgcgaccaggccggtctcctcgccgccgacgagcatccccgcctgcgcgcgtggaccgaccgactccggccatctccgacggtgttccgcacaccgttgtgatccccgcgacctccccttcaccctcggccacttcaccggaacagtctcgcc

SEQ ID NO: 16092 - DNA, 303 bp, Zea mays
  unsure (1)..(303): unsure at all n locations
tgaggcatgcaagctngaaaagtatctagatacagtccgaatgattgatgctttcttcgaaggtttctctgtcaaaaatattcctcgtggagaaaatgaatacgctgatctattggctaagtcagcagcccaggggctgcctataccttcggaagtattttttgaaacaataaaagcaccttcggtcgagcttcttgaaagagcaatccttaacatatcccctgtttatagtgaagatnggagaactgagatcatctctttccttcaaggtaattttctctcagatgacgaagcttataacag

SEQ ID NO: 16093 - DNA, 482 bp, Zea mays
  unsure (1)..(482): unsure at all n locations
agcttaacatatntatcaggtgccttgttgttattntcttcttggcattccaagacatcattcttttcattaatggaagtcactaattcattgattttatcaatttgctttttcgaaaggccttggaagagcaaagttaatttttcttcatcatcactagaatcaccctcatcatcggaagtagtatacttgggggtgggtctatgtgttaccttccttttgccctccttggccatgaggcactagttgccgatgttggggaagagaagtcccttgttgacgatgatgttggtggcgttctcatcggagtctgagtccgtggagctctcatcgaagttccactctctcacaacatgcggctcgccgcccttcttcttgtggtagacttcttctttccatattcttcttcacttcttgcctcaatcctgtcactatcactatcatatggacatttaacattatagtgaccggaccttaccaca

SEQ ID NO: 16094 - DNA, 488 bp, Zea mays
  unsure (1)..(488): unsure at all n locations
gcttgaacaaccgcaccacgtggttggctgtacatacaatgcctaaccaatagaacccctaacgtatgacctatgcggcgagggccctatggcatgagtgacagccgcagacccccttgtgaacctcgagaaggagctccctgcgttcgacctctatgatgcatttgaataacgactgactgatgcctttntgtaaagtcagccttctattattgtaaatccttgacttcgatatttcagtcttttggtctccgcctggggcatgggatgatagtgcccttgcaggtacgaagtaatgggggccctccagtcttcggtcatgatgaggcttatgattctctgaccattanggttccttattgtcngngctccaactatctggaagaatacgtctgaggtcatgggatctcttngtgggggccttcgtcttccgaaggtcctcanaacacaactaacatgttntccagtataatatactgtcacaggaa

SEQ ID NO: 16095 - DNA, 480 bp, Zea mays
  unsure (1)..(480): unsure at all n locations
gcttttgaatatacacgagctagtatatgttacttaaccatggggcaaggaacaatatcataatatatttgggtgttatagcttcggtgcccgctctgggtcgagctgtcccgtgccaacctttcggaagagatggcccggggaatggatgaaggaatggttctatgtgagaaacgatttgacggttcgggaagatatcaaggatatcatcatgcgccctatctggcagcgcttcggacttcggaaaccaaaggtagaaatggacgaagcaactgaagaatgtcagagggccttcggcgtagtctgttcctttatcgggaccagagatttaatgcaagagcacattgccttcagagtgtggccacttgtagatgactgggaaatgccgaaggagaccatcanagaagctgacgagggtggactaattagactgaaatatacattcaagtacggagatannnattgtgaaccggatgatga

SEQ ID NO: 16096 - DNA, 401 bp, Zea mays
  unsure (1)..(401): unsure at all n locations
atgcaagcttcatgtgtatattctttcccacctatctctttgttgcangacacatccctcacgtatattctccacactcgatccccagcagaaaaaaatcccatcggtggtctcatcctttcccagtcgccgtgctaggccttgattttttttcctgtgcagggctcactcccaagagctatcacgtatgccactatctacaccagctcttcaaccgctaaccgctgggtctctgcctntgtgcgcgctcggcattctgcgcagcaacgtccttcgctcagccgacgatggctacctagccgttgtcctccaccactgggcgtaccctcgctggcggtctggtacaccagtccttgcgccctgctctgaccaggctcgcccaagtcgtgacctcgccgaat

SEQ ID NO: 16097 - DNA, 416 bp, Zea mays
agcttaaagccatggtaagtagcataggcatgtttatacgaattgactcaagcctagctacgggtgcacaggtttcaccgaaatccaaaccttcgacttgtgaatatcccttggctacaagtcgggctttgttccttgtcaccacaccatgctcatcttgcttgttgcggaagacccacttggttcctacaacattttgattaggacgtggaacaagatgccatacctcattcctcgtgaagttgttgagttcctcttgcattgccagcacccaatccgaatcttttaatgcatctccaccctgtatggctcaatagaagacataaaagagtaatgttcacaaaaatgtgcgacatgagatcgagtggttacccccttatgaatatcgctgaggatggagttcacggagtgatatc

SEQ ID NO: 16098 - DNA, 487 bp, Zea mays
  unsure (1)..(487): unsure at all n locations
atgcaagctttatgatctgataaatgtgacagatattacccagtagataatgacgctaganttttagggcatgaaccactgcagctagatccagatcatgagttggataatgttcctcatgtcggcgcaattgtcttgaagcataagctatcactcggccttcttgcattaatacacagccgataccactgcctgatgtgtcacaatacacatcaaaaggattttcaatatctggttgagccaataccggagcagnggttaataatatcttcaattgttcaaaggcttcgttacactttgaggaccaattaaatttagtatcattcttcaataaactcgtgattgggttcacaagcttagaanaatctggtataaatcgacggtaatagccagccagtccaaggaaacttcggacttgatgtacagtggttggnggtttccactccaaaatatccttaactttgctgggaccaccagaatccccttg

SEQ ID NO: 16099 - DNA, 471 bp, Zea mays
  unsure (1)..(471): unsure at all n locations
agcttgagaagcgtgtcctctgtttttatgtttagtcatgcatgcaccaacattgtatgctaagaaaaatgtgggatttaatttcaaacaatatgagaaccgagaaaccatgcctgctactaatttggcttcagtaatttcaaacaaaatgagaaaccatgtctattatcgatttgtcttcgcttattagatttacagagaagctatgactctgatatctaatgcctaactctgaaggaaactcattggatggagctaacttgtttcctgtttggtccatttccattttgccgtaccattctaattttagttattgtttcattaatataagttgtgtaccaaatacaccttactgtcaactgaccaggtacatantacaaacctgacctccctgcgcttatttagtgattcanacttcanaacctttatcctatagtactaaccatatgcactgtttgtgtcatttacagg

SEQ ID NO: 16100 - DNA, 263 bp, Zea mays
gcttacccaaaaagtttatggctgttggagctttcaatttaattctaaaaatctaaaagactagatttatgcacccttaaatactaaataattcatgacagagactaaaaatcttagaactatttttattaaatactagagcaatctatgagtctaataaaattggtcccatatttttatcatttttctagaatttcctataaatttcctaagcctggtagaaaaagaaaacacaaaagaataaaaagtaatgggctcaaact

SEQ ID NO: 16101 - DNA, 488 bp, Zea mays
  unsure (1)..(488): unsure at all n locations
agctntcttcggcggcatgacgaggatcaattcttttctaatgtggtcgaaaaaagggtcaccggaggtggacgccgcggactngttctcaaatgctatgaattaagaacaaggcaacacaaaaacagattatttgttaatgactntcgtccttcgaagcattatttccccaaggatataatgctttccggacgaaggacatgaaggacataccttcatcatctcaacatatatatatatatacataataacaacaaacgaagcatgcaaaacataagaaacaatgtgaagaattatataacattatcatatatatatttttctttatataattgccaatgaatataaatacaatattgagttacatctagtaccttcggcttgacagaagacaaagaaagcgtgacgcataaagcaaatgccaagtcagcgtgaacagtacgggagtactgttcacgctatttatatgcacgggacgcagcccatgt

SEQ ID NO: 16102 - DNA, 384 bp, Zea mays
  unsure (1)..(384): unsure at all n locations
gcgccatgggcgaacccctcattgtcggcccagacgcaaggccgaacagccatgccgcccgtcgccttgcgcctccgtgccgttttccctccgttccgccatgcccttcacccaagacatacatattaccttcggtgtctttccacacgcttggacttagcttatttccggagccatgcccgaacctcggttttccgcccctgcgccatgggcgaacccctcgttttcggcccanacgcaaggccgaacagccatgccgccccgtcgccatcctgcccttcacccaaggcatacgtcgcagcttcggtgtccttgcacacgcttggacttggctttnntttggtcgtgcacgaacccacggcggtcttcggccacgctgcgcct

SEQ ID NO: 16103 - DNA, 443 bp, Zea mays
  unsure (1)..(443): unsure at all n locations
agcttatcagcagtataagcacaaaagagagtttgttttctcagcagatcagccgaagcctatgctcttgtgtgaagacatagcagatcaaaaggtactgctgagatcttagctatctggtgaacaagaaaagactctgctaaggttcttattcaacaacaaagatgtcttcgcttggacagctaatgatctatgtggtgtcaatagagacgttattgagcattcactcaatgtggacccatccttcagaccaagaaagcagaggcttcggaaaatgtctaatgataaagctgaaggtgcacganataaagtaaagagacatctcactgccggtgttatcagagaagtaacatatccagagtggttggctaacaccgctatggtgatgaaagctaatgggaaatggagaatgtgcattgacttcacagacctcaacaaggcat

SEQ ID NO: 16104 - DNA, 451 bp, Zea mays
  unsure (1)..(451): unsure at all n locations
agcttngaaatagtgccgaagcttcctggatgtcttctatacagcatacagnaccttctccaactctgtataatttttctttgacaaactaagaacttcggaaacaaaatatattggggcctgcctcttaacttggccttcaagcttctactgaacaagtgctgcacttaccgctgagtgcgaagctgccacatataataacaaaggagcccctggcgtaggtggagttagtgttgtcaaatctatcaaatactgtttcagttcttcaaaggccttctgctggattggtccccattgaaagacttcggctgacttcagtacttcgaagaatggtaagtttctttctgcagatctggatataaatctattgagagatgccagccttcctgtcaatctgtgagcccnctattttgtactcggtggctccattcgaagtatagcttcgaattta

SEQ ID NO: 16105 - DNA, 440 bp, Zea mays
ggctgtcttatgcggttagcttttatattttaattcctaaaattaacttggtcaaaaagcctaaccgccatgtgtgtgttgaatcaaaacaaccacgcaagccacacaaagctgctgatgcgaggagtttggcacctctagaactcgttcattctgatctgtgcgagatgaatggaattttgaccaaaggtggtaaaagatactttctcactcttatagatgactccactagattttgtatgtgtatctcttaaaaacaaaacattgaacgttcaattattttaacgcctatacagctgaagttgagaaccaacttgagaggaaaataaaacggttaagggctgatcgacgtggagaatatttctctaatgtgttcgatgagttctgtgcggaacatgtgattattcatgagaagacaccgtcattctcaccacaatcca

SEQ ID NO: 16106 - DNA, 431 bp, Zea mays
  unsure (1)..(431): unsure at all n locations
aagagaacaaagcagctgatgctctgtancgtgtgggttgtgtgatggcattgacagcagtcagtgaagttcaacctctctgggtccaggaagttacgaattcctatgtgactgactcggctgcgcaatcacttctggctcggttgtgtgtccacagcccggatgaacatggctactctctctctaaaggagtcattatgaagggcgagttgatttggatagtgccatgggtggtcactcacgggtgcacgcgacttacattcgattgaagaagttgtttttttggaaaggaatgaagactagtgtggaggagtttgtcaaacaatgtcaacattgtcaaaaggctcaaggagagcgagtccacccggctggttattgcaaccacttccgggttctccaggtgaatggcaagatattagaatggatttcgt

SEQ ID NO: 16107 - DNA, 469 bp, Zea mays
  unsure (1)..(469): unsure at all n locations
gcttaggaagtattttcgaccttctttcttgccttcatttattntatggtatgatctcgttatgaaaaacgaactgataccacaaggggctactgttggggggccttcatcttctaaaggtcctcataacactaacttaacagttattttctagcatgtttaaagtgctataggtacaatatataaggtcagcctcggctagaacagccacgagcgtaagtacgtatgaaccaacttaggattaataaggtgtgcatggctaataagcaaaacgaatctatgagaaattctgaaggcttgctcaacaagatagcaggaggaaaagacaacactacccttagtttgttcactagttcgaatgtatagggcacaattgtaattttgtcaaagtgtacctcaccactataaatatagaaatagttccatgcattanggacatcttttcgatcagagagaaacataccacttt

SEQ ID NO: 16108 - DNA, 470 bp, Zea mays
  unsure (1)..(470): unsure at all n locations
agctntngaagaaaactccctatgaattgctcatttgtagaaagccaaatatctcatattntagggtattcggttgcaaatgttatattttgagaaagggaagccggttttctaaatttgagaagaaatgtgatgagggttttcttggatattcatcaaatagtaaggcttatagagtcttcaacaaaactcatggtattattgaagaagcatatgatgttgagtttgatgaaacaaatgggtctcaagatgaaagtgataatcttgatgatgttggtggaactcaactgaaaaatgcaataaaaacaatggccattggtgaaataaagccaaaggaagatgatgatgaaaatagtgtggttgtcattcctccctcttcaactctaaatgaagaagatcaccaaagtcaacanaatgttgaaattatggatactcatgatcaaggtacttcaagtcattcggttccttct

SEQ ID NO: 16109 - DNA, 219 bp, Zea mays
  unsure (1)..(219): unsure at all n locations
tctgacctattatgtcccattcacttttaatgcactgtcccgcattacttaattgaaacctaaggattgactagctttccatttaccttatccttgtttaccttttgggntatcatgggtatcattatgctattgctttacttgaatcaatgaacatgatgtgaatacttatgatactatgatgttatcccgatgatgttcctgtgatactttaagggg

SEQ ID NO: 16110 - DNA, 454 bp, Zea mays
  unsure (1)..(454): unsure at all n locations
agctttagtgttaagtgagagtgttttgttgtgttcttttgagctctcgcgcttggattgctttcttctttctcattctttcttgagatcaatactcacttgtaaccgaggcaagatacaccaattgtgtggtggtccttgcggngaagttttgttcccggttgatttgagaagagaaagctcactctgtccgtgggaccgtttgagagagggaaggggttgaaaaagacccggcctttgtggcctcctcaacggngagtaggtttgcgagaaccgaacctcggtaaaacaaatccgcgtgtcacactctttattcgcttgcgatttgttntgcaccctctctcgtggactcgattatatntctaatgctaacccagcttgtagttgtgattaactntgtaaatttcagtttcgccctattcacccccctctatgcgactttcaattggtatcg

SEQ ID NO: 16111 - DNA, 384 bp, Zea mays
  unsure (1)..(384): unsure at all n locations
ctaaagcatgatctactaaaccactaagggattttgtggcatcctcggcacagtctacaaggactttaagcaaagccttcattttttcttctgtcgaggatgccattatcaagtgtgctgcaaagaagtaatatatgaagtaacacgtgcatacccttataaaccatataggctattggaatgaaacagttcccaataacatgaacaaaaatataggcagggacatgtaatgattacaaaaccatgagtcttattgtaggcaggaacataaagaacttagtgaaactntaactgataatgttctcaatggtaacccgaatgtatgacgatgaacttgaaataaagtgtagtacatggacatagagatgtatctcacatctgatg

SEQ ID NO: 16112 - DNA, 519 bp, Zea mays
  unsure (1)..(519): unsure at all n locations
ggatcttaagtcacctgcggcatgcaagcttatgaagattcttcatcccaacatgtgctagtctgcgataccaaaggcagcccatgttggaattagcaagtaaacatgcatctagatcgacattctctttagttaaatctactaaataaagcttggcgtcagaaacatctttaaatgctaatgaaccatcactccttctaaagatagttacatcaacatttgtaaatagacaattgtaacccatacgacataactaactaacagaaagcaaattataaccaagcgattccactaagaaaacattagaaattgaatgctcggtagtgatggctattttacccaaacctttgattntgccttggttcccatctccaaagataatcgtatcatgggaatccttgtcttgatgtaagaagtgaacatcttcttttcccccatcatgtggtttgtgcatncgctatcaataattcaacttgatcccccggatgcataaacctgcanggcaatttaatcttggga

SEQ ID NO: 16113 - DNA, 504 bp, Zea mays
  unsure (1)..(504): unsure at all n locations
caagcacctgangctgcagctatgaagatcttcatccaacatgtgcttgtctgttatgccagagccagcccatgttagtcttagcaattaagcaagtgtcaagttcagctctatcaaaattcactaagtacagctgaccctctaacactcccttaaatgctattgaatcatcacttcttctaaagacagtgacacctacatcagtgaatagacagttgtagcccattttgcataattgagaaacggaaagcacatcgtaatctaatgaatctacaagacaaacattggaaatagagtggtcaggtgatatagcaattttacccaatcctttgaccaaaccttgatttccatcccctgaatgtgatagctcggtggggatcttcgttattctcgtaggaggagaacattctcttctcccctgtcatgtggtttgtgcacccgctgtcgatacccaacttgagcccncggatgcataaacctacataacaagtntagttcttcact

SEQ ID NO: 16114 - DNA, 509 bp, Zea mays
  unsure (1)..(509): unsure at all n locations
aagtcacctgacgcatgcagcttatgaatgactaagaacctatgactgttgttatttcaacttatcacggatgtaaaaatatagcatggcaaagaaaaggacaggtcaaatttcaaggagcacgataagaacataaagaaatcatatcgtttgaatgacaagaacaaatgaattacaggctaacgtagtgtcttaccatgataatgcaataggatcccacttcgatggaacagccttttttacttcatctcgaagaactaatggagaagcctttaggtgcaagttgtacaaagaaatgaaatatccgtcgaatgctagatgcttggtctctttggcatcagtcaaccaagctccacttaattcatagagagcattaaaatagcctgaaagaactttcccttggactgaagatnntctgataagcaattctaacatctaatcaaggaaaataanatgtgagcagaataaatttgtaaacatttgcagatggagtaccacagctgtactta

SEQ ID NO: 16115 - DNA, 467 bp, Zea mays
  unsure (1)..(467): unsure at all n locations
agcttgaacagcttgatcgtgctactgttcttatctatgttgatgagaaagtcgaagatcaggtaaatggaattgcacttatgtcgccatacgtactaataatagccataccatatcttcacatttggtcagtggtagcaccatttgattgccaacatttttgtgaagcaatgtctaacttttgttgacaacaccgcttttgcaaaatgaatgcttaatgtgattatcttttgatatttatccaggcaacaagcttatagatgacacggcaccagaagcgtaaaattgatgaaacacatgtggaggtatgctgcatattgttattgctcatcgcacatttactattttcacataaatgttatgtgaaggtntattatgtcagtgctagttgaagcattacctccttgtgcgttcactgcacaaaatatttctagctcatttgacctcaattgtttggtagcaaggac

SEQ ID NO: 16116 - DNA, 398 bp, Zea mays
  unsure (1)..(398): unsure at all n locations
cacttggaagcctcggtgccgaatccttcgtgcgtggtagcgtcgcagagactgctgataccacgtcgagtgtagtaaggctacgtnccgagcctctttcagctggtccagtgaatcttctcagctggtttggttgttttggtcgacgtatgcctttgccctcggggaaccgtattctaagtctgtgggtaggacggcctcggccccatagactagaaaaaacggtgagaaacccgtggcccggctcggcgtcatcctcagactccaaactaccgacggtagctctcttatccatcgcttgccaaacttgttgaggtcgttgtatgtcctcggatntagtccctgcaaaatcatgccattagcgcgctccacctgcccgtttgtcattgngtgagcta

SEQ ID NO: 16117 - DNA, 474 bp, Zea mays
  unsure (1)..(474): unsure at all n locations
agctngaagttgagggcatgaatctgttatttttatgttcagatagaaccatcctgagagtccaacttgggttgagattntctccacatttctcataagaacatggcttgaatccttaaacaaagttgttctcctataattgggctacaaacttgttgtggtcactttgggcaaaaaccctatgctttgaaagttacaaagccccaaagttgagccttcaacactaaatttcagacttagtatagaacttaattgaggtccattttacatttaagtccaaaacttatggtttggcttacaagtccacacatttgggaaccaaagaacttgagatacttatttaacctggtttttgcactttagtccaaaagtggactaattttgcacataagcccctagtgtgtggttcagggtttccagggtttaattacgggttttggatctcaagggataaatgtgatcaactttattttg

SEQ ID NO: 16118 - DNA, 476 bp, Zea mays
  unsure (1)..(476): unsure at all n locations
agcgtataatctagagcatacaggtattcttttatttgtgttgngcataccaaccaccaacattgattatgaaaaggtgtaagcatatttccctttcacatagccattcagtactgacatgaaacgctcatacatccatatttcatgcaagtacataggacccaatgcctctatctgtggtaccaagtgcaccacaaggtgcaccataatatcaaagaacgatggagggaaacacatgtcacactgtgatattgtctccactgcaaattcctgaagagatgccaactcatcatggttaattaccttgtgtgaaattctattgaaaaagtagcactaccgtgtgattgttatctttaaaaacaaatgatttatagccctgatggaataggtaggaatgtagtcaacatgatatgacaatcatgtgagttgtagttggtgacagccaggtctttcattgacacaatacttcggatgct

SEQ ID NO: 16119 - DNA, 413 bp, Zea mays
  unsure (1)..(413): unsure at all n locations
agctntagagatcaacatgttgtcttctttttatgctttataaaccagcagggtgatctgcccatgtcctgttaggtttgaaatttatttgatcggcaacagattggacgtctagtagatggctcttggctggtcttcatttcgctttgtgcctcaatgcttcttttgattagacttgtacttcagtagctatatttggctttcctctgatctccatcgatatctttcttctgtcttgatacattcattgcgtatactatacggatgtgactgcttgggaaaatctattgaaaattcttggccgtccccccaatgggtgtgaccgagggacgtcttggtatgccgagcgttagcaaactgtccttgagtagtaacttgacatgaccacgaagtgtaatcatttcgtccaagca

SEQ ID NO: 16120 - DNA, 420 bp, Zea mays
cccatgttagtcttagcaattaagcaagtgtcgagttcagctctatcaaaatctaccaagtatagctgaccctctaacactcccttaaatgctattgaatcatcacttcttctaaagacagtgacaccaatatcagtaaaaagacagttgtagcccaattgacataattgggatacggaaagcaaattgtaatctaaagaatctacaagaaaaacattggaaatagaatggtcaggagatatagcaattttacccaatcctttgaccaaaccttgatttccatccccgaatgtgatagctcgttggggatcttggtttttctcatatgaggagaacatcttcttctcccctgtcatgtggttggtgcacccgctgtcgagtatccaacttgagcccccggatgcataaacctacaaaaac

SEQ ID NO: 16121 - DNA, 466 bp, Zea mays
  unsure (1)..(466): unsure at all n locations
gcttatgaagattcttcatccctacgtgggctattcggcgatgccagagccaacccatgttagtcttatcaattaagcatgtgtcgagttcagctctatcaaaatctaccaagtatagctgaccctctaacacacccttaaatgctattgaatcatcacttcttctaaagacagtgacacctacatcagtaaagagacagttgtagcccatttgacataattgagatacagaaagcanaatgtaatctaaagaatctacaagaaaaacattggaaatagtatggtcaggtgatatagcaattttacccaatcctttgaccaaaccttgatttccatccccgaatgtgaatagctcgtggggatcttggtttttctcatatgaggagaacatcttcttctcccctgtcatgtggtttgtgcacccgctgtcgagtatccaacttgagcccncggatgcataaaccta

SEQ ID NO: 16122 - DNA, 443 bp, Zea mays
  unsure (1)..(443): unsure at all n locations
ttcaacagaaggggctggccatgacgaccatgctcgggcagagatggcgggcggtggtgctttcttttcacggcgagctccagtgatctctggctcgggcggggctctgggtgcgcgagtgctaacggctaaggcctctggaggcatttataggcgaggcaaggtgcagacgcacggtgcggtgcgaccacgcgtggggcgcgcgctgccgtggccagtccgcactcggccggtcaggtaagcgatcgaacacgtggctctttgcttctacccgagttcaagcgctcataggttggagatcttcacaaatttgggcatgatcactgcacaagatatgctcccccaacagagctttgtcatttatgtgtagaagtcgagcagtttggggctgtgtacagagagtcgtcgtgtcacanaggtggcagtgtcacaatgtcgagtcc

SEQ ID NO: 16123 - DNA, 453 bp, Zea mays
  unsure (1)..(453): unsure at all n locations
ctgcagcttgagctgtgtaagcgcctgacgatttattatctcgcagacagcctcgcgtacaacagcctgaaggtacgggaattaaacactggagaaagaacaccccctatttttctttctttttttttttttacgcaactcattccttttttcttatatgaattcttttttcatatagggcctgatcctaagcaacgcgttaagagcgcaaaagagcgccgaagatgaaagttatgaaattgcgtttaataatttacgctccanagttatcaaactgagaaacgaagctttggaaaaagataagactctgcttacattggtagataaagtgagaagaaacgaagctgctttaaaggcccaggccgaagctcaaaaactcgaaattaaagatcttcagaaacagctggccagagccgaagaggatcgcgctcttgatgaaacgaaacgagaact

SEQ ID NO: 16124 - DNA, 445 bp, Zea mays
acatcacacacagcagggacaggtggtacacagataagtactaacgatgtttgataaatagtgctcaaaaataccttacaaaagcaaaagtattacatccgccttcaagcggagtcctagctccatctctactctgcaggaatggactactcttcaccgatagggtcgcgttggaagctagctctcggcagcctcaccagcagcgacaaccacctctgcaccgagcaacttgccagtggtgatggccgctgtggaggatagatatcctccgggtccactaaaagagtaaaggacctcacgataggcccaagggcccaataaatcgtaaggtcattctttcgtgggcctggggagaaacaaccagcaaagcataacgacatgaggccggattggtgcaaacccggacggcccacagcgtcgagcgaatgaccgcaacatagatccg

SEQ ID NO: 16125 - DNA, 441 bp, Zea mays
  unsure (1)..(441): unsure at all n locations
agcttggctggagcagcacaagtattttttgctatctgaacattaacaggtttgtccaattcgacgacattgggcaaagcagaagccactgttgtactgacagaagaattggaactacctgaatccagtaaggccaagacgtccattccagcaatatgtcccacaaagcgcatggttcgtgtagcatgaactccttgctcagcaaccttggacaagaatgaattcaactcaagagtgtctgtgatatcctagcccatgggactgggatggtgatatcctggcccaaggcttaatagaattaatagagtatccataccaacaaggtgcatcttctttttcggtagcctatcttgaaagaacctccaagtccaagttaagtgtgcttggcttggagtaatntgtgatgggtgaccgatcgagaagntntctcgggtgcgtatg

SEQ ID NO: 16126 - DNA, 429 bp, Zea mays
tgcaagcttgctggtcgctgttccatgctggtcctattttctcatattctgctcagctcgcccccatggcacatcagtcctgcttgattagtgttggctggtcctccttggcgttgttccgtgtagatccttgaccccgttcaccttcagccccaccgtgttcacctccctgcgttgtcgcgaactcgccgttgccattcgcctagggtgaagtccatgtcatctccctgccctggtgcacaccgtcgcgcttctgtgatctgggccaacacacctagccaatggagcccgtccgcatgtcactgttccgcttcccacgccgaggtgggttatcctggaagtttagatgaacgaagtgaagatcaacacgacattactagatgtttgatgaattgtgtggatcggatcccgtcattagttggtgagcta

SEQ ID NO: 16127 - DNA, 447 bp, Zea mays
  unsure (1)..(447): unsure at all n locations
gatgtactcatccatcttctgaagcagcttctccaaagtttgtaggggcttcctggcgaaatattgggcagtatgtcctggacaaagatccttgatcatggcctcaatgacaatctcattgggcaccataggcgctngtgccctcaatcgcaagaaccttcgtacatatgcctaaaggtattcttcatggtcttgtgtgcattagaacagagcctgagttgtgaccggcttcgtttgaaagccttggaagctagtaaccaacatgtccttaagcttctgccacgacgtgaatagtcctggtcgaagaatataataccatgtttgngctacattccggactgtcatgacgaacgactntgccatgactacagtattgcccccatacgaagatatagttgcttcgtagctcatcagaaaactgcttggatctgagtgtccatcatacat

SEQ ID NO: 16128 - DNA, 383 bp, Zea mays
  unsure (1)..(383): unsure at all n locations
cgaaattgctcgatagaagagtgttaacttcctcaatcacattgagatgtgatccaaagatcaagatgtcatcaacataaaggcacaacataacagactcacccccaccataccgataatacacacatgtgtcagattcttttacaacaaagccagctgctggaagaatattatcaaacttttcatgccattgcttaggtgctctgtttatgccatacaatgattntatcaacctgcacaccttgttctcttgaccatccgcgatgaacccttctggctgatccatatagatctcctcatccaactctccattaaggaaagttgtctaacatccatctgatgaatgataagaccataagaggctgccacggctattaatgtgc

SEQ ID NO: 16129 - DNA, 305 bp, Zea mays
  unsure (1)..(305): unsure at all n locations
gcttcatgcccctataagatagtctaattctgttatttggtaggctcccatggttcaggatagtgagggctatatcttatatcctcctaactatcctgaacacaagattaggaagattcacgctaggaaacctcatactatttctcaccatgcttttatgtataaaaatgaggcttctagctctaggcataccactcatgttaaaatgcctagaaagaaaattcctgctgcatcaaatgaacataacatttcatttaatacttntgatgcttcatatgtgcttactaacaaatcaggccaaatag

SEQ ID NO: 16130 - DNA, 398 bp, Zea mays
  unsure (1)..(398): unsure at all n locations
agcttcaggtctcttgctntataacttttgttttatgaccagaaataacttgggaatcagtgttatggatggcccttctgattcccattgcctttaattatcgaagacccaaaagcagagcttcatactcggcgatgttatttgtgcaactaaaatcaagttttgccgcataacaaggtttaactttggaaggtgaaaccaacacagcagccgctcctgctccgaaggttccccaagacccatcgcaaaacactggccatgcttcggcgtctttatatggttcttcctcccgagcccctggcgtgcagtcagcaatgaagtctgctaacgcctgggactgaatcgaagatctatgaacatattcaatacaaaattcattgagctctgcagccattttc

SEQ ID NO: 16131 - DNA, 392 bp, Zea mays
  unsure (1)..(392): unsure at all n locations
gcttcgtccggctgcgcccttatgctactgttttacggatagnncttgtggagacttcgagttttcacacttgntgtgctagtccggctgcacccttaggcgacttctgcacggatagtcttcgcggaagacntacgattttcgcacttgttgtgctagtccagctgcacccttatgcgacttctgcacggatagtctttgcggaagactaccgattttcgcacttgttgtgctagtccggctgcacccttaggcgagttctgcacggatagtcttcgcggaagactancgattttcgcacttgttgtgctagtccggctgcacccttaggcgacttctgcacggatagtcttcgcggaagactacgatttttcgcacttgttgtgctagtc

SEQ ID NO: 16132 - DNA, 414 bp, Zea mays
  unsure (1)..(414): unsure at all n locations
ccttctcacatccaccaccccattcttaaagctcttgccaatcaaaactcctatcctatttctgtttgcacgcttgtagttatcttgtgtaccaaagcttgtagcatgtattgtccacctcctttaccttctgaccatttcatttagtctcttggacgtacaagatatttacacgcctcctagtcactatcttaactaactgttaacttacctatgagcaaccttatattccaactacctaaacggattctagttggctcgactagcttccttacccttcacacccatcgatgatgatctgaagatccttgcacattntttactacacctggacactgatgtagcgtgccactaaggaagtagtgtcctgatccatgctcgcttgacatcttgcccagatcatgacatggcaca

SEQ ID NO: 16133 - DNA, 449 bp, Zea mays
  unsure (1)..(449): unsure at all n locations
gcttcgcatctctgaactaatttggctgcatcgttctttgccgntggccaatagaatcctgacctgaaaaccttcccgactagtgttctggatgctgcatgtattccacattgcccagcatggacctcctccagaagttgcttcccagtggacggnggaacgcacttcatgaggacgcccgatgcaccccttctgtataatgtctccccaatgagtgtatagtgagccgactgcctggcaattcgctctgtcgagttcttgtcgnctggttcttcttcattctttatatacttaatgatcggccttctccagtcatcagagtctgactcgggttgacctatgatgttgcactcttctgtttgaccattgagatactcggctgcagaatttcttgcacgaagacatcgggtggggcctgagttcgaccggatccgagtttggacagtaca

SEQ ID NO: 16134 - DNA, 483 bp, Zea mays
  unsure (1)..(483): unsure at all n locations
agcttggacgatattntgcgatgggtcatggtggattctttagtgcangtgcagcagctgtcctggttgcaccttccaaagtcagaacatgttatgcaataaaattggactttagctatacaaataatattgccgagtacgaagcatttctcttgnggcttcggaagctaaaggctatgggaataagaagggcaatcctcaagaccgattcacaggttatctcaggtcatgtggacaaaagctataagtcaagagacccanagcttgaaaagtatttagatgcagtctgaaggttggaagcctctnttgaaggattntctgtaaaaaaatattccaaggggagtgaatgagcatgcagacttattagctaaatcagcggcataggggctccctctaccttcggaagtatttttcanaacaataaaaacaccttctgttgagctcatggaaagggcagtgctcacaatttcacctatacatagt

SEQ ID NO: 16135 - DNA, 444 bp, Zea mays
  unsure (1)..(444): unsure at all n locations
agcttgtggaggacccgatcgtccaagcatatttgtttctggatgagaagtggccacccaagttttgttgatgaagcaccagaagaccaatcaagaaaggaatccatgtgggagttcgcaagagaaaggtttgcgtgttggcatcaatgcttcctcaataagctagctgccaagcgaaagccagaagcctaaagatgatctttgagtagccagaatcagtgttgcaatcggcaaccagatgcccctcataggccagatntttgtgaagctctatctcctcgaagagtttgcacagtgaagatatgtagctgaagtaaagctatacccataacccttctaagccaaatctcgaggacgagattccttttaagtggggtagattngtagcatcccacatattcaaatcctgaaattttctcaaactcgctctaaattcanaatgaa

SEQ ID NO: 16136 - DNA, 402 bp, Zea mays
  unsure (1)..(402): unsure at all n locations
ggatctctaagcacctgggctgcaacttcgctatggtaaatttgttttcttttattgcactagcaatgaatgctgtggtgacttcacacctacccgtctgtttatatagtgtcacaagtgggaaggtgaatcgtcaaagtctcccgcaccggacaaacagtcacccgcacttgctgaacgatgggccacacggtccgagaaggtgaatcgctggggtgcgcgtaactgctgcaagatggggccaccgcgcgtacgccgattattttaatcgtttctcttcaacgagctcacggaaggtgtttttcggatctttggcgtcccgaagcctataagatnttttcacggaccaagctcgttacgaagaacgatctatcaccgcgaaagagctactgttgggggtat

SEQ ID NO: 16137 - DNA, 452 bp, Zea mays
  unsure (1)..(452): unsure at all n locations
ttctattgcaaaagagcgtcttttattataaccattgctcgtgatagtttttgaacagcaaatgctttttttgttatgctttcttttaatttggtctacggtgaatgttgtatgttattgagtggtgtttgtttcttcttgtttgtttatgtgatgctaagtgattgatcccatatttgagaatcaagattcaattttgaagaagaatctaaggttttctataaagcaaggcaagtggacttctccccctgcatattctgtctgatcccatacaacacatntaataaagtttacattcatgatatgcataattngatgggttacctattcaaatacacctaacccttccaaccttattccttgatcaaacctgngtattgtactttactttagtagctatattattgctacaactntaactttatgcagtcactcctgtttatgatattaat

SEQ ID NO: 16138 - DNA, 467 bp, Zea mays
  unsure (1)..(467): unsure at all n locations
agcttnctctatgggtatgccatttgccccttgtttttctgatgtgcctcttcatccccctcctccggaaatcaatgagtggcaccagcaggcatatggggtgcctttcatgtctccagaagatgaagaagtttttgatgattgtgagtagtttgtcccgcctccccaccagggggatccgggtcaatcctcttcttatcctccgcccaggatccttcaggaagctatcctcccccagctcagtctggggaagaacactttgcaactcacctggcgcatcagttctttgatcctcctcctcctcagtggtaatatgtgagtggtggttctctctttttggtgctagttgccaaaaagggggagaaaggatctcatattagcagtacttttatattatgtaatgaacaattggtctataataattattcgcctgacttgtgatgcatgttgtgatgcatgtggtgatg

SEQ ID NO: 16139 - DNA, 454 bp, Zea mays
  unsure (1)..(454): unsure at all n locations
catgcaagcttctcttgtacaagcgccacacttactgtttttgcgaagctgccacatataatagcaaaggagcctctggtgtaggtggagttaatgttgttagatcaatcagatattgcttcagctctttgaaggctttctgctgagctgaaccccactgaaagactttgcccgacttcagcacttcaaaaaatggtaaatttctttctgctgatctagatatgaatcgattcaaagatgccagtcttcctgtcagccgctgggctcccttctttgtacttggcggttccatccgaaagatggcttcgatcttgtttgggttagcttcgatccccttcgttgaaactagacatccaaggaacttgcccttcttcactccgaagacacattnnttctggattgatttcagaccagcttgcctaaaattagcaaatgtttcctgtagatcaacaat

SEQ ID NO: 16140 - DNA, 459 bp, Zea mays
  unsure (1)..(459): unsure at all n locations
tgctagcctagtcctcgntggatttatctacacctgngcttggagtctatatcaactccttcctccgtttgctcagatctgtcagtatgacagatagagcctttcactattgagtggggttacaacaaaaccgcggctgcttacaaacttcttggcagcaccccggcagagtaatgatacgctcaagaccttgctctagctctaagcagcacttctcatctctcttaaggcttatagctgtgccttctacacaaactacagagttacacacaagagggagagtgagaattgattcgagtgaagtctacacttgttggctgtgcttgtatattgctggaggcgcctaggggtcccttttataggcacaaggagcctatgagccgttggaagcaatccaggaaggcaaatctttctttctgtcgggtggcgcaccggacagtccggtgcacaccggacatt

SEQ ID NO: 16141 - DNA, 398 bp, Zea mays
  unsure (1)..(398): unsure at all n locations
gcaagctggaattagaaaatgatatgttcatattgctatggttcattaaagaaaaacattgaccgaagatggcacattcgatagtattagtaacaaaataacatgtgtcaggtggtacttcactacaagtatttgatgccgcttcggcccgaagcttgctctagaagccggatgagaaactggtagtttagactatctccagcaacgtcctctatatacatactctatatccgtcctttacagtattctctaaaagatttcatctcctatatctactntctctccaacaacgtgctctaaatcacgtcctctatatataaatacctatattaaaaatatttttaaatttttaattntttacatacgtattatcatactctcaaaatatgtacatattt

SEQ ID NO: 16142 - DNA, 507 bp, Zea mays
  unsure (1)..(507): unsure at all n locations
ttaagncacctgcggctgcaagcttctcttgggttgccattgcctcttgtcttctgatgtgcctcttatccccctcctccggaaatcaatgagtggcaccagcaggcatatggggtgcctttcatgtctccagaagatgaagaagttnttgatgattgtgagtagtttgtcccgcctccccaccagggggatccgggtcaatcctcttcttatcctccgcccaggatccttcaggaagctatcctcccccagctcagtctggggaagaacactttgcaactcacctggcgcatcagttctttgatcctcctcctcctcagtggtaatatgtggctggtggctctctctttttggtgctagttgccaaaaagggggagaaggattctcatattagcagtacttttaatttatgtaatgaacaattggtctataataattattcgcctgacttgtgatgcatgtngtgatgcatgtggtgatggcttagagccacaaactttttaatga

SEQ ID NO: 16143 - DNA, 438 bp, Zea mays
  unsure (1)..(438): unsure at all n locations
agcttctaaagggggaacacgttatatgtttttcttatgtgcaattcgaaaaagatagaccttgtgcagcttgtcaagcaggcaaacacgtggggagctctcatcacatcaaaaatgtgatgaccacatcaagacctttggagatgcttcacatggacctcttcggacccgtcgcctatctaagtataggaggaagtaagtatggtcttggtatagttgatgactcttcccgcttcactagggtattctttntgcaggataaatctgatacccaagggaccctcaagcgctttctaaggagagctcaaaacgagtttgagctcaaggtgaaaaagataaggagcgacaatgggtccgagttcaagaaccttcaagtggaggagtaccttgaggaggaagggatcaagcacgagttctccgcttcctacacaccacaac

SEQ ID NO: 16144 - DNA, 434 bp, Zea mays
  unsure (1)..(434): unsure at all n locations
gcttggtgccaatggagaagcagaaatccttttagtcttggatgtcaaactgcttggccgtgtcaactgtgagttcggacggtactccgaagcggcaaacaatgttctgccagaagaatttctgtgcagtctttgatgttattgtcgatacaaccctcgctttgatccatttggtaaaatactcgacagcgacgaaggtgaacttgaggttcccctgagccgtgggcaggggcccgacgatgtccaggccccagcgctggagaggccatgtgtgggcgattagttttgtgaattgcgaagggctgcctgatcgaggagaaaacttctggcaggcttcgcaggaccgtgtgacccgatttgcggcgcagatcattgcgggccagtagaaaccttgacggatcacctttgcngctagggcccttggccctgcgtga

SEQ ID NO: 16145 - DNA, 250 bp, Zea mays
gctggtctattcaatttctgcgttcccattttcctcaaccaatgccgcgggcggggcgagacgactctccgctcttactcctccgctacagatgcaccgcgctatatatgcccatgaaaggggtcgaaaggagcggaaaggcggcaggggcgacgctgctgccgctggtaacggtactggaggaaggctggaagaaggctgcgtgggaaaccattaaactcttctccgctgcgctgtgatgtgatcatgt

SEQ ID NO: 16146 - DNA, 459 bp, Zea mays
  unsure (1)..(459): unsure at all n locations
agctntaacccctgcgagacctttccccgtttctttctaaccataatgaatgcgatatcgaatgtcatacttgatgcatattcactttatttgttcccttgtatgatgtactgtttgtttcccaatttgaatggatgaatgtatgtatgcttgcaatcgcatagagaacgatccggtcgaagagcccgaggaactcgcatgagaagcccctgagcagcagtcggttggtggaggcaagtgtcctttgacctatctctgtcctattcattatttaattcacctcccgctttacacatttatgcctaaggattgactagcttttgttatccatgtccttgtttacctatttgggttggattattattgtttagctttatgctattgctcaactataatcaatgaacatgatgagattatctatgatacgctgttttcccttctcttattatgatgttatgc

SEQ ID NO: 16147 - DNA, 417 bp, Zea mays
agctttgcttagtaataaactctataaaagtgaactcaaagttagaatactaaagtcaacacggagatatcagcgataactagcaaaaattatcttactttgaagttagaataaaataagctgcctatgacgtgttggcgtctgtagcacctgatgtcctttttgagcttcaggaatccaatactcttagacattgtgcttataattttagcaccggctcagtcgcagatgcatcccacaacttcttcattgaccccgccaaagagcattgaccccggctggtagccacaagaggttgcaagttttttaactatgatatgtcctcttcggagagatgttggccacccaagtgccataggttcaaaatcactccttccgaagaggttcttcaattatgtccccttgtctaaactactg

SEQ ID NO: 16148 - DNA, 415 bp, Zea mays
gccatggctatacgctgcaacttctaatgaagctcctgactggccaagagactgagagccttgtgatccgtccggatttcaaactcgctccgttggagataatgacgccaacgatccacagccataatcagagcgatgaactccttctcatagatggaaagcttctgattggaaactcccaacgccttgctcaagatagcgataggtctaccctgctgcatcaacaccgctccgaccccgtcatcacaggcgtcagtttcaacagcaaagggtatgttaaaatcaggtaatgctaataccggcgtggaaaccatggcctgcttcagacgctgaaaagcaacctcagcttctggtgtccacttgaaggcccctttctgcagtaacctcgttagtggtcgagcaattattccgtacc

SEQ ID NO: 16149 - DNA, 446 bp, Zea mays
  unsure (1)..(446): unsure at all n locations
gcttctaaaggagaacacgtgataggtttgactaacgtgcatttcgaaaaagatagaccttgtgcagcttgtcaagcaggtaaacaagtgggaggagcgcatcacggcaagaacgtgatgaccacgtcaagacccctggagctgctgcatatggacctcttcggacctgtcgcctatctgagcataggagggagtaagtatgggttagntattgttgatgatttttcccgcttcacttgggtattctttntacaggataagtctgaaacccaagggaccctcaagcgcttcctcaggagagctcaaaatgagttngagctcaaagtgaagaagataaggagcgacaacgggtccgagttcaagaaccttcaagtggaggagttccttgaggaggaagggatcaagcacgagttctccgctccctacacaccacagcanaatggtgt

SEQ ID NO: 16150 - DNA, 421 bp, Zea mays
agcttgttagagaagctgatggtggggtaatcttgttacaatcccattatgtggaaaaggtattgagtcgctttggttttagtgactgtgatcctgctccaacaccttatgaccctagcatgctattgagaaagaatccgagaatagcaagggatcaattgacatactcctagatcattggctcgctcatgtaccttgcaagtgcaacaaggccagacatctcttatgctgtgagtaagctaagtcggtttgtgtcgaaaccaggagatgatcactggcgtgctcttgagagagtgttgcgatatttgaaaggtactatgacggtattcattatactggaaacccaaaagtgttggaaggctattgtgatgccaactggatttctgatgctgatgagctctatgccacaagcggatatgtg

SEQ ID NO: 16151 - DNA, 468 bp, Zea mays
  unsure (1)..(468): unsure at all n locations
agcttctaaagggagaacatgtgttaggactaacagatgtctattctgagaaatacaaaccttgtgcagcatgtcacgcaaggaagcaagtgggaacaaatcaaccaagcaagaacgcgatgacgacatcaagaccaccgcaacttcttcatatggatctcttcggacccattgcttaccttagcatcgggggaagtaagtatgggcttgtaattattgatgatttttctctcttcacttggatattctttttgtaggataagtcagaaaaccaaagtacattaaagcacttactaaggagagcccaaaatgaatntgagcttaaggtacagaagatcaggagcgacaatggatcagaattcaagattcttcaagtagatgagtatcttcaggaggaaggcatcaagcatgagatctccgcttcttacacgtcacaacaaaatgatgtagtagagaggaagaacatga

SEQ ID NO: 16152 - DNA, 354 bp, Zea mays
agcttgtgcaaagtccactcgagctaactttctgagaaacccgaccccactgcaacatgacaccagagggtcaaactcaacgggcaatggatgaattcagaatcattgcagagcatattggtaccacggatctggttcaagaattcttagcattcaaagttttccctactctgaaaaaatgggaaatgccaaagttaaagggggagaagaaagaaggggatcttgtccggcttccttaccacttcaaattcaagaaatattttaagaagccctgccaagagtggctggacacagttgaggtgatgtgtaatgaaattcttggaaattattcgaaaaaagaagatccactgatga

SEQ ID NO: 16153 - DNA, 225 bp, Zea mays
aacttctcttccgcttttcattattttaacaacgaaggagttttctaatgaagggtggttctgcacagagtatgctattaagcaaagctttgaagatgcaacaggaccctgtagacaaaaaaacatgagggtattattgaagatttacatagccaaataaaagatcatgcgccagctcttcgaagaaagaatttgaaacttccacagcggagggtttactggaag

SEQ ID NO: 16154 - DNA, 447 bp, Zea mays
  unsure (1)..(447): unsure at all n locations
ttatccaatttaaaacaagcaccatctcttaacatagattntctatggataaactcaacacaagagatgacattagtagcacaagcactagtttcttatttagcaaccctttatatgtggaaggcaatcgagttgctaaaatagagaaacctcaaaatatggactaaatttcccttgatccctcatgcacaatatattttgaatgacatggataatatgcatggttgttcaataaagtctaaagggctgacttaatccatattatggtcagtgtctaataaagaagaatcaaatccaaattaactagatagagaatacgtcacataattttggattgttcaccatgtgataatattcattcatcttccaattagacctttatttcataatcaacaactgatgtatatcctcaagtgcttcttttcccttagtggctacacaagtcac

SEQ ID NO: 16155 - DNA, 429 bp, Zea mays
  unsure (1)..(429): unsure at all n locations
agcttcatcacaagagggagcttcggcaaagataaaaaagtattcaacttcgtcaaaacgcaagaaattcagcatcaaatggccagggtccgttcaacagctatggttacacgcgacgaagaggagggcgaagctgctgaaactgccccgatctccgaagtaatgaggcagacgggactggttatgccagagggtacaactgacgaaggtgcacctattgcagaagccgagcaggcagatattgaagaaggtgaggctgacgaggaagatatggactattctgccgtgctatctaagcccatccacttggattttgggaagtcaactgtctccgaagctgatatgccgatgatgacaaaaccaggctacttcggggaagccgagaagaagataattcgctttggtggngaagaaaccactccgaagcta

SEQ ID NO: 16156 - DNA, 350 bp, Zea mays
  unsure (1)..(350): unsure at all n locations
agcttcagcttcatctatggtatggaatgctttttattcagtccaannttcctcaacccttctgggagctttctgacttccatgaatagcaatgggtccttgatcccaagggatcttcatgccaaggtaaacacgatgaagaatttcttttaaaacattgagggtgccaccaccaataattgccttgtaagggtattccatgtcaacaattgtaaacacaacttgctcagatctggtgtttgtgatgaatcccaaagtcactggcatggtgatcctgcccaaggctacaatctgtctttcttcgaagccacagaaagggtgtgtagcatcatgaatcttatcttctggct

SEQ ID NO: 16157 - DNA, 437 bp, Zea mays
  unsure (1)..(437): unsure at all n locations
cctgcggcatgcaagcttctatccaatgcattctttgtccatctttntacaaaataatgagaaggaagtgcagagacacctcttacaccaaacacagtaagtatgtgcctgcagacaataccaaaatattcaaacatccgacagctacatgtcgcagaacttccagaagaacagaactgaactgttacagacttctcacttccttcagatatggccactgtataaattgaagcattgccctcctctttcaccatttcagcagtgtaagcagtggcacatatcaattcctgttggaatttcaaaaacattgacctcgtatataactctgctccttgcttttctataggagatgatgtcttaatatccggaagtgaatattntggttcaaattcttccttcacctccttctcataacaacagtctaaagctttttcata

SEQ ID NO: 16158 - DNA, 450 bp, Zea mays
  unsure (1)..(450): unsure at all n locations
catgcaagcttgagagcaccaaattaaggagcgcttatggaaaatatactaacccaagccacaggcagaactgggtgcaaacacaacccccctcaatcaagcatagtagaaaagaagtcttccgctgctgaaaaacataaataaatctaggtgaatacactaagtatttccgaagcccaccacgctcccgtagagagaaagagatctataatatacatgctttatctggtggagttgaagtcactcatcactttcttagagaaaggcagttattgtaaggtttctcccaaagacttaaaagcagcaaaatactcaaccaccactgagcttnccgctcccgtggccctgttgtctttcttagcacccgtttacccacacacatctcctgttcatggaactcaaagagaaatctctaattgccacacatacatacttgtcataccagggaca

SEQ ID NO: 16159 - DNA, 445 bp, Zea mays
  unsure (1)..(445): unsure at all n locations
agcttccctctcacgaaagacgtacgcctgtattatagtttgagcagatagagagagagagagatgtgcaagagctcctttgttaatttcactggctgctttgctatgcacatgtgcgtagtatttattcttcttctttgcttctcatgtatgcttccttcttgtattgattggaagaggatgttgcaagtttgcgatacactataggaacaggcaaagagataagatggcaatataattcccagaggctttgtttgtgatctgtcctgtgatgagatgtgaaatctgtttgcgatgtatggcccttggactagcttcttttggaacgaacgattttaattcctgtttcctgcgttntttctatggaaataaactaattcatgtgaaatttctatatgatttctatgttaaggcttctgatctcctgtgcttttgatttgcctat

SEQ ID NO: 16160 - DNA, 496 bp, Zea mays
  unsure (1)..(496): unsure at all n locations
atcttaagacacctgcngcatgcaagctntccagaatgtatntaaacttccaaatctgacatgagatgtatccgcggtggccaaaacgaaccacagatgtttatggtgatggtggatctcgcggtgaccaaaacgtggtagaactcacaactctataggaataaactaagaccagcaactcgacacaatcgatgcaaccaaaaactcaacaagccctaactaagtagtactagtaaatgctcaatggtttataggattgccgtaaaactaatctactattttttggctttttctggactatacgagataagaaaacagcgaagaaaagtaaatctctcaccgataaaccttgctctgataccaactgatgtgcacccgttgggtgattgcccgatctttcgatgagatggtgtggaataactcgattgggggagaagacgacgttcactggccgactacagncttcccaagacgctgcgccttatcaaccgataca

SEQ ID NO: 16161 - DNA, 407 bp, Zea mays
  unsure (1)..(407): unsure at all n locations
agcctctcttgttgggactcattgggaattctgaatttcagaattctgaaattcagaccttgagccaaagatcacggatgttcaccttgatccctaactcgaatcctaatggccccattgacaaaattgtgtctaactaacccctctgtcgtgtgccaaaagatggcattgggacgcgagccctagacacgacaaaacttgggatttgcctcgggtttgggcagggagacaggccagatttcctggctccatatctctgcaaccagtaggcaaaatcctatgacacccacacaagaatggtagcttgtanggaggagaagaggttntgtgcactgaccaaggcgagagcatgctcggatgagcgaccacacgcgccagaacttgtgcagaacgcacgggcacacgtg

SEQ ID NO: 16162 - DNA, 379 bp, Zea mays
atgtcaaggatttgaggattgccaacaggaacatacaatagatgaatttcaacaccttctccataagcctcaaccacgcctccacataaggtaacatccaaagtaatgatcaagccacacttcacattaagaagtgtatcgaatgctttgaacaggggcacttgattacgtcatgttcctatattaatggcttgattattaacaaagatgatacactttgttttaaatgctccaagaagggacacttacttacatcttgttcccatttaaaacaaagaggcatagggttagaacagaatatttttactaaccatgtatctagccacaaacacaagaagaagaaatcttcacaacttggataacgcctatgctacacatg

SEQ ID NO: 16163 - DNA, 366 bp, Zea mays
agctttaccaaatggacgtgaatagtgccttcctcaacggacctatcaaggaagaggtctatgttgagcaacctcccggctctgaggatagtgagtatcctaaccatgtttacatactctctaaggcgctttatgggctcaagcaagccccaagagcatggtatgaatgcctaagagattttcttatcactaatggattcaaagtcggtaaagccgatcctactttattcactaaaaccattgaaaatgatttgtttgtatgccaaatttatgttgatgatatcatatttgggtctactaacaaatctatttgtgaagagtttagtaggatcatgatccaaaaatttgagatgtctatgatggggg

SEQ ID NO: 16164 - DNA, 441 bp, Zea mays
  unsure (1)..(441): unsure at all n locations
gcttatggaaagacaccgaacctaaagtgcatgtcttaagtgaagggcaaggtagaacggaaggaaaacgggaggaggcgcgcggcgacgggcggcaaggctgtttggccttgcgtttgggctgaaaacgaggggttcgccatggcgcacaggccgaaaactgaggctggggcacgaccccgaaaataagctaagtccaagcatgtggaaagacaccgaacctaaagtgcatgtcttgagtgaagggcacggtggaacggagggaaaacgggaggaggcgcgctgccacgggcggcagggctgttcggccttgcgtttgggctgaaaacgaggtgttcgccatggcgcggngccgaaaactgaggctcgggcacgaccccgaatataagctaagtccaagcatgtggaaagacaccgaacctaaagtgcatgtcttgagtg

SEQ ID NO: 16165 - DNA, 467 bp, Zea mays
  unsure (1)..(467): unsure at all n locations
agcttcacatgtctcgatgattaaaanctttcttattttaaagcccatcagaatgaagcttcttcatgcgattctcacttatatgacccaaacgatagtgccacatgtaggtaggacttaaatcattaggccgaggccttttagcactaatattacagataggtgcatcatcaagatttaaaatgaataacccattcataatggatgcaaaagccacaaacatgccattcttagagatcatacaaccattgttttcactcgcaaatgaataaccatccttcatcaaacatgaaggagacataatgtttcgactcatactaggaactagataacaattatttaactccaaaataaatcctgatgggaggtggagttgcatcgtcccgacggtcaacgcagcaactcttgcattattgcctacccggaaataacttctctcttttatgcttctactcttatcattcctg

SEQ ID NO: 16166 - DNA, 452 bp, Zea mays
  unsure (1)..(452): unsure at all n locations
catgcactggcggtggcgggcgcgccagtcgttcttttgctgggaaataagaaggagctccaccaccgcagcccctcaggcttcctccagtgatgcattttcatcgccaaaggccaggagcccctacgagaggtacactcgggggcttgcgaccatcgcgcagcaccccgagcccttgttggagacacccgggggctacacgcacccctaggaagggccgcttgtcatcgccaaagttctgaagcccggaacagacgaactggctgacagtcaaggcgaggtctgcaccaacactntgaacgtctaacagctatgtcgcctctacccttaatatgctttcaagttgttcacttacttcgcccccacacaagttntagtcatcaaggaagggtcagccttgcctcggcagagcccgaccctccctcgagggctaaaaaggggggaacccctct

SEQ ID NO: 16167 - DNA, 109 bp, Zea mays
agcttatcaagtctactttcatatggatccggaattatagtcatatctggtctgacgccgccggaatcattggtttcttaccgagacatttactggcttttctggccat

SEQ ID NO: 16168 - DNA, 439 bp, Zea mays
catcttgggaagattcttcatcccaacgtattttattcgacgatgccagagccaacccatattagtcttagcaattaagcacgtatcaagttcagctgtgttaaaatcaactaagtatagctgaccctctaatactcacttaaatgctactgaatcatcattttttctaaagacagtaacacctatatccgtaaaaagacagttgtgacccattttgcataattgtgaaattgaaagcaagttataatctaaagaatctacaagaaaaacattggaaatacaatggtcaggtgatataacaattttaccaagttccttgagcagacctcgatttgcatcaccgagtgcgagcgctctatgtggagctctatttctatcgtaagaagagaacattctaatcttctctatagagacggaacgcatactgctataattatcc

SEQ ID NO: 16169 - DNA, 454 bp, Zea mays
agcttagcactaaaatgcattcaaatttttactttttcaccaagtttttgaaagatcatcacatagctttaaaactatcaatcaaaaatagtgaatcaaacaatttttgtgaccgctttcaagctaagttacgagaatccaagatatttaattcactcctaagaaaacaaaacctagtctcatcgaggggttttgtgaagatatcggctagttgattttcggtgctcacatgaaacaattcgatatctcttttggcttcgtgggctctcaagaaatggtgtctgatgtcaatatgtttagttctagagtgttgcacagggttgtttgcaagttttatggcactctcattgtcacacaaaagtggaattttgttaaactcacaaccaaagtctcgaagggtgtgcttcatccataacaactgtgcacaacatgccccagctgctatgtactcagc

SEQ ID NO: 16170 - DNA, 436 bp, Zea mays
  unsure (1)..(436): unsure at all n locations
ggatcttaagacacctgaggcatgcaagcttctccagccacagtcttctgagtcttgtttcttcttcttccagatcacgctntttcataccatgtgcaccttcatcttaaagccgaagcttcctttgacagtatactatactggaaaacatgttagttctgtttgaggaccttcagaaaatgaaggcccccaacagtagcccctcgcagtattaatttgtttttgcttctaacaaattcagactgcgacgtgaacgaaggcctttagccgaaggtccgaaaatacaccttcccttcgctagaatagagaaagtcaatgacaaatggggcccaccaagttgtgatgcgctatgcatataaatagaaacctgcaacgatggcatttgttgtgcttttcagttgcttgtgctatntgttcaagcttgaaatttctatct

SEQ ID NO: 16171 - DNA, 459 bp, Zea mays
agcttatgaagattcttcatcccaacatgttctttaggcgatgccagagccagcccatgttagtcttagcaattaagcatgtgtcgagttcagctctatcaaaatctactaagtatagctgaccctctaacacacccttaaatgctattgaatcatcacttcttctaaagacagtgacacctacatcagtaaagagacagttgtagcccattttgcataattgagatacagaaagcaaattgtaatctaatgaatctacaagaaaaacattggaaatagaatggtcaggagatatagctattttaccaagacctttgtaccaaaccttgattccatccccgaatgtgatagctcgctggggatcttggtttttctcgtaagaggagaacatacttcttctccctgtcatgtggttggtgcacccgctgtcgagtatccaacttgagcccccggatgcat

SEQ ID NO: 16172 - DNA, 341 bp, Zea mays
gccagcttcgtgactgtctcaacaccgtcagggtttacagctacaatgagttggtcaacatggctatcttccacgaggactgtatcacagctcgtcaggccgaaaagaagaggaagacccctgtggcatgacccttagctcagccacagcgcttcaagattgtgtctgacactcagaacaggggacttcagcagcagcaagggagatgggtgatccgaccgcagcagcagcagcaggcacccaaccgcacccagtttccggctcagaggaacaatcagcagcagcagcagtatcgccaggcaaatgacaatatgtgtttcacatgcggcaacacccgacac

SEQ ID NO: 16173 - DNA, 361 bp, Zea mays
ctgcaggctgcagcttgtaatgacgagattgttcttgtatttatagctttcgccaaatccttaaaccaaggagggggagagattacaagtcccgctccaagaaagtctgctaccaatgtggtaagcccggccattttattgctaaatgtcctatattaagtgacagtgaccgaggcgacgaccagaaggggagaagaaaggagaagaatagatactaccagaagaagggcggcgatgcccatgtttgtcgtgagtgggatttcgacgaaagctcaagcgactccttcgacgacgaggacgccgccaacatcgccgtcaccaaagggcttctctttctcaacgtccgccacaagtgcctcat

SEQ ID NO: 16174 - DNA, 329 bp, Zea mays
ttcacaaagttggatacttgagcccagcatgctgccaccactgaattatatccaactcttgtgtcctaggcaacaatggttcttctaggtacaaatccaactctgtccggacgtatgtggatgtaactgttggttgctttgacatataatcatcgaaagtatcaatccaatcttcatctattgtcatagtaaaagcactagttgtcctagtttgagcaccatctgatgtggcacttgcctccatgctatcttggtattctaagactaaattgtacaacaactctttcactttatggacagcatccatagctatgctttccaactcatga

SEQ ID NO: 16175 - DNA, 408 bp, Zea mays
  unsure (1)..(408): unsure at all n locations
tgctctcttcaagngcacacaagatcatgaggagtatctacaagcttatgtccgaaggttcttacggcttcaagcccaagcaccaacaatactgaatgagattgacattgaggccatgatcaaggggcttcgaccaagaccagcgacataatattttgccaggaaaccccttagactctagagaagctcttgtagaaaatggatgaatacatctcggcggacaatggtttttgacaaaggaaagaagaagccttcagatactgtaaaatgacaaggggcttcggtggacaattcaatccaaggtatgtcaggaccattcacaatccaagccaaggcgaagacaaaagcggtcatacccaagggccagaatatcatgcccagtcaacaggaacccagcagagttccttt

SEQ ID NO: 16176 - DNA, 465 bp, Zea mays
  unsure (1)..(465): unsure at all n locations
gcttgtggaggaccagatcgtcaaagcttattattttctggatgagaagtggtcacccaagttccgttgatgaagcaccagaagaacaatcaaggaaggaacccatgtgggagttcgcaagagaaaggtttgtgtgttggcatctatgctccttcaataagctagctgccaagcaaaagctagaagcctgaagatgatccttgagtatccagaatcagcgtttgcaatcggcaaccagatgctcctgcaaggccagattttgttgaagttccatctcctcgaagagtctgcaaagtgaagatatgtagctgaagtaaagctatacccataacccttctaagccgaatctcgaggacgagattccttttaagtggggtagatntgtagcatcccaaaaattcaaattctgaaattttctcaaactcgcccaaaattcacaatgaatttcaaatttcatttcaaaat

SEQ ID NO: 16177 - DNA, 182 bp, Zea mays
acaagtgggaggagcgcattacagcaagaacgtgatgaccacttttagaaccctaaaactgctgcatatggacctcttctgacccgtcgcctatcttagcatatgagggaggaagtatgggttagttattgttgatgattttttccgcttcacttgggtgttctttttgcaggataagtctg

SEQ ID NO: 16178 - DNA, 452 bp, Zea mays
  unsure (1)..(452): unsure at all n locations
gcttctaaagggagagcacattntaggacttttcaatcttcattttgagaaagacaggatttgtagcgcatgccaagcaggaaagcaagttggtacccatcatccacacaagaacatcatgacgaccgatagaccgcttgagctactccacatggatctattcggcctgattgcttacataagcatcggcgggagtaagtattgtcttgtaatagtggatgattattctcgcttcacttgggtattctttttgcaagaaaaatctcaaacccaagagaccttaaagggattcttgagacgggctcaaaatgagttcggcttaaggatcaagaaaataagaagcgacaacgggacggagttcaagaactctcanatgaaggctttcttgaggaggagggcatcaagcatgagttctcttctccctacacgccacaacaaaatggtgtagtgga

SEQ ID NO: 16179 - DNA, 282 bp, Zea mays
tttcggcgacttttccaatctccgtgcggaacatgggattattcctgagaggacaccaccatactcaccacaacccaatgggggtgctgggagcaagaaccgaactccaactgactctggaaaagccatggtagagactttggggctatctaacgaatggcggggtgagacaatcatgatggcgtgtcatgtactgaataaagttcccacaaagaataaagaaagcacaccatttgaggaatgagaaaagacgagattcagtatctcctactggggcaccta

SEQ ID NO: 16180 - DNA, 310 bp, Zea mays
  unsure (1)..(310): unsure at all n locations
attttgcatcagncagacattcggagtcaaatggactccttgaaagaaccaatggtattattatgacaggaataatgaaatccatctttcatcaacccaggggaaagtggccagatcagtttacccaagtggtggggagccataatacaacaacatcaaagtctacaggcttgttgggcctgtgcttcttcgccgaaggtcttccaagaagaagcgaccttctgctgaagttgtttgtgtaagatggccgaaggtccctcttcatgaagcttctgtatttcaaaccgacttaaagatagaatgacctttt

SEQ ID NO: 16181 - DNA, 413 bp, Zea mays
atggttaatagagattacatgtctccggactacaccgcattcaaaaaagcacataactttgcgattgtttttctaacattgctcgggaaaacacccctcaacatgactgaaagcaattatgtcatcaacatggcaatcatgaaagattatgtgcataaatttcttgtcatgcatattatcagcttttttacattataggagtagctagttgggacttcgatataattcaagcattcaaacacgatgtcattttctttcttgctgagtgtatagctagcaggaccaagataatgatgtcctgcatccctctcttctgggtgaagaacctgtcattgattcatagctttcaaatcttcccgtgattccactgcatctttgtccttctcatatgcgcttaagagaccaagtatgtt

SEQ ID NO: 16182 - DNA, 403 bp, Zea mays
agcttgagcaaatactcaacctgaatcgtctcttagacgtgcctgacactggaatgctctgtgatcttctttggtccgatccttccaatgaagcaacaggctgggccatcaatgatcgtggcgtttcattcacatttggtcctcgataagtttctgaacttcttgagaagcatgatttggaccttatctgccgagcacatcacggtgttgtgttcttaaagatgtgacctacttattacctgttaaactacaaagagtatccataggttacttatgcttttgcattgttgaaattcaagttgtcgaagatggataccagtttttcgctagccgtcaactcgtaacaatagtttcagcctctaactactgtggagaattctacaacgcttgtgccatgatgagt

SEQ ID NO: 16183 - DNA, 460 bp, Zea mays
  unsure (1)..(460): unsure at all n locations
agctngatgtttataatgacatcagcctctctctaatctttcatctcgaaattgctcgatagaagattgttaacttcctcaatcacattgagatttgatccaaagatcaaaatgtcatcaacataaaggcacagcataacagactcacccccaccataccgatagtatacacacgtgtcagattcatttacaacaaagccagctgctgtaagagtattatcaaatttttcatgccattgcttaggtgcttgttttaggccatataatgattttatcaacctgcacaccttgttctcttgaccatccgcaataaacccttccggctgatccatatagatctcctcatccaactctccatttaggagagctgtcttaacatccatctgatgaatgataagaccataagaggctgcacggctattaatgtgcgaattgtagtcaatcgagccactggtgagta

SEQ ID NO: 16184 - DNA, 419 bp, Zea mays
cttcaagcttatcctgagtagcctttgttttcttttctccactagctcaatggcaagatcatcggcagaatgtgataccttataagcccagatgtcgtcgatgtctgggccatcgtcacccaccacatcatcaccatgagccatggtgcaaaggcttcctgccgcatctgggaggaagcatagtccattcatcctgttcttgttgcttgaggaaaatgatgtgttattatactcttggtctaggtcactaatgggaggcaaggaaagcacactctctgatctttaccttctaaaggtacttcttcttgagcgcatccttgtcgaaacctctcttagacttgtgcttgccggagggtgactctcacttgcccttgcgcccaccacagtggtgataatgcgggccatactcacacttaccc

SEQ ID NO: 16185 - DNA, 191 bp, Zea mays
attctttcactttttcaagcgaaatcctattcttactcacaaaataatgtgtcgacatataacaaaaggtagcccaaaattgatgcttcagtacggaattgaccggcagaaaagaaagccttgctaagccgattgtcgccaatccgacgcccgttatcactcgatagtatataatacgacaagcccccagc

SEQ ID NO: 16186 - DNA, 432 bp, Zea mays
  unsure (1)..(432): unsure at all n locations
gcttagcaaaagaaatttctagaatcaagaatattgagctcatgcctaagtctggtaaaagaatgttcatcaagtggcttggtaaagatatcggctaattgatctttagtattaatgtaagaaatctcgatatcccccttttgttggtgatccctaagaaaatgataccgaatggctatgtgcttagtgcggctatgctcgacgggattgtcggccattntgattgcactctcattatcacatagcaaagggactttggttaatttgtaaccgtagtcccgcagggtttgcctcatccaaagcaattgcgcgcaacaatgtcctgcggcaatgtactcggcttcggcggtggaaagaagcgaccgaatttgcttctttgaagcccaagacaccaaggatcttcccaagaactggcaagtccccgatgtgctc

SEQ ID NO: 16187 - DNA, 404 bp, Zea mays
  unsure (1)..(404): unsure at all n locations
tcactaacttggaaaaaccttcaataaatcttctatagtatcctgccaatccaagaaaacttctgatcttggacgcatcctttggttgctttcaatctagtatctcacttatctttcctgggtccactttaattccaccatcgggaacgatatgccctaagaaagacaacttctttaaccaaaaatcacacttcgagaacttcgcatatagttggttgtcacgaagcttttgtaggactagccttagatgatcttcatgtgtttcttcattcggagaatatatcagtatgtcgtcaatgaatacgaccacaaactgatccagatattccatgaatactctattcatcaagttcataaagtatgctggtgcattagtcagtccanacgacattgaccaaaactca

SEQ ID NO: 16188 - DNA, 426 bp, Zea mays
  unsure (1)..(426): unsure at all n locations
agctngaggctgactcgccgaagcaacagaatctgcttgatgattgcccacatattctggaatgtagggcgaatgatacgaagctgtatgcatgacctgcttcggctgagcttgttgcgctgctgcttcggctatttccttttgcttctgaatagtaacatggcacatcctggtagtatggcctttgttctcaccgcagaataagcaaaagattcttctcggttgatcaccaaatctttctccaaagcccctggcgcctctgcctcttggagctggtggtcggaaggagctttgctgttgtcccgaagcgtgtgaggagcattgtggcctttgctgttggcttcctctgtcatcattttgtgtagagttatgaattgatctcacatgtctcgggtagaaacctcctccgaagcccctggtcatttc

SEQ ID NO: 16189 - DNA, 399 bp, Zea mays
  unsure (1)..(399): unsure at all n locations
tttttagctatgaatctctaatggttaatgcccaaaaggcactttctactgtcttgttatttcaaacagcagatttcatantttttttctatgtttttaataacaaaacataaattttcccaacgtttggggtgtcttcaccttgaggttacttttctagggtatttctaagttttccttgttttcttaaaataaaaggtgtgacggaacctcccaagtaattatgcccacctacagttgtccttgtctaacagacatcagacatcatgtagatgttcctaagtcacttgacaagttcggtatcttttcttacctcaccaggaacagttcacttgtcttgcagacattacagaacatcggagagtaagaaatgctgaagccattacataaacttacatt

SEQ ID NO: 16190 - DNA, 436 bp, Zea mays
  unsure (1)..(436): unsure at all n locations
agcttccttcgaaggattntctgttaagaatattcctctagggcaaaatgaacatgctgatttgttagccaggtctgcagcacaggggctgccgctaccttcggatgtattcttcgaaacaataaaggcaccttcagtagagttacttgaaagagcagttcttactatttctcctgtgtacagngaagattggagaactgaaataatttcttaccttcagggcaacttcctatcagatgacgaagcttataataaaagaatagaggcaagagctcgtccgtatatcattatagaaggggagttatacaagcatggagtttgtgccccgctgctcaagtgcttgtctagagccgaaggtatagagtngatgaaggagatacatgcacgcctttgtggatcccacatcggatccaggccgttacttggaaaagtgttc

SEQ ID NO: 16191 - DNA, 474 bp, Zea mays
  unsure (1)..(474): unsure at all n locations
tgcaagctttaagctctttgcaataaaagttctttatctatttttaccagagatgcactaaagcaggaatgaattttgggaaattaaactatgtatgaagcagggataatacatggacatgctttctctttctttcatacaagatatgcaaagaatgtataaaaaaggaagattttatgtacaagtttaaatgaaaggagatagttttacctttntgtacctttacatagagacgctcgcttcattgtgctttgcccttagtcttagatgcttaagacctattcttaatgacaatatatggaaatattttgcacaagagagagttctacaactagtgatcttttcaagttattgttagcgtatatcaaatggatcacaagttgcataaatgtatcatgaattctccttttaacttagtgcatatcaagagagatatcgatgatagaatatacgacacttcgaaatatgattgtt

SEQ ID NO: 16192 - DNA, 433 bp, Zea mays
atgtgaacaaaacattacatatttttatatgacatattatgtcaaatgggaaccaacaaacataacatcttcttaccatttggatgtgtatctggactatcctttttttggacaccaggtaggtatatatatttgccgttaaggggatctttgcaacccgacttcttgtttttgaggggaagacttgactccttgtaatcacaacacaaaacttaagtataattgcttcccattaactgtgtgctacatgtttgaaagagactgaatcattgacaaagaaattatgagatattatgaccgataatatacgtgttgctcccttttatgtaaatattgtgtgatatcattttatcgaatagtttgtgtgctgtcacaagtcataacgtattggcgtaaatctgaaaaaaaccgaagacaaatatataaagcaata

SEQ ID NO: 16193 - DNA, 430 bp, Zea mays
tgtcaccggtctcatagaggcagctcacttcatacgaaacaaggagttaataaaactttctgagcaacacctgatagatggaaacaacctcaggaactttggatgcaaacatggatcatgctccgaggccctagactacattatgagaaacggtggaattatcaatgcagaaagttacccatacaaggaagcccaagggcctgtccggtctatcacggtacataattcaacctccccaccacacttgtttccacatcaaaatatcaacccctacttcataaaggtatgtataattcacatcattgcatatatcttcacccacacaatttgagcatacaatgagtccaaaagaacaggtccgtgaacctttatcaaacctaaaggctctatgataaataactgaaccataatcgcacaagaacagtaagat

SEQ ID NO: 16194 - DNA, 227 bp, Zea mays
tggatgctgggtgtattccgcattgtccatcctggacctcatatatcagttgcttcccagtaaccgaaagaatgcattttatgaggactcctgatgcgccccttctatatagcgtttccccaatgagagaataatgagctgactgacttgcaatgcgctctgttgcatttttgtcataccgctccttcctattctttatgtacctgatgattggcttccttcagtca

SEQ ID NO: 16195 - DNA, 368 bp, Zea mays
agctcttaatgggtgagcatattttatgactatcaaatgcttcttttaagaaagacaaaccttgcgtagcttgtcaagtaagaaagcgggttggctagagtcatcatccacaaacataatgacgacatcaaaacagttggagcttctacatatggatcttttccgtcatgtttcttatttagcatcggctggagtaagtatggtgttgttattgttgatgactttactcacttatttgggtatttctcttgcacgataaaagtgaaatccaagggactctaaagcgatctttaagtcgagctcaaaatgagttcgacttgaggatcaagaagatctgaagcgacaacgacacaaagttctataacttg

SEQ ID NO: 16196 - DNA, 454 bp, Zea mays
tcatctatattggggattgctttttaatcagtccaattcccctcggcctttctgacagcttcctgactcccatgaatagcaatggtccctgatcccaaggtatctttatgcaaagatatgctggatgaagaattgcttcgaaagcattgagtgttccgcgaccgatgatagcattataaggatactccatgtcgacaatgtcaaacacaacttgctcaatccttgtattgttgacgaacccgaaggtcactggcatggtaatcttaccgagcgctacaatctgtcttcctctgaagccacaaagagggtgcgtagcatcatgaatcttgtcttcgggctcttgcatttgtctaaaggccttagcaaatataatatccgctgcactgcctgtgtcaaccaaaacattgtggaccagaaatcctttgatcacacaagagataaccatagcatcatt

SEQ ID NO: 16197 - DNA, 476 bp, Zea mays
  unsure (1)..(476): unsure at all n locations
agcttggcaagaccaaataactcanaaccctttggtttaacaataaaggggagtgaagaaagggttattaaattgggagcaaaaggtacaaagaaaatgaccaggaaatgtcagaagtgtggaattgctgatggtcacaacagtaggacatgtttgtcaatggaggaaaatagacaaaggttggcaagccttgctggacgtaaaagaggacgacctccaggatctatgaacaagggtggcagtaaagctcctgattggaatgagacaacaacatcaaaaaaacacgcaaatgatttcgatagtagtgagtcagacagtgattagactgttgtatgagatacgattaatttgttttttacaataaaccttgtatgtttggcaactgatgtatatagaggtggatatttgaatctaataaatggtgcgtatattgcttaatatatgtgcgtaagtggaactacaaaacatcgtagata

SEQ ID NO: 16198 - DNA, 467 bp, Zea mays
agccgaggcattgcctcaccggagatgtcattttaccctcaccggacttcggtcttctgccgccgcgcgtggaccgagctaaccagtgagtcttcgtctaattccttgcacccacatcttccctagcatcccgtgaagctctctgacccgttcaattgaactatcgcgccgtgagtaggccggactcctcgccgccgacgagcatctccgcctgcgcacgtggaccagccgactccgaccatccccgacggcaacccgtacatcgctgtgatccccgagacctcccctacgtgctcgaccacctcaccggagcaatctcgccaccggtaagcccctccgccctttcttccgccgcggttactgtttaagttgggagaaggacctcgggttaggattagaagaacccacgggggtttctgcaatgtcagtggctcatgtgaatagtagcccagggactgatctgtgag

SEQ ID NO: 16199 - DNA, 436 bp, Zea mays
agcttagtgacaaggttcccggaacgttgggttctatgaacgggaacgaggaacgtggtacgtctgttaaagcaacatggaacgttgaggggtatacagctgatcgacgttcattcgatgcgtggaacgtgttcccaacgatttccgaacgaagttagggaacgattgtaatggaactttgaagtatgagtctttgatactttgagtttgagttgtgcttggctctgtggattatttaaataacagcggaccagccaccagccagtacgcggctccgccgcgccgctatcccttcctcttctctaacccactgcaacgcgccgctattcctcttcctacgcggctccctgcgacccactgcaacgcggcggcgcggttcctcttccacgggcgacgcggagctcgattcctctttcacgggcggactgcaacgacg

SEQ ID NO: 16200 - DNA, 205 bp, Zea mays
  unsure (1)..(205): unsure at all n locations
tgcaagctttaagttcaacaatcttagcacgtaaaatatcattgttatctctaagatcggaaattggtacattgcaaacatctaaatctttagccttagcaattaatttttattatcgtntctaaggctagccagaaagacattgaatctttcatcttagcaagcaaattaatattattctcttttagaatgggaattggaatat

SEQ ID NO: 16201 - DNA, 390 bp, Zea mays
tcttgcagccacgctaatgatggcagccagcatctcttccagcccgatgagcctccccgtcggcgaccgttggctgtcggggaccctctttcaacggcgacagtcgcctccgacagggtaccggtggttcttctcgggtaatgaggcgctgaacattgtcagggattacagttgggccatcgtgggcctcgggccttagcctggctgaatagtacacgggcatcttctactataggcacatcgaatagcgactaggaaaggcagaacagatacagaatcgccttcctccttcctagctgatgtttcctatctctagcttcctttaggggtagtcctctacctctccctgcttagcgtgctcctgatctattacccgatatcgtgtacctt

SEQ ID NO: 16202 - DNA, 406 bp, Zea mays
gcttttaaaatgatacagactgttattttatatctcgttgcaacatacgattattggacttgaaagtatatatacatacaggttggtagttgttcgattaacatttgcttgacccaaattaatattcgataatagtccctatggtgaatgtgatatcctaactcctgtgatggtgatatcctgatccaagtcttaatacaattaatggagtatccataccaacaaggtgcatctttcttttctgaagcatatctcgaaagaacctacaagtgaagcgtgcttgacttggagcaatttagaataggtgaccgaccgggaagttctctcgggtgcgcatgagtgaggacaaagtgcgcacaaaagactcgtgttggtctgtggggacgatatatgatcctacagagct

SEQ ID NO: 16203 - DNA, 396 bp, Zea mays
atccttaagacacccgcagctgcaagctggcatttattgctactgctccttttgtatggaccggatcaaggaacagagggagaagaagaaaactatagaaggccaagggcgaggcacatcttggcaaggagtgggattcagattgctcctcgtccgactccgacaatgaaggactcgccgccaccgccttcaacaagtcgtccctctttcccaacgagcgtcacacatgccttatggcaagggagaagaaggtatgtactcgagactctacctatgcttcttcaagtgagaacgaatctagtgatgaggatgaaatagattattcatgtttatttaagggcctagatagaaccaaggtagataaaatcaatgaattgattgatgcattaaatgata

SEQ ID NO: 16204 - DNA, 421 bp, Zea mays
  unsure (1)..(421): unsure at all n locations
agcttatccgttggatcccacaaggcctctattcttacccaccgatgcctttcctcgagtgaaaaanaatagtttgtccaaatttcttcttcttttgagtagtgatgaatgcattacagtaatctggtacaaagtcacgggtggtgattggtgaagtagtctgaggtcgtcatggatcacatagttttttaaagataaagatctgttttattccagactcagcaaaagttttgcacataatcgtttattgatattaaagttcaaacagaagcaaatgatgtgaaaaaaggccaaacgacgagctaagcaaaagcctatgaaaagacagccatccattattggtaaaaatctcgatcaccaactttaaacgggtggtcgtcttttctgaaagtgaacaaaaccacagtggcttacagcgagt

SEQ ID NO: 16205 - DNA, 323 bp, Zea mays
  unsure (1)..(323): unsure at all n locations
cagcttaatgcccctaagaaattgnccaattttgttatattttatatcctacagggtatcccaaacacaagatttggagaattcatgctccgaagtctcattttggttctcatcatgcttttatatataagaatgaggcatctagctctatgcaatccacccatgttaaattgcctaaaaggaaatctcctactgcatcaaatgaccataacattttatttaagacttttgatgcttcttatgttttaactaacaaattangcaaaatagttgtcaaatatgttggggacaaacacaagggctccaagacttgtgtttgggta

SEQ ID NO: 16206 - DNA, 313 bp, Zea mays
aacaagatcttaatgcgaaacttgaagccgaagctcaacagaatttagatttgagaaaactattgacgagccttccagaaaaatgtttggaatttagcaacaaatgccttcaacgattaataaaaatttttcactcagttggagccagcagggaaaaattcaccccctcagctgaagatctaccgaagacctctgtacatattgtgggtgagattgacgagctcgacgaagtcatatctgggcacggtgacttctgtgcctgggtggcttcttggagcaccgctgcagcttttctaaaagctggctatgatca

SEQ ID NO: 16207 - DNA, 472 bp, Zea mays
  unsure (1)..(472): unsure at all n locations
gcttctacatattcaaaattgaataagaacgagattttaatcacttcaatcctcttcgattgtgtggcttccaaactagccctagaagtgttgattctttgactgggtgtaatttgagcacccttgtgttcagtaagtctatttgcgtatacatgcaagagttttgctgaacaaagcgacgagccccttccatggttcgattggaagtgaagtgtagtgtcgcagatattttctccgccctaaattataagtagtttgatttttataagtagttttgattnttttttctagggaagtgacgagccccttccatggttcgacggcactttctctgtatacaaatgtttgtcattgttattntttaaggagttaattatttttaactctgaccatatttatataaaaagatcaatatttatagtacataatttgtattattaggtagatctntaaatctattatatttcataac

SEQ ID NO: 16208 - DNA, 494 bp, Zea mays
  unsure (1)..(494): unsure at all n locations
gatcttaagncacctgcngcatgcaagcttctttcttcctcctcatcctcatttgtgctttcgctatcattngnattagccacacaacacatgtgggaattgaaatgggaagacaaaccttttggagaggtggattcatcgtttggtctccatcgatcattttcttcttcttccttgcaagggttagtatcacaaagaccaaaggaagtagaagcacaaaatgaactaccatgtttggacttattaaatttgcttttaattctagtccaaatatcatgcacatcacaaatgggtttgtcatattttattatgaaggcatgataatcttctttgctaagggatttacttaagatgtcataagctagatagtttaagcgaatacatcgtanatcttcttcggaggcattttccctagcatagctaggaggaataatactcttgaactaaaattgttctaattgaggatctatcgctctaaaagcatttattactct

SEQ ID NO: 16209 - DNA, 435 bp, Zea mays
  unsure (1)..(435): unsure at all n locations
cagcttgtcattgagtcctcttataaaacaattctttttcttcagatctgtattcacctggtcaatggcatactgggagagatggttgagtttgttgagatactgcattacagtatctcccccttggtttaaccggataaactcttcttgttcatatggagcactccctctggaacataatgctcccggaacgctagcttgaattcctcccacgtaatctgatgcccagctggttggattgctgaaaaatttgcccgctaagtgctggcaggccctcttagctattgtgcggcaaacaacggcttttgcgtctccgtgcatcaaatcaacccaaacttctgttccataactcttacccattcatcatcttctaaaggttcttctgctctaatgaagagcggcggtcgagtctcagaanattccaagtatgtagtt

SEQ ID NO: 16210 - DNA, 443 bp, Zea mays
  unsure (1)..(443): unsure at all n locations
agcttaattccacataaagctagtccacctcagtctaatgggacatttgctgaatacgttgatgtgtcctcatccttgctttcgcaaaacaccaggttgcctttggtgcaatctatgctcangtaaagaaagagaagaaggcatctaggcggatctccaggagttccaggacttctacgagttcgaggattatgctagcggcctcgcccagtcagctgtttgtggtgggttaatttacgttggctacatttctattttgtgtactttgatttatattatgtaaatgactctagtctttcgtattattacttactctgtattgntattcgaagcactgtgctatgatgagacatttatgtaatcgtcgtgtacgtgaatttctgatcctcccacatacatggttcgcattcggtttaccttccaaaaccgggtgtgacatgaac

SEQ ID NO: 16211 - DNA, 433 bp, Zea mays
tctgcgatgccccagccaacccatgtgaggcttagcaactaagcaagtgacgagttcagctctattagaatcgactaagtatagctgaccctctaacacttccttaaatgctaccgaatcatcacttgttctaaagacagagacacctattacccgtgaaagacaattgtggcccattttgcataattgagaaacagaaagcacgttgtaatctatagaatctactagataaacactggagatagaatggtcacgtgatataacaagcttaccaagtcctttgaccaaacctagatttccatccccgaatgtgatagctctttggggatcagaggttttctcataagaggagaacatcctcttctccactgacatgtggtttgtgcacccgctatcgatgatccaacctgagctcccggatgcataaacctac

SEQ ID NO: 16212 - DNA, 382 bp, Zea mays
  unsure (1)..(382): unsure at all n locations
tggcatgggactgtttatgggnattttttaaccacagtctaagattccttccacggggagtcgaacccacaacctgaggagtgctattcaaaccacctaaccaacttagctagaggccctttctcatgggagagaggaagggagagagagagagagagccaggtggtgcaacctcatgtgcttgctattgcccactttcaccacccaaatgcttgtaaatggcagacctggacgcctcatccaacaccattgcggccttagacaaagtgaccgcctctcccatgctctttattctagtaatggatgtgatgaactccttgattaagtggcttctggtgataatttgctgctgccgagtgctggtcgacctgagcccctggat

SEQ ID NO: 16213 - DNA, 473 bp, Zea mays
  unsure (1)..(473): unsure at all n locations
tgcggcatgcagcttctgaagaaaattttancaatattcttgttctgatgaataatatccaggctttatgagaatattttccgaagctacacctccgaagatcaataatgtatctccttgtgactatgatttttcccttttttcaaaacgctcttctgtagattaatattgtgtccacctcttgtgccatatgcaacatgatgtataatgcttatgctatgcgacatgatgcgatgatgttatgttatgtgaggcgatgcttattccgaagatgcacacgcatccctgcaataaaacacataatcttttacaagcctcccttatgagcttcttcgccttttacttcagcggaatcagcgtttatttttcgctgtaagcctcccttatgagcttcttcgccttttactttcagcggtattcgcgttgactcttcgcgcttcgccttttacttatgcggtatcagccgtgacttt

SEQ ID NO: 16214 - DNA, 450 bp, Zea mays
  unsure (1)..(450): unsure at all n locations
agctntttcagaaggaaaggagcccgcattatctaatgcacctangccaaagaggcaaagaatcgttactgtgacagaagtcattgaagcaacaccaccaggagcttcagctccgaagatgccggctattgaaagcatgacagctactgaagctataccttcgaaggctgccgcagaagaggccagagccgaagatgccaaatccgaagatattaatttagaaagcatggttgctgatatagacaaaatgctactaaacatggccgtggaagaagctgctgcagaagaggctgccgcagccaccgaagagactacggccgcaaaacccgagaaggaagaaatgaccgaagatactntggaagatgaagcatttaactttcanaacttagttggccaagagctgacaagagctgaanaagaagaactaaaagaatatgctatatcttgcgg

SEQ ID NO: 16215 - DNA, 426 bp, Zea mays
aaacacgaagttatcattgagagcttagaatgctaacaataagaccaatccactgctcttgaaaagaaagagtttgagcttcacacaaccgaacgcttattgacagaagctgaatctaaaatagcagaactaaatacgaagcttctctcttattcataaagcttctaacaagaaaagcacaagcttaatgcaaaatttggagccgagactcagaaaagttcacattcgcacaaatcattaacagggcgttaaaacaaatgtctggagtgtcagaatcgatgtatacaatgactgaagcaagtcttttattctgttggagccagccgcgagaaatataattcttcggttgaagacctgccaggggccttcgaacatatcgaaggtgaaattgatgaccttgatgaagctataactggacatggtgac

SEQ ID NO: 16216 - DNA, 393 bp, Zea mays
attttgagaaagacagggtttgtagcgcatgtcatgcacggaagcacagtggagttcatcatccacacaagaacatcatgacaactgacaggccactcgagctcctacacatggacctattcggcccgatagcttacataagcatcggcgggagtaagtattgtctagctattgtggatgattattctcgcttcacttgggtattctttctgcaggaaaaatctcacacccaacaaaccttatagggattcttgagacgggctcaaaacgagttcggcttaatgatcaagaaaataagaagcgactacggaacggagttcaagaactctctcatcgaaggtttccttgatgaggaaggcatccagcatgagttctcttcttcctacaccccac

SEQ ID NO: 16217 - DNA, 434 bp, Zea mays
  unsure (1)..(434): unsure at all n locations
aatgccagggcgtctcccactatagagcatgcttctagcaaatttaaatttttcattttccaagttatgttcattaatcttagcactaagttgagctatgtgatcattttgtttcttaattaaagctaagtgatcatgaatagcatcaacattaatatctctacatctagtgcaaatagtaatatgctcaatggtagatgtagagggtttgcaagtatttaattcaacaatcttagcatgtaaaatagcattctcatctctaagattggaaataaaagtattgcaaacatttaaatttttagccttagcaattaattnttcattctcaattttaaggctagagagggatgcattcaatttgtcaatcttagcaatcaaattactattctcatttttaaggttgacaagagaatcatcactaacatttaatttct

SEQ ID NO: 16218 - DNA, 467 bp, Zea mays
  unsure (1)..(467): unsure at all n locations
acacctttagcatctaagtttttcttatattngaattcaaagggcaggtggggtggggttttggattatgtaccgacttcttttgggcagaaagtcggggaagcgagaacgtagaaaatcctcagtctcccacgtagcttcttctaatgaatggtgactccactgaaccttatacattcggatcgacttggcccgcgttgatctctccttttgatccagcactttgacggggtgttcctgataagacaagtctggttctatctcaatttctggttcaggtaatacttcagtgggtaagcggacacacttccgtagctgagatacatggaacacactgtgaactgctgacatgtggggtggcaactccaactgataggctacgagtccacaacgtgcttttgatctcatagggtccaatatagtgaggagctaactngcccttgattctaaatctctggacacctttg

SEQ ID NO: 16219 - DNA, 453 bp, Zea mays
agcttctgtaatggtcatgaattattatatgaatcatagccttggggcaaggaacagtaccataacaactttggctgctacagcttcgtttctcggtccggggcaagctgtcccgtaccaacctttcggaagagatggcccggggattggatgacagaatggttttatgtgaagaatgacttatcagcacgagaagacatcaaaggtataattatgcgtcctatttggcaaagcttcggccttcggaggccgaaggttgaaatggacgaagccgccgaagagtgccaaagggcctttggggtagtctgctcgtttattgggtcaagggacttggtccaagaacacattgcattcatgttatggccacttgcggagaagtgggaaatgccgaaggagaccattatagagcccgacgaaggcgcgctagttagactgaaatacacattcaaatat

SEQ ID NO: 16220 - DNA, 468 bp, Zea mays
  unsure (1)..(468): unsure at all n locations
agctttaatttccttaattttctcatcagattcttgttctttacgaataacttctttcaaagtatattcaacttccataaccgctgcttctacataattgatcataccaaggttgagttgttccatttcccagcacaattcctgtgacatcaaatgagtagtgatgttgttcacttgacccttaccgctcaaagcatcagctactacatttgctnttcctgggtgatattgtatttccaaatcatagtccttaatcaactcaagccatcttctttgtctgaggttgagttccttctgagtgaatatatatttcaagctcttgtgatctgtgaagattttgcactcgttttcaatcatatagtgcctccaaatcttcaaagcatgcactacggcagctagttccaaatcatgcgtangataattcttctcatgtntccttaactgtcttgaagcataagcaatcacctt

SEQ ID NO: 16221 - DNA, 383 bp, Zea mays
tgctccggatgacagagatttgatttctgctgatgatactgacttggtccccactgatgcattgcgagttgttccgcgtggtgatcctttgcctcatttgcttcctttttccttgtgattcgcgtccatctttccgtcggagaggtggacaatagagttctccgagtagacagaccctctgctcctagcttgctgaaggtgatctttttcggagcgctggaagttgcgctcttctctgcttcgctccgattttctcggagatctttgaagaagatttctctttcggggatccgcgatgcgatgcagagttccctcctcattctctacagacgagatagttccaaagcagaacacggacccgagacggaggatgatcttgtgct

SEQ ID NO: 16222 - DNA, 442 bp, Zea mays
tggacgtgaagagtgcttttctcaatggaccaatcaaggaagaggtctatgttgagcaacctcccggctttgaagatagtgagtaccctaaccatgtctataaactctctaaggcgctttatgggctcaagcaagccccaagagcatggtatgaatgccttagagatttccttatcactaatggattcaaagtcggaaaggccgatcctacactcttcactaaaactcttgaaaatgacttgtttgtatgccaaatttatgttgatgatattatatttgggtctactaacgagtctacatgtgaagaatttagtaggatcatgacacaaaaattcgagatgtctatgatgggggagttgaaatatttcttaggatttcaagtgaagcaactccaagagggcaccttcctaagccaaacaaagtatactcaagatattctaag

SEQ ID NO: 16223 - DNA, 445 bp, Zea mays
  unsure (1)..(445): unsure at all n locations
gcttgcaacttaaggcattgagactattctttgggaaaagctcaatacgcagtgcatctctcgcttcaaagntatttgccttatctcaaggctggggtggaaaagaaggtggtcttggattagtagcatgttctctacccagtgtatctgatccagtttccactgaggttggatccacactccattttgagttctatcgtgctgctgataaatcagagaaatcccagtgtctagagaaagagaacaagttggaagtaattcatttatcgaatgtcaattcgtgcaaggaggcagatcttgaaatattggacaggttggtcaaggattacagtgtgccacaagctttaaggtttcttcttcttacaagactgagatttgcaaggggctttgactctttaacatgtcgacaccagtatatctgtatccgcttgtatgctttattgtc

SEQ ID NO: 16224 - DNA, 342 bp, Zea mays
ttgccccataacattctaatttttatggttagtacttaatataagaatgtcccaatgcactcatgcatcatgatatatattatgtatacttgcgttctaccctttcatgatcaggcatagtatactcaacgctagagccgatgttatgccaaattgtacagaatgccgatccattgtcgtactcctcatctcatctctgttttcaagttgactgtgatccagatatcggacagccaaagcattggcaccatgcgtggcaaatttgtgcgtcattccgattgaaagtgagaaatgcctctctctcaaaatagcttcatgttttggcaccaaatctaatacaac

SEQ ID NO: 16225 - DNA, 382 bp, Zea mays
  unsure (1)..(382): unsure at all n locations
atttaaacgaaaaatgaaaacgaatgccagaactgttgccgaggtaggatatcttctagtagatgtgcttccactctggcacagtatgttgactgtgcgagcttcagactcctctctgaagtctcgttgctgatgagtgtgctggctcccttctggctgctggcctcgttgcattggtggtggaggtggaggctgttgccaagacgcctgaggttggcttgccgaagcaacaaaagctgcaggatggttacccacatactctggaatgtaccgtgagtgatatgaagcagtatgcataacttgcttctgctggctctgttgggctgcagctttngctatctctttctgtttctggatggtgacattgcacatcctcgtagta

SEQ ID NO: 16226 - DNA, 309 bp, Zea mays
  unsure (1)..(309): unsure at all n locations
aaaagaatcttgtcccgagattcggagcgaaagactttcaagagtagagaagcatgtnacccatgttcatatcagcggccatcataagacaattcccagcaaaagcgagtgtctcataatgtggaaacttgttgagcccctcaccatgaagaagattccagcaccatcccttgagatcaaggaagaagctgcaagcaccctgccagcaccgacgccctctgaggagctacaagagtcagtcctgctcgaggaagagttcaaccccgtgcttgcacctcagccgccgccggaagaagtcatcaacatcag

SEQ ID NO: 16227 - DNA, 398 bp, Zea mays
  unsure (1)..(398): unsure at all n locations
agcttcaagcctttgaactgtatccaagnagttttcaagcttctgatttcttgctctacaactcttgtccatatgggtagaaataacttgggaatctgtattgagaacacgccttcttaccaccagtgcctttgactttcgaagccccaaaagcaaaagcttcgtttcagcaatattatttgtgcagctgaaatcaagtttcactgcgtagacgagtctgactatggtaggtgcgactaaaacagcatctgcgtcttgccacaatgttccacccaacccgcgtataacactgtcaggcttcgggattttacttgcttcttctgctgacccctggcggcagtcagcgatgaagtctgctactcctgtgactgaatcgagaactatgtacataatcaatg

SEQ ID NO: 16228 - DNA, 492 bp, Zea mays
  unsure (1)..(492): unsure at all n locations
gcttctaagggagaacacattttatgactaacatatgttcattttgagaaagacaggatatgtagcgcatgccaagccgggaagcaagttggcactcatcatccacacaagaacatcatgacaagtggcaggccactggagctcctacacatggacttattcggcccgatcgcttacataagcatcggcgggagtaagtactgtctagttattggggatgattattctcgcttcacttgggtgttctttttgcaggagaaatcccatacccaagagaccttaaagggattcttgagacgggctcaaaatgagttcggcttaaggatcaagaagattagaagcaacaacgggacggagttcaagaactctcaaatngaaggcttccttgaggaggagggcatcaagcatgagttctcttctccctacactccacaacaaaatggtgtagtggagaggaagaatctaactctattggacattgcaagaacgatg

SEQ ID NO: 16229 - DNA, 370 bp, Zea mays
  unsure (1)..(370): unsure at all n locations
ttaagtcacctgangcatgcaagctctaaagggagaacacgtgataggtctaaccaatgttcatttcgaaacagatagaccttgtgcagcttgtcaagcatggaaacaggtgggaggctctcatcacaccaaanatgtgatgacaacatcaagacccctggagctgctacatatggacctcttcggacccgtcgactatctgagcataggaggaagtaagtatgggctagttatcgttgatgactttttccgcttcacttgggtgttctttttgcaggacaaatctgaaacccaatggaccctctagcgcttcctcaagagagctcaaaatgactatgagctcaacgtgaataagaatacgagcgacaac

SEQ ID NO: 16230 - DNA, 421 bp, Zea mays
actcagtcttagtatataatatatatatgggagctacaccgggatgagaccatctaaaattgggagtggttccctgatgtttccgagtgcctttaaaaaaacaggctcattttattttccatcaatggcaggtgtgttgccgaaatatttacactctgagtggtcagtagctcaattcacgctccatgagggggagcagtacattagtgcatttggacatgagaagaataccgtgtcaagttgtggtatggatggaaggtgagaacatggaatccaacattgcatttcatcaacagatataaacacaatagttgaagatatatgtttgaatctaaatatatcttcttccaccaatggttttgcagcttctacagatgtcaattgacccagttatggaggagaaatgctgagctggagtgta

SEQ ID NO: 16231 - DNA, 414 bp, Zea mays
atgcaagcttgtgcaaagtccactcgagctaactatctgagaaacccgaccccactgcaacatgacaccagagggtcaaactcaacgggcaatggatgaattcataatcgttgcagagcatattggtaccacggatctggttcaagaattcttagcattcagagtcttccctactctgaaaaaatgggaaatgccgaaattaaagggggagaagaaggaaggggatcttgtccggctttcttaccacttcaaattcaagaaatattttaagaagccctgccaagagtggctggatacagttgaggtgatgtgtaatgaaattcttgggaattactcgaaaaaggaagatcaactgatgacagcagccttctgcacccgttcgaagcgaatgctgaaccgagtgcttgatgctct

SEQ ID NO: 16232 - DNA, 361 bp, Zea mays
aaatttagctaattgctctccactgttgcagaagtgtatctacccaacacatgttgtggccatgtcgtcctgcacgcaacaacacttactaattttcgtccaacaacatacaacattcactcaccaatgcaactagtgcaaggagtcattccaaaagtatctcatctaagaaaaattggatgcatgatatatgtacctataccaccttcacagcgaagtgcaatgggttctcttcagaaaataggatatatgttggatatgagagtgcattcataattagacaccttgacccaatgaccggagaattgcatacggcccgattcgctgactgtattttcgacgaggacaattatctgtcatt

SEQ ID NO: 16233 - DNA, 473 bp, Zea mays
  unsure (1)..(473): unsure at all n locations
agcttatgaagattcttcatcccaacatgggctattctgcggtgccagagccaacccatgttagtcttagcaattaagcaagtgtcgagttcagctctatcaaaatctaccaagtatagctgaccctctaacactcccttaaatgctattgaatcatcacttcttctaaagacagtgacaccaatatcagtaaaaagacagttgtagcccatttgacataattgagaaacagaaagcaaattgtaatctagagaatctacaagaaaaacattggaaatggaatgatcaggagatatagcaattttacccaatcctttgaccaaaccttgattcccatccccgaatgtgatcgttctttggggatcttggtttttctcatangaggagaacattttcttctcccctgtcatgtgtgttgtgcacccgctatcgagtatccaacttgtgcccccggatgcataaacctacaaaac

SEQ ID NO: 16234 - DNA, 456 bp, Zea mays
  unsure (1)..(456): unsure at all n locations
agcctggattcatttgaatgcatgttcnatgtgctgttcatttgactttttctaaatgtattgaatgtatgatcgctttatttagacaacgagcaaccagtgattccttagtgtgttgccgaagatatttccaagcaacaacctggtgaaggcaagtgtcctctgacctattatgtcctatttacttattaattcacagtttcacattacattattgaaacctaaggattgactagtctgtatttaccttatccttgtttaccttttgggttatcatggttagctctatgctattgctttactttaatcaatgaacatgatgtgaatacttatgatacgatgatgttatcccaatgatgatcctgtgatactttnggggaatcacgccattntcttggatacctctccgtaaggacctgtttggggagtgacaacccgggataacagtgcaaccat

SEQ ID NO: 16235 - DNA, 448 bp, Zea mays
  unsure (1)..(448): unsure at all n locations
agctctatacgctggcagantaagactcgcatgtggctcactgacctaaaattatattgggtagtgacgtccgctgttccccaggctgcatcaaataatgctggtgatgcagcgaagatcgccgcactatccgagaaggccaagtgggacgaagccaatgaagcatgcttgtctcgtctgctgaacgtcttgtcgaaccgcttatttgacgtgtactctgcgtatacctccgctaaggggctatggactgaacttgagaacgagttctctgaagttgacaatggctatgagtcatttacaacggaaaactacctcaactataaaatggttgagggaaggtctgttatggagcagctacaggagaatcaactccttgttanggacttggtccaatatggctgcgtcctaccagacaagttttagttgaatgcaatactggcgaaactcc

SEQ ID NO: 16236 - DNA, 237 bp, Zea mays
aatagatattatagagtattgtcagatgtaaggggttgaatgtaatatttgtaacggctgtgtcccgtgtctataaataggggaacagtatccccgtactggtcacgctgacttgtcattcgctttatgcgtcacgcttgtacaatcatttccttccgattgaagcacttgagaacaagtcccaacattggccccacctccgggaactcactttcatttttgagcttttcaacacct

SEQ ID NO: 16237 - DNA, 457 bp, Zea mays
  unsure (1)..(457): unsure at all n locations
tgcangcgtgtggaatggaaagacaactaatcttatgtgtatgtatggcttgagtgaacggcaaggtggaacggatggaaaacaggaggaggcgcgcggcgactggcggcatggctgttctgccttgcgtctgggctgaaaacgaggtgttcgccatggcgcacgggccgaaaactgaggctcgggcacgaactcgaaaataagctaagttcaagcatgtggaaagacaccgaacatacagtgtatgtctttggtgaagggcacaatggaacggagggaaaacgacacggaggcacgcggcgacgggcggcatggctgttcggccttgcgtatgggctgaaaacgaggcgttcgccatgtcgcgcgggccgagaacaacggttcggccacggcctctcaaataagctaagtccaagcgcgtagaaagacaccgaagctaatgtgtatgtctgtgctg

SEQ ID NO: 16238 - DNA, 464 bp, Zea mays
agcttacttcgtgccttagcacattttcatattgacgaagcatttgctgaagattggcttcgtattcgattcttttgctgatgatgcaatatgatgtatgatgtaatgtgatgcaaaatgatgtgatggtatgatgcaaaatgatggtgatgccaaagacacacactcacacacccacactggaatacaggactctgcatccccttatgaacgttctttgagtctaagctctgcatccccttaagaatgacttttgagcttcttcaccttctatttcggtggtacaagttctgcatccccttagaaacgacttataaacttcttcgccttctatatcggcggtataagttctgcattcccttaggaacgacttttgaacttcttcgccttatatttcggtggtatatggctctgcattccctctggaacgacttttgagcagaaaacttacactgtgctccctt

SEQ ID NO: 16239 - DNA, 197 bp, Zea mays
acacatagctcttttgaataccactgatcatatctcttttatatgctacgactaatgtgttttcagtttatttcacaccaagtcatatgtgtatttgaagggaattggagtcttctgcgaagacaaaggctttcactccgtaactcatactattgcaccactccgagcaactctcttttctttgggggagaaatgag

SEQ ID NO: 16240 - DNA, 426 bp, Zea mays
  unsure (1)..(426): unsure at all n locations
agctntaccttgattcccaacaaaccagcatacccatgagaatcttttctttagtcgggtaagtcttgctgagtaattgtgtactcagggttttatttcctattgttttttacgttataattttgttctgttgtggatggagctaagtgccggtgggctcggccttctcatatgtataagcatatctcatctatagtttctttattgaggattatcacataagctagcatatattttaaaacttataaatgttttatacatttctaagtctaattctcttgaatcactttcttttgtaatcactccaataattgtataaatgaagacttattgtaacttgtaaccattatgtaataaagaatttctgctgcaaatggtggtgtgtgatttgtgtttacttaatcttgtgatcttggcgataagtga

SEQ ID NO: 16241 - DNA, 399 bp, Zea mays
agctcaaagccatggtaagtagcatatgcttgttatatgcgaattgactcaagcctagctacgggtgcataggtttcaccaaaatccaaaccttcgacttgtgaataacccttagccataagtcgtgctttgttccttgtcaccacaccatgctcatcttgcttgtcgcggaatacccacttggttcctacaacattttggttaggacgtggaaccaaatgtcatacctcatttctcgtgaagttgctgagctcctcttgcatcgccagcacccaatccgaatctttaagtgcatcctctaccctgtgtggctcaatagaggtaacaaaagagtaatgttcacaaaaatgagcgactcatgaatgagtggttacccccttatgaatatcgccgaggatg

SEQ ID NO: 16242 - DNA, 481 bp, Zea mays
  unsure (1)..(481): unsure at all n locations
agcttgaagttcctatcattgcangtccgagaactatatcatccactctttgaccggatactactggaacaatctactgaggtaagcgtttctgctgggtcagagctatatataatatctcttctgtctgaaacaaagggacctactaacgatggctttcatttgccatatgtttcttacactagaacagatgagtaaagtatgaaatgccatggataaatagctcactagctgtttttgtntttgttaccaatttcatactgcttgaacttgcatcanggaaaaatgcaattcccaatttatacaataaacatattaacttcattaattttgtcctttcaaatcagctcatatagtggaaaacacttttaatgagtaaacaatggaagaccatcctcaatccacgtgcagacgcagtccttntgtctttcttccacctccacggnttcactcccgccgaactttcttcttgattcccaca

SEQ ID NO: 16243 - DNA, 466 bp, Zea mays
  unsure (1)..(466): unsure at all n locations
agctntaccaaatggacgtgaagagtgccttcctcaatggaccgatcaaggaagaggtctatgttgagcaacctcccggctttgaagatagtgagtaccctaaccacgtttataaactctctaaggcgctttatgggctcaagcaagccccaagagcatggtatgaatgccttagagatttccttatcactaatggattcaaagtcggaaaggcaaatcctacactctttaccaaaacacttgaaaatgatttgtttgtatgccaaatttacgttgatgatattatatttgggtctactaacgaatctacatgtgaagagtttagtaggatcatgacacagaaattcgagatgtcaatgatggcggagttgaagtacttcttgggaattcaagtgaagcaactccaagagggcaccttcattagccaaacaaagtatacttaagatattctaagcaacgttgggat

SEQ ID NO: 16244 - DNA, 418 bp, Zea mays
  unsure (1)..(418): unsure at all n locations
agcttgtgaaggttcttcatcctcacatgtgctaagctgtgatgccacagccagcccatgctagtcttagcaattaagcatgcatctagaccggcctcctcttttgcaaaatcaactaaataaagtttgtcgtctagtacacccttaaaagctagtgaaccatcacatcttctaaagacagacacatctacatttgtaaatagacaattatatcccattttgcataattgactaacagataacaaattatatccaagcgactcaactaaaaacacattagaaatagagtgctcagatgaaatagcnaatttacctaacccttttaccttgccttggttcccatcactgaatataattgaatcatgggaatcctcatttttgacgtangaggtgaacatcttcttctcccccgtcatat

SEQ ID NO: 16245 - DNA, 406 bp, Zea mays
atgtgtgttatttgactcgctttggacattggttgagtcttaaacccacaaccctagttccttatgggaaaaatgcctaaccctactaaactacttgcttagaaaaaccatagtttccctattaaaccgtgaatgaaagttgtattcaaggtaccacttaatgtagcttctctattattgcattttcataagcattacatgagcattcatgggtatatatgattatgtatagagaacgaacaagtgataactcgtgaagaggaagagactactccatccacagaaaatccacctgccacgaactgtttctattttgatatgtttggaaacaagctcaactctcctacaacacaacgcaagccctggtgcattttgcacctccttgctattataaacactttatcac

SEQ ID NO: 16246 - DNA, 468 bp, Zea mays
  unsure (1)..(468): unsure at all n locations
agcttgtaacttgtattggcagtatgcatcataacacttcanatgttcaaaccaaataaaggacagaccgagtgctggcggcttccacacatgtggtgtctgaggaaggaataaccgactcagtgaaaaggcttgtcaccactgtgccaggcttgtcctttatgaacatgttcaacaaataaggagatatataatagtgtagtagaaataggcactcacgagacacactcccattctcctgngttgagtaaacggtatgttggtttctcatgacattgcaagcatcttgtattcttagcaaaattcaaaaagttgcacctgaaataaggtcagtatgagagagagagagagaacatcacttgcagtaaacatttatcataactagagctataagcaggctcaccttatgcatatccagtcaccctttntgagaggcagatgctctcggtcttcatgcaacaactgata

SEQ ID NO: 16247 - DNA, 434 bp, Zea mays
  unsure (1)..(434): unsure at all n locations
agcttaacaaaagagatntctataatcaagaatattgtgctcatgcctaagtctggtaaaagattgttcatcaagtggcttggtaaagatatcggctaattgatctttagtattaatgtaagaaatctcgatatcccccttatgttggtgatccctaagaaaatgataccgaatggctatgtgcttagtgcggctatgctcgacgggattgtcggccattataattgcactctcattatcacatagcaaagggactttggttaatatgtaaccgtagtcccgcagggtttgcctcatccaaagcaattgcgcgcaacaatgttctgcggcaatgtactcggcttcagcggtggaaagagcgaccgaatattgctttttgangcccaagacaccatgatcttccaagaactggtaagtcccgattgctcttctat

SEQ ID NO: 16248 - DNA, 447 bp, Zea mays
  unsure (1)..(447): unsure at all n locations
gcttagagaagagaacaagatgctaaagcgactatattaattatctcaccgccaaattagccgttgcttcgtgtgatatttgtgttgtttgagcctatagaatcacattgtcatcatctagaaaactgccatctaagtttgggacagatattatataataactgtcatgagcagttgagtaccgtgcatatgtttgtatttcctttgctatagctctcttgctttgttgttaattttggcataatcagatgtgagcctcaatggctgcaaaacataatgcaatactctggctttgtttaatcactgatagtgattttgcacatgaacagagttcggctctttgctaacctaagtatgtntcacaggtagaagtgaaggtgtatatggacctcgtatagagacaaaaacactgtagaattgaaaccagctatttgaactgctgaacta

SEQ ID NO: 16249 - DNA, 475 bp, Zea mays
gcttaccaaagttcaaagactcacgtttgcagttaagcttactagtatgagaaccttatgccaaacttttagttcacaggttaagtatctttcctgaatctagaattgtctaatctagagcattcacttgacctacactagcttcattttagcatcggtagttgcacttggtatctacgatgagggtcgaagatctagtcttcatatacgagaagttcggcgatctgaatcgattaatacccaactagggatctccaaccacacgacatatgtagcacttaatccttgcatatgtcaacacgcacccgggtttctcaagaccagaatgggtccccgccaaccgagagcttattaccccaccatccagcctttgccaggtggatacacgatattctcgccatctctccactcccattgcgggttggcctttctggtattggcccacctaggctaagcttacccatgatgaggcatg

SEQ ID NO: 16250 - DNA, 366 bp, Zea mays
  unsure (1)..(366): unsure at all n locations
agcttaatcccgagaagtgtgtcttcggggttcctcgaggcatgctctnggggttcatcgtctccgagcggggcatcgaggccaacccggagaagatcgcggccatcaccagcatggggcccatcaaggacttgaaaggcgtacagagagtcatgggatgccttgcgcctctgagccgcttcatctcacgcctcggcgaaagaggcctggctctgtaccgcctcttaaggaaggccgagtgcttcacttggatccctgaggccgaggaagccctcgggaacctgaaggcgctccttacaaacgcgcccatcttggtgccccccgctgtcggagaagccctcttgatctacgtcgcctcaaccactc

SEQ ID NO: 16251 - DNA, 324 bp, Zea mays
gcaagcttatgaagattcttcatcccaacatgggctattctgcggtgtcagagccaacccatgttagtcttagcaattaagcaagtgtcgagttcagctctatcaaaatctaccaagtatagctgaccctctaacactcccttaaatgctattgaatcatcacttcttctaaagacagtgacacctacatcagtaaaaagacagttgtagcccatttcacataattgagatacggaaagcaaattgtaatctaaagagtctataataaaaacattggaaatggagtgatcaggtgatatagcaattatacccaaacctttgacc

SEQ ID NO: 16252 - DNA, 474 bp, Zea mays
agcttgctaatacttatcagagcagctgtatttatcggcacagcaactgcagaccatacctgtaacatgaccattcgcgtgctgtggactggacaggattggacccttcaagaaagctcacggaggatacactcacgtgctggttgccattgacaaattcactaaatggatagagtacaaacccatcgcttctctgacttcagctaaggcggtggaattcatacaagatataatattcaggttcggaataccgaatagcattataactgacttgggatccaatttcactagctcggaattctttgatttctccgaacaaagaagcatccagatcaaatatgcgtcaatagcacacccaagagccaacggtcaggtagaaagggctaatggaatgatattggaagcactcacgaagaaagtcttctacatgaatgaaaagttcgcacgatagtggatcagagagttgccgtatgt

SEQ ID NO: 16253 - DNA, 480 bp, Zea mays
agcttctaaagggagaatacattatgggactaacaaatgttcatattgagaaagacagggattgtagcgcatgtcaggcagggaagcaagttggtgttcatcatccacacaagaacatcatgacgactgacagaccactcgagctcctacacatggacctattcagcccgattgcttacataagcatcggcgggagtaagtactgtctagttattgtggatgattattctcgcttcacttgggtgttctttctgtaggaaaaatctcatacccaagagaccttatagggattcttgagacgagctcaaaacgagttcggcttaaggatcaagaaaattagaagcgacaacgggacggagttcaagaactcacaaattgaaggcttccttgaggaggagggcatcaagcatgagttctcttctccctacacccctcaacaaaatggtgtagtggagaggaagaatccaactctattggaca

SEQ ID NO: 16254 - DNA, 488 bp, Zea mays
  unsure (1)..(488): unsure at all n locations
agctttagactnaaatctactcgaaatagtatttcgcgaattcttgagagaagtaaggtatagctaagttaggatgaaaagacgaatatgtaaaggctattttacttctagataaactctacggaaaaatctttatgtcaatcttgcaagtaaagatatcttaagttaaaaacaagcaagaacacaaaaacacaagatttaatccgaggttcggccacaccacanaggtgtcctactccccgttgaggagcccacaaagggccgggtctttttcaaccctaatcctccaaaagccgaccacaaaggtcaatgcaatctcttcttatctcagctcanagagcgggtgatacaaacttcttggggtcgtccacaaatttggagactcccaagcaacctcaaaagatcttgaaacctatggtttcaagaacaccaagaaagcacaagaggggtttgcacaagctcaagtcttttgaaaaaggagatgggag

SEQ ID NO: 16255 - DNA, 386 bp, Zea mays
agcttgcaatgcatgcataaatttcttgtattgcatctagggctcgtctaacctagttgagataaccgccaacaaagcgagtgaaaaagcttaactcggatcaaacttgacaagtcttagttttaagcttttagcacttaaattcttactttttatgcaattgttggttcttgaaatatgcatgaagtactgcacttaaggggagtattcaaaactcaattcactcatgaaaacccctagtgaaggccaaaatgcaaaattcaccatctgcctatattctctaaaaattatctagcctatggcataatattttgaaaatcttgagaaaagtataagagggtgccaatacctgtcccaacaaagtgtatattgtgtgtttataagtt

SEQ ID NO: 16256 - DNA, 381 bp, Zea mays
  unsure (1)..(381): unsure at all n locations
atgcaagcttgcagccaaaaaattttaacttattctcttgtcatatacgcaaaacaccactgagcagtgggtcccacaatacagaatttctcgctattctaagcaaaggaaggtggtttttctgaccttctgctaaaggccttcgttcattatgcagactaaatttgttacatataaacaaactaatactgtgaggggctactgatgagggccttcctcttcctaggtcctaaaaacacgactaaccatttgctttcagcatactactaaatattataggagcttcgtcaccagaaaatcttcgacataacacaagaggagcacgacgaagcangcttcgtccaacatgcttcatcacggtgaaatatggaggcaatgtaa

SEQ ID NO: 16257 - DNA, 457 bp, Zea mays
  unsure (1)..(457): unsure at all n locations
agcttcgggaaccccatacttctatccatctcccggcagacagataattctttgttgtctgggaggcagtataagaagtcatcttcgtctgtgccattgaatactaaggccccctttggatacttcagttctcgggcatagtgattagcttcaaaaatctcttcttcagataatctttttcccgaagcatgtcgtacaatataatcgagggctttggaggatgcttcggggacagcagcaccagtttcttcaaccaaaattggctctgatatttctgtttcttcggcttccaaggatttcaccttggcgggctctgaaggcccagcttcagattctgcctggttctttgaagcttcggcagcaaaggcttcagtgtgcactctggaagtatcaacaattttcttcggagtcatgcttgaagacttaatngtcttcaanacatccagcacattaacca

SEQ ID NO: 16258 - DNA, 262 bp, Zea mays
  unsure (1)..(262): unsure at all n locations
ctcggcgtagatgatgttgatgctatttgcctcgtccatcangaccttggtgagcctgacatcgccgacaacggggtcgacgacgagcgggtatttacccnggctcggcacatggtcggggtggtcggcccggtctaaagtgatgggcttgtctgaccactctatgtaaaccggcgccaccacctttctctgagcagaactccccgcgctcttgcttgcggtgccgagccgatgtattccccgcatgccttccatagatcat

SEQ ID NO: 16259 - DNA, 197 bp, Zea mays
cttggcagacaatacgtgtcccaaaaaatgaattttcttcagccaaaatgcgcatttactgaatttaacatataatgctcccttaagcgcgctaatacgatccgcaaatgccaagcatgctcctcttcattcttggaatatatcatcaatgaagaccaccacgaatttattcaactcgggcatgaatagcgagttca

SEQ ID NO: 16260 - DNA, 408 bp, Zea mays
gcttgtcatcttgctcaaacaactatatataaactctacaacaaaagttattaagggtctgtgtcatgaaaatgtcgagaaaataccccaattgccttaaatatctaatttgaagccttataatgatactacgttgaccaaagtgaaactttgatttacattcaacatacgaggtttgatttttaataaaagttgtagaacctgtgttatacaacaaattttataattacccatagccttgattcaatccctaagtatctcaaacagtgccctcgtgacggaataaaggcacaacatatcaaaagatggcgttcatctgaccccgttgacaaggttttgagggcaatttctaaccctcatcagcaccctgacactagtaacattgagcttaattacctactaaccctt

SEQ ID NO: 16261 - DNA, 487 bp, Zea mays
tgcacaaattctccccctttgacatctaacaccaaaaaccatactcgagcaagaacatatgatgatgtcaagggacagcaaggtgtcaagggggaaaacgactatcaaaaaactcccccttacttattgaacatatgcactatcaacatttaggtaagatacatatatgcaaaaagattaatactccctttgtacctttaccatgttgtagtgtacttcccatcttgaaagtatctgatctctcaagagcttcttcacacttgtgcctgattctttatccttactttttcttgttgctaagacaccaaacttagaacaagttatagtatttggcacaggaagaaactttcaatctaatgattatcaaaagatgtcaattgaagtagactatcacggctactaattgaaaaataccaatgcaaagttcatttatatcatagctccatgatatttaagaataagcaactattatcaccagatattatat

SEQ ID NO: 16262 - DNA, 326 bp, Zea mays
  unsure (1)..(326): unsure at all n locations
actccctccgcttgttttatttgtcgccgtttagtacaaaattgaattaagtagcgtcnaataaataaaaatggaggtagtactattgagcagagctagaaagaaacgaagacttgtttgatggtgtttgactgcagaggctatgaacctgttgatatttccattggagctggctggtaggctgagtctgtatggtttttcttgatctatcatgaatgttaatgactggctacatatacaaaaccaatgttttagatgtaaataattaattatttcatagttattcgcattcaagaaatgaactctggtattatattcagtacttc

SEQ ID NO: 16263 - DNA, 350 bp, Zea mays
  unsure (1)..(350): unsure at all n locations
agctntatgctgatggcggttaccagctgagaattatgagtaatgagggtacccctaattatggtccccgacagtagcccccgagcctctaagggagtgttagcactcgcttggaggctttcgttgcacttttatgcaaggggaccagcctttctcggttgcgttttgttccggtgggtgcgcgcgagcgcacccgccgggtgtagcccccgaggcctcggaggagtggtttcactcctacgaggtgttaatgccttcctttatgcttccgctggtctggatgttccttatgcgagctggacgaacccaggtgtacggatggttccaattctccggcaggaatgttcctc

SEQ ID NO: 16264 - DNA, 484 bp, Zea mays
agcttaatgccagaattgccatcaaggaagcttcctcactcttctcatccccccattgcctcatggcaaagggagatgctaaggtgaaaatcatcaccgatttaaatgatataaatgatgatgatgatatcgatgatgttgatgatgatggctattcatatgatgatcttgttagaatgttatgtgaggccgatgactacatgcacaaagaaaaagaaaaatttaacgccttgaaggaattgtataaaaacctccaagtgtcttttgaggagctcaagacctctcacaatgacctcaaagaaaattgtgagaagcttgcggatgctcaaaaatcatctattgtgcatgaagttgaggtggttactaaggatgttggagtcacttgtgacttacttgatagtcttacaagtgaaccactacctactaactctatatgtgataaatgcgaaatttctctcaatgagtatattgctcttgatgaatc

SEQ ID NO: 16265 - DNA, 480 bp, Zea mays
agcttgatgtttagaatgacatcagcttctcccaaatctttcatctcgaaaatgctcgatagaagactattaacttcctcaatcacattgagatttgatccaaagatcaagatgtcatcaacataaaggcacagcataacagactcattcccaccataccgataatacacacacgtgtcagattcatttacaacaaaaccagcagctgtaagagtattatcaaacttttcatgtcattgcttaggtgcttgttttatgccatacaatgattttatcaacctgcacaccttggtctcttgaccatccgcaatgaacccttctggctgatccatgtagatctcctcatccaactctccattaaggaaagctgtcttaacatccatctgatgaatgataagaccataagaggctgccacggctattaatgtgcgaatcatagtcaatcgagccactggtgagtaggtatcaaagaaatcttca

SEQ ID NO: 16266 - DNA, 419 bp, Zea mays
agcttctgtgccaaagatcacatataatctaatttatggttattatagccgagaatctctaaagtttaatgtcaacaaggcactctctactgccttgttatttgaaaaatgtcaaacaacacatttcatattgttcctatgttcttaataacaaaacattaattatcccacggtttgcggtgttattacattggggctatttttctaggggtattctaagattaccttgctgtcttacaataaaaggtatcctatttatgttatactataccagggtatataaagattttctagtgaactacacttgataattatactacagaaatatgggtgctccctgggtccttatctaaacccttattaatattttctttaactgtacgctaaaaagcggttatatggtaaactctatcttaact

SEQ ID NO: 16267 - DNA, 445 bp, Zea mays
  unsure (1)..(445): unsure at all n locations
agcttcagcttctccactgatccactcgataaaaccctccgggtcgcctcgtatgaagttgtcttcgcttgaataggcgcccacattggtgaagctagtcttcatctttttcacgcaccccacagatttttcaaaacatctttccttggatgcgcgaagctctgcaactgtcttttctaaataatttttccaatattcgctggcatctcgattagcttcagcaacaacgcatttttctttggcctcagctaattgtctccgaaggtcttcaatttcactcttttgggcctcagcttgagctntggaactagcttcgtcttcttttattttggttaccaatgaaattaatatcttatccttctcaagaccttcattccttagttcgatcacctccgaacgaagggtgtcagggccattgtatacccttcatcttcaatgggtttct

SEQ ID NO: 16268 - DNA, 421 bp, Zea mays
  unsure (1)..(421): unsure at all n locations
cttgatgtanaaaaacacaagaagagcaatgaattcacaatgcatattgtcttctactttgaaaatcacgccaacaccacaacgtgctttctatctataaatctgaacatcttctggatgaacccaacgaaggctgtagctaaatgatagtatcaggtatcagcaaccatcagaaaatgccagggaacacacaactattatctgtaaccaatttaaatacttagaagaaaatgtttttacctcaattaccagttttagcatcgtgaaaaggaacagtactatctctggatcttgtattcacactgcatgctaacacaatcctgaagaactagcatgacataaccagccaaaaatatgttcctaatgtatatgttcctttacaacatcctgatccatttcacgttatgagttcacaatactg

SEQ ID NO: 16269 - DNA, 484 bp, Zea mays
  unsure (1)..(484): unsure at all n locations
gcgccaatgtggacactngtctttgattgctatgatttattaacaaggcaacacgaatgttaagtgtgaggacctttgtcctctgaaacattatctcctttctggtataaaagcctcggacgaagatcttgaagaacatgtcttcatcattcacaaatataaaagtactattacatatgtaataataagttatttactcatttcccatcacatacagaacaatgttacaatccatctcatatattagtaaagtgatacgaaatatacattacatgtgtactcttggcttgctcgaaggtaaaagcgtgaatgcaattccaatccagcctaaacagtatggagatactgttcatctatttataggcattagtacaacttcgtacaatattacattcatgctctcatagattacacantaaagttacaaatatcatatggataacactggcattagctcttagcatcttggataacaccttctcct

SEQ ID NO: 16270 - DNA, 435 bp, Zea mays
agcttctaaagggagaacacgtgataggtttgactaactttcaattcgaaaaagatagaccttgtgcagcttgtcaagcatgtaaacaagtgggaggagcacatcacagcaagaatgtgatgaccacttcaagacccctggagctgctgcatatggacctcttcggacccgtcgcctatttgagtctaggaggaagtaagtatggtctagttattgttgatgacttttcccgcttcacttgggtattctttttgcaggataagtctgagacccaagggaccctcaagcgcttcctcatgagagctcataatgaggttgagctcaacgtgaagaatatatagagcgacaacgggtccgagttcaagaaccttcaagtggatgaagttcttgaggaggagaggatcaagcatgagatctccgcttcctacacaccac

SEQ ID NO: 16271 - DNA, 184 bp, Zea mays
gctagctcatttggaggcgtaccatacgatctttgagaaatgggagccgcaccgggcttcaatttaattacaaactctacatctttctcgggtggcaatccaggcaaatcctctggaaagacgtctgggaactcgcataccaccggaatatacttgacttctggataatggcttcataaactct

SEQ ID NO: 16272 - DNA, 478 bp, Zea mays
  unsure (1)..(478): unsure at all n locations
agcttcaatctacactaaataagtatgattacaatatttgttcttaaangcttaatataaatgcggaaacttaaagagcaaagtatagaagcaaactctcgtggacgacgccggtatttttaccgaggtatccggaaccacgcaaggtcccgactaatcctcgttggtgcccctacgcaaagggaagcccacgcgagggccaagcaccacggtcgagtaactccgtagagagccacatgccttctccacgcgcaagtggtgctccgcttacggctcctcttggacgctccccgtcgtctccactatcgagctttcggccaaaacgctgcgggcctcgttccctccggtatacggtggcggtcgtgacatatacgcggttgtcacagtctcgcaagactctcgccccactcggtacaattacaacgactcacgcgagagccgatgggttgtgtggtttacaaaactcactcaactaact

SEQ ID NO: 16273 - DNA, 468 bp, Zea mays
  unsure (1)..(468): unsure at all n locations
agcttgacattgtctaccctttggaagccaatttctttcttgatgccatggcgtctcccactataaagcatactacgagcaaattttaatttttcattttctaactcatgctcgacaattttagcatctaattttgctatatgatcattttgttgtttaatcatagcaatgtgatcatgaatagcatcaatgttaacatctctacatctagtgcaaattgtaacatgctcaacggtagatgtagagggtttgcaagaatttagttcaacaatcttagcatgtaaaatgttattctcatctctaagaatggaaatagaaacattgcaaacatctatttccttagccttagncaattaattttcatattcatttctaaggctagcaagagagacanttcaattttcaatcttagtaattgaactagcattatcatttctaagaatgcaatagaatcatacaaacatttga

SEQ ID NO: 16274 - DNA, 468 bp, Zea mays
  unsure (1)..(468): unsure at all n locations
agcttcctatccagggtcctatntgcaaaaacacttataacaatacaacttgtttgaaattattgcctagtgaatgcactctaggtgtatcaaacatatgcaatgccaatgctatgatgtcatgctcaagttttagttatagtaacaccagtggtgttacaacacatgccttgagagagaatatgggagtacatattctactcctccatgatggttgggacaaacgtcccactattgtgactcttcctctagattctagagttctaaggctctagatcatgcaccttagccctaattccatcctttccttatcaacattcatctacttgtgtgatgcattcatggnggtgaggccatctgtggtattgtcccccacttcatcattctctagtcatcgaatggttggaactcattcaggggttctacttctaactccactcaggccaaatcctcaacatatacatcatt

SEQ ID NO: 16275 - DNA, 434 bp, Zea mays
  unsure (1)..(434): unsure at all n locations
tctgagtcacctgcggcatgcgagcttaccgcatntgaagcatgagcgcttcctcttggctttggtcttgcttggctgtcccttgcgacctttaagcgccgacttgaatcttttgatgatgagggccatctcttcatcattaagtccggctgcctcaatttgtgccaccttactaggtagcgcctccttgcttcttgttgccttgagagcaaagggatgcggctcgttgatcggaccattcaaggcatcgtccacgtacctcgcctccttgatcatcatccgcccgctaacgaatattccaaggacttcttcgggcgacattatggtgtacctgngattctcacgaatattatttaccaaatgaggatcaagaacggtaaaggaccttatcatcagtcggacgacgtcgtggtccgtccatcgcgtgcttacgt

SEQ ID NO: 16276 - DNA, 350 bp, Zea mays
caagcctagctacgggtgcataggtttcatcgaaatccaaaccttcgacttgtgaataaccctttgccacaagtcgggctttgtttcttgtcaccacaccatgctcatcttgcttgttgcggaatacccacttggtacctacaacattttgattatgacgtggaactaaatgccatacctcattcctcgtgaagatgttgagctcctcttgcattgtcaccacccaatccggatctcttaatgcatcatctatcctgtatggctcaatagaagatacaaaagagtattgttcacaaaaatgtgcaactcgagaactaatggttacccccttgtgaatgtcaccaagaatg

SEQ ID NO: 16277 - DNA, 459 bp, Zea mays
agcttaataggcggaaattttttcactgacatctgtgaaaatggtggtcgagggatggcccatgaaataataaagaaaagccgaaaagatactcatgacgctagagaagcaacgaaagcagctgaaaaagctgcagaactcgaaaggcgaatagatattacttaatggcttttaactttgttgtttatttttgtgactccgaactaattcatgttttctaccgcagctgaactatctcctcccccagagccattcgacccactggctgacccagagacaaataaaacaatagagattattaatatggtcgaagctattgtggatgaagttgttaccaagctgctaaccaaaactgctgaaaaagttctaaaggaagaagagtagctattggtaaaaacattttaagatattaatgtaatatttgctgaactaagtctgtaatattcgatgtttgtatct

SEQ ID NO: 16278 - DNA, 451 bp, Zea mays
  unsure (1)..(451): unsure at all n locations
gcatgcagcttaactggataccctgtataataattttcttacccttgtaattattncaaactaaaaaatatatatataaatctgaaaatcagcaaattaataatatgaatgtaaattatttgtttgatggagttatccatttatgaattatgcatcaaagagaaataagtaaataaataaataagtaaccaaaataaaaactataattgcatcatgctgggtttcatgtattgttgcatttattaccacanttgagacttagatttgaattaaagttatgaatttaaacttgaatttgaaacaataaaagaaagggaaaagcttgtgggccaaaaccatcgcgacccatttacctcctctctgcaccagcccactgcgcggacatctcaccgacgcgcgggtcccgcacgatggtctcgcttctccactgtgcacacgcgtgtcccgtctc

SEQ ID NO: 16279 - DNA, 475 bp, Zea mays
  unsure (1)..(475): unsure at all n locations
agcttgccctcagctcatggccatggagctcgttctggtccctgcgcgctcgctgtgggcgctcccctgccttgttcctctccccaactcgagctcgacgtcggcacctataatgccccaaactggtataggagaaagataataggataaataaataaatatacttatatgctagaattttgaggattacttgatcttcttttctttgtgcatattcaactaaagaaattaaagtagtcaaataacaaataaataaatacgtgaatgtgcattccatgctggagttcttgtatgattacatgtgtactcaaattttttagacaagttaagtttgaaaggtagnaattgtaacaccctaatatcccactggtggtatttgagaaaaatctttctatataatttaaatagatagaccctcttaanaatattattaagatatctcttttaantaataaattggagatactcttaaaca

SEQ ID NO: 16280 - DNA, 407 bp, Zea mays
  unsure (1)..(407): unsure at all n locations
tagtgtaacactggcggcactataaaatgtcagtggaaataactctatgaccgccactatagagcttctatgtactagtgtggtctacatgccaaacactttcataaactatgcaactttgaagcagagcgaagttcatgaagctaagctacaccaaacacccactaaatcattctaagtttgttctccaatcaaacatctcaagtttcactaagtttatataataaaatactaacattaataacgtcaaataagtattattatagttaattctattnttattacacacatatgtaatggtatagattctttgcatttcttatgaatntaaattaaattttaaattctttgtgttttgaacaaagctagaataacttgtgatggggaacacaaagagcattaaatcg

SEQ ID NO: 16281 - DNA, 230 bp, Zea mays
ctcccgcgccttgaatgcgaccgtatgcatctcgtgtgtggaggagacgccttgctcgatgattatcttggagccgctgatcatcaatacagagctcacataatttgctagtaacttctcgggagacattaacttatatctacgatcaccactgattatctgaactcgagtcggagtaagaaatacgagtgatcttagaataaccttgaccatatcatggtcatcccatt

SEQ ID NO: 16282 - DNA, 484 bp, Zea mays
agcttcttgacaaaggatgtttgtttctttctatttgtgtgcactggttaatttagatcatgccgatatggttgtcttcccattgctagcagattattaatgtcgattatgttttcttatcatgatatctatctatactttgttgcttccccgtttatgcaattttcaaaggagatgctgtcgaaattttatatactaatgttagaggtgtagtttagtagcattctggggtgtttatggatcccggggtgttacacaaagctaggggggttgttccacttatacctcctccttgattggcccattgaggaaagcactcttcacatccatttggaacagcctaaaagagtggtgagcagcataggccaataatattcgaattgactctagcctatcaacaggagcaaaagtcttctcaaagtccaaacctgtgactttgcataaccttttgcacaagtcgagccttgtttcttgtaccactctg

SEQ ID NO: 16283 - DNA, 484 bp, Zea mays
agctgacactgccattcacctctgttagtatttctacgggccgcatgcgccactctggatgacaagctccggcacagccgccgcttggacgcggtccagagcggctgcaccgctgtccatcgtcaagcagggggacctcatggtcgtcgccaacttctgcgactcccaggttgttctgggcaccacattcgacaacaacgccatcacgtcatcaagctcatcgtccacctgaagcccaacctgccacgtaagtcactactgaccggccataaattcttgtgcgctgggacgatggccgttactgacgttgtgtgagtgtcctcgaacatgatgtatgcagaggagtagcgcatccggtggtgcaatagccagatgtactacctcgctgatgagcccggtgttgcgggccttcgtctttcgaaggtcctcataaacatgatttaacaatggttctgtagtataatacatgaacacgtacctttgg

SEQ ID NO: 16284 - DNA, 368 bp, Zea mays
tgactcttcgataccttcatcgtttctatcatacccttgactattatcttctttgacccttgcgatatagatgtctcctacccaaatgcatactatgaacttaccctataaaagactcccctcttcttcaacccagtttcagagatgcgagatacctatctctcccttgatttcttttcatttcttgtcgccttacaagttttgtgttaattacatccctagctgtgtgtttatgtgctatcacccacaccttgtcggtcatcgatcttgccttgatactcatctttattcctacacctttaaaaacccctttcttccaccccaatttgagagtggccatttacctatctggccttggacataccctc

SEQ ID NO: 16285 - DNA, 443 bp, Zea mays
  unsure (1)..(443): unsure at all n locations
agcttctaaagggagagnaacatttaggattaacatatgttcattttgagaaagacaggatttgtagcgcatgccaagcatggaagcaagttggtgctcatcatccacataagaacatcatgatgactgacaggccactggagctcctacacatggacctattcggcccgatagcttacataagcattggcgggagtaagtattgtctagttattgtggatgattattctcgcttcacttgggtattctttttgcaggaaaaatctcatacccaagagaccttaaagggattcttaagacgggctcaaaatgagttcggcttaaggatcaaaaagattagaagcgacaacgggacggagttcaagaactctcaaattgaaggcttccttgaggaggagggaatcaagcatgagttttcttctccctacaccccacaacaaaat

SEQ ID NO: 16286 - DNA, 431 bp, Zea mays
taagctgctgtgctgatcgatcatataactcaattaaagaatggtgcacaaatttgataataaaaatacaccaataaaaattgctcctataatcaaataataggagcatatattaggtatacaataaacagtacctttgagtgagtatctgaaaagaaattgatacttcgcttgtctgatatttataaaaatattctcatcaggttcttccaacatgagaatgtcattcttgaagtgtgcctggtaattagtccctagccatcaaagggaaggagtccctatctctgtcatacattgtgtatgcaatgaacctgtgttctggagatactttatataacaactcatatgagtatcctacatatcaatcggtggttataacttaaataatcggtgaaataagtgtgacaaacaatgtatttctaccttcaaat

SEQ ID NO: 16287 - DNA, 406 bp, Zea mays
  unsure (1)..(406): unsure at all n locations
tttatatcttctcgnaccgccaggtcattcttcacatataaccattctgtcatacagacgccgggccatctctttcgaaaggttggcacgggacagcttgacccggaccgagaaatgaaactgtagcagccaaaattattgtgatactgttccttaccccaaggttttgtttcgtatgataattcgtgtatattgcagaaactcttcgcattaagctccagaccttggcttctcacggcccacacgaagatattcagccttatgattgcctcggcggtaagttggtgaagatagacttcgaatattttcagcacctctacgacaaaggtgctcaggggagatcgtattccggctttcaaaaagcttcngtacactacgacttcattctcttcagggtttggacaag

SEQ ID NO: 16288 - DNA, 383 bp, Zea mays
agctaggacatcttattgctaactgttccgacattgatagagaacacgaacatgggaacgagagggagaagaagaagaactataagaatgctaatggcgacgcacatattgtgaaggactgggagtctgattgctcctcgtccgactctgacaatgaacgaatcgccgacaccgccttcaacaagtcatccctcttgcccaacgatcattacacatgccttatggtaaggtagaagaaggtatgtgctcgagactctacatatcgctcttcaagtgaggacgaatctattgatgacgatgaaatagattattcatgtgtatttaacggcctagatagaaccaaggtagataaacataatgaattgattgatgccttgaatgat

SEQ ID NO: 16289 - DNA, 478 bp, Zea mays
  unsure (1)..(478): unsure at all n locations
tgctagagtctatgacttttattactgctaacttacgagaatggccactaggaaagctcttgcgcccatcttggtagaagttttctcaccatggcaaatcacatcactagtcacttgatcgtataactgcacccaatatatcataaaggcactgtgttaatttcaggatgaaaatcatctctaggagtatgcagtaattaatagtgaccaatagcatttacactttacaatttccaaaaaagggtcaatcacctcacactgaagaacaagaatgtatgatcagctagagtcccaccaacagacttcagagcagcaataatccctgcaagaactacagcagccgtgcccggtaaatatcatggctaaagagttagtactggttgtggaataaaattcattggcttttaagaaaagcaagatanattaactagcatctgatttgattacgtggatatcatcattaaatacaagatggttt

SEQ ID NO: 16290 - DNA, 466 bp, Zea mays
  unsure (1)..(466): unsure at all n locations
agcttgtggaggttcttcatccccacatgtgctaagcggttatgccatagccagcccatgcaagtcttagccattaagcatgcatctagaccggcctcttcttttgcagaatcaactaaataaagtgtgccgtctagtacacccttaaaagctagtgaaccatcacatcttctaacgacagacacatctacatttgtaaataaacaattatatcccatttgacataattgactgacagatagcaaattatatccaagactctccactaagaatacatttgatataaaatgctcatttgaaattgcaattttacctagcccttttaccttgccttgattgccatcaccgaatataattgaatcttgggaatccttaattatgacgtacgaggtgaacatcttcttctcccccgtcatatggtttgtgcatacgctgtcaataatccagcttgaacccncggatgcat

SEQ ID NO: 16291 - DNA, 442 bp, Zea mays
  unsure (1)..(442): unsure at all n locations
gcttctaaagggagagcacattntaggactaactaatgttcattntgagaaagacaggatttgtagcgcatgccaggcaggaaagcaggttggaactcatcatccacacaagaacattatgacgaccgacaggccgcttgagctactccacatggatctattcggcccgattgcttacataagtatcggcgggagtaagtattggtttgtaatagtggatgattattctcgcttcacttgggtattctttntgcaggaaaaatctcaaacccaagagaccttataaggattcttgagacgggctcaaaacgagttcggcttaaggatcaagaaacatagaagcgacaacgggacggagttcaagaactctcanattgaaggctttcttgaggaggaaggcatcaagcatgagttctcctctccttacatgccacaacaaaat

SEQ ID NO: 16292 - DNA, 364 bp, Zea mays
  unsure (1)..(364): unsure at all n locations
agcttctgtgctcaaaatcacagaangctaagggatggttatttagttatgattttctaaagttaaatgccaaaaaggcactntctactacattgttatttgaaaaatgtcaaacagcagatttcatatttttcctaagttcttaataacaaaacattaattatcccaagggttggggtgttttcatcttggggtgattattgtagggtttttctaagttttccttgttttcttaaaataaaagagatcctacttatttcatactaaactagggtataatagaattttctagtaaactacattgaataagtactctaacaaaaataaggatgccctctggttcattatttaaatcaccttttct

SEQ ID NO: 16293 - DNA, 475 bp, Zea mays
  unsure (1)..(475): unsure at all n locations
gcttgagcgagacggaagacgattattacgaatgataatatgatcacaaagctatgcgcagaaaagcttctgcatgacagcataaaaagggaaccgacttaaagatgaaaaggcaaattataccccgaagaattactatagagttattgattaatgtaaagggcattaatgtaattctacacgggctgcgtccctttgctataaatagatgaacaagactcccgtactgttcacgctgacttggcattcgcttttcgcatcacgcctgtacctttactttccgtcagtccgaaggtacatttattaattgtattntgaacatgataatgaagataaaaataaattgataataatatttaaattattcttcgtatttcgtatatgaaatcttctntattatctatcgagcttacgangggttttncttcataatcttcgtccggaaatcattatatccgaagggacataatgtctt

SEQ ID NO: 16294 - DNA, 486 bp, Zea mays
  unsure (1)..(486): unsure at all n locations
agcttatgttgatgatgtggtcatcaatacagttatactaaacaacttcattgaggagttgcaacaggtcttcaacagcttgagacgctatcgatggaagctgaacccagagaaatgcgtattcggagtgccggctagaaagctgcttgggtttatcgtcagccatcggggaatagaagcaaatccagagaatattgaagccattatgaggatggagccaccacgatcacagaagaaggtataaaggttcactagatgcatggcagcgctaagcagattcatatcaaggctaggaaagaaaggaatgtcgttccataagttgctcaagaaggtggacaaatttcagtggaccatggaagcgcaggaagccttggatgcactaaagaagtatctgaccacaccaccagtgctcaagccaccacaccaagttacaaccgatcagccggtcgaggatctgctgctatatattngctccacgactcacat

SEQ ID NO: 16295 - DNA, 479 bp, Zea mays
  unsure (1)..(479): unsure at all n locations
agcttggatatttcttatcagaacactatggatattgtcttgataaatgataaaatcttcttcacgaagcatgaaaagaagggaaggtgttttttcgtcgaagactcaaaaatggtacgtgtttaaagtttcatgcatcgtaaagaattgaatcataaaacaagtatattacatacaggattacagaatattacacaaatcatatatcaaatgttttttgcaatagcacttagtcttccctaagtactatctctgcagcttcgttcagcagtcgatcgacaacctgatccatgatagcttcggccatctttttaatttcgtcgtcatctttaggctgagggcccgaagatgctttagtaggatctgagtgaggacgggatactattacatcattattacagatcgcgaacgaactataaaattaaaagttataatggcatgaaaactattcgctagtacctatntgcccttcgggctct

SEQ ID NO: 16296 - DNA, 418 bp, Zea mays
agcttgtgaaggttcttcatccccacatgtgcttatcggcgatgccacagccagcccatgctagccttagcaattaagcatgcatctagaccgacctcttcttttgcaaaatcaactaagtaaagcttgtcgtctaatacacccttaaaggctagtgaaccatcacttcttctaaagacagacacatctacatttgtaaaaagacaattatgtcccatattgcatagttgactaacagatagcaaattgtaaccaagagactcaactaaaaacacattggagatagagtgctcattagaaattgcaattttacctaacccttttaccttgccttgatttccatcaccgaatataattgaatcttgggaatccttattcttgacataggaagtgaacatcttcttctcccctgtcatat

SEQ ID NO: 16297 - DNA, 493 bp, Zea mays
  unsure (1)..(493): unsure at all n locations
atcctctgagtcacctgcggcatgaagcttatgaaaccaccttaccttcccacactgtgtgtattttgagttggccctagtgagggcacttcgaggcaggacacttgtcatgatacatgattagccaagagatcccccaaacgactcgggtggacaactttccgacaagatatgttcccagagagcaaaatgcactatgcgaagccgattaaggatagagaagagataccctctacttatagcaaccgaccgacctagggatcctacctacccttaggactcggacgccagaagggacatagcaatcattgtctgatccgagagaagccaccaaggagagacactctcccctctgaggctcggtggctactgtcgaggaaaagatccccgggcccctatggcccatgagtcancatgaggatgagggataggcctgtggtcacgtgaatcaagaggaagccactcatatgtattccacaactgacccagaact

SEQ ID NO: 16298 - DNA, 421 bp, Zea mays
  unsure (1)..(421): unsure at all n locations
cttcgaaatgtaatgaagcctttgagcaactgaaagtattattgaccactactatggtattagctcaaccggacattgaaaagccctttgacgtgtattgtgacccatcacgcagcggtctaagctgtgttctaatgcaagaaggtcgagtgatagcttatgcttcaaggcagttgcgccgacatgaggaacattatccaactcatgacctgaagttagctgatgtggttcatgccctcaaaatatggcgtcaatatctgctgggaaatatctgtcacatttatacagaacataaaagcttacgnacatctttacccactcacaattgaatatgatgcacaggagatggttccactaattaagattatgaatcgagatcactatcacccagcaagctaatgaatggagatcctcagtctaa

SEQ ID NO: 16299 - DNA, 378 bp, Zea mays
  unsure (1)..(378): unsure at all n locations
aattattancccatatttcttatcttcgagatcttgagggattcttaaggcttttcttaacaacaagctctgctgaaatatgttaaggttagtatattttaacccatctcaaaaataacaagaatctattgcaagattttaccttgaaattggagtaaaataagctgccgacgatatgttgacgtcggtaagcactaacgtcagactctatcttcgggaaaccaacactcttcgacagagtgccgagtatatttgccccggcgcggtcgcggatacataccataatatcttcgtccactgcaccgaaaagcatatatcccggctgatagccacaagagattccatattctttcagctcctctttgtgcgcctcggaca

SEQ ID NO: 16300 - DNA, 418 bp, Zea mays
  unsure (1)..(418): unsure at all n locations
gcttaactccatcaatntatggattgcttttttgtanactaaaatccctcggcccttctggcagcttcctgacttccatgaatagcaatgggtccttgatccgaaggtatcttcatgcaaaggtaagcaggatgaagaattgcttctaaagcattgagggtgccacgaccaataattgcattgtaagggtattccatgtcaacaatgtcaaacacaacttgctcggttctggtgttgttgatgaagccgaaggtcactggcatggtgatcttgcccaatgctacaatctgtcttcctccgaagccacagagagggtgtgtagcatcatgaatcttgtcttctggctcttgcattngtctgaaggccttagcaaatataatatcagctgcactgcctgtatcaaccaaaacattgtgga

SEQ ID NO: 16301 - DNA, 394 bp, Zea mays
agaccgacataagccgctaccgacgacagcatcttgtctgtagcttattctattctaatttcaaggtaaaaacttttttcgacttttcattattttgaacaacgaaggtgttttctaacgaaggttgcttgtgcatagagtatgctgctgagtaaagctttgagaatgcaacaagatctcgaagataaaaaacatgaagttataattgagggtttagaaagtaaaataaaagatcaagcagcttctcttgaaaagaaggagttcgagcttcagacaatagaaggtttattggcagaagctgaagctaaaattgcaaagttaaatacagagcttctctcgaagtcagaaagcttctaacaggagaagcagaagttaaatgcccactttaagaatg

SEQ ID NO: 16302 - DNA, 323 bp, Zea mays
atatatatcaatcaaggttagaagaaaaagattgagagtgtgtttggaaagaatgtatttttggagtcttcgaggtaaaaccatgatataccatactattttttgtctatagatgtttggctatatggtacaacactctattctagatactataatttttgtagataccacgatagttttggagtaattgaaacttcactcaacctaaagtatatttgtctatgactagcctcgactagccttgcacatgtatacttaatactatggatgaaatacatagtattgctgaaagtgatgcatacattactacagacatgtgatga

SEQ ID NO: 16303 - DNA, 488 bp, Zea mays
  unsure (1)..(488): unsure at all n locations
gcttatgaagattcttcatcccaacatgggctattctgcggtgccagagccaacccatgttagtcttagcaattaagcaagtgtcgagttcagctctatcaaaatctaccaagtatagctgaccctctaacactcccttaaatgctattgaatcatcacttcttctaaagacagtgacacctacattagtgaatagacagttgtagcccatttgacataattgggatacggaaagcaaattgtaatctaatgaatcaacaagaaaaacatttgaaatggaatggttaggagatatagcaattntacccaaacctttgaccaaaccttgatttccatccncgaatgtgatagctcgttggggatctnggnttttctcatatgaggagaacatccttttctcccctgtcatgtggtttgtgcacccgctggcgagtattcaacttgagcccccggatgcataaacctacanaacaattntagttcttgaa

SEQ ID NO: 16304 - DNA, 445 bp, Zea mays
  unsure (1)..(445): unsure at all n locations
agcttccctttaaccccgaaacgcgatactcccttcattggtgaaaccttcaggtagacatagtccccttcatgaaaatacaagggcattcgccgnttgtctgcataacccttctgacgagcttgtgctttcttcatattatgaataattttctgaaccttttcctcggcctccttcaccatatcaggcctaaagaagtacctttccccaggttcagaccaatttagcggagtacgacatcgtcgtccatataaagcttcaaagggtgccatcttgatactttcttgatagctattattatattgaaaactccgcaagggcaaacattcattccatttctgtgagaagtccagaacacatgcccgcagcatatcttcaagtatctgggtcactctctcagtctgtccactggtttgaggatgataggccgaactgtggagcaact

SEQ ID NO: 16305 - DNA, 387 bp, Zea mays
agctcgaagccatggtaagtagcatatgctaataatatacgaactgactcaagcctagctacgggtgcataggtttcaccaaaatccaaaccttcgacttgggagtattctttggccacaagtcgagctttgttccttgtcaccacaccatgctcgtcttgtttgttgcggaagaccaatttggttcctacaacattttgattaggacatggaactaaatgccatacctcattcctagtgaagttgttgagctcctcttgcttcgccaccacccaatccgaatcttgtagtgcttcctctaccctgtgtggctcaatagaggaaacaaaagagtaatgctcacaaaaatgtgcaacacgagatctcgtgggtacccccttatgaatg

SEQ ID NO: 16306 - DNA, 500 bp, Zea mays
  unsure (1)..(500): unsure at all n locations
ttaagtcacctgcggctgcagcttttcaagctgggcttggtccctttttgtagtttgtagttaaagtgctgaagatctaccaaatcttccttcatcagatcacccccgaagccataataaggatggggatttttgtctgggcagtgaaaagtcaagggctagagccaagtgccaagtgcttttgcattatgcacgaacttctatatgagacgaaggccatgggtaaagaacagtaccacaacaacttcggttgttatgggtttatcgctcgccccaacgcaagccacccggtgccaacattttggatgagatggcccggagcttggatggaagaatggttntatgtgaagaatgatttgaaaacgagggaagacattaaggaagtcattatgcgccccatctggtcccgcttcggcatccgaaggtcgaagttgatgacgccaccgaagcgtgtcagaaggccttcaatattgtttgctccttcattgcacaagagatta

SEQ ID NO: 16307 - DNA, 451 bp, Zea mays
  unsure (1)..(451): unsure at all n locations
agcnttgcctcgggtagactaataccataatatgtattcacgcaatgggagtggagagatggcgagagtagcgtgtaccctccatggcaagaggctggacggtggtgtatctgtgctctctgttggcgtgaacgtgatctggtcttaagaaccccggtggcgagttgacatatgcaagagttaagtgctacatatgtcgtgtgattggagatcctcagctgagtataatcgattcggatcgccgtaacttcacggatatgaagacttggtcactgccctacatgtagcaatctagtgaagatgaagggttgataagaaattggctagtataggtcaagtgattgaactatggtagaaagaactctagctgcaggtaacttcacttaacctgacaagtaaacttgattttaatgatcactgtagaagcattttgcaacagagctttgattat

SEQ ID NO: 16308 - DNA, 353 bp, Zea mays
agctttaatgtgcttgaaatagaattaaatgacttattaattttctaacagatttcatgtcaaaacagtgactctaagtgttagagaataatattacaaaattttagaaactggaatggctcaatttggactaaaaatggattttctatggattaaataagtctctatgaattgtttttatattaaaaatccatttctgaatttatttatttgattttcatgagctctggactgggcatcatttactgagaagtgcaggggctccggggtaagaatctccagacacagagaacagcggaggtggacggcgggttattttaacctaaaccgagggactcttatgtaaaacggat

SEQ ID NO: 16309 - DNA, 388 bp, Zea mays
  unsure (1)..(388): unsure at all n locations
agcttgctcggtcagtcgctatttctttattgtctgatcacctttttcatatatagagccatagtgagaggaggaccacatgtttttgacacgtatggtaaaaataagtatgtctaccatatataagggttgcctccctctaccccctctttggccttgcccttgacttctatgttagtatattaaaggaaatcagattgtttcatcttatacatattgtatcctaatgtttctcatggagccttgttgaactatcgctttaccctttattcttggcatctctatcgtaagaacaaatgcaaccacactatatttccatcgtatntttttccttgagtggttngtgtgggagtccctctgttttttatttgcacgtttagttcaaaat

SEQ ID NO: 16310 - DNA, 475 bp, Zea mays
  unsure (1)..(475): unsure at all n locations
agcttgaaatgaggagatggcgctcgttattattagcttccgccaaatcctcaaacaaaggagggggaaagactacaagtcccgctccaagaaggtttgctataaatgtggtaagcccggtcattntattgctaaatgtcctatatcaagtgatagtgaccgaggcgacgacaagaaagggaggagaaaggagaagaagaggtactacaaaaagaagggcggtgatgcccatgtttgtcgggagtgggactccgacgaaagctctagcgacttctccgacgacgaggacgtcgccaacatcgtcgtcaccaagggccttctctttcccaacatcggccacaagtgccttatggccaatgacggcaaatagaaggtaaaatcaagatcctccaccaaatatgaaacctctagtgatgaggatgatgctaaaagtgaggaggaatactngcgcaccctttttgctaacctaaacatg

SEQ ID NO: 16311 - DNA, 438 bp, Zea mays
  unsure (1)..(438): unsure at all n locations
agcttctaagggagagcacattntaggattaataaatggttcatttgagaaagacaggatttgtagcgcatgccacgcagggaagcaagttggagtccatcatccacacaagaacatcatgacgaccgacaggccgcttgagctactccacatggatctattcggcccgattgcttacataagcatcggcgggagtaagtattgtcttgtaatagtggatgattattctcgcttcacttgggtattctttntgcaggaaaaatctcaaacccaagagaccttaaagggattcttatgacgggctcaaaatgagttcggcttaaggatcaagaaaattataagcgataacgggacggagttcaagaactcacaaatagaaggctttcttgaggaggagggcataagcatgagttctcctctcctacacgcccaacaaaa

SEQ ID NO: 16312 - DNA, 411 bp, Zea mays
  unsure (1)..(411): unsure at all n locations
gctttcatgagaacatgagtacgaagttgaatttttagttctgcttatcaccctcagactgatggacagactgaaaggacaaatcaagtcttggaagatatgttgagagcatgtgcccttcagcatggacgaagttgggataagagtctgccttatgctgagttctcgtataataatagttaccaggccagcctgaagatgtcaccttttgaaggcttatatgggaggaagtgcatgacttcttngtattgggatcagactggagaaagacagttctttgggcctgaattgattcaagaagcagaagaacaagtccgtataattcgagagaatttgagagtggctcaaaccaggcaaaagagctatgcttgatatagaaggagaccactggaatttgaagaggggagatat

SEQ ID NO: 16313 - DNA, 509 bp, Zea mays
  unsure (1)..(509): unsure at all n locations
ctcgtcccggatcttaagcaccgcggctgcagctaaccttgaacgaggataagatacctttgttccaaaggtggatggtccttaagcctctntgaaatccttaagggaaaatgcttaagatgtttataacatgctttcataagtgcataaactgtcatgagcatcactctttattatgacacattgcacttcacagtttctatgatatagatatgttctcattaacctaattacgtgcacttagcatttaaggccaaaatctgtattcctctcaaggcacatatttagggggagcaatctatattatatagaactgtataagcttaattgacatatccttttaaccatgtctctttcctttggtacatttgcatatttcctatctctcttgtgccaaggctaagactaatatgcttccatgagtatcttgtgtattaagtcttagatngaaagggaaatggagtattcggcanagacatncgcttcactctacaccatcgatattatct

SEQ ID NO: 16314 - DNA, 372 bp, Zea mays
  unsure (1)..(372): unsure at all n locations
gcttatgaagattcttcatcccaacatgggctagtcggttatgccagaccaacccatattagtcttagcaattaagcaagtatcaatagggctgggcatgcagntttttttttttgaaatttcggttcggtttttcggttttctagacattagaaaccaatcggttttctagaaaatgaaaaccgagaacttcagtttcggttttttacttcgggtttttggtaaaaaccgaataccaaacttatactcaaaacaacacatacaacaagtttatatgatagattacacataattttaaaaagtaaaaattatataggtacaaatatttagagatacatcatacatcacatantaaatagtgaataacaattt

SEQ ID NO: 16315 - DNA, 409 bp, Zea mays
  unsure (1)..(409): unsure at all n locations
gcaagcttcttcagctgctgaaccgaaagatactgctctctctacgcataagattgaagagtcgtctgcaatgccgaaggcaccttctactgagctaattgaaacgaatgttgacgaagataaggctgaaaggtctaaaactgaagaagcaaccaggatgctcaagattctaagttcttcaacagaagccacaatgctgcaggcagaaaaaagttctgccataacccctagaagaaaaaggatggtaaatgtattagatattntggaaacaaccgattccaaatgccctgctcccatgaagaaaggtgccgaagctgtcaaagcacaaactgatgttgatgcttagcagatagaagttgaagctgcaacgattgaagctgaaatagatactgggccttaaagtctgctg

SEQ ID NO: 16316 - DNA, 307 bp, Zea mays
gctggatggaaccatggaggtcagagaacattcctgctttggagagcgcatgtgctcagccgaactcagactaccagtcggacacgcgctgactgtgaagcagagcagtatgaaagaacaggctgacctttgaacccttccgatgtttctgctgacgccagtgtgagtggagatacaaacgagatctctccgtggaggcacgatgttccaaagcgctggacaggcgttctgctctgttctttgccgtttatcttgaatatggaccgttgagaagacagcattcttcatgtggctatttttgtgacac

SEQ ID NO: 16317 - DNA, 416 bp, Zea mays
agcttcagctccatctatgatatggattgtctttgagtcagtccaattgccttcggcccttctggcagcttgctgacttccatggatagcgatgggtccttgatccgaatgtatcttcatgcaaagataggcatgatgaataattgcttcgaaagcattgagggtgccacgaccaataattgcattgtaagggtattccatgtcaacaatgtcaaacacaacttgctcagttctagtgttgttgatgaacccgaaggtcactgacatggtgatcttgcccagtgctacaatctgtcttcctccgaagccacagagaggatgtgtagcatcatgaatcttatcttctggctcttgcatttgtctgaacgccttagcatatatgatgtcagctgcactggctatgtcaaccaagacat

SEQ ID NO: 16318 - DNA, 434 bp, Zea mays
  unsure (1)..(434): unsure at all n locations
agcttctaagggagaacacgtgatangtctaacttatgtaactttcgaaaaagatagaccttgtgtagctggtcaagcaggtaaacaggtaggaagctcccataatgccaaanatgtgatgacaacatcaagacccctggagttacttcatatggacctcttcggacctgtcacctatctaagtataggaggaagtaagtatggtcttgttataagtgatgaattttcccgcttcacttgggtattctttntgcaggataaatttgaaacccaagggaccctcaagcgcttcctaaggagagctcaaaatgagtttgagctcaaggtgaanaagataaggagcgaaaatgggtccgagttcaagaaccttcaagtggaggagtatcatgaggaggaangaatcaagcacgagttcttcgcttcctacacaccac

SEQ ID NO: 16319 - DNA, 349 bp, Zea mays
  unsure (1)..(349): unsure at all n locations
agcttgctnntgaaataaatgtaagtttatgtaatttgcttccgcattntctttatctccgatgttctgtaatgtctgcaagacgggtgaaacgttcctggtaaggtaatgaaagataccgaacttgtcaagtagttcaggggcacctgcaaggttgtctgaggtctgttggacaaggacgactgtaggtgggcctaattacttgggaggttccgtcacactgccggtgaactgggtgtcngtgtcggtgatgacggagtttggaaccccatagcgatggatgatgttggtgaagaatgccaccggctgttcagacctgatgcttgttcangggtcggacctcgatcca

SEQ ID NO: 16320 - DNA, 375 bp, Zea mays
agcttaagctccatagagagataacacagtttgttgttgtaaagattaagattgctgttagtgacctgtgatttgttcaccccagagagaaatttaacagtcatagttgtcactataagcatgtgtaagtttgctaaaaaaagttgaaatcagatgctaatgtaaccctaatttgcactaccctaatttgcctgacactacgtggccccaattatattctaatttgcctgacactacgtggccgacgattgagaaacttgtgtattttattcactacaagaagcaggccagggggacaaaattgatgcagcattcactcgtcaatcccatattctagtattccccggagcggtagtcgatggtgcataatttaat

SEQ ID NO: 16321 - DNA, 461 bp, Zea mays
  unsure (1)..(461): unsure at all n locations
agctntatcacatggatgtgaagagtgccttcctaaatggaccgatcaaggaagaggtctatgttgagcaacctcccggctttgaagatagtgagtaccctaaccatgtttacaaactctctaaggcgctttatgggctcaaacaagccccaagagcatggtatgaatgcctaagagattttcttatcactaatggcttcaaagtcggaaaggccgatcctacttttattactanaactcttgacaatgatttgtttgtatgccaaatttatgttgatgatatcatatttgggtctactaacgaatctacatgtgaagagtttagtaggatcatgacacataaattcgagatgtctatgatggnggagatgaagtatttcttatgatttcaagaaagcaactccaagagggcaccttcattagccaaacgaagtgtactcaagacattctaaacaagtttg

SEQ ID NO: 16322 - DNA, 354 bp, Zea mays
  unsure (1)..(354): unsure at all n locations
agcttggactgagccgtgagcgttcgtgactacaccttgatggacttggactgcgcctccagcgcggcagtgatgcttggatccgacgcacccgccatcttcgctcgtcgagtgtagtagcacagcgccgccagatcaggaactgaactgacctctgataccacttgtcacgcaccttcgtcgtgaatgtcaccggatatgaggaagagagcangagaagtccgaggaagaagaacgaaagaaatggacgaatattgttctgttattcgacaactctattagcagcatcccatcgagtatttgtacaacaatatatttgacacgacccacgggccattagtcaagtcattcatt

SEQ ID NO: 16323 - DNA, 499 bp, Zea mays
  unsure (1)..(499): unsure at all n locations
ctgcagcttctcagcttcttgacccctaggcatccgaatgtaacaatatgtaccactggaggttatgaagctggttnttggctcatcttccttcttcatccagatntgatggtagcctgaataacaatctctagtagactcatgagctctgacgaagctgctgcatccactagagaatctattcttggtaatgggaactcatcctttggacaagccttattgagatcagtaaaatcaatgcacattctccatttaccattggccttcttcaccataacagtgttagctagccattccgggtattntacttctctgatgactccagcactaagaagtcttttcacttcattccgagcaccttcgtccttgtcatcagacantttccgaagcctctggtttctgggtctgaaggatggatcgacattgagcgaatattcaatgacatccctggtggcaccacagagatcgttggctgaccatgcaataacatctnttgtgt

SEQ ID NO: 16324 - DNA, 480 bp, Zea mays
agcttctacagggagagcacattgtggactaacatatgttcattctgagaaagacaggattggtagcgcatgtcaagcggggaaacaagttggtgctcatcatccacgcaagaacatcatgacgactgacaggccactcgagctccttcacatggacctattcggcctgatagcttacataagcatcggcgggagtaagcactggttagttattgtggatgattattctcacttcacttgggtattctttttgcaggataaatctcagacccaagatactttgaaaggattcttgagacgagctcaaaatgagttcggcttaaggatcaagaagataagaagcgatgacgggacggagttcaagaactctcaaggtgaaggcttgcttgaggataatggcatcaagcatgagttatcttctccctacacgccacaacagaatggtgtggtggagaggaagaatagaactctatttgacat

SEQ ID NO: 16325 - DNA, 412 bp, Zea mays
  unsure (1)..(412): unsure at all n locations
gcttaccctcactgataacattaacctatctattgtttacagtgctgngttatagctacacgacctagataattcagtaactgttcatgtggatcaactacatgacccagacaaaaactttgaagcccataaagattcgttatttttaaatttttaaaatcctgaaattcatatagttgtgctcgtcaatttacttcaaagtatggaataaatcctgaaaacatactatagatcagtaatagcctaaaattaattttcaataattttgcaatccaatgttgcaaaaatattttttcaggaagacggaaacaagaaaaatatgagttttgaattgcagtacaaataaatttatgagaacagagataatctcagaaaaaactagtttagaccctacttactatcactacataat

SEQ ID NO: 16326 - DNA, 412 bp, Zea mays
  unsure (1)..(412): unsure at all n locations
agcttacccatgacgaggtatgtggccagatnaatggtcctatatcagcaggccaacaatcggtacggtccttaaacgactcagacggagacactacatcgagactcctttctcgtgcaagtcacccgcccggtctcagctttataatttaaacccaaagtttggtacctggcagaggtacatcttttccgatgttgaatccatcaaggccctgatggattcaccatcaagttttatttttcanaacttcccatccaatctgtagcatcacttttgtttaaaacaaaacattttgtttntctaaagcaaggctaagcatncaaaaaatcttttgaaaacgatgatcaaggaaggtgatcaaattcaaggaaggtagtgcaggaaatgtttagcaatcaactctatacctaat

SEQ ID NO: 16327 - DNA, 392 bp, Zea mays
  unsure (1)..(392): unsure at all n locations
gcttctgccatgatgtgatagtccctgaccgaatataatagttccatagttgtgcgacactcttgaccgccatgacgaaggatttcgccatgactgcagtgttgcccccatatgaagatatggttgcctcgcagctcattagaaactgcttcgagtcagagtgcccatcgtacataaggagctggggtggcttgtatgatgggtgccatggggtagcctgcaattctgctgctagaggagaatcatcatcaaaagcaaaattgccacgatggaaatcatcataccattcgtcatcattgtaggaatcgtcttgacgaagctctctgtgttgagtccttcggtcttgttcatcttgngtagatgacgcatttcctctgcagcctcatcaatct

SEQ ID NO: 16328 - DNA, 458 bp, Zea mays
  unsure (1)..(458): unsure at all n locations
tatatatacacagagcaccattgcacgatgggccccacaatacagaacatctcgctattctagcgaagggaacgtgtttatcggaccttcggcttgtaatacccacaattgcaaattatacgaagagataatgttcttatgtgtattgactgaacctactatcacatgtgaatagacaccatccaacaggggttaaataaccaaagacacctacataaaacatgcatcatgctgagtttttacttgattgtgcatttgtggataataaaataaatgtgtcattaataatatattaatggacccatggaatgtaacctataatttgaaaacaaaaccatgaacatagaggagagacagaaatattattcaatacaaaataatattataattaaataacttcaccacatgatggtatgaccaaatngcatatgtaatatgaatgtaaattggcacttaag

SEQ ID NO: 16329 - DNA, 421 bp, Zea mays
  unsure (1)..(421): unsure at all n locations
agcttcggaggaaggttcagcactcaacctatgatattgttctatntatcctggggggaggataatggacacatgtaacaaggacgtgccatgtcactatccacaagcagaatgagatagctgaagccgaagtacgatagaatcagccgaagcaagtcttgcatactgcctcatgctattcgccatatattcctgactatgtgggcaaccagtaacccacgacatcagttgctttagcatgtcattctcaagctgcatgggcttagttaccaccaccaccattggcacctaccttggctcataatcagcagccagataggcatcaccaagtgcaacaacaacgtgacactcaagatgagtacgaagctcgcacagtcaacaacactatgcccaaatctagacatatttactaaagcaacac

SEQ ID NO: 16330 - DNA, 381 bp, Zea mays
  unsure (1)..(381): unsure at all n locations
agctttagtgagggtgttgtccacatactataatttattcacctttaggtagcgactattatgcaatgaggctttatatgcaaacgtgtaaataaatcttctgatccatttgatcgtgggtatatcacatttagggtatgtttgtttccttcttaattatatactagttaagtgcccgtgcgttgcaacggcacatagaaacagactttcgaatgtaattatcgcttccttctttgntagaccaatacaaacaaagtctatggctagataccaagtatgaaaaacaaagcatggtggtgatatcgaattctaagctgttagcattgttcagagtgcgagggcgaatccctcgcanaatagtatacgaatatacactcaatc

SEQ ID NO: 16331 - DNA, 363 bp, Zea mays
  unsure (1)..(363): unsure at all n locations
agcttcggctccatctatgttataaatngcattttaatctgtccagtttctttcggccttcctagcagcttcttgactaccaggaacaacaatgggcccttgnttcgaaggtatcttcatgcataattatgctggatgaagtattgcttcgaaagcattaagtgttccacgaccaatgattgcattgtaggggtactccatgtcaactatgtcaaacacaacctgctcagtccttgtattgtgaacaaagccgaaggttactggcattgtgattatgccaagtgctacaatatgcctttcttcgaagccacataagggatgtgtagcatcatgaatcttatcttctagctcttgcatctgtct

SEQ ID NO: 16332 - DNA, 469 bp, Zea mays
  unsure (1)..(469): unsure at all n locations
agcttgtnccattcgaaacatatattgacaacgatattatactatgtggcgcgttaccgacaacaatttcacaacaacaaaacaagcaatgtgattattattgatatttcgaatttattgctttgaaaattaataaatacaattttttngtatcatttatatagtgtcaaatgagaagaaaacaaagaaaaatgataaagaaatggaaaatgtgaatctgttaacactgtagctttatgggacggaatttaaaggacgctgctggagacggagaatatatagaggacacaatctttttgagtgttntgtanaggacagagaatattcctttatgggacgacaattaggggacgctgctggagacagtctaaggtcatacaacactgangactccctcgtctaaaactctaacatgtagtagattggttgttcacttgtgtnttgatagactcctgatactatgtgtaaa

SEQ ID NO: 16333 - DNA, 502 bp, Zea mays
  unsure (1)..(502): unsure at all n locations
agctntcaattngagagttcttgaactccgttccattgtcgcttcttattttcttgatccttaagccgaactcattttgagctcgtctcaagaatccctttaaggtctcttgggtttgagattcttcctgtaaaaagaatacccaagtgaagcgagaataatcatccacaataactagacagtacttactcccgccgatgcttatgtaagcgatcgggccgaatagatccatgtgtaggagctccagtggcctgtcagtcgtcattatgttcttgtgtggatgatgagtgccaacttgcttccctgcttgacatgcgctacaaatcctgtctttctcanaatgaacatttggtagtcctaaaatgtgttctccctttagaagcttgtgaagattcttcattccaacatgggctagtcgccggtgccaaagccaacccaggttagtcttagcaactaagcaangtgtgagttcagctctttcanaatctaccaagtatagctg

SEQ ID NO: 16334 - DNA, 344 bp, Zea mays
  unsure (1)..(344): unsure at all n locations
agcttgcttacttggtaagatgaccaaggcgcctttcacgggtttaccggagaggacattagatttattggaactcatacatactgatgtgtgcggaccaatgagtacgacagctaggggaggattccaatacttcataaccttcactgatgattntagtagatatgggtatgtctacttaatgaaacacaagtctgaatccttagaaaagttcaaagagtttcagaatgaagtagaaaatcagcgtggcaagaaaattaaagcactgcgatcagatcgtggtggtgaatatttgagtcatgagtttagcaatcatctaaagagttgtggaatttgtccacagc

SEQ ID NO: 16335 - DNA, 469 bp, Zea mays
  unsure (1)..(469): unsure at all n locations
agtcacctgcggcatgcaagcttctacgctaagtggganattntactccgatgtactgctgataggcggatgagaagtcgccgacgaagccattagaagaaaagaaaaggaatctcatggtgcttcggaagaggcaagaagggctgaagaagctgccaagcgggctaggctaataggtatacatttgttgtggtctagcttcataatcagttntagcttcagaactaacaagcatatacttcggtgcaactgaactatctccgcctttggagccatacgatccagaagccgacccgttcctgaaggaagcactcgagactatcaaaattgccaatgaagctgttgacgaagctgtcaataagctgttaaacaaagcttccgagaaggtcctgaaggaagaactagaactttttaattttggctagttaatatctntgaacatgatccctagtcttgcaagaaaacactt

SEQ ID NO: 16336 - DNA, 436 bp, Zea mays
  unsure (1)..(436): unsure at all n locations
gctatcctctctaaatctggagatcctatttgttatttgtgtaatctgaacacctttntggactgtcttataagtggcttctatatttcactgcacatttcagcaaatggaaccagcgaaacagataaaggtcatgaaaggattctagaaacgatcaaacagttggacatgacggtaataacattgacactgcttgattttgttatgttacttgaaagtttaaagatctcttgtgtcatataatttatgctatagacatgaatcaactagacaatgtaaaacattaaaggcactgtaaaacataatgagcactatgtatcanngtttgatccagagtagaaaatggtaccgtgtggtgtatcagcaatttcattgcttaacaggctattcagatacttattaacatctatactatgtgagcttacataatatttat

SEQ ID NO: 16337 - DNA, 441 bp, Zea mays
gcttacctcgacctgagaggaaagcttatcttatgtgttaagagggtgaagaataattctaggggtttccttgagttcctttgatggtgtgaagagggtgaagattaattttgggggtttccttgagttcctttgatcttaaagaaaaatgtgttaatttggtgataatacttatcatatgcttcttgttgtattatatggtgataatgcaaaattagtgcttccgctgatatgaatcacatggtatctactgtgtttatcctataatagatattcatgtggttctggtgctttaaatcgctttaaattggtatcttaatggtgaatagtggtaggttgatattcctgtgtatatccattcaattggtgttaactctgactctgtgtcattgtgtattatacgcatcacaagttaattattgacacaatgcattccacaag

SEQ ID NO: 16338 - DNA, 427 bp, Zea mays
  unsure (1)..(427): unsure at all n locations
tcttaagtcaccgcggctgcagcttctccctaaatgtgatcatgcctctgttttcaacccaagcctatagccaatgggtagtagtgaaaatcacctataaaggagacatgtnaagttattttgagaaaacatatcctttctactaagccagagtgacaaatagatggttgctactcctagcagggctaattttttaattttttgtcgaagtatgaaagccaatttccaaacatanttgcagtggaagtaggttttaggattcctaatgcccaaacactaggcttcaatccatgcgaacaaattggcattcaagaaacaagtgtgtgttggttcattgtctttgacataagtatatgctctactatccttccaattacgtttaaccatgttatctgtggtgaagatcactctcctacgaagataccat

SEQ ID NO: 16339 - DNA, 501 bp, Zea mays
  unsure (1)..(501): unsure at all n locations
atcctcagagtcacctgcggctgcagcttcgcttggtaagattatggcatctttacagtgcaatagcaatgaatggtgtggtaactntacacctacctgtctgtttatatagtgctgcaggtaagaaggtgaatcgtcaggatttttacaccaggcaaacagttgctcgcacccgctgcgcggtgggccgcaaaaaccaaatagtgaacctgcactgtgggaccgctctgcgctcagaaaatgtatcgtttctcgacaacaagctcagggaaggtgtttttcggaccttcggcttcctgaatcctaagagactnttttcacagatcaagctcgttacgaaaaacgatctagcaccgcgaaggggctactggttngaccatgcttcgtcgccgaaggtcctgcanaaagaaacaacttctgttgaagctgttcgtacgtggtgccgaaggtgcatttcgtgaagctcggagtacacacgacttaagataaatgcctttaatc

SEQ ID NO: 16340 - DNA, 469 bp, Zea mays
  unsure (1)..(469): unsure at all n locations
agctntaagcactgtatgcaccaaatcacttctctttctcaagacaagcttccctctcaagcaaggtaagctntaacaataacttctccccttggacatcaaacacaaaaatatcatacaccacaattaaacaacatgagaatgatgtcaagggactaatatgacatgaagaaggaatatgcatacaaaattactaacttactccccattactcctaagataagcaattcacactctagagaggatctaggtacaaggataaatgccacaagtgatttacctccctttgtaccttttcattgataccagatgaagactcatctttattgacaccaattgagagtcttctcacaagagactccttnggtgcctaatcctccatcttgatatacacttgtaacttaaccaacaagctaaaacaagttataacactaatggcacaagagaatattcatatagctagtgatca

SEQ ID NO: 16341 - DNA, 453 bp, Zea mays
  unsure (1)..(453): unsure at all n locations
gcttcatgactgccagttcgacctctggtagcattactacgtggctgcatgagccgctatgtatgacaagctccgacgcagccgccgcttggatattgtccagagtggctgcaccgcgttgtccatcgtcaagcaagggggcctcattggtgttgccaacgttggcgactctcagggagaggagtagcgcattcggtgggcaacggccaggtgtactaccttgccgatgagcccgaggtgcacttcgtctggcagcccagccaagagtcatcggtactcgtcatgtagcgtgcattcgacgactactatatcatggactgtggcatcatctcgacgctggagatgacgcagaggaggatcgacagcaacgatcagttcgtcatcctcgcaccgntgggggtagctttgtgctggtctaccttaattctcttcgcaacacacacacttgttttt

SEQ ID NO: 16342 - DNA, 435 bp, Zea mays
agcttatccacggcggcgtacaccagtgttatcttcttacccgagaacaacgtggaccggctgccgcacgaatcacggcggcaatcggtcgccggcggtgaagttgccgcgctggcggcctgatccactcgggttactgtaccatcaaaagttcagattcagtttcttgctacatgtctgacagggcaacttcagaactctttttctccagattttctacggcaacgtgatccacactctgcagcaaatttgtagagtaatataccatctacacaatttgtatgggaatcatacccaaacttgcactggatcatgtttaaatccaagttcaaagttagctctggttccctgaagttctgaatttcagaattccaccagcctgacagtccaactttgggcttacttatctctggatgtttctaacaagtgagctta

SEQ ID NO: 16343 - DNA, 453 bp, Zea mays
  unsure (1)..(453): unsure at all n locations
gctngaccttgtaatgaggataagctgactttattccaaaggtggatggtccttaagtctctttgaaatccttaagggaaaaatgcttaaaaatgccatgaaaatattcataacatgctttcgtaagtgcataaactgtcatgagcatcacacctatactatgacacaatgcacttcacattctgtatggtatagatatgttctcattaacctcattatgtgcaattggcatttcaaggccaaaatatgtattcctatcaaggcacatatttagggggagcaatctatattatatagaactatgatcatgcttaattgacatatcttttgatcatatctctttcattttggtacaaatgcatatatcttattattctcgtaccatgactacgactaatatatntccaagtatatttctatactaagtcgtagattgaaagggaaatggagtct

SEQ ID NO: 16344 - DNA, 342 bp, Zea mays
  unsure (1)..(342): unsure at all n locations
agcttcgcgagagagaggtgtggcctgaagtgagtcgtctgagttagcgtcctctgcctttntcccctctctccgtatgtncggggaaggccctgngcatccccttttatagatacaaggggatggtccagctgtacatatgggggtgtagctatgtgctaacgtgattggcggagaagtgcttgagccctgtagaagcgtagctggcggtgcggccatgggtcctgccgacgtttctttgccttcgtagagagctgagaacaatcgacatcatggacgcatgcagggaaccatcattacctgttgctggagtaatctagatgtgacaccggtcttgttcct

SEQ ID NO: 16345 - DNA, 419 bp, Zea mays
  unsure (1)..(419): unsure at all n locations
agcttgtggctatntagtgttgaatttacaggatcacctattcatccncttctaggtgctctcaattagtcctcatttccattnttcccaaagaanaaataaactaatttcccttaggaaaataaaaatcccttagaaaaaattgtgttcccaaactagtcctaaaaccttgtcacacccgggttttaggggcacaaagacccgggcgcgaacataatcaccaggtgtgctgggaccaagtctcacacatatgatgattcatggcacaggatcgaatgtcacatctttactacacatcgggagttctgtacaaaataaataaataattacattataaggagacaacggtccagcaacccaaagttgactgggagacgacgacctagatctctcacgaactcatcgcagcatcctccatg

SEQ ID NO: 16346 - DNA, 462 bp, Zea mays
  unsure (1)..(462): unsure at all n locations
gctattgaagggccttcatctgctcctgggtcatactaccccgctcctgctgaagctaagggagagtcngacgaagtgtcgaaaccgaaggtaacaacgaagtagcagaaaaccaagacggtcgaagtgccgaagcgtcctgccgaagctagtgaaaaacggccgaagaaccagaattacggaaatcggcagaacgaccaaaaactctaagcccgccacaagagtaggagctgccaaaggtgtcaaaaattcccacaataactccaaaaatgaggagaatggccagcgtactaaacgctgttatggaatcttcaaaagtacaaaccctgcttcagcgcatgatagaaagggtgaaatcccaaagaaatctagtgaagctggcataacactagatacttgcgaagctggccagctcctattgaatatatgcttaggatctatcctctaacttgaaaaagaaga

SEQ ID NO: 16347 - DNA, 408 bp, Zea mays
  unsure (1)..(408): unsure at all n locations
gcaagcttatgaagattcttcatcccaacatgtgctagtcagtggtgccagagccagcccatgttagtcttagcaattaagcaagtgtcgagttcagctctatcaaaatctaccaagtatagctgaccctctaacactcccttaaatgctatngaatcatcactccttctaaagacagtgacacctacatcagtaaatagacagttgtagcccattttgcataattgagaaacggaaagcaaattgtaatctaatgaatctacaagaaaaacattggaaatagaatgggtaggtgatatagcaattttacccaatcctttgaccaaaccttgatttccatccctgaatgtgatagctcgttggggatcttgggttttctcataggaggagaacatcttcttcttccct

SEQ ID NO: 16348 - DNA, 436 bp, Zea mays
  unsure (1)..(436): unsure at all n locations
gcttgcaatgaggagatggcgctcgtcatctttatcttccgccaaatcctcaaacaaaggaaggggaaagactacaagtcccgctccaagaaggtttgctacaagtgcggtaagcccggtcattntattgctaaatgtcctatatctagtgacagtgaccgaggtgacgacaagaaggggagacgaaaggaaaagaagaggtattacaagaagaagggcggcgatgcccatatttgtcgcgagtgggactccgacgagagctcaagcgacttctccgacgacgaggacgccgccaacatcgccgtcaccaagggactcctcttccccaacgtcggccacaagtgcctcatggcataggacggcaaaaagaangtaaatctaaatccttcactaatatgaatctctagtgatgacatgctagtgataggaagatatt

SEQ ID NO: 16349 - DNA, 416 bp, Zea mays
  unsure (1)..(416): unsure at all n locations
agcttaatccagagaaatgtgtctttagagtacttgcatgaanattgctcggattcattatcaggcaccgaggaatngaagctaacccagaanagatcgaggctatcatgaggatggaagcactgcggtcacagaagaaagtgcaaagacttactggatgcatggcagctntaagcaggttcatatcaaggttaggagaaaaaggcctatcgttctacaagttgctcaagaaggtggacaagttccagtggacctcagaagctcaggaagcccttgatgcactaaagaaattcctgacaacaccgccggtattaaagccgccaagccaagccacaccgagtcaaccgccagaagaatctgtgttgtacatctcttgcacgactcacgtggtgagcaccgcattggtagtcgagcga

SEQ ID NO: 16350 - DNA, 450 bp, Zea mays
  unsure (1)..(450): unsure at all n locations
agctntaaccnctgcgagaccttntcccgtttctttctaaccataatgaatgcgatatcgaatgtcatacttgatgcatattcactttatctgttcccttgtatgatgtactgtttgtttcccaatttgaatggatgaatgtatgtatgcttgcaatcgcatagagaacgatccggtcgaagagcccgaggagctcgcaggagaagcccctgagcagcagtcgtttggtggaggcaagtgtcctttgacctatctctgtcctattcattctttaattcacccnccgcattacacctttatacctaaggattgactagcttttgttatccatgtccttgtttacctatntgggttggatatttattgttagcttatgctattgctcaactctaataatgaacatgatgagattatctatgatacgcctgttcccttctcttatataatgta

SEQ ID NO: 16351 - DNA, 446 bp, Zea mays
agcttcggagtcaaactgcgttccattatctacagtgattgccttcggtaccccgaagcgacagacaatattctgccagaaaaacttttggacattggccgaagttattgtggccaatggcttcgcctcaatccacttggaaaaatactccacagccactataacatattttagattcccttgagccggtggtaatggacccaacaagtcaaggccccacctttgcaatggccagatgggttgtatcagctgtgtcaaagacgaaggttgtttttgatctcttgcacatttctgacaaccttcgcacttttgcactaactccgccgcatccgaagctgccttcggccaataaaacccttggcggaaaactttccaagtaatggcctggatccgatgtgggatccacacaggcctgcatgtatctctttcatcaactctataccttc

SEQ ID NO: 16352 - DNA, 474 bp, Zea mays
  unsure (1)..(474): unsure at all n locations
agcttgaagctagatatggttatgcagtcatgttttctactctagagttcctatgatgggtggaaatgcccaaaacctttgacccatttgatctctcctagtcatgtgccacgcccatggcacttcccaccaatcctaaatgcaatagtgggagatgtgtgattacaccgagtccttatcgatggtgacaatagcctcaacatcctctttactaaaacttacatgaagatttgactcttggagaaatcaatgaagtcgagcctgacacanttttatgaaattattctatgaaattcaacaactcctctatggaagatcaccctatntgtcaccttcggaactaaataaagtttccgaacagagttcctacatttcnaaagtggtggcatcaatgtgactcaccatgctatcatttgaagacccaggctttgcaagntcatggcaatacactactacatctatctagtactcaag

SEQ ID NO: 16353 - DNA, 394 bp, Zea mays
gctttccttttaccccaaaacgtgatacacccttcattagtgaaactttcaggtagatataatctccaactagaaagtacaagggtatccggcgtttgtctgtgtaactcttctgacgagcttgagcttctttcaaattatgaattattccgtgaactttttcttctgtctcctttaccatatcaggcctaaagaaattcttttacctggtttagatcagtttaacggagtacggcaccgtcgtccgtataaagcttcgaagggtgccatcttaatgctttcttgatagctattatttatatgagaactccgctatggtaaacaatcatcccatttctgtgggaatccataacacaggctcgcaacatatcttcaagtatttgattaccctctc

SEQ ID NO: 16354 - DNA, 368 bp, Zea mays
  unsure (1)..(368): unsure at all n locations
agcttgccttcgcttcagtctattatccttagtctaacgaggtcgtggagcgtgccaatgggaaaatcttcacagctgtcaagaagatgctcctcgatgaanaaaaggcagatggaccgacttgttaccggaggcagtctgggcgctaaacacaaccgagtgcagggcgaccgggttcactcctttccgccttctatacggatcggaggcaatgaccccgcaagaaataaagcatgggtctccgcgcacagctccgtcagccgcccctgacgtggatgagccaacctccaaagatctcattgacggagaccgggtcttcgccctgcaggccttanacaaataccaagcccagaccaaagcatggcgcg

SEQ ID NO: 16355 - DNA, 369 bp, Zea mays
  unsure (1)..(369): unsure at all n locations
gcttatgctcgaagggtcctttaccttcgagacctanctctcagtgaccaaacgacattgtcatagaagcaaagatcaaagggcttcgccaaggtccggtggcctagtattttgcaaggaaaccacgtcactctctggagcatctactataaaaatggatgagtacatcagggaagacaatgactttcggcagcacctgcaagaggcacaaaagtatgtggaagtgactaaggcttcacaggaagatgtcaccctagacatgtgtgaaacattcaatacccaagccaacattatgacaatatgaatcaatctcaagaacaacacactcaatctcaagacttgactcaatcgtcaatagggcaacaacct

SEQ ID NO: 16356 - DNA, 314 bp, Zea mays
caaacaaagagagcaaaagacaacacaaaggcagccttggtctggcgcaccggactgtccggtgtgccaccggacagtgtccggtgcaccagggagttccagtttaaacttgccaccttcgggagattgggaggccgctccgctataattcaccagattgtccggtgtagcaccgaactgtctggtgtgccaagcggagcaacaactccaagcgccaacgatcgtctgcaacggtacatgaacagtgaacagtgttcaatgcgcgcagaagtcagagcaagcgtcagaaggcgcaccgtacagtgaacagtgac

SEQ ID NO: 16357 - DNA, 273 bp, Zea mays
  unsure (1)..(273): unsure at all n locations
ctgcagcttgacaatgaagagatggcgctcgcatcaatagctttctgccaatcctcaaacaaaggagagggaaagattacaagtcccgctccaagaagggttgctacaagtgtggtaagcccgggcattntattgcttaatgtcctatatttaatgacagtgaccgaggcgatgactagaagggaagaagaaaggagaataagaggtgctaccagaagaagggcggcgatgcccatgtttgtctggaatgggattcctacgatagctcaagcg

SEQ ID NO: 16358 - DNA, 365 bp, Zea mays
  unsure (1)..(365): unsure at all n locations
tgaactttattcttatntcgtcaacgtaatatgtagttctaaagtaatgcaattttttattctctctaagaactgaatatcttttatttgcttggttatgtgttcaatgaatcttttttcataactgaaacgtcgtatnttagttacaactaaaatttgtaaaagaaaaatatgatgtggcgctaaggcagctgaaggtggaattgtgtagaagaacatacgatagataaaggctaacaatgatgaatataaatcagccgacatcaatgcggcagtagatatagcctgccagggcataatcagtctaatggtgtacgtctgctacacatggctgcgtataagaagaggtaaaactatctgtctct

SEQ ID NO: 16359 - DNA, 413 bp, Zea mays
  unsure (1)..(413): unsure at all n locations
agcttcatgcaactgctgccagaaatgatatgtgaactgcgttcctctgtctgacactatcttctttggcacaccatgaagacaaaagatccgagacatatacaattctgccaatactgcactggtgtagttggtcttgacaggtatgaagtgggctgacttggtcaagcggtccaccactacccaaatagaatcgtagccggctcgagtgcgaagcaatccgactatgaaatccataccaatttcatcccatttccactgagggatctgcaacggttgcaacaatccagcacgtctctggtgctctgccttaattcttcggcaactatcgcacatagccacatgctctgcgatttccctcttcattccgtaccaccagaatntcttcttcagatcctgatacatcttctcac

SEQ ID NO: 16360 - DNA, 465 bp, Zea mays
  unsure (1)..(465): unsure at all n locations
agcttatgttgccttttacaacgtggngtttatgttatcaaaacttggatattctgggagggatttcttggtttacaagaaacgatgtggcattgaacgatccaggctagtggcacttgattacatccaccaagaagaggccatgatatctgataatgtggatgagagaaaaataagttttgtgctcacaaaagatccacccagtgatctagaggtaagcataactcccatcaagcgtccaaggcagcggacaaatgttgatgaagaaaatacagaagtgttgattgatgcatataaggagtggcttgcaatactacaacatgataatccagaaacgggtaagttaagatgtcaaactcattacactaaatgcatgatatgttatactctccattgttaaacttacatattggttaagtgcagatttaatggatgactttagggaggatacgatcaanacatata

SEQ ID NO: 16361 - DNA, 384 bp, Zea mays
  unsure (1)..(384): unsure at all n locations
agctngaaggccaagtcanaaagcaagctccaacatactttgtatccgaagttcttagtttatcaaagaaaaattatacagaattggagaaggtgttgtatgctgctttaatggcctccaggaagcttcggcactattttcaggcatacaatatagttgttccttcttcacaaccgttgaaggatattatgagaaatatagaagctactggaagggttggaaaatgggctgcggagctcaatgaattctgtattgattatgtgcatagatcttcgattcaatctcaagcattggcagacttcattgctgactggacgccangggctcangaagaagaaacgaataaagatgctgaagtgtggacaagtatttgcgatggatctt

SEQ ID NO: 16362 - DNA, 423 bp, Zea mays
  unsure (1)..(423): unsure at all n locations
agcttaactcatacagagcctaacaaaatatgtttattcgtatttgcacaaatatttctcaagttatgcattntacaagttctctgtagaattaaaattaaattttctaaatgaattagggaattgcccatttagcactggggtccctgggttgtcttcctttctttaattacacggtggtcttcggggcactattctcctaagtcaagggctttgtctcacgatatttggtctggctctaatctgatctctctntctcgatactgtgaattgaaatcctttcattggttaacacttaaccctagcacggccatgcatttcttgatccaatcactcgaggggcccagagatatctctctcacgaagagactannaattcatcttgactgatcatgcctcacgccattgcttctaacaaaccta

SEQ ID NO: 16363 - DNA, 349 bp, Zea mays
  unsure (1)..(349): unsure at all n locations
agcttttcaaacgaggaactcctatgctttcttctttttaaatccgnagcggngtttctcgaactagtgtaactatggaaaggcctcgtagggctactctggctcgtctcctcggtagagatgaatgggaattgtaagccccttggaaaatgagtagcacatcttgtgggtcaagatgtgaacctctacagagtacaaaactaaaatattagtcgtgctcacggtcaagaacatcttggacactcacatgtgtaacttatggaattataattaattcgtcatttgcattgcattgggggatntattataattgtgatctcttatcttattggatggcatcaccctatac

SEQ ID NO: 16364 - DNA, 232 bp, Zea mays
aaaagatagaccttgtgcagcttgtcaagcatgtaaacaagcgggaggagcacattaccagcagaatgtgatgaccaccttaagacccctggagctgctacatatggacctcttctgacccgccgtctatctaagcatatgaagaagtaagtacggtctagatattgttgatgacttcttccgcttcacttgagtgttctttttgcacgataagtctgaaacccaatggacc

SEQ ID NO: 16365 - DNA, 354 bp, Zea mays
  unsure (1)..(354): unsure at all n locations
agcttctggtgcgcctgcgaaacgtcaccgaaggataaagcctgagaggaggaatgctcatcggggttctcgaggaattagcaaaggctgaattctgccagccccgagccccagaggaggtacccaatctcttgaacacagaaggcctaggttcctccaaatttttcctgaggattcttggctccaccaagatacctcgggagcgaggagacatacgacgccggagaattggaacaacgttcgcaccagtcaacgacggaatccgaacaatattagcaaacaaaattcttttcttgcccttaacaaaccaccagttggcattntcctcctgaagaaataatctatattcatagc

SEQ ID NO: 16366 - DNA, 399 bp, Zea mays
gcttaccgactcgggctggtgccacaaacgcatatatgttaagaagaagaagacgagacgcatcaaggagatcgtctactacgacgacagcgatgagtccacttcttcccaaaaggacgactacgactacgagaaatgaaagacggttaattcgaacttttctttcgattactctcgtattccgcaaagttcaaatgcacatttgctttccatccctcttggcaaaccttcacactttgatggggaggactacggattttggagtcacaaaatgcgtagtcacttgttctctctccatccaagcatatgagagaaatgtgagaatggaatgaaatttgatagctgggatagtcctatatttattaatgaacagattcataaatatgcacaagctactac

SEQ ID NO: 16367 - DNA, 402 bp, Zea mays
  unsure (1)..(402): unsure at all n locations
agctntgctagtgggntattcatatgcttcctgcattattatatgtgttgcatcatatggactaatgcttccgttgctatgaattaattggcatctattgtgttcattaatagacagtcatgtggataatgatgcatgtggttaatggtgttaatggtgctttaagattgctttaaattggtatcttagtttaaattagtatcttaatggtgaataggtggtggttgatattcctgtgatatatccactantttgaatggtgtgtaactctgattatgtgcatttgtgtattatagcatcatgtgttgaatcttgtctcaatgcttcctaaaagtgctaaagtgtagaaatgtttcgatttgcctaagtatgtgcacattggcgtctaaagccacaattatg

SEQ ID NO: 16368 - DNA, 439 bp, Zea mays
  unsure (1)..(439): unsure at all n locations
agcttgcccttcatacaagtaanaataaactacatgaacatttggaatcaggaccaacctccaccatggatgtacgtattctcctattttggcctgcattctttgtcctctcttctctctgaagcccagcttccatatcatctgcatttaaatggctctgaggaacatttttaggggtaactcctccagatgataacacactagatcgttcattagatgaactgtctcctcgagaacgttttcgcacaatattgggacaaagtttatcaatcttcgccatagcaccaccaaaagctctagatctttccctgcaagagaattcacagtggacaattagacaggagcacataatttataccccacataaatatcaccatatactggaaaactntccccatacaactntccccagaaggaaaaacagcatcattataaaatc

SEQ ID NO: 16369 - DNA, 371 bp, Zea mays
  unsure (1)..(371): unsure at all n locations
gcttctatagggagagcacattgtgggactaacaaatgttcattntgagaaagacagggtttgtagcgcatgtcaagcanggaagcaaattggtgcccaccatccacacaagaacatcatgacgaccgacaggccgcttgagctactccacatggacctattcggcccgatagcttacatgagcatcaacgggagtaagtattggcttgttattgtggatgactattctcgcttcacttgggtggtctttntgcagaagaaattccaaacccaagagaccttaaagggattcttgagacgggctcaaaatgagttcggcttaaggatcaagaagattagaagcgacaatgggaccgaggtcaagaactctc

SEQ ID NO: 16370 - DNA, 321 bp, Zea mays
attatgaggaacagagaagctactggaagggttggaaagtgggctgcggagctcaatgaattcaccatttactacgtgcacagatcttcaattcaatcccaggcgctagtagacttcatcgctgactagacgacaggggctcacgaagaaaggacaagcaaggataccgaagcttggacggtgttctgcgatggttcttggagaaccttcgatgcaggagcagctgcggtcctagtggcaccttcataagtcaaaacatgttctgcagtcaaactggatttcagctgcacaaataatattgctgagtacgaagcacttcta

SEQ ID NO: 16371 - DNA, 467 bp, Zea mays
  unsure (1)..(467): unsure at all n locations
atcttaagtcaccgcggctgcagcttctcatctgaagaaantaccctgtatgttagatatgatctcggntctccaatcttcgctaanaacaggagatatattaagaactgctctttcaagaagttccaccgaaggtgcttttattgtttcgaagaacacatccgaaggtaaaggcagcccctgtgctgctgacttagctagcagatcagcatgctcatttcgtcctcgaggaatattcttgacagaaaacccttcgaaggaagcttcgactcttcgaaccatatccagatattnttcaagcttcggatccttagccttacaacttttgtcaatatgacccgaaacaacctgngaatcagttntaagtatggcccttctgattcccattgctttaacttccgaaacctagaccaatgctcgactcagcatgtattgtgcattaaataangtttgcgatacaaattgac

SEQ ID NO: 16372 - DNA, 396 bp, Zea mays
  unsure (1)..(396): unsure at all n locations
agctngtgagaataataatatgtattacataagttcatctctattctaaatcttaggtcaccataaaataaattgatctatgagtttgtacttgtaaataacacttatgagaaatagtaatctattttcaaacaaagttaatgtaggttatagtttatgttatactttgacttctttatcccttatgtagtattgtgtccttttattatgtgttccaatgtttgtacatgtttggtgtgatgttcatttgtactttccaaatgtattgaatgcatgctcgctntatttagacatcgagcagtccgagtttcctgagtgtgttgttggagacctccttgagcaacaacctggtgaaggcaagtgtcctcagacctatcatgtcctactttactttat

SEQ ID NO: 16373 - DNA, 344 bp, Zea mays
attcatcaacttagcttccatggacagcgcggacgctgatgggacgcggatcgagagggattgcggcgaaacgagtgggattctccccttccatggacagcgcggacgcggatcgaggggcggtgatctgagtgaatggcggaggagagcatgcggcgaaacgagagggattcaccccttccatagacagtcggacgcggattgcggaatcccggcgggagagacatggattgcatcgagattggatggtggggaaacctcacgatgatacgacagtcaccggcctccggagtgaatgaagaggtgggtgagtgcccgtatgggcgcgtacctggcgacgtctt

SEQ ID NO: 16374 - DNA, 481 bp, Zea mays
  unsure (1)..(481): unsure at all n locations
agctngacaatgaggagatggcgctcgttatcatgagcttccgccanatcctcaaacaaaggagggggaaagactacaagccccgctccaagaaggtttgctacaaatgtggtaagcccggtcattntattgctaaatgtcctatatcaagtgacagtgaccgaggcgacgacaagaaggggagaagaaaggagaagaagaggtactacaagaagaagggcggcgatgcccatgtttgtcgggaatgggattccgacgaaagctcaagcgactnctccgacgacgaggacgccgccaacatcgccgtcaccaagggacttctcttccccaacgtcggccacaagtgcctcatgtgcaaggagcggcaaaggaagaaggtaaaatcaagatcctccactaaatatgaaacctctagtgatgaanatgctagtgatgaaganngataacttgcgtacccttttgccaatcttaacatggaaca

SEQ ID NO: 16375 - DNA, 371 bp, Zea mays
  unsure (1)..(371): unsure at all n locations
agcttctaaagagggaacacattttatgactaaccaatgttcatnttgagaaagacaggatttatagtgcatgctaagagggaagcaggttggagctcatcatccacacaagaacatcatgacgaccgagaggtcgcttgagctactccacatggatctattcggcccgattgcttacataagcatcagcgggagtaagtactgccttgtaattgtggatgaatattctncgcttcattgggtgttctttttgcaggaaaaatctcaaacccaagagaccttaaagagattcttgagacggtatcacaatgagttcggattaagaatcaagaagattagaagcgacaatggaacggagttcaaaaactcac

SEQ ID NO: 16376 - DNA, 376 bp, Zea mays
  unsure (1)..(376): unsure at all n locations
agcttgttcttcggcgagaaaatatcggcttcctattgctccataaccaacatagtgaggcgttgcaccaaggaaggagggtctataaagcgagaggngtattctaatcgagcagggagggctcaattctgatgaaagattcgagtgctttctggtgggcttccacgacctcctagcagcaattgtgcgcatcaaccttgaggaatacacgtaatcatgccccacagcaatgtttactaccttttatagattatcatgaaatctctattaggacatcttcttttatacttcttcagaaaatatcacaatgtataggttccaatgaaaggaataatctaactcccgagagaatcttttcatttaatccctcgattca

SEQ ID NO: 16377 - DNA, 306 bp, Zea mays
gctttctcgactaagtcggtgacagggcctcatggactggtgatagtacgcgtaagcggcaaggccgaccgagccgagggattcacatgcctctgggataccgataccttactcgtcccttccgtgagaagcaactctcgctcgcacaaacatccctattaccgacagaaagtccagatgctcgaaacaagagggaaaaagacgcagcttcgcaagcacggcgagggtgtgttttctggcctcggcgggcgcagaaggcacacgctacaagacgatctgatcctgcaggctcgggtctccacgctg

SEQ ID NO: 16378 - DNA, 338 bp, Zea mays
  unsure (1)..(338): unsure at all n locations
gaagttctcagattatcaatgaaaaactatacggaattggagaagatgatatatgctgtcttaatggcctccangaagctttgtcattactttcagcataccatataattgttccttcatcacagccttcgaatggatatatgacgaatatagaagctactataagaaattggaaaatgggctgcagaactcaacgaattcagcattgattatgtgcacagatcctcgattcgtcccaggcgttagcagacttcatcgctgactggacgctaggggctcangaagaagatcaagtatagatgccgaagcctggacattattctgcgacagttccttgg

SEQ ID NO: 16379 - DNA, 352 bp, Zea mays
  unsure (1)..(352): unsure at all n locations
gcttatgaagattcttcatttcaacatgggctattcggtggtgccagagccaacccatgttagtcttagcaattaagcaagtgtcgagttcagctctatcaaaatctaccaagtatagctgaccctctaacactcncttaaatgctactgaatcatcaccttttctaaagacagtgacacctacatcagtaaatagacagttgtagcccatttgacatanttgagaaacagaaagcatattgtaatctaacgaatctacaagaataacattggaaatggaatgtgcaggagatatagcaattntactcaatcctttgaccaaaccttggtttccatccccgaatgtgatagc

SEQ ID NO: 16380 - DNA, 326 bp, Zea mays
cccatggtggtcttagcaattaagcatgtgtcgagttcagctctaatgaaatcaactaagtatagttgaccctctaacactcccttaaatgctactgaatcatcacttcttctaaagacagtgacacctacataagtaaatagataggtgtagcccatcttgcataattgagatacagaaagcaaattgtaatctaatgaatcaataagacaaacattggaaatagaatggtcaggagatatagcaactttactcaatcctttgaccaaaccttgatattcattcccgaatgtgatagctcgctggggatcctagtctttctcata

SEQ ID NO: 16381 - DNA, 416 bp, Zea mays
  unsure (1)..(416): unsure at all n locations
catgaganactcattctcatgcatgagactatatgaaataacgaagataaagtgatagtctcatcaagatatatacagaggctccccctagagatatgcatcacgtatttgaatgaattgaatggatgcatttactttaaagacaaatagggagaagctttatcttcttgatcaaggctcattagaattgcaacaaacaactttagcctatgattctcattatgagaggaggtagaatactcacaaccacaccattgattgtgtgtagatctattatccacactgtagttttgatgtctaccctctatttgagagacctcatttgagttgctcgttttctttcaactattgaaatcttaaacagatgttatactcacgagatatgatgaagaggtctctttaacgaaataacatta

SEQ ID NO: 16382 - DNA, 401 bp, Zea mays
  unsure (1)..(401): unsure at all n locations
gcttatgctctttatgaagtcccgaaagccaagatccatacatgtcagacacattctatggagcatgcagattggtagctgacatgaatcacactccaaattttgtgagcaaaagtgtaaatgtaacaccctatattatggatggcaatggttgggccgggtggagcaaaaaccagcccgcgatcacacccgtgaagtttatcaaaatccgcccacgaatgcacctgcgagtgcaattcataatccgcacacaaacccgtcaggttttgggtcactagtgggtttttgctgtatacaataactcacttcggggttaaaatagaaacccgtacccacacctgtgaaactttgggtcangtgcggngttgcacctatgggtcanaatcttcacccgtacccgc

SEQ ID NO: 16383 - DNA, 404 bp, Zea mays
  unsure (1)..(404): unsure at all n locations
aagcttcttggcacaacctncgcctccacctccattacagcaaggacaacagccagaagggagccagtatgctccacaccaaagggacttccgagagcagtccgaagctcgtacagtcaacagcaccgtgccagaatcaaagcatatctattgacaaatatcctaccctaatagcaatcttttctatccagttntgttttctgtaataaaggatattgtttaggtttcatataaatactttcgttgatttccacaaggaaaatatattnttctcaagcttaaattgttaaagtttaaagacttgtgataaccaagaggaccttcggactaccgaatattattcgaaacagcaaanaagtcgttctaaggaacgcagagtaaagtgccgaagtcacaaaaaagtc

SEQ ID NO: 16384 - DNA, 492 bp, Zea mays
  unsure (1)..(492): unsure at all n locations
agcttctcacagttcttctttagaacgttgtgagatgtcttgagctcctcaaaagacacttggaggtttttatacaattccttcaaggtcttaaacttttctttntctttgtgcatgtagtcatcggcctcacctaacattctgacaagatcatcatatgaatagccatcatcatcatctatatcatttaaatcggggatgatttttaccttagcatctccctttgccatgagacaatgagggaatgagaaaagtgaaggggcttccttgatggcaattccggcattaagcttggatgaggtgtcatcatcatcatctgagctatcatccgaatcccattcaactatggtaggcttcgccatctttcttcttggtgtagaatttcttcttctttttatcatctccatctttgcccttcttcttgttangggcaatcatgtcgatgtgaccgggtccccacactcnaacactttctatattgaagcattcttc

SEQ ID NO: 16385 - DNA, 340 bp, Zea mays
  unsure (1)..(340): unsure at all n locations
tccaccttttttctttggtcaaatctcaatctggatccttaaatgcaaactgctataaatgcttatttaaatagtataaactctaacattactaagtaacttagtattgcttcaccatgcatcctctacaaactttntgcatatcatagcatataaatatcatatgaattgcattcattagattgcaacctcgcttatggagagttcgtccagattctgcagcaaggagtcgaacaaaagtccaagaacatgctcccaagctgctgcataagatctccctgcagcaccagcactttataggcaagccctagttttatgcactaaccgtactatgctattt

SEQ ID NO: 16386 - DNA, 319 bp, Zea mays
agcttcggcccaacagcagagttcttttctgccgtcagcgccaaggggcagatgcgccacgggcttctggggaaggtttggagaccacccaagaaaaatatattgcctattttgtggtgaagacaagggccatactaccaggatgtgccatgttaccatccagaagcagaaggaaatagcggaagcagcagcgcaacagagtcagccgaagcaggtcatgcatactgcttcgtatcactcaccttatattccagaatatgtaggcaaccaccctgtagcttctgttgcttcggcaagccaatcccaagcatcctggcag

SEQ ID NO: 16387 - DNA, 361 bp, Zea mays
  unsure (1)..(361): unsure at all n locations
agctntatcaaatggacgtgaagagtgccttccttaatggaccaatcaaggaagaggtctatgttgagcaacctcccggctttgaagacagtaagtaccctaaccatgtctataggctctctaaggcgctttatgggctcaagcaagccccaagagcatggtatgaatgccttagagaattccttattgctaatggcttcaaggtcggcaaggccgatcctacactctntactaaaactcttgaaaatgacttgtttgtatgccaaatttatgtngatgatattatatttgggtctactaacgagtctacatgtgaagagtttagtaggatcatgacacagaaattcgagatgtcgatgat

SEQ ID NO: 16388 - DNA, 360 bp, Zea mays
agcttcccaagtcctcggagcgacagaacttcaccggaggctcaaggtcgtcctcgccggacttcggtcgcccgctgccgcgcgtggaccgagcaatccagtaagccattttcaaattcctgaagctctctgacccgtttgattgaactatcgcaccgtgagtaggccggattcctcgccgacgatgagcatctccgcctgcgcacgtggaccggccgactccaaccatccccgacggcgacccgcacatcactgtgatcctcgagacctcccctacgtccttgaccacctcaccagagtagcctcgccaccggtaagcccctccgcctctttctttctctgcgaccactggttcattac

SEQ ID NO: 16389 - DNA, 314 bp, Zea mays
  unsure (1)..(314): unsure at all n locations
tcttcatccccacatgtgcttatatgcgatgccacagccagcccatgctagtcttagcaattaagcatgcatctagaccgacctcctcttttgcaaagtcaactaaataaagtttgccgtctagtacacccttaaaagctaatgaaccatcacttcttctaaagacagacacatctacatttgtgaataaacagttatatcccatattacagagttgactcacagacaacaagttatatccaagcgactcaactaagaacacattagaaatagagtgctcggatgaaatagcaattnttcctaaccctttcacc

SEQ ID NO: 16390 - DNA, 317 bp, Zea mays
tgcagcttggaaattcttatccgccatgggctattctgttatgccatagccaacccatattaggcttagcaattaagcaagtatcgagttcagctctgttaaaatcaactaagtatagctgaccctctaatactgccttaaatgctaccgaatcatcacttcttctaaagacagtaacacatatatccgtaaagagacagttgtagcccattttgcataactgagaaacagaaagcaaattgaatctaaagaatctacaagagaaaacattggaaatagaatggtcacgtgatatagcaatcttaccaagtcctttg

SEQ ID NO: 16391 - DNA, 429 bp, Zea mays
  unsure (1)..(429): unsure at all n locations
gcttcacactcgagtcatattaatgcacaaacatcatataatagtacgaagttgtcatcctacgacttcggaaactcagagccctcggggtaaataattgcatagtcaaaattgattccatgattgtcgctggtcaaattgagaaagactacacatccagggagccagtcctcatgcaatacttatcggtcgtgcagagtctagaaacatagttcaaaggattcacactctagcacatagacacaagaaaaatgaagaggccaacatgctagcaaaggcagtagcaaagggtgatcccatgcnctcagatgtattcttccatacgataggcacactcgtggtaagaaaccccgagggtgtcaaaatcacagaagatcctaagggccaagaatcgtatattaagcatgaccaaagattatagggtgcata

SEQ ID NO: 16392 - DNA, 399 bp, Zea mays
  unsure (1)..(399): unsure at all n locations
agctngacgactgtcagttcgacctctataagcagtcctaagtggtcgcatgcgccgctgtgtacgacaagctcccgcgaagcagccgcttggacgcggtccacagcagctgcaccgcgttgtccatcgttaagcaggggacctcatggttgtagccaacgtcaacgactctcgggttgttctggacaccgcatccaacgacgacgccatcacgccgtccagctcatcgtccacctgaagcctatcctgccacgtaagtcgctactgaccggacatgaattcttgtgcgctaagatgatggacgttgctgacgttatgtgagtgtcctcgaacatgatgtatgtagtggagtagcgtatccggtggtgcaacggtcaggggtactatctcgctgatgat

SEQ ID NO: 16393 - DNA, 373 bp, Zea mays
agctttgcctcgcccgaccccagggctctgccctcgtctcggcctcagacgatgaactccgccttgcccgacccatggctcggactcagcctcggctcctgaagacgacgaacttcgactcgcccgaccccagggctcggactcagccttagcctcatacgacggtctccgcctcgcccgacccggtgctcggactcgacctcgacctcggaagacagactcaacctcgacctcggaggagcctcctcctcgcccgacccatggctcggaccgaccacgtcacaggggggccatcattatcctacccctagctagctcaggctacggtaaacaagaccggcgaccatctggctcgccccggaaataaataatg

SEQ ID NO: 16394 - DNA, 450 bp, Zea mays
  unsure (1)..(450): unsure at all n locations
agcttgtgaacagtacatattcagaagggagaaatcagcttcagcagatcagccgaagcctatgctcttatgtgaggacatagcagaacagaaggtgctgttatgctctcaattatccgaagagcaggagaaaaccttgataaggtttttgtttaacaacaaagatgtttttgcatggtcagctaatgatctttgcggagtaaatagggatgttattgaacactcgctcaatgttgatccatccttcagagccagaaagcagaggcttcggaaaatgtcagatgataaggctgaaggtgctcgtaacgaagttaaaagactcctcagtgcangagtcatcagagaagtaaagtacccagaatggctggtaacactgtatggtaaaaangcaatggcaatggcaatgttatcgatttacgatctaacangcgtgtcaaagacgagttcatt

SEQ ID NO: 16395 - DNA, 452 bp, Zea mays
  unsure (1)..(452): unsure at all n locations
agcttgtgcgcatgctatggcacggacttcaagattgtgnttgattntttctgctatatcttctaattaaaagatttaatcactataccaatttcatttttatgttcaataatattttaggaacaaaactggaccatctatactgtataatatttgaatatttgtttatacacttatatgtaatacacgttctgatgtagacatcaaacacaagctatatctatgctgaatacaataatacaaacaacccanaaaaaattatgcatggacactcacacgagtgaatactcgtgccaaacgggctacgaccacactgtacagcatcgctgaacacagtcaacccacgcacgccaagagtgttgaaaataaaaaacgggccggaaatcaccccaccgtcttcgttcccagaattagtcactgacatgtggatcccacgcggtgtcggcgccaca

SEQ ID NO: 16396 - DNA, 352 bp, Zea mays
  unsure (1)..(352): unsure at all n locations
agctngagttacgtntgtctgcaatgacgaaggacatactcacagatagccttgtctataatagtctgaaggtgggaacacttttaacttgttaaaaagcagattatttttttagtttatttccttttcaatatgtgttcatcgtttatttttgtagggcttaattctgagcaaggctttaaaggcccaaaagaaagccgaagatgaaagctgccagctagcgcatggaaatctttgatcagaagttattacactaaggaatgaaggtcttgaaaaagacaaaatactactatccttggtggatagactgaaaaccagcaaagcccagcttaacgcacaagccgaagctcat

SEQ ID NO: 16397 - DNA, 406 bp, Zea mays
  unsure (1)..(406): unsure at all n locations
agctnggtgctgatggagaagcataaatccttgaagtcttggctgtcaaactgtcttgccgtgntgactgttagttcggacggtactccgaagcggcaaacaatgttttgccaaaagaatttttgggcagtctttgatgttattgtggagacagcccttgcctcgatccatttggtaaagtattcgacagcgacgaaggcgaacttaaggttcccctgagccgtgggtaggggcccgacgatgtctatgccccagcgctggagaggccatgtgtgggcgatcagctttgtaaattgtgaagggctgcctgatcgaagagaaaactttnggcaggcttcgcaggaccttgtgactcgattngcggcgcagatcattgcgggccagtacaaaccttggcggatcacct

SEQ ID NO: 16398 - DNA, 311 bp, Zea mays
  unsure (1)..(311): unsure at all n locations
cttaacgaggaaagcgcgctcgtgtgcccgcgccctggcagttttgcagaaagggccttgcatttcagaacaacctgaaatagatccgtaacactattcactgagtcgctgatgctttacaccgagccccctgggtttctaattcattgcacgcncacgtncccgatggcgttcacgcccagccgagctccggcgagcacctacgccggccgattaggcaatgaccgacgtcgagactaagactaacccaaattcatgaccagtggagtactttccccaaactaatggcatctaagactaactatggagct

SEQ ID NO: 16399 - DNA, 394 bp, Zea mays
  unsure (1)..(394): unsure at all n locations
agcttaatgctaanaacaagaaatataaattgtattatagattctatattctattaattcacaattaaagaaaaaagatcaaaaaattgatatctgaataagtatccgtttgctctcctaatgatgagtcgtggtaacaggttaatcaatatgagtactgttgtacaacctaagaagatgtttgggaagtgaagtttttcacagttttgaaaaaatactgttatattctcaaatactatagtattatatacataatagtgtttggcaagctagctaaaaatctatgtctttcaaactaaaacattgcaagtactggagttgttttaaaatatagtaaacttaagtttgaatctatattccaaaaatgtagtattttcaactgtgggattctcat

SEQ ID NO: 16400 - DNA, 212 bp, Zea mays
tagagcacctgaggcatgcagcttactattattccagacacacatattttttttatttatggatacctccctggtggtgatatcatgacccttctctgacataggataccttgactgaacatgtatcgcgattctacagtgctgagaccattattgctgtctcaattcatccatctgcgtaacttcatacacaggtaacatatatttgttta

SEQ ID NO: 16401 - DNA, 235 bp, Zea mays
gctcactacttaacttttgttcaataagctgaccgaacacctgcataatatggtaactcacaatctaagtgcatatatttaaggcagatccatcctggacaatttcatgcttgtgctacagacagccgaaatgctttacctgagaaactgagcgaggatccaccttatgttggatatcaaccaagctattgactctatctcgtgtgcctttcttctaaaggatatgaagcatttg

SEQ ID NO: 16402 - DNA, 276 bp, Zea mays
tgaactaactcggctgcattattcttctgttgttgccaatagaatcctgacctgagaaccttcccgactaatgttctggatgctgcgagtattacacactgccctgcatggactttctccggaagtgcttacctctggaccggagaacgcacttcatgaggacccctgacgcgcccctcctgtataataccgtcccaatgactgtatagcgagctgattgtctggcaatgcgctctgccgagttcttgacatccggctcttcgtcattctttatat

SEQ ID NO: 16403 - DNA, 259 bp, Zea mays
actttggtctcaaaatttttgctacagaatatttctaggttatagcttcttaactaggagccagatatgggtcaacgtgcttaaacccactactaataatgaagagagcatcacattctggtctttagaaaaaatggcactgggtttgaagtcattctacttactattatgaaccaaaccatccccccattattttcaacatgaaatgcaacttgagaacgacaatccactttggtcaaagcatttagcaagggaccac

SEQ ID NO: 16404 - DNA, 384 bp, Zea mays
cttcggagaccaaatatactgttacttgctttttagtttgggcttcaagcttctcctgtacaagcgccacacttactgcagagtgcgaagctggcacatacaatagcagaggtgagagcacctagagggggggtgaataggtgatcctgtgaaacttataacttaagacacaaaacttgggtaagtgttagcacaataatcaccaagtggctagagaggagtctcaacaaaacacaatatccacaaagatatcaattacagagatggcacggtggttatcccgtggtttggccaagaacaacgcttgcctactccacgttgtggcgtccaccggacgaggatgcaatcaatcctctcaagcggccaaagaccacttgatacaca

SEQ ID NO: 16405 - DNA, 464 bp, Zea mays
  unsure (1)..(464): unsure at all n locations
gctntgtgaagatattntccgaagccacacttccgaagatcaatagtgtatctccttacaacttagtatgattttctcctttttcaaaacatttttctggagttcgatattgtgcccccttcttgtgctatatgcagcatgatgtatgatgcttatggtatgcgaaatggtatgatgatgttatgctatgcaagatgatatttattccgaagacacacatacatccctgcgataaaatacataacctttntgaatcagagttgactntntgctataagcctcccttaggagcttcttcgccttttactttagcggaatcagcgtttatntttcgctgtaagcctcccttaggagcttcttcgccttttactttcagcggtattcgcgttgacttttcgcgcttcgccttttacttangcggtatcagcgatgacttttcgctgtatgctctgcattccctttga

SEQ ID NO: 16406 - DNA, 393 bp, Zea mays
  unsure (1)..(393): unsure at all n locations
atgcaagcttgaccctantctctttagtttccctattcatattctggtatgccgatggactcatatccaggatgactgtcaccgccatctccgctaaatggtaggtcaactctgagcatggtcgaaccatctgcaaatgatctcggaccgtccggccctccgtcggatcgtccaacaccctacgccggacagtctgggtcacacagagcccaccacaaggatcgcaggcgttgcccaacgcagtcggacagtccgggaatagtaactgatcgtccggtccactcacagatcgtccgactgcacaggtcggaccgtccagagcacctgaaattacttgtgatcctcctagtgcggaaggccggtataaagatagccggccacccaatccccaag

SEQ ID NO: 16407 - DNA, 333 bp, Zea mays
  unsure (1)..(333): unsure at all n locations
cccttcttgggctatatgcaccatgatgtatgatgcttatgggatgcgaaatggtatgatgatgctatgctatgcaagaagatatttatttcgaagacacacatacatacctgcgaataatacataaccttgttgaatcagaatcgcgtctntgttataagcctcccttaagagcttcttcgcttttactttagcggatcagcgttattatacctgtaagccttctctagagcttcttcgcttttacttcagcggattcgcttgatattccgcttgcttttactagcggatcagcgtgaccttcgctgatgcctgcatcccttgacgatttga

SEQ ID NO: 16408 - DNA, 447 bp, Zea mays
agctataacccctacgagaccttctctctttctttgtaaccatggtgaatgtaatatcagatgtcatattctatgcatgtttaatctacttgttctcttgtatggtgaactgcttgtttcctaatatgaatggatggatgtatgtatgtctgcactcgcatagagaacgatccggttgaagagcccgaagaacttgcaggagaagcccctgagccgcagtcggttggtggaggcaagtgtcccttgacctatttctgtcctattcattctttaattcacctcccgcattacacatttatgcctaacgattgactagctttgttatccatgtccttcgttacctatttgggttggaatattattgcttagtcttatgctattgctccactctaatcaccgaacatgatgagaatgagcaatgatacgctgtcttccccttcttattat

SEQ ID NO: 16409 - DNA, 470 bp, Zea mays
  unsure (1)..(470): unsure at all n locations
agcttngttaaaggattagatagagctaaagtataaaagatcaatgaattgattgatgctttaaatgaaaaagatagactactagagaggcaagaggacattntgtatgaggaacatgacaaatttgttaatgttcaaaagtctcttgccttagaaattaagaggaatgagttactatcttctgagttatctacttgcaatgaatctatctctagtttaaaaactttgaatgatgatttaagtgctaagatagaggtagctaagaaatcaagttcatgtgtagaacatgttgtaatttgcaatagatgcaaggatattaatatcaatgcttgtgatgaacatcttgtttctattggctaaataaatgatgaggtggcaagtcttaatgctcaacttaagacttgcanggttgattttgataagctaaaaattgctanggatgcctacactattggtagacacacctcaat

SEQ ID NO: 16410 - DNA, 433 bp, Zea mays
  unsure (1)..(433): unsure at all n locations
agcttcttaataccttatacactcatatattatttattgatgaaattaaaccacaattcatttgataaaaccttaaccttcgtctatgaagaagtcttcttaaagggatgaccactcgtatacgaaggatgattatctctcttaatatcgtgttgccttgtttttgattgtgtatagcaatcgagaatgagtgaccaacaatgtcgtccaaccttgctccccttcttgaagttgaccattgttgtgctaaacatacaaagaaggataagtggatttagacatgatatgttagttntaacacaaccctctaactgatcatatttgtttcgcgaaaaaagggagggttcatattgaacaagtttatactcgatggaccatatattctcctttccaatatatcttcagtaacatgatatgaatgttagataccatg

SEQ ID NO: 16411 - DNA, 457 bp, Zea mays
  unsure (1)..(457): unsure at all n locations
tcatctaattttctcactagttctttaagaatggttttaacatgatggaatcatggatatgatgattcaagtacttcatgatgagcacactggtgggggcccttctctttccaagggccttaaaaacataattaaccatttgttttcagcataagctattacaggaaacttcgtcttcaagatacaagcttctcccttatgatgaaggcacacaagatgaagacagatccaaagaggataagagtanacgccgaagctatcaccagatggacagcttcggctcgcaatgaagaagataaataatgatgatgatctgaagaggaaaagactacttagtccttaataacttgaatactatcatgtgtaaatgttgaggacataaatgtacttttgctcaggctgtgtcccgtgcctatanatagatgaacagtaacatcgtattggtcatgctggattg

SEQ ID NO: 16412 - DNA, 423 bp, Zea mays
  unsure (1)..(423): unsure at all n locations
gcttctaaagggagaacacatattgggactaaccaatgttcattntgagaaagacagggtttgtagcgcatgttaagcacggaagcaagttggtgttcatcatccacacaagaacatcatgacgactgacaggcctctcgagctactccacatggatctattcggctcgatcgcttacataagcatcggcgggagtaagtactgtctagttattgtggatgattattcttgcttcacttgggtgttatttttgcaggaaaaatcacaaacccaggagaccttaaagggattcttgagacgggctcaaaatgagtntggcttataaatcaagaagattagaagcgacaatgggatggagttaagaactcacaaatagaatgctttcttgggaggagggcatcaagcatgagttctctttctcct

SEQ ID NO: 16413 - DNA, 356 bp, Zea mays
  unsure (1)..(356): unsure at all n locations
gctttcgtgttccgggacaccggagcaccggacggatcctgcaccaatcaaataaccaccagttntacgctattgtcagtgctttcattgtaacgaccacaacaacaacaacaacaacaacaacaacaacaacaacaacaacagtagtaacaacaacaacaacaataataaacaggctgttatcaaataaatgcactgcttttattttaaatttgctggcaagatgattatttccctattgttacagggtttcattatctcaggttagtataagggaatatacgagtgacattgtgatgagaaacaggtagcatagaacaaagcataacatggatagagccgaatggcataccccg

SEQ ID NO: 16414 - DNA, 471 bp, Zea mays
ctcgaccgggacctctaatcgacctgaggctgcagcttggaaggcttccgagctctcaggaatctatcctgaggctcggatcaagaggaggtgggcaggaatggtttggccaccgcgggcgccctcgggcggctctagcgggtcgcggggaggtcgtcggagctgcgggcgagctctggaaagttaggcgcggtgcggagggggcaactgggaaggtggccgcgcatgagggtgggctttataaccactcgcgggcacggcacgggcgtgggcacggaggcggccaatggtgcgcggtggtgcgcgtgcgggcatgctctgggcgcgttccccagtgcctgcccacgttgaacacgtggtggtttactttgccagtgtcaacggcctgttggtcgcttatcttgcaatctagcaaaatctgtgacggctcttcttacccaatcctatttttcatggagttccagcaagaat

SEQ ID NO: 16415 - DNA, 429 bp, Zea mays
  unsure (1)..(429): unsure at all n locations
tagagcgactgcagcatgcaagcttaacaattattacgctctactattatcgtatcgaatgcaattatagctggtaatgtgtcgcataatgctgtgaaaatttatgatttcagatcaagatctcagcatgccagttgcactatgcacggtattttcaaacacaatccatcgcttgtgtgtgtggcatgtttagaacagggatatgccgtatttaaacaagttgtatgctagatttgatgaagatgactcaaaacaacgtccaatctataatacatatncttaactgtactgatttgaactgctggcatgctattgtgattcctctacatgatacatcatcttttaaatgatgaattcgaatattggaaccactttttaaaatgatattgggatgaaggctttcacacgagcagagctgacaacttgtaa

SEQ ID NO: 16416 - DNA, 486 bp, Zea mays
  unsure (1)..(486): unsure at all n locations
agcttctattctagtgattaccaaaagatacctattgtagcacactaccaaggctaccaattgaaaaatcatcactatcatagctccatgatatttaaagataagcatctaggatcaccaactattatagagcacgagcaacctttaaatacgtaattactcacaactttagataccaattactcgacttgtggaggtatccaagtcgngattgctccatttcttgctcatcttcccttttccaccttgagactatacaggatcactcaagaaacaattagtctcaaaagacacaagttatgtgtgctccccctaaagttgtgcatcaagtatttgagtgacttgcactttgcacattctagcttccttagaactagaggggatcacaacatactntggtctaggcataatatatcaatggcatcacanaaagataccaattggatagatgacataatacaacttatgactagtggaaacaatgct

SEQ ID NO: 16417 - DNA, 320 bp, Zea mays
tgcttagcaaaagagatttctagaatctataatcttgagctcatgcctaagtctggtgatagactgttcatcaagtggctcgtgtaagatatcggctaatagatctttagaattaatgtacgaaatctcgatatcccccttttgctggagatccctaagaaaatgataccgaatggctatgtgcttagcgcggctatgctcgacgggattgtcggccattctgattgcactctcattatcacatagcaaagggactttggttaatttgtaaccgtagtcccgcatggtttgcctcatccaaagccattgcgcgcaacaat

SEQ ID NO: 16418 - DNA, 339 bp, Zea mays
  unsure (1)..(339): unsure at all n locations
gcttgtactccctgtccaaatcaatggaaagaccagtggtacaatccttgttgacaaagcgtgctctgaggatgatgtttttcaaattgcagcctcggatgagaaactctccaaatatcttgatgggaaaggcatcaggaagaaaatttatgtgcctggaaggatcttgaatgttatcttagatcaacaaaagtcaaggacctgataattgctctttgttgtccatttatctcgttatgagtcaggaatagagatcaataagacatgacagatcttgtaatntgttttttagcacttgcagtttactgtcaatttgccaacaacaacaacgtcgaacac

SEQ ID NO: 16419 - DNA, 484 bp, Zea mays
  unsure (1)..(484): unsure at all n locations
gagtcacctgcggcatgcaagcttgtggaggttcttcatccccacatgtgctagcggcggtgccacagccagcccatgcaagtcttagcaattaagcatgcatctagaccgccctcttcttttgcaaaatcaaccaaataaagtttgccgtctagtacacccttaaaagctagtgaaccatcacaccttctaaagacagacacatctacatttgtgaatagacaattatatcccatattgcataattgactaacagataacaaattatatccaagcgactcaactaaaaacacattagaaatagagtgctcagatgagatagcaatnttaacctaaccctttaccttgccttggttccatcaccgaatattattgaatcttggggatccttgttcttgacgtaggaagagaacatcctcttttcccccgtcatgtgggttgtgcatccgctgtcgataatctagcttgtacccccgacgcataa

SEQ ID NO: 16420 - DNA, 331 bp, Zea mays
  unsure (1)..(331): unsure at all n locations
agctatcctcanactcgccgacccatgcaattgaattatgaatcctctggtcgccaggaacgcgactgcctagccgcaatgctcacggtcgccgnggttagggcaaagtanggcaccattcttcgaattaacctaggggaaacattcgctaagttatgaatattgtttaggccgaagctgagcaccagtcttggccttctctggccggtctacatgctcgtcggagctcggctgcgcgcgtcgccgtcgaggaccttcccctgcgaaggaatagaaaccggaggactttactggcaaccgtcagcgactctttaaaacagtgaaagaacct

SEQ ID NO: 16421 - DNA, 306 bp, Zea mays
  unsure (1)..(306): unsure at all n locations
agctnttacagaagaaggatgagtcttcggcatctaagaaggcgggtgggccaaaaaagcgaaggagtgttactcgtatgcaagctattgaaggaacgccactgtctgcctcatcatcaaaaataacaccagctgtcaaagttgcggcttctgccgaagctgcgcctgccagagctaccaacctggagagcactttatctgctattgataaagtgctcttggatttggctgcggaggaaactgctgctgttgcagaagaagtcctggccacagcgcctgaaaaagggaaggaaattaccgaagata

SEQ ID NO: 16422 - DNA, 468 bp, Zea mays
gcttatgaagaatcttcattccaacatgtgcctttcggcgatgccagagccagcccatgttagtcttagcaattaagcaagtgtcgagttcagctctatcaaaatctaccaagtatagctgaccctctaacactcccttaaatgctattgaatcatcacttcttttaaagacagtgacacctacatcagtgaatagacagctgtagcccatttgacataattgagaaacggaaagcaaattgtaatctaatgaatctacaagaaaaacatttgaaatggaatggtcaggtgatatatgcaatttatccaatcctttgaccaaaccttgatttccatccccgaatgtgatcgctctttgcggatcttggcgtttctcataagaggagaacaacttcttctccctgtcatgtggttgtgcacccctatcatgatccaactgagcccctgatgctaaacctacaaacatgt

SEQ ID NO: 16423 - DNA, 434 bp, Zea mays
tatgctaccaggaattgacccattgaaattattttgactcagtatcctggttatgagagaaaggaagataagattacatgaaaaaggtcacatataactctatttcttttctcaaatatgtaggacatataactctatttataagaagggaactctgattttaaaatacttacaacagctgaagcttagaaaggttgccaagggaagctggtacttctccaactaaaagattgtcctctaaatctaagcttgtcaagctagatagattgccaaactcctcaggtatggtaccagtaatcctggtaccagccaatgacctgcaacatcatatgctatacagtttcataagagtccgagaagtatcaccaagctcgaacagtagttcatgtatgacaaatatctaaaggtctggaataaaatatgttagcatatgt

SEQ ID NO: 16424 - DNA, 448 bp, Zea mays
  unsure (1)..(448): unsure at all n locations
agctntatcaaatggacgtaaagagtgtctttctttattggaccatcaaggaagaggactatgttgagcaacctcccggctttgaagatagtgagtaccctaaccatgtttattaactctccaaggcgctttatgggcttaagcaagccccatgagcatggtatgaatgccttaaagattttcttatcactaatgggttcaaagtcggaaaggccgatcctacactcttcaccaaaacacttgaaaatgatttgttgtatgccacaattatgttgatgatattatatgtgggtctactaacgaatctacatgtgaagaatttagtagaatcatgacacaaaaattctagatgtctatgatggcggagttngaagtattcttatgattcaagtgaagcaactccaagaaggcaccttcctaagccaaacgaagtatactcaagatattc

SEQ ID NO: 16425 - DNA, 279 bp, Zea mays
tttttgcgtgcgctcctgccgctatcgtcaggagactgtttgccatctgattatgaatctgtcacgcgaacccttgtgacgaccggccgtcaccaaactcatgttgccgctcatatcaattgtgacttcatcccctatatcactattcggcgagcaccaggcgttaaggcccattactgcttaaaaattagcccgcctgcactctccagagtgtgtattattagcttctgcgactggcccatcctaacgagttgactgagcgcgcgcatccccctgagc

SEQ ID NO: 16426 - DNA, 349 bp, Zea mays
  unsure (1)..(349): unsure at all n locations
agcttcctcaatctttcttgttgcttaatgaatatacttcaatgattataattggcccatgccatgattataaattattcatacccttttccacattttcttgaatattgctcatagggctcacttagggtttttattatggttgcaacattattacctttttgaaagacccatttgttntgatcatgatacttttaagtataggcttggtgggttcttcactcttaagtcaatttgatgctcatgctcaatttggntcacataaaatgagggttcttgggttagccttttgagagaaacccttggtgacactggggtgtcacagccttccncccttaaaggaatcttg

SEQ ID NO: 16427 - DNA, 471 bp, Zea mays
  unsure (1)..(471): unsure at all n locations
gcttcgctacgccatccacctncacttcgacttcttcaacaatgtcgtcgaatatgacgcactcatctatgagctccgtatcacgggtgagatgggggtgtggcggctcctggtgaggggtgcctccaagttggtcgttgaccatgtcatgaaggcaatggagccacgcgacccgcaaatgtgtgcatactatggagaggtatgaaagttggaagagaagttcaaaggctatgagctgcaccattgaaaggggaatgtgcttagccatttcctataatcaattatggtgtttgacgctcatcacaaactatatggactaactagtttgcccagttatcatttatctcatgtgcattaagatcaacataaaccaacaaaaaagtgagttgtgaaactctattaaagttggagcaatacaataattggtcaaccagtggcgcaccgacattgtcccggtgcactggacactgt

SEQ ID NO: 16428 - DNA, 403 bp, Zea mays
agcttctgtaatctctgaactatattaaagattatggctcaacattaaaaaacatgaggaaacaacaaaacgtagcagaaatttctgaaagaacaagtgataccatgaagttgcgaatccaacgacccactctccatcagctcataaacaacgaaacggttctcctcatgaatgcagaagcccacaagggacacgatgttcggatgtcgaatcttcccaagcaagtctagctcattctgccgatccaatcaacaataaatccatttttaagggcagtgtttaattaacaacaacaatccgaacgcaaccatttagatggacacttttgtcgacaaaaaaatgcatagctgattattatcacctcgaattccttcttggcatcatgtgccccaccatccagtct

SEQ ID NO: 16429 - DNA, 473 bp, Zea mays
  unsure (1)..(473): unsure at all n locations
agcttctaaagggagaacacattttgggacttatatgttcacctcgggatccacanacaccccagaatgctactaaactacacctctaacatccgtatataaaatttcgacagcatcttctttgaaaattgcataaacggagaagcaacaaagtataaatagctatcatgataagaaaacataatcgacattaataatctgctatcaatgggaagacaaccataacggcataaactaaattaaccagtgcgcacaactagttagaaacaaacatcatttgacaagaagcttctaattaaatcatgattgcgcctaagcagcgttattatgagagtgaangtggatgtgctgctacttcccacttccctggatgagcaagaagcacctacattgagtaatgcaagagtgagatgaaacatctcagcatgtgaattgtttgacgagatattaaaccacaaattgattactcaaca

SEQ ID NO: 16430 - DNA, 276 bp, Zea mays
agcttgagcaaggctcacggtctcaccaggatgctatctgtgggcttgaatcgaacggagggggactggagaggggttggccacggcggaggctcttggtcggcactggcgggctgcacggaggtcgccggaggcaacggctggctcgggcgagtccggcgaggtacggaggggataacggagaaggcaaccgagcgctggggcgggttttataggcgcggacgctgtcggggcgccggctcaaccgtttggcgcgacgcgggcacgctgggcgcg

SEQ ID NO: 16431 - DNA, 410 bp, Zea mays
  unsure (1)..(410): unsure at all n locations
agcttgtgaagattattcatccccacatgtgcttagcggcgatgccacaaccagcccatgctagtcttagcaattaagcatgcatctagaccggcctnctcttttgcaaaatcaactaaataaaggttgtcgtctagtacacccttaagagcccatgaaccatcacttcttctaaagacagacacaattacatttgtgaataacagttatatcccatattacagaattgactcacagataacaagttatattccagcgactcaactaagaacacattagaaatagagtgctcggatgaagataacaattttcctaaccctttcacctttgcccttggttccatcaccgaatattattgaatcttggggaccttgtcctgacgaggaagagaacacctcttttccccgcat

SEQ ID NO: 16432 - DNA, 385 bp, Zea mays
tagctttgttgtccccaccaccgactttattctgctgagaaccctgacgggcaggttcgctttatcagctacagttggatcccaataccctgatgttgtatttttagggtctatattggccctctattcttcttaatataatgatgtgctgactctctgcgctttcgaaggaaaaaagaattctttcgcaaaatttaccaccaagtactaaagctgtaaagcataatcaattccacctctacagttaacacaaattagctgagatttttttctaccaggactcagttaatcttttgatacagaacgtacctttaattcttaatattttttgtctacatgaacaaccttacaggtaagcttgtggtctggggcaaaccaagaaaga

SEQ ID NO: 16433 - DNA, 393 bp, Zea mays
agcttcaaaaggggacgtcttcagactggcctgtgaactattattatatgagaactcagcatgtggtagactcttgtcccagctgccttcatgatgaagggtacaagctctcaacatatcctcaagtacttgattagtcctttcagtctggccatcaatctgagggtgataggctgaactgaaactcaacttcatatccatattctcatgaaagcttctccagaatcttgaggtaaactgtgagcctcgatcagaaatgatcttctttggtacaccatgtaaacacacaatctgagccatgtataactctgccaactgagaacctttataagtagtcttgaccggaatgaagtgtgctactattggtagcctatccacaatcacccatatcga

SEQ ID NO: 16434 - DNA, 334 bp, Zea mays
cctgagctgcagctggaggctaacagtgtgggaagattattattgtgactggaagtctgagtacaagcaactgcttgttcttctgaatgcaatgaaggcggttaatccaagcatgcattatgagtacatccctaaaccaaatgcatggattgataggaggcagatattcttctgtgtgttctggtgctttccccattgtgtggatgcctttaggcactatcgccatgtcatctccattgactgcacatttcttcttggcaagtaccagggcacacttcttattgccatatccgtttatgcaaacaacaagctagttcccctaacaattgcactg

SEQ ID NO: 16435 - DNA, 346 bp, Zea mays
  unsure (1)..(346): unsure at all n locations
agctatctgaacctttcttggtgcttattaaatatacttctaattttataattggctcaagtcataatatcaaatttttcatacccttttccttattttcttgaattatgctcatggggctcacttagggtttttattagggttgcaacattcttacctttttgaaagacccatttgttntgatcatgatgcttttaagtatatgcttggtgaattctttactcttaagttaatttgatgctcatgcttactttgngtcacataacatgatggttcttggtttgggcatttaagagaaaccctatgtgacactggggtgtcacagtcttcaccccttaaatgaatc

SEQ ID NO: 16436 - DNA, 294 bp, Zea mays
  unsure (1)..(294): unsure at all n locations
taataccactttaaatgattgttcaataagctccaaaataacatggctaatcagtggtttcaatacatggcttggttggatgtactcttatggtggatataccttgaactatatggttggaagtgaatttaagttaaaaactaaagttagcttcaccttcatgcattccgacacacatggatttaaggtaaataccaatgccctaaacaagaacacaagtggaacacgtaaattaaccatactttgctatgacaattaagttattccaatgcttanatactggatgttagcatc

SEQ ID NO: 16437 - DNA, 414 bp, Zea mays
  unsure (1)..(414): unsure at all n locations
ttaatattaaaactctaagcgaagtggataaagatttaaatctaattgcataatacttattcaaatctttacttctaaagcctagattagagctttgnnnttttangaagagaatttaaataggccataaactacctggccgctgagcaccatttaaatagacctttaggctatttatttttataataaaatctagaaatctaaaagacccattcatacatggcgaaagtaaaggtggtgaatnttagtctaacatgaanagtggaagtgaccaagctagtttaaatagattgtattttactattctaaaaagagcacaatatagacaaagctaacgctctgtttgtttgtttcttccttgcgtgtacttgtactgctgaagggagaccatgtaaaatgcaagttagtaccttt

SEQ ID NO: 16438 - DNA, 447 bp, Zea mays
catgcaagcttaatgatgaactggctagtcttattgctttacttaagactagcacgaatgatttctataagcttaatattgcaagggatgcctacacaattggtagacaccccataattaaagatggacttggcttctatagagaaacttataacttaacaagccataaggctcccattcccgccaaggagaaagggaaggcccctatgactagtaatgtgcaaaagaaccatgcttttatgtactatgataggagatattctagagatgcttttagaggtcatgatatgtttgattcacatgcttatgactcttatgccatgactgcttctagtactcatgtaatgcatggcacaaatatgtctatgagaaatgctactcttcatgtgcctataaagaatgttattcttgctcctagaaaatattgaatgaccttctccatttatt

SEQ ID NO: 16439 - DNA, 417 bp, Zea mays
  unsure (1)..(417): unsure at all n locations
tgattaacaaatgttcactttgagagagacaggatctgtagcgcatgccaagcanggaagccacgtggagtccatcatccacacaagaacatcatgacgaccgacaggccgcttgagctactccacatggatttattccgcccgattgcttacataagcatcggcgggagtaagtatatgcttagcatagtggatgattattctcgcttcacctgagtattctttttacaggaaaaatctcatacccaagagaccttagagggattcttgagacgggctcataatgagttcgtcttattgatcaagaaaataagacgcgacaacgggacggagttcaagaactctcacattggaagctatcttgaggaggagggcatcaagcatgagttctcttcttcctacacaccacaacacaat

SEQ ID NO: 16440 - DNA, 471 bp, Zea mays
  unsure (1)..(471): unsure at all n locations
agcttatgttgggttaccacacactctccaggtataaccttgcaatctaagcaggcatgcttgtcctcttttctcaagaggacaaaatcaatctggctagtgtgttggccactactgaaggtcaccaggtgggatttcctctatagacagtgtttgctataaacatgtcataggctacggaaaagttcacgatttcctctccttcttgaatcctagtccaaagtcgaagcctccatgcacacccttgaaactagtgctagatgtacccacatggccattgagatctccttctatgaagagcttctcgccaactggcacactactaaccatgtcctccaggcctttccagaacttcctctntgagttctcattaaggcccacttgangagcatacacactgataacattgagaaccaagtccccaatgactacgttaactatgatgagtctatctcctagcctcttaacatc

SEQ ID NO: 16441 - DNA, 458 bp, Zea mays
  unsure (1)..(458): unsure at all n locations
agcttggtgccaatggagaagcagaaatccttgaagtcttggctgtcaaactgcttgccgttgtcaactgtgagttcggacggtactccgaagcggcaaacaatgttttgccagaagaatttctgtgcagtctttgatgttactgtggaaacagcccttgcctcgatccatttggtaaaatactcgatagcgacgaaggtggacttgaggttcccctgagccgtgggcaggggcccgatgatgtccatgccccagcgctggagaggccatgtgtgggcgatcagttttgtgaattgcgaagggctgcctgatcgaggagaanacttctggcaggcttcgcaggaccttgtgacccgatttgcggcgcagatcattgcgggccagtagaaaccttggcggatcacctttgcggctagggcccttggccctgcgtgagagccgcaagtaccactgtggac

SEQ ID NO: 16442 - DNA, 434 bp, Zea mays
acctgcggcatgcagcttttctgctaacagagtctatgattattgtatagtcttaccttgacacccttaagccagcatacccttgagagtcttttctttagtcgggtaagacttgctgagtattccatactcagggttgatcccttcgctgtttttaaagagatgaaaaacatacttttgctgcttctgtgccaaggtggctccaaaagaataaaatcacgactgatgtgcgggaggactcggacctccacctaggatcttttgctattatcttctcgggaggagtatatgcctccctggtttgtataatattactctatgcactcacctttagggctggtctgaaatatataactcaagcttacttttgaatatatgtagagttatgtaattctctatcgcatttctttatctccgatgttctgaatgtctac

SEQ ID NO: 16443 - DNA, 439 bp, Zea mays
  unsure (1)..(439): unsure at all n locations
gctcatcctctttcttcatcctaatntggtgatgacccgagtagcaggccaataggctcatgagctctgaagaagccgctgcatctacaagggaatctattcttggtaaagggaactcatccttccgacatgccttgntgagatctgngaaatcaatgcacattctgcattttccattagcttttttcaccataaccgtgttagccaaccattctgggtatngtacttctttgataacaccggcactaagaagtctctgtacttcatttcgtgcacgttcagctttatcatcagacattttccgaagcctatgctntcttggtctgaaagatgggtccacgttgagtgaatgctcaataacatctctatngacgccacaacaggtcattggctatcaagcaaaacatctttgtattaacatgaatcttaacaagttttt

SEQ ID NO: 16444 - DNA, 334 bp, Zea mays
  unsure (1)..(334): unsure at all n locations
gcttcaagcctatgcaagagttcgggcgaatgtattggtactctcttttcataaaatgaggaatcatctaaccaacattcataccaaaagagcacaactttataggagtagcagaagggcacacccaccgttgttaatttgtgggcatgcttcttaagcaaattcaagcctctaaatatcaatgttccaactgatgaacataatataaatgctgacccgatcagggacagagctaaagcaaaatttagtggctgcaattgccttttgagtgcattcagttntacgatgagaatacgtatatagtagttgtttttatcataatcatttcatttga

SEQ ID NO: 16445 - DNA, 383 bp, Zea mays
  unsure (1)..(383): unsure at all n locations
agcttcttgaagaaaagactgctggtttcattgttgtttatngccaagacaaatacagaaaagattacgaaagaaattctataaggcttatctgaagataccgatgacagcgatagttatgatgcagaaagcgggggcgaagattccgaagatcggccctggcgaccaagtcacgcagtcttcgggaaatcgactatcagacaaagtcatctttgatacatgagaggaaggtatttttgagacatatctattgtgagggctgacaatggagacatgactgttcctgttcctgaagagaatgaagtcgtaatctaccgaagcttcttcaaggttgggcttcggttccccttaagcagatttgtgggtgaagttctaagatatat

SEQ ID NO: 16446 - DNA, 420 bp, Zea mays
  unsure (1)..(420): unsure at all n locations
agcttatctgcgcatagcttcgtaataatctttttcttcgtcacaatcgccttccgtcccactcaagcttcgtcttgaccataatcttatatactcgtaatccaatttcgaagatacctgctcacacatcacttggaaaacattgttaaatcatgtttttgaggaccttcggaagccgaaggcccccaacaaattgcatccattatttgatcgagtgaatagttaagtcacaacaaggatgacatgtatcttgccttgagcttgactaatatcgttgaaagggaaatgtggcctcanggcatttctagttgttctagcgattaaatgctcaacacaccactttgaactaaccctcttcatatgagcatgagcacagggttagatcaagcaaataggagatcagaagtccaaatgagttgg

SEQ ID NO: 16447 - DNA, 285 bp, Zea mays
  unsure (1)..(285): unsure at all n locations
agcttaatgtccctaaaaattgtctatatttgtgaagggcaaagcttccatggtttaggatagtgaaggctacattttatatcctgttaactattctgagcataaaattagaagaattcatgataggaaacctcattctatttctcatcatgcctttatggataaaaatgaagcttctaattctatgcatttcacttatgttaaaatgccttaaaagaaaacctctaatgcattcaatgaacataaccattcatttaanacttttgatgcttcatatatgctcac

SEQ ID NO: 16448 - DNA, 125 bp, Zea mays
ataattgagaacttataaagcaaagtataagatcaaacagctgcttttgagaaaaaagagttcgaactccaaacaactgaagggttactatcggaggccgaagctaaaataacagaactgaatac

SEQ ID NO: 16449 - DNA, 278 bp, Zea mays
  unsure (1)..(278): unsure at all n locations
agcttcgcatctcttgctttacaacatcttgtttacatgaccagaaataacttgggaatcggttntgagaaccgcccttcttatccccattgccttcaactttcgaagccccaaaagcaaagcttcgtattcaacaatattatttgtgcagctgaaatcaagattcactgcatagcatgttctaactatggaaggtgcaactaaaacagcagctgcacctgccccagaggttccctaggaaccgtcgcagaacactgtccaggcttcggcatctttac

SEQ ID NO: 16450 - DNA, 266 bp, Zea mays
  unsure (1)..(266): unsure at all n locations
agcttcgcgccgcnaacacttcaggcttaatgacatcagaactggaggccataataagaattggttttctggaatgctgtagatttagagaaataagtgacatgcttccttcatatttaaagaaattagatattctcattccgaataaaataatcatgtaactcagagtaataccatatgaaattattgccgcaatgaacagtagcaattgtaagacatgtaaacatgtaaaatagctacacaggtccatttcataattaaacatg

SEQ ID NO: 16451 - DNA, 452 bp, Zea mays
  unsure (1)..(452): unsure at all n locations
gcttgtgaagattcttcatcccaacatgggctattcggcgatgccagagccaacccatattagtcttagcaattaagcaagtatcgagtttgtaacacccctggtgttactataactaanacttgagcatggcatcataagcattggcattgcatatgtttgacacacctagagtgcattcactaggcaaaaatttcaaacaagttgtattggtttaatgtttttgcaaatagaaccctggttaaaggacttaaccctaaatagtggttaaaggggtaaaacttaacccaagttaaggaaacctaaagactttagggtaaaagtcataaaatgaccccaagaataaacttgaatcacttttatacccctggaataccagaaaccctagatggaaccctggagaaccataaaaccaaactctangggcttatgntgcaaattagtccactttt

SEQ ID NO: 16452 - DNA, 431 bp, Zea mays
  unsure (1)..(431): unsure at all n locations
atgcaacaagatcttgaagataattaacatgtatttataatcgagggtttagaaggcaaaataaaagatcaagtagctgctcttgaaaagaaggatttctagcttcagacaacagaaggtttattggcagaagctgaagctaaaactgcaaagtttaatacggagcttctctcaaagtcagaaagcttcgaacagganaagcagaaagttaatgctaaatttgagactgaggtcgagaaaagtcaaatttgcaaagatcattgacagagcgtcaacacaaatgtctggagatcagtagccgatgtgtacaatggccgacacagatcttaatatggtggacccacctgtgataaattagttctttactgangacgtgacgaggccttcgacatatcagggtgaattgagccctgataaatataaccgacatg

SEQ ID NO: 16453 - DNA, 404 bp, Zea mays
  unsure (1)..(404): unsure at all n locations
agctngaaacggacagcatcaggagaatgcattgctccatgagcctgctcatcggcaccaagacaggagacacgatagcttgataagtngccagcagtgaaggactctactatgcgacagtgtgctgccttgtaattgtcggcagagcttgatggttttctagaacttgtcaccactttccctgcatgaacagtatgtccaatgcctccatgataatgatcattcaatccaccatcacacgttgttaggcagaagacaccctcaaagatctgtctttctttcttggaaccatcaaacgcatcctctgccagctcggaaactttcttcccagacagcattgtggcaatgtcctcctctttcatcctatctgcgaaacaattctttccatacatcttgctgacaac

SEQ ID NO: 16454 - DNA, 411 bp, Zea mays
  unsure (1)..(411): unsure at all n locations
agcttaatgatgaattggctagtcttaatgctcaacttaatactagcaagaatgatttcgataagctaaaatttgcaagggatgcctacacgattggtagacacccctcaattaaggatggacttnggcttcagagggaagccaagaacttaacaagccataaggctcccatctccgccaaggagaaagggaaggcccctatggcaagtaatactaanaggaaccatgcttttatgtatcataataggagacacactagaaatgctttataggaatataatgcttataatgagtttgactctcatgccatgtttgcttctagttcttcctatantgcatggagaaatgtgcctagaaaggatattattcatgcctctacgaaagtagtgaatgaaccttctacaatttatt

SEQ ID NO: 16455 - DNA, 368 bp, Zea mays
agcttgaaccgagggcccgcgtcacttgagaatttcaatcgcgctcatcggagttcaagaactcgccggcgcacgtggaccgggtaaaccccttcaccattttccgattcgttgcgcgcatggcctctgtgtcatcccgtgaagcttctcgtgcccattaattgaactctcccgccgtggtttggccggagcaagcgccgccgtcgatcctcgccgcctgtgttcgtggccaggggagctccgaccacctctgacgccgacccgcacatcgacgtgaccgtcgtgacctcctgaacatcgctgaccacctcgccggaccttcctcgccgccggtaagccgcgccacccttttctttcccgcggctact

SEQ ID NO: 16456 - DNA, 351 bp, Zea mays
agcttatcaaggctactttcatatggatccgttattatattcatatctgttctgaggccgccgtaatcattgatttcttaccgagacatatactgccttttctgcccatggtgctgcgacaccctattttggaccaatgggtcgagtatcaaattatgtccattaaggacgcatcctagggttgcagcacgaccccaataaccttgaggtcgacctcccatgtttataaaccccctaaccgacaccaagaacagcgggatttgtttagaaacaatttagctctctgtacttgcttgcaagcgcgcgtgctaaatcagccgaccgtattcttgacttcggaaccgcaccata

SEQ ID NO: 16457 - DNA, 355 bp, Zea mays
  unsure (1)..(355): unsure at all n locations
atcaaatggacgtgaagagtgcctttctcaatggaccaatcaaggaggaggtctatgtngagcaaccttccggctttgaagatagtgagtaccctaaccatgtctataggctctctaaggcgctttatgggctcaagccagccccaagagcatggtatgaatgccttagagatatccttattgctaatggcttcaaagtcggcaaagccgatcctactttattcactaagactcttgacaatgattngtttgtatgccaaatntatgttgatgatatcatatttgggtctactaacgaatctacatgtgaagaanttagtaggatcatgacacnaaaattctagatgtcgatgat

SEQ ID NO: 16458 - DNA, 343 bp, Zea mays
acccaaccctcagcagcagccaaacagaagaagaaggtttgtcttcaatacctcgctttggagctacagaatcaggaaacgagggaccgaacgaagaacttcagcagaaagccgagaaaatgctcaaagcatgagggccccacaaaatgctagaaggattcaataaaatgcaaaaaatgccaaacaagcgtgaaaaccatgcactacatggatctgccagctaattgctcctcaaccacaaggaggagacaaaactatctctgcttgcttggcgaagctaaaatagaaacacgcctgctggaacaaacattgcataaacttgaaacaaaaaacaggatatggg

SEQ ID NO: 16459 - DNA, 282 bp, Zea mays
agcttgtgagcaacacttgtacacatgggagaatggtgctacgcatgaacagccgaactccatgctcttatgtgacgatatagccgaacatattgtgctatgtgatctaatttgctatagagcacgagataactcttttaatgatcctgtctaactacaaagacggcttcgcatggtcagctaatgatccatgtggtgccaacatggatgttattgaacactcgctcaatggtgacccatccttaagacccagaaagcagaggcttcggaagatgtctgatg

SEQ ID NO: 16460 - DNA, 282 bp, Zea mays
tgatcaatgcaagcaacgcacgaaggcgagggcacgtcgactgtgacatcgctgctgttcatgacatatagcttcactcgtggcatttctttaatgcgcgcgaggcgccaaccatgccgtgctgcgagggaaacatggctgctacgagcatcgctgtcttgtgagggaagaaaggaggatgggccgctttatccatgaacagggaggaagaataggacctgcttccccaaggagagagggcatagctgtaattgtgggaatgcccgcgcgctattgaggttg

SEQ ID NO: 16461 - DNA, 421 bp, Zea mays
  unsure (1)..(421): unsure at all n locations
ttgtatctggaggtcctagcggttctaagaaaaactattctcaattggagaaagtattatatgctgttttgatggcattcaagaagctttcggcttattttcaagcctaccatattattggtccttcttcgcaaccggtgaaggatattatgagaaatagagaaactactggacggattggaaaatgggctgcagagctcaatgaattntgcattgattatgtgcatagatcctcgatccagtctcaagcgttggcagaattcattgccgattggacgccacgggctcangatgaagaaacacatatagatgccgaagtatggaccaatgtttgcgatgggtcttggngaaccttcggagtgggagcagncgctgtgttggtctcatcattcaaagacaaaacatgttatgcggcgagact

SEQ ID NO: 16462 - DNA, 445 bp, Zea mays
  unsure (1)..(445): unsure at all n locations
agcttcgtagcagctgagctggtgcagggcgttcttggtgtgccccattgtattgatccaattaattaagggtgtggtcagttgtattctctcgtatctatatctttnttaataatactattaaagttttttttttctatcacttggaaaatcttcctttctctcgagagcaagatgacgtgtttatatatcttttacaataatgttttggacggtcatatacacgatagactcaccatatcctaatatatgccacatatctgaccccatgtgcaaataaataaaatggaaactggtaagttagcatcatgcatgtcagcatgtgggacatatatatatacacttctgaaagaaacaagagaatgatgagctacaggggaaggaattccgatgggatctangcaggcacgatcgtcgtcgtgtatatatagtattatatggtaat

SEQ ID NO: 16463 - DNA, 349 bp, Zea mays
  unsure (1)..(349): unsure at all n locations
tggagattggtcgggtattgttttgcttgctgcagctgctgcacaccacccccgtattgctgagctccggcacgcggacatagccactgctcctctgtcatttcagaatagaaatggaaacggagccactgcattgctcgctttcactttgtgtgagagacgtctcatctcttgctctgtgagcttgagccgtacagatataacctgagtgcgtctgcaggatcctgttcatggagagatggaccctgngtgccagaatggtagatctcgcactactgctgtctgctgcttctcatggaagacgtaactacgcgcgaatctctgttgccgctgggttgctgttttatgt

SEQ ID NO: 16464 - DNA, 368 bp, Zea mays
  unsure (1)..(368): unsure at all n locations
agcttcggcgatggctaaagagtttggcaacataacagagcaaatagctgtgaatgctgtgggaacttcacacctactcgtctggttatataggactgcaggtaagaaggcgaagcgccaggatttttacaccaagcggacacccgctcgcactcgctgcgtggtggaccgcaaagaccaaacagtaactcttgaaggaggggccgctacgcgctgggtaattgaatcgtttctcgacaacgagctcagggaaggtgttttttagaccttcggcgcttcaaagcttaagagactttttttacggatcaagctctgtacgaagaacgatctatcaccgcgaagnggctactgttggtctatgcttcgtc

SEQ ID NO: 16465 - DNA, 346 bp, Zea mays
  unsure (1)..(346): unsure at all n locations
ttaagcgactgagctgcagcttagctcatctatgtatatattctttttagttctgtgcagttccttcgacccttctggcagcttcctggcttccatgaataacaatgggcccttggtccgaaggtatcttcatgcaaagatatgctggatgaagaattgcttcaaaggcattgagagtaccacgaccaatgattgcatntgttgggtattccatgtcaacaatatcatagacaacttgttcagaccttgtgttgatgataacaccgaatgatactggcattgtgatcttgccaagggctacaatcttgcttcctccgaagccacaaaggggatgtgtggcatcatg

SEQ ID NO: 16466 - DNA, 418 bp, Zea mays
  unsure (1)..(418): unsure at all n locations
agctntggaaagtgagcttgcaagatatgattggacaaagagtgagtcgcttcaatcactctttgatcgggtgatggtgttggtcaacaaaataagagtacttggaagtgaagaatggattgactccaaggtcacaagattattcatgagagcatataaagaataggataagagtcttgcaaggatgataagggatcgtgatgactatgaggatatgacgcctcatcaattatttgcaaaaattcaacaacacgagtccgaagaagcccccatcaagacaagagactctcatgccttgatcacaaatgaacaagacaacccccagaagaacaaagaccacaaagcaaagaaagtggtcgagacctcaagtgatgaagatagctcaagtgatgaagacacagctatgttcatcaaaaca

SEQ ID NO: 16467 - DNA, 386 bp, Zea mays
agcttgaagccatggtaagtagcataggctaataatatgcgaattgactcaagcctagctacgggtgcataggtttcaccgaaatccaaaccttcgacttgtgaataccctatggccacgagtcgagctttgttccttgtcaccacaccatgctcgtcttgcttgttgcggaagacccacttggttcctacaacattttggttaggacgtggaactaaatgccatacctcgttccttgtgaaattgttgagctcctcttgcatcgccaccacccaatccgaatcttgtagtgcttcctctaccctgtgtggctcaatagaggaaacaaactagtaatgtctacaaaaatgtgcaacacgagatctagtagttacccccttatgaat

SEQ ID NO: 16468 - DNA, 316 bp, Zea mays
  unsure (1)..(316): unsure at all n locations
agcttctaaagggagaacacatttntggactttcatatgttcactttgagaaagaaagatttgtagcgcatgttatgcacggaagcaagttggtgtccatcatccacacaagaacatcatgacgactgacaggccactcgagctcctacatatggacctattctgcccgattgcttacataagcatcagcgggaagaaatactgtctagtaattgtggatgaatattctcgcttcacttgggtattctttttgcaggaaaaatctcatacccaagagaccttataaggatttntgagacaagctcaaaatgaggtc

SEQ ID NO: 16469 - DNA, 60 bp, Zea mays
ggatccttaagtcacctgaggcatgcaagctgacatgctcctgtggaagtgtgagcacct

SEQ ID NO: 16470 - DNA, 371 bp, Zea mays
aacatgatcgaaaaagttttattatatttacacacatggatagaaatgcatgtgcaagggagaggaataaaaaacactggaattctggagtaataggtgtccgcatggactgcattaaaaacatatgacaccaaacacacgacgttggtttgagtgggatgtctttttttttacagttcttctctatataatcaaacgtgaaataaagttttcatgatgtccagcaagtgattcctgtgaacctaaaggatgataaatacgcaccggagcccccatgcatactgtacacatttctttgttaattagtacgactatggaactgccaatagtttcacgcttcagcgtgccatagtttctatgtgcgccaatgc

SEQ ID NO: 16471 - DNA, 448 bp, Zea mays
ttatgcttgctgaacaatggaaaagcacatactctttcttattctaacatgccctaataggtgacacaatattcaaaggaacttggttatcacacggcaggaagtctgaaacgtcgtaattgcgaccataagtaatgctcgattattgtagaccctgcatgacggattactcaaatagttagcgtagcgctatatagagattaagggggccaagctagcagacccaacacacaaccaaataaaaacaccatatgaacctgaacaggcaatggcaaaaaaaacagaacttacttttgcttcaaactgatataaagacactgagggcgactcaatatggatccatacttttggcaggcctcaccaacggctcctcaatgttgtcaatgagcagctcgtagaaaagcctctcgttcctttcctgtgataagatggtaccagagaaaagtat

SEQ ID NO: 16472 - DNA, 438 bp, Zea mays
agctgatggtggggtaactttgtttctatcccactatgtggaacaaggattgagtcgctttggttttagtgactgtgatcctactccaacaccttatgacccgagtgtgctattgagaaagaatcggagaattcaaggaatcaattgacatactcctagatcattggcttgctcatattctagttattaaataacttcagaaattcataactaaataaacgtaacttcgaatttattgattcttgttcctacgatcgcgttatgacgcgtagattattatcatgtattatgttctgttgtttggtgcgatgttaatatcttctataccatgtttgtttgtatcgctgggagtagacgagccagctacaaatgatccatgggtttagcatgtggagactgctgagcaggagctcattgaatgcaagttatgcccttgat

SEQ ID NO: 16473 - DNA, 452 bp, Zea mays
  unsure (1)..(452): unsure at all n locations
agctttatactatttagcgcgatgtccagagctcagagaaatctaataaatgagtttagaaattgagttttaatataaaaataattctagaaacttatataattcatattaaactcatactaactccaaattgagccatcccaatctctaaaattttgtaataatattctctaccatctagagtctctgtttctacatgcaaacagtaagaaaattaatttctcgtctaatcctattntaatcacattaaaccttaggaaattcataacttgaaatctataactccaaatttagtgattccagttcctatgatctcattttaatgtatagatttttactgtatatgttatttgcatgtttgatgtgatgttaatntatgtcatactatgtatgtattgtgttgatgcgaatagacgagcaagccattgtggaatctgaggttcaacaagtag

SEQ ID NO: 16474 - DNA, 257 bp, Zea mays
  unsure (1)..(257): unsure at all n locations
cgcgagcttcttctcagtttctctgaagtagcccagntntatcatcttgggcatatcagcttcagacacagtagatttttcanaatccaagtggctgggttttgatgggatcagaatgctataatcttcttcttcatcagcattttcttcctcaacatcagcttggttagcttcggcagcaggtgcaccttcttcaatggccccctctgtcacaacttaccccgattgactcatgacttcagagattggagctatct

SEQ ID NO: 16475 - DNA, 429 bp, Zea mays
  unsure (1)..(429): unsure at all n locations
atgatatgaagctttatggtgcttgagagagtcaattcaattcttattaactcaagctatcaatcttcaatgatctatacatccaatattgacccaaagttgtcttgaactattatgtccaaaaactcatatcatctcggggaagatattgatgttgtaggaaataaagaattatcctgtgcggaaaaatcaagacctacaacatggaggaaagccaaatgatggtaacatgtatgctttcaaatacaagtatcttaaattaccatttcttatgtgtcttgtgtagtcacatataanaaggaagcacttcanatgtttgtaaattatgtcaccattctttgaagaaattcctctcatatggtagaatgcatattcatcatttctatnaccatggcaattacattctttaaattattgtaagtacatcat

SEQ ID NO: 16476 - DNA, 451 bp, Zea mays
  unsure (1)..(451): unsure at all n locations
agcttatgaatgttcttcatcccaacatgtgatagactgtgatgccaaagccagcccatattagtcttagccattaagcatgcatctagatcgacattctctttcgaaaaatcaactaaatagagcttgtcgtctaatacacccttgaaagctaatgaaccatcactcctaaagatagatacatctttatttgtgaataagcaattataacccatgttacataattgactcacagacaataagttgtacccgagcgattcaactaaaaacacattggatatagaatgctcggatgtgatggctatctttcacaatcctttaaccttgccttggttcccatctccaaagataataacatcctgggaatccttgttcttgacgtaggaggtgaacatcttcttctcccncgtcatgtggtttgtgcatccgctgtcgataatccagcttgagc

SEQ ID NO: 16477 - DNA, 450 bp, Zea mays
agcttcaagttggaagaaacagtcccagtttgttcacttgactcggtaattccaagtataagcaaaatgatcagatggacaagtcagggttagaagtttcacctgtccctttccagaataagatggccaagttgttccttcagcgcttcgagctctgtatcctgcaatggcaaaacagatgaaaaatgaggaacaccatctcattgtatggttcaacttagtaagacgcagatttgttggtggcgtaccttcgcctttgattgttcaatctgttgctgggatgctatgagcaacttttgcagctcttcttggtcaaccaaattctagacatgtgaacaacaaacctcactaagtgaacagtataacaagcacctaatagttaacagcttggagaaacttctggtgcttacagcatagtttgtcatgtctagtttgacaccaagtagttct

SEQ ID NO: 16478 - DNA, 333 bp, Zea mays
agcttctccaagtttgagccgaggcattgcctcaccggagaggcggattcaccctcgccggacttcggtcacccgccgccgcgcgtgaaccgagctaaccagtaagccattttccaattccttgcacccatgtcttccctagcatccagtgaagctctctgacccattcgattggactatcgcgccgtgagcaggctggattcctcgccgccgacaagcatctctgcctacgcacgtggaccggccgactccgaccatccccgatggcgacccgcacatcgtcgtgaccctcaggacctcccctacatcctcgaccacctcaccggagcagtc

SEQ ID NO: 16479 - DNA, 448 bp, Zea mays
agcttttctgaaatttaaaccgatagggaagtcgtactagtttatatttattcccttcttcctttttcttcggcatcccccacccaccaggcgttggaaatgttttgttggccaggtattcttgcaccaaatcccgagtactaatatgtttctccacaactctaaattccacttcggccaactggaagggggacccgagttacatgttgcacaatggacgtgtcatgtcgaagctcattctcaggggactcatcaccatagtcataagcttctctctcttcttctcatgagccttcacataaaaccattcatttgtccagccagtcggccacttggtgtgatagccaatcataggtgctttaatatcctttcattatgcaaaattgtaacatccgtagttcttatgcagcccatcagctctagccttagtctggtagtggagttcatg

SEQ ID NO: 16480 - DNA, 447 bp, Zea mays
  unsure (1)..(447): unsure at all n locations
agcttctctaccagttctatatgcaatcttgtgcatgcttttgtagctgcttcattggataatgcatcctccattgctattatcagccttcctccagcgtttgatagctgaaattacaaaagaagcaactttgacaactcagcataacatgtgccacataaaaactaaaatgtaggtccctgcatttcataatttatatcaaccttgatttgctttacatgtgaaataggcacaatgaactcccaaacatccatgtcccccaatggatcttgaaatgaagagtatttacgaactgaaatgaaaagtgtttacaaactgaattttcgcaagaagtccattccaaaccaaatagcagatactagcatcccatagtatcatatctaatatgaaaaatatttttcctttnttggtgctaacatgtcaaaaactcaaaatgattaaacacaa

SEQ ID NO: 16481 - DNA, 428 bp, Zea mays
  unsure (1)..(428): unsure at all n locations
agcttcgtcatctgaaaggaaattacccttaatgtattagatgatttcagttctccagtcttcactaaaaacaggagatatgttgaggaccgctctttctagaagttcaaccgaaggtgcctttattgtttcaaaaaatactttcgaaggtaagggcagcccctatgctgctgacttggccaacaaatcagcatgctcattttctcctcgaggaatattntttacagaaaacccttcaaaggaagcttcaatcctccgtacagtatctagatacttctcaagcttcgggtctcttgccttacaacttttgtcaatatgaccagagataacctaggaatcagttttgagaaccgcccttctgattcccattgcctttaacttccgaaggcccaaaagcaaagcttcgtacttcagcaatgtatttgtgc

SEQ ID NO: 16482 - DNA, 272 bp, Zea mays
tctgatgccattgattttgggtggacgactgggatcgctttggcatccggtcgagcagcacatctgcgcatgattctggataacgtctaggcgatcggcgatttaaattcgggccaccgatcgttaatcggacgggtgccactccatacctcttcgtggtgagcctagtctaatccgatccgtagattggtgatccaacagccgaaaaataaccataccccttcgagcgggtgcaattgcagaagagcccctcggctttacaaaaacaaccc

SEQ ID NO: 16483 - DNA, 401 bp, Zea mays
agcttatcgaacatgcattttaataaatagattatttgtggtcacaaagaaatattttacccttctacacttctaccattatccaacttatataatttaaaaacgaaacaaacatggcctaatagatgtttatgagcctatattaacaagaaggggatgtttgggatggctcgagggtacaactccagtatggagctatagtttataatatcaatttaaatagttctaaaaatatttttaatctaaatagtaaacaaaatgacttatctaaatgtattttaaaggcttacaacttcaactccatgaatttctggagcacctaatgatctgctccactaactctattaaatttgctggagcttgagctgttcggacctaaatatagagatatactctttttt

SEQ ID NO: 16484 - DNA, 399 bp, Zea mays
  unsure (1)..(399): unsure at all n locations
agcgtggcgcctacagnttcctttaataaaacatttgtccaattcgaaatctttgtctcctgaaggcaaacaatggaagctccggtggacagaattgtatgcctaacgctntctctcttcgcgtggtcatttagccctcgaacattccaagaaaaaatagcacactgtggattcataagggaaaaacaaccactccacttgagacattatgctgccaccacacgtagatcagcatgggagcctgctgtaacaaactaacacacagtccggccccaaacgacaacctgaaagtatagagatacaaaggcatgttgtgaacgccagcagagatacaaccgagagaggagggaatggatccgctccgagagagtctgaccatctgagaacacattgatcatc

SEQ ID NO: 16485 - DNA, 451 bp, Zea mays
  unsure (1)..(451): unsure at all n locations
agcttaaagntgcttacaatatgctttcctgcatatattcttggagaaactcttgtaatatagctatggaacaactcatgtaaatttgtacataccttgtaatatattttggctcccttatccgcattcagtctgctttgctgtggacgaaacttctcttttgagccgaaggcgaaaaacaccttcccttcttttcgtacacaacgaagcataaaaaaattttccttcgaagcttttcctcattttctgaagcacctgtcttctttgtgtagcatgatgatgattctatatatgtctaaatgaatgtttatgaatgcaaatgacatgatgacatgtactgtgcaaatgaatattaggacacatgttcaaaaaccataagcacagcccttcatccnctcaagaatgaatacaaatcttttgccgtttacttttcgacttcaccgtttacttt

SEQ ID NO: 16486 - DNA, 440 bp, Zea mays
  unsure (1)..(440): unsure at all n locations
agcttatcatcgatgagcgacgccaacgcgagcaccttctgctagtggtgtttgttcgggatttctaagtaagaaacatggattcattcttagcgttggtttatgaaaatgactcacaagtcaaatccatggaaaaaatattacggagaataaatgtcacgcatgcaaaaaaggaatttaagttggaaacattaatcaaacaaaagaaattgcatgtaaggctcttttttaaatactacttcctccatccaaaaatataattcaagaatctcggtgatacttatctactgctacgtattgtgcaaggatagcagttgggcttgaggagagatgtagtagatatttttcctatcataaatatagacataaacacatatgtggtgtagcggtagctacggacaangaatgagaataggctgtacggggagagggaatgagaa

SEQ ID NO: 16487 - DNA, 448 bp, Zea mays
agcttcggcttcgtcttcttactcctcagctttggcctcggcttcatcatcctatatgtattaaagtattgtaagcaaaattcaagcttgaaggaagaggtaggcacaaggtatgatttcattatcggcttaagatgactccgagcttcatcaccagctttgcttcgtccaccctttgtccataccagttttataaatctatttgctatgcttcgggcaaggttgggaatattatccagatctgctggtgataagctgaaattgggtatattgataacctttccgtgttcgcagctagacttcaggaaggcaacagctgtgccccgagaagctaccagtgcacaaaagtcaccatgtccagcagtaacttcatcaaggtcatcaatttcaccttcgatatgttcgaaagcccccggcaggtcttcagtcgaaggattaaatatttcgc

SEQ ID NO: 16488 - DNA, 415 bp, Zea mays
agcttcgtcagcaatttcttttccttttcccgaagctgcggttacggcctcttcggcggcggtagtaccttcttctgcagccatgtctaacagtatttggtcaatgtgttcaattgtgctctccaggttcaaatcttcagctgaggaagcttcggcagctgtggcctccgaaggagcaatttcaatatctatcttctctgcagccgctggtgttttctggaccgaagctcttggcggcgtcttgtcaattacttctgtcacagtgataattctttgtttctttgccttgattgttttcttcgatttttcgggctccttgtccttctgaaaaaactttgtcagttgagggtccagtggacttatcttcgcaggtaaggtttcagtcattaccttcagaatttcctcaacgacagca

SEQ ID NO: 16489 - DNA, 421 bp, Zea mays
  unsure (1)..(421): unsure at all n locations
tgcaagctgaagccatggtaagtagcataggctaataatatacgaattgactcaagcctagctacgggtgcataggtttcaccgaaatccaaacctttgacttgggagtatcccttggccacaagtcgggctttgttccttgtcaccacaccatgctcgtcttgcttgttgcggaaaacccatttggttcctacaacattttggttaggacgtggaactaaatgccatacctcattcctagtgaagttgttgagctcctcttgcatcgccaccacccaatccgaatcttgcagtgcttcctctaccctgtgtggctcaatagaggaaacaaacgagtaatgttcacaaaaatgtgcaacacgagatctagtggttacctccttatgaatgtcgccgaggatggtgtcgacggngtgatctc

SEQ ID NO: 16490 - DNA, 349 bp, Zea mays
  unsure (1)..(349): unsure at all n locations
agcttctaaagggagaacacgtgataggtctaactaatgttcaattcgaaaaagatagaccttgtgcagcttgtcaagcagggaaacaggtgggaggctctcatcacaccaaaaatgtgatgacgacatcaagacccttggagatgctgcatatggacctttttggacccgtcgcctatctgagcatatgaggaagtaagtatggtttagnttattttgatgacttttcccgcttcacttgggtgttctttttgcaggaaaagtccgaaacccaagggaccctcaaacgcttcctcaggagagctcaaaatgagtttgagctcaaagtgaagaagataaagagcgacaa

SEQ ID NO: 16491 - DNA, 451 bp, Zea mays
  unsure (1)..(451): unsure at all n locations
agcttgctagtgtgtggtttctctcatcaggtcaggaggagcatggccgaccataaggaggagcagtctgtgatggacaagatctccgagaagttccacggcggggactcctcgtcgtcgtctgactcggacgacgagaagaagaaggggtcttcttcggcgtcggcgacggaggccatgaaagccaagatctaccgtctcttcggccgcgagaggcccgtccactctgtcctcggcggcggcaagcgtaagccatcctcccttccccccgatttgtatacccgattctctccttttctccctctagatccgatctagctatatttgtgcttgctcgtgctaccttgtactgctgcagaatacaatactagttcgttactttgttaataagctccatcatgattngaaactgaaaaagtgtttgggccttggttntggcgtatgtagcgta

SEQ ID NO: 16492 - DNA, 456 bp, Zea mays
agcttcattagatctacgacgtagatcttgggatgtgcggttttgggcgttcgaatcttgatttgtgctagatcactggatcaagatccgacgaccactatcgcataccggttcgggatgtaatatagggcgtcagatttcaatcgtacgactctgttgcctccatgcgttttcagccaagtgacaattgcttaaaaccccctaggaaactatttatttaacccgcagttcacgctgtgttcaaagaaatataattaggtcctcagtttgacacaccagaccctagactttagtataattgtagccgccgtccagcactgcagaattaatataaaaataattctgcaaatcaatttatagtataaaagtaaatccgataatcttagaaaatgcataaataattcgttttaactccgaattactccgttccaattgcgttagctgcataaaaatatt

SEQ ID NO: 16493 - DNA, 450 bp, Zea mays
  unsure (1)..(450): unsure at all n locations
agcttggctgcatcaaaacacaaatatctgctaatactgaagctgaaaaacttacgaagttaagctataagggtatacctataagcctagcccactcaacagcttcttcagctcttttagcctcttctaaggcgtcatgagactctntctcattctttctaatggcttcatcggcatttctcggtcacccttcagccatacttcagaataaaacttcccactcatgttagtaacttcggttgaagggtttctaacatcgtcggctgagaaggtaaaatctggctgagctacagccttggcatgatcacaactagccttctccaaaatagaaacgaccccacaggcaccggcaaaggcacataagtcccctctgtcactaagaatttccttgagagcttcgactttgccgttaatccattggataactncaccaggattgccacggatgaa

SEQ ID NO: 16494 - DNA, 132 bp, Zea mays
aaaacccgctccactacacagggaaagagacgctatttttccggccacgcaccgggaccgtggatcacccccctgacgtgccgggcatcgcatactatgccagcggtcccagggcgtagcacaaaccccaaa

SEQ ID NO: 16495 - DNA, 416 bp, Zea mays
  unsure (1)..(416): unsure at all n locations
agcttggcgcaacgaaactcgtggtaaacatcccatcccttgcttgtacttcataccccatcgtgttgcaccaattcgaatggaagatagcttacaagaaccccctgaattgctcaccggaagctaagctccgccgcggtgtcgcgttgggtcgggggcaagtcatgccaatgtatcatccgcgatgggactgccttcatcatgtccgttgtggattggggttgcccgtgcaatggaaatccttagttctagggcgcccgtgcgtggttccgggaatctccggcgaactcgccaccgtatgcggtggtggcggcgccgcgctctgcggattgagctggtgatttggggtgagccattggattgtagatttgcgttgctgatntgtcctcagcaaacattgggatagccactaatct

SEQ ID NO: 16496 - DNA, 450 bp, Zea mays
tagcttgtaggagaggcggtcttaacggattccgtatattgtgtctcaaccgggatctcccgagtcgcgcaacataggaaaggggaggtctgacgacacgggcccacgtggcggtgatggcagtcgcagctgaagaacgggtcccgccagtctgcgttacgagacgtgcgcgcggtgactggacgactggctgatggggcctgcgagacaatggtggagagcgactgatggctagggcccacatggcagcgagtgactactagcggtggagacgggccttgggctggccgatgtaaacgtgacatgggccgatgactaagaatagggcccatgcgcagtttctctttgtatttccttattcttttcttttcttttcttatttcttctgtatcttgaatatcaaattcaacacctcaatttagattcaactgtgtgacatgtgtgtactca

SEQ ID NO: 16497 - DNA, 441 bp, Zea mays
  unsure (1)..(441): unsure at all n locations
agctntatcaaatggacgtgaaaagtgccttcctcaatggaccaatcaaggaagaggtctatgttgagcaacctcccggctntgaagatagtgagtatcctcaccatgtctataaactctctaaggcgctntatgggctcaagcaagccccaagagcatggcatgaatgccttagagatttccttatcgctaatggcttcaaagtcggaaaggccgatcctactttattcactaaaactcttgaaaatgacctgtttgtatgccaaatttatgttgatgatattatatttgggtctactaacgagtctacatgtgaagaatntagtaggatcatgacacaaaagttcgagatgtctatgatggnggagttgaagtacttcttgggatttcaagtgaagcaactccaagaaggcaccttcattagccaaacgaagtatactc

SEQ ID NO: 16498 - DNA, 449 bp, Zea mays
  unsure (1)..(449): unsure at all n locations
agctntacttagttgattntgcaaaagaagaggccggtctatatgcatgcttaatagctaagactagcatgggctggctgtggcatcgccgactagcacatgtggggatgaagaaccttcacaagcttctaaagggagaacacgtgataggtttgactaacgtgcaattcgaaaaagatagaccttgtgcagcttgtcaagcaagtaaacaagtgggaggagcacatcacagcaagaatgtgatgaccacttcaagacctctggagctgctgcatatggacctcttcggacccgtcgcctatctgagcataggaggaagtaagtatggtctagttattgttgatgacttttcccgcttcacttgggtattctttttgcaggataagtctgaaacccaagggaccctcaaacgcttcctcaggagagctcannaatgagtttgagctcag

SEQ ID NO: 16499 - DNA, 279 bp, Zea mays
gcttatgtacgacggcttatctgatagccgtcggacataatgtaatgtccgacggtcctcctgacaaccctcggatatactacgttacgtctgactgcttgccggggtcttcggacattaccttatgtccggcggtatcctatggggccgtctgacattagagagccgtcagacttttactgttttactgtagtgatgttagaatggaactcacctactacagtacatcaagttcggagtttccttaactggctggatataccacagaatcttccggat

SEQ ID NO: 16500 - DNA, 425 bp, Zea mays
  unsure (1)..(425): unsure at all n locations
agcttatatatttatcttttacatacctctttatggcatgtaattgtattggcatcttccatcccatcgccaacattattnttattcaattctacttcctggtacaaataacatgttactatgcataatttatgttacaaatagtataacactaaaaacatctggaatattattaccttgtcttcctcatcatcactaacatctgttgactcattacatccaatatctggctctaatcngcatataacgacatcgagctcatccaacacctccatcgtcttatcgtaccctgcttttgacatacacgcctggcgaactactttcattgttttcgttaacaacattntctgtttgtatgatttaataactccatccttcccctgaagctcttatcaattctttcaaatggaacatcttttcttgat

SEQ ID NO: 16501 - DNA, 211 bp, Zea mays
tgcaaacttgacggaccacttgcatattaacttgccacttgaagactagtccggtccacggagtcgctctatccgaacgcgagttacttatcgcaccaggtgatgagtgaggtatccgcatcccggaggcgtaggagtccctcggctcggtcagccttggctgcttacgagtactctgtcgtttccaggatccccttttcgaagaagtcaa

SEQ ID NO: 16502 - DNA, 439 bp, Zea mays
  unsure (1)..(439): unsure at all n locations
agctnttatttataacacttttgtcttaaacttttaacataatggtcagttatattggattcatttacttaataatattcattttacaacagcataagaataggacaaacacgtttgatgtaccgcgtcctgacccatgtgactagcacaccattcacatccaactcccactaatcagagaattgatttcaagcaagctgaactagcttccatcccgtcaccgactgggattcatagagaagctatcacattatgacgcagaggttggcaaggcttgttcagtgatcaaacagactctttaccatattgttgagaaacagtataatctatctgatgtttttgctgagttaattgatgaggtcctccgtgctgagtcagaggagaatgaagatggttctgatgtgcagcaaccatccaagaaatcagatgatattcatca

SEQ ID NO: 16503 - DNA, 279 bp, Zea mays
  unsure (1)..(279): unsure at all n locations
tgcatttttgctcttttttgcctttacattttcttttaaaaatacaatacaagaaggtccaaccttcagtttgatgtaataagcctatgattacaccatcgggtgtaacaaaaacgaatcaagaagctctaaagtcattcctaagggaatgcagagtaagttacaaagcttcaaagttgttcctaagggaatgtagagctaagataccacctaagtaaaaggtgaagaagctctaaagtcatttctaangggacgcagagcttaaatgccacctaagta

SEQ ID NO: 16504 - DNA, 450 bp, Zea mays
  unsure (1)..(450): unsure at all n locations
gcttctaaagggagagcacattttaggactaacaaatgttcattttgagaaagacagggtttgtagtgcatgtcaagcangaaagcaagttggcgcccatcatccacacaagaacataatgacaacggacaggccactggagctactccacatggatttattcggcccgatcgcttacataagcatcggtgggagtaagtactgtctagttattgtgaatgattattctcgcttcacttgggtattctttntgcaggaaaaatctcanacccaagagaccttanagggattcttgagacgggctcaaaatgagttcggattgagaatcaagaagataagaagcgacaatgggatggagttcaagaattctcaaattgaaggttttcttgaggatgagggcatcaagcatgagttctcttctccctacacacctcaacaaaatggtgtagt

SEQ ID NO: 16505 - DNA, 434 bp, Zea mays
  unsure (1)..(434): unsure at all n locations
agcttcacatcacgtatttatcatagtttcatgcaatatatttagtatctcgtcttcatctatctcaacgctagaggtcgcggaggacatgaaagaattatttggagtgaaaggatagtgacacgaatgaaataagaagtgttaggagcaaaatggagagtgaaatgtgtgaatggatccaaacatccctctctattttgagacctaattttatttatttattgattctttgaattggttgtgtaatcccactagctaatagatggataaactatagtcctatggagaatacttccgcttctctgtgacaactgtccaccactgggagtagtttcttatttatatttatgaattatgcagctnttattttatatttaaattatatacttctaattatttntatgaattgtgaattttatatgaattaatatata

SEQ ID NO: 16506 - DNA, 427 bp, Zea mays
  unsure (1)..(427): unsure at all n locations
agcttgagtgggaattcaaaaccgaatttgaatntatatcgtatctttgaaaatgaagaaaataaaaaaaaagaaaaggaaacctactctcgggcctatttccaagccggtccagtagtcttttctcaccgtctcgcggcccaggaaggaatttgcaccccgccggccaaacgcgcttcttcttttcactccgtacgacatgcagggccgacatgccagggtgttcttcttccccgaagttcttggccaagtttgttacgctcgcgtaactgactccccacttcatcgcttgagtgtgtcgttgtgccgattatatatactcgcccctctcgattccatcgaagaacagggatgccaccgtagccgagcgattgacgagagccgaanggcatgagagatggagagagggagctgatgccattgatat

SEQ ID NO: 16507 - DNA, 452 bp, Zea mays
  unsure (1)..(452): unsure at all n locations
agcttgaggacaagttgtttgaagaagtgagaagagatgttatgacctgtatatcttatgcacgctagaaaacaagtcatgcatgtattgngctcaaattacaatagacgtaaatagtatctaattaggaaatagagttgtttgtgaggaaaggagagtctaaatcgataaggactccttgtttaggaaatataattatttgttaggaaaggagattccaaatcgataataactcatgtagtttgcttggtaaaacaagtcctctaggggctataaatatanggaagcaaggcaattatctttgtcagtcttcaagagctacccacatgttctatccnctcattatagtgtcgatctacaccctagccaccacaacacctcanaattggaggttccaaccctgaccccaaatctcacatccctacacactttgcaactgtgacagggtcaca

SEQ ID NO: 16508 - DNA, 435 bp, Zea mays
  unsure (1)..(435): unsure at all n locations
agcttaatgtctaaagctatgactaagcgatcttgtatatggtcgtgcaagatattatttttcactgttgaccatattatttatagagtggagtttgaaatgagagatgtggaagagtaagctgatagagatagcctaagatggagcacatttctaatagctccctccccatcggccatgaaagcatctaggcccctggttggttntaatgattaatgacaacgtaatattatatgtgactaacgtgtgttttgcagagacaaatggtaagttacgtcgcatgacaggtagtagtactacaacggtgaatacaatcccggagataagaactcgaagcgacggctaaaacgacggaacaaaaggtgaaggtctactgagtccgagtgtcaaggagatgtggacacttcgcgattatgtaggtcttttattctcttt

SEQ ID NO: 16509 - DNA, 209 bp, Zea mays
agctgtgtatgcaccccgacacccgctttcgttatgtttgacgtgcggcaacgaaattgcgcaaaaccacccaaacatgattttggacctcaagtagtggattgggcatgttcgttgcgaaaaacgataaaatggttccggtggcgaatactcgcgctttgtatgcacccccgacacccgttttctgaatgggtgacgtgcggcaacca

SEQ ID NO: 16510 - DNA, 433 bp, Zea mays
  unsure (1)..(433): unsure at all n locations
agcttctaaagggagaacacgtgataggtctatccatttgttatttcgaaaaagatagaccttgtgcagcttggcaagcaggtaaacaagtgggaggagtacatcacagcaagaatgtgatgaccacgtcaagacctctggagctgctgcatatggacctcttcagacctgtcgcctatctgatcataagaagaagtaagtatgggctagttattgttgatgactnttcccgcttcacttgcgtgttctgtttgcatgataagtctgaaacccaatggaccctcaagcgcttcctaaggagagctcataatgagtttgagctcaaagtgaagaagataaagagcgacaacgggtccgaattcaagaatcttcaagtggaggagttcgttgaggaggaaggagatagacacgagttcttcgctccctacacacc

SEQ ID NO: 16511 - DNA, 442 bp, Zea mays
  unsure (1)..(442): unsure at all n locations
agcttatgaagattcttcatcccaacatgtgctattcggcggtgccagagccaacccatgttagtcttagcaattaaacaagtgtcgagttcagctctatcaaaatctaccaagtatagctgaccctctaacactcccttaaatgctattgaatcatcacttcttctaaagacagtgacacctacatcagtgaatagacagttgtagcccatttgacataattgagatacagaaagcanaatgtaatctaaagaatctacaagaaaaacattggaaatagaatggtcaggaggtatagcaattttacccaatcctttgaccaaaccttgatttccatccccgaatgtgatagctcgttggggatcttggtttttctcataggaggagaacatctttntctcccctgtcatgtggtttgtgcacccgctgtcgatgatccaac

SEQ ID NO: 16512 - DNA, 421 bp, Zea mays
  unsure (1)..(421): unsure at all n locations
agctntgtgagagtagtttngtttgaaatttctatcaatagagaagatggttagttatactcagtaatctttgacagaaagaatgtgtaccataataataagaatgagcgcatacacatcgtaagtttcttgttcatataaaagtgaaatcaaaacgatgaacaagaactagaagactggtgataacacaataggtgaaaacataatacacacacagtcaacgtaagcatcgagagtatatatagagtttgtgagccaaacgcaccatacaaaagtgaagctagtacagagagtaacaagcacatatattacatcaaaatgactctctactaactaactaactaactccccctagcactcacaactcatatctctccccctttggcgtcaaacaccanaagggaaccccgaacctacacac

SEQ ID NO: 16513 - DNA, 390 bp, Zea mays
ttcagcctagctgccttcttcgatcttgcgggctccttttccttctaaaaaagcttcatcagatgtgccccagtggacttaacttgacaggcaaagattcagtcattacctttaagatttcctccacgtcggtggcagagggtgttgcagcagtttcttcttcatcatcaattgccttctgctttggagctgtagcttttctcttcttcgaagcatctgtttttggctcaaggcttcaacttttctttttcaattgttcttcatcgtatttcatcgatttagtagcttctttattcaaagcaccagccactctctttctcttttgccctttggcatccttgtctagccgctcgtaatcaggatactcaaagtccaaagcatccattactc

SEQ ID NO: 16514 - DNA, 435 bp, Zea mays
  unsure (1)..(435): unsure at all n locations
agcttggtgccaatggagaagcagaaatccttgaagtcttggctgtcaaattgcttgccattgtcaactatgagttcggacgggacttcgaagcggcaaacaatgttttgccagaagaatttctgggcagtcttcgatgttattgtggatacagccctcgcctcgatccatttggtaaaatactcgacagcgatgaacgtgaacttgaggttcccctgggccgtgggcaggggtccaacaatgtccaggccccagcgctgaagggccatgtgtgggtgattagcttcatgaattgagaagggcttctcgagcgtggagaaaatttctggcaggcttcgcacgaccttgtgacccgatttgcggcgcagatcatggcgggccagtagaaaccttgatggattacctttgcggctagggccctangccctgcgtgag

SEQ ID NO: 16515 - DNA, 467 bp, Zea mays
  unsure (1)..(467): unsure at all n locations
atccttaatcacctgcagctgaagcttactccccctggagggccattcatcatcttcttatttgaagcccggaacatacaagctggacaacaatcaaggcgaggtctacagcaacgcttggaacatacgacaactacgtcgcttttacccttaagatgttttcaagtcgttcatatacctcgttttctatacatacacaaataaagtctaaccgtcaaggaagggtcagccttgcctcggcaaagcccgaccctccctcgggggctagaaggggggaaccccctctgcgtcaaaattttccttggaaaagttttctaccaaaacgactcgcgcgctttccaactacgtcaacagtagaacgagtaagagcgcacgtaagcggcaaggccaaccgagccgagggactcctacgcctccgggatacggatacctcactcgtcaccttcccganaaagtaactcttactc

SEQ ID NO: 16516 - DNA, 441 bp, Zea mays
  unsure (1)..(441): unsure at all n locations
agctctntggaaacacagactaagcacggactgttcgggctcttgctgcggaccgtccgcgacaccaaagtgaccctcggacaggaacactacaaaaacacaagtctacactacagaccattcgatggagaagcgagcaccgtacgagaccaagcgcggaccgttcgacctcatgcgcggaccgtctggtcggtgaaaaccagataaacccgaaggtgacgggttcggtaaaatgtanttttagcgtcctcgcggaccgtccggtgtgcacgaccggaccgttcgcgactgctttatctaacatttgacgacacattaaatgctatatagccgctgatatagccgttacagctgaccattgcgatattagtcgttgatgtgcagtgcggaccgttcggaccatgggcgcggaccgtccgtggtcggcagaaaaggaacaac

SEQ ID NO: 16517 - DNA, 408 bp, Zea mays
  unsure (1)..(408): unsure at all n locations
cttgaatcactnttataccccggtgataccataaaccctaattggaatcctggaaaaccctaaaactaaaacctaggggcttatgtgcaaaagtggtgaacctttggactaaagtgtaaaaactactatgtttaaacatataaagtcatttggttcacaaatatgtgaatttgcaagttaaaccctaagttttgggcttatttgcaagaatcacctcttaagcactatagagcctaagtctngaaattcagtttgttggtttaactttggagccctgtatcttctgaaatatagggtttttgcccaaagtgaccacaacaagtttgtagaccaattaatggagaacaactntgcttaaggttgtaagctcacttgttgagaaaaatccagagatatntaagcctgaag

SEQ ID NO: 16518 - DNA, 433 bp, Zea mays
  unsure (1)..(433): unsure at all n locations
agcttgccctaaaaagaaaatacctcttccncaagaataatcttctctcctcccccccgattntaacagacccttcttttcccattccagatggaagactctctggccattaggacatcctactgctcggaggtggaagggtttccacatcttttacgaagttgtgcgcttcgcatgggaatccgcaagaagccggaatacgtctggaaggagtatttcaagggaggtatggagaaatgctctatggcagtctacctgngagaaagccgaaactatccgaaccatccttccttccaagtcactnttaccggataccgctttccggatacttgccagaatgttgcccgatcagccctccgacaactatgccagaactacaacaaggtgatctttgaaaccccccttcgctactttccacccagcaacaagaata

SEQ ID NO: 16519 - DNA, 432 bp, Zea mays
agcttatccaaaaagtttggtgatttttggagttactatttaatttctaaaattccaggagtataggttttggctattttaaagactccataaatcctggtttggactaaaaatcttggaaccatttttattaaataatatagaaatttaggagtccaacaaaattggtcttatatttttagcatttctctacaattttctaggaattctctaatcttggaagaaaaagaaaaagagaaaagcatgaatagtattgggctgaaaccggcccaatacagcccatgaccaggtgaaacgcgcgcgctcgcgcccgcgctggcgtctttgcataaatacccctggtgtattgaacaacccttaaagagccctcaacactattgttttgtctcactgacactcccatcaaggtccctccccttctttctctttaca

SEQ ID NO: 16520 - DNA, 442 bp, Zea mays
  unsure (1)..(442): unsure at all n locations
agctntgtatccttcaacatgaggtcaaaatctatactatttcgacctataattagctccaaaataatttaatagagcattatattttatttatgaattatattattttatagcttcatgaattatataacttctatttatgttttataaattatgtaatttgtatttgctcaattatccgtctcttgaaagttatatccattttttatttagggtaattgtgtcattgcttctttatagcatataactacaaatttgtccctactttttaaactntgcatgtttgtcccttgtttttcataacaaactatggtgtgcccctattttgttagtagtaattagcggtgttacatcttgataaaaaagacaagagacaattgcgctagtgcacctatttaaagtgtaattgtaattttgtattggttttagtccttacatattt

SEQ ID NO: 16521 - DNA, 448 bp, Zea mays
  unsure (1)..(448): unsure at all n locations
agcttgtcaagcatattttggtacccatctcttgatgggtccatcaaggttagtcaacaaagatctaggaacccaaacgtcctttgtgttagcactatgtaaactcattacctttctagcacaagttgcaattntgggttgcctagttacatgagaattaattgacaagctaggagtgggatagttaccattgggacaatccttgcattgatgtcccttctttcggcatatgtagcataggcgatcttcaagtcttgaagatttcttccttccttgtttcttgcttgctacatggntagtgaatattttcttttctaacataatgcctttttgttttaaatagggacaagacctaattaagtgtcccttctttgagcatttaaaacaaagtttatcatccttgttaataatcaagtcanttttaatatagggacatgacctaattgag

SEQ ID NO: 16522 - DNA, 445 bp, Zea mays
  unsure (1)..(445): unsure at all n locations
agcttctaaagggagaacacgtgataggtttgactaacgtgcatttcgaaaaagatagaccttgtgcagcttgtcaagcaggtaaacaagtgggaggagcacatcacagcaagaatgtgatgaccacttcaagacccctggagctgctgcatatggacctcttcggacccgtcgcctatctgagcataggagggagtaagtatggtttagttattgttgatgacttttcccgcttcacttgngtgttctttttgcaggataagtctgaaacccaagggaccctcaagcgtttcctcaggagagctcanaatgagtttgagctcaaggtgaagaagttaaggagcgacaatgggtccgagttcaagaaccttcaagtggaggagttccttgaggaggaaggaatcaagcacgagttctccgctccctacacaccacagcaaaatgg

SEQ ID NO: 16523 - DNA, 423 bp, Zea mays
gctttggtagaactagtttcagatgatcttcatgtgtttcttcattctgagagtatactagtatattgtcgatgaatacaaccacaaactggtcgagatactccatgaatactttattcatcaagttcataaattaagccggtgcattgaaaaatccaaatgacatgaccaaaaacccatataatccacatcttgtagtaaaggttgtcttaggtacatcttcagttcgaatcttcaactaatggtaacctgatcttaaatctatttttgagaatatattagctcctctgatatgatcaaacaaattttcaatccaaggtaacaagtattggttcttaatggttacttcattcaaacttcttatagttgacgcacatccttctcgaaccatctttcttgttcacaaatagaaccgatgctccc

SEQ ID NO: 16524 - DNA, 422 bp, Zea mays
  unsure (1)..(422): unsure at all n locations
gccgaagctcagcanaactcggatttgagaaaactactaacaaatcttcaagaaaaatgccttgaattcagcaacaagtgtattcaacaactaaggaagatttttcactcagttggagccagcagcgaagaatttaccccctcagctgaagatctacaaaaaaccttcgaacatattgagggagagattgacgagctcgacgaagtcatagctgggcatggcgacttctgtgcctaggtggcttctcgaggaactgctgcagccttcatgaaggctggctgtgatcatgggaaaattgtcaataggccaaattatactttgtcaccatcaatcctggatgacatccctgatctcgcccgaagcatctcgaatcgatttgtgaaaatgatatggacaaaaggtggtcgagagaaagctggaga

SEQ ID NO: 16525 - DNA, 396 bp, Zea mays
  unsure (1)..(396): unsure at all n locations
agcttctagtggaggaacgatatatnnnttatttactcattttatccacaaaattcttattttcttctcttttctaaattctacaattccttttggattntaaattccacttttgactntaatatttttcttgtcacatttattattttattttgtcaccatgtgcacacaaaagaaaatcccagcatgatgcaaaattttaatggcatatattctttttattaattatttgcttttgaatatggtgttcacatgggatgatgcataaagatcaaactcacataaatagaaattgtttctctattggtattatttctagcaaaatacaaagtgggtgttacagtggtggctgacgccactagaattgtccgcacctgcgaagggtgccattctatg

SEQ ID NO: 16526 - DNA, 452 bp, Zea mays
  unsure (1)..(452): unsure at all n locations
agcttcggtttcgagagcaccttctcagcattngcaaggatgtctgaagataaaaaagccgctggtgattcgaagctaagtctttctgaggaaatgcatctgggctttcttcaatcaatgtncaagactaatacagagaagattactaaagagattttggagggtttatctgaagatactggtgccagtgacagttttgatgcggatagtggtggtgaagagtacgaagatcgaccgtggtgaccatgtcacacagtcttcggaaaatcgagcatcaaacagagccatcttgatagcatgaagggaagggtattttgagacatgtctattgtgagggcagatgccggggagaagactacgcctactcccgaagagaacgaagtcataatctttcgaagcttcttgaaggctggactgcgatttccttttgagcaatttgtcgtggaagtact

SEQ ID NO: 16527 - DNA, 274 bp, Zea mays
  unsure (1)..(274): unsure at all n locations
tgtgaatggcttgctgaagcaacataagctgcagattggttgcccacatattctggtatgtaaggagagtggcacgaagcagtatgtaaaacctgcttcgactgattctgccgagcttctgcttcggcaatctctttttgcttcagaatagtgatctggcacgttcttgtagtgtggcccttgtcctcaccacaaaataagcaatagattttcctgngctgatccccatatcttcctctgaagcccctgccacttctgccccttggagctggtg

SEQ ID NO: 16528 - DNA, 432 bp, Zea mays
  unsure (1)..(432): unsure at all n locations
gcttaacgacctggggcccgggacgatgcgcccgttcttgaccaggtaggacggcctgagcagcgggtgctgcanggcgaaaacaaagtcggtgacgccaggcgcgagcatcgatgcccgctcgtctctggcgtctaggacgatggggatggaggagagtgccacccacgggcggtgctggaactcgagcgccacgtcgcgcgctgtttgctcacgggcgcgagacgactcccccacattgaacgacgacgacaccatggctggcgtggcgctgggtgcgctctgcctatgcctgcgttgccggcggcggcgtggatggggctgctgctgcggtgccacccatgggcggagctggaactcgagcacttcgtcgcgcgctggttgctcacgggcgcgagacgactcccccacattgaacaacgacgatgccat

SEQ ID NO: 16529 - DNA, 406 bp, Zea mays
  unsure (1)..(406): unsure at all n locations
agcttgaagccatggtaagtagcataggctaataatatactaattgactcaagcctagctacgagtgcataggtttcaccgaaatccaaaccttcgacttgtgagtatcccttggccacaagtcgggctttgttccttgtcaccacaccatgttcgtcttgcttgttgcggaagacccacttggttcctacaacattttgattangacatggaaccaaatgccatacctcattcctaatgaagttgttgagctcctcttgcatcgccaccacccaatccaaatcttgtagtgcttcctctaccctgtgtggctcaatagaggaaacaaaagagtaatgctcacaaaaatgtgcaacacgagatctagtggttacccccttatgaatgtcgccaaggatggtgtcga

SEQ ID NO: 16530 - DNA, 443 bp, Zea mays
  unsure (1)..(443): unsure at all n locations
agcttatatctacctactagaccaagtaaaaatgtttaacctctctgtctactccatttaaattagttntaccccttattctatgatatgcttaaggataagaaaaatagaaaatgtaattaaattaatgaaccagagagtacctctatttttgttaggttacttattcaatatagttcactggaaaaatatatcataccctgttntagtgtaaaataagtaggatcccttttgttttaataaaacaagtgaaacttagaaaaactctacaaaaataaccccaaggtaaaaacacccccacccttgggataactaatgttttattaatgggaacttatgaaaaatatgaaacctgttgtttgacatttttcaaataataatgtagtagaaagtgcctttntgatattaaactttagaaagtcataactaaataaccacccctt

SEQ ID NO: 16531 - DNA, 426 bp, Zea mays
  unsure (1)..(426): unsure at all n locations
agcttagaggatcactgaagatcgctgccatcaaagtctctggttttggagagcgcaagactcagtacttggatgatattgccatccttactggaggtcagctaaacttccattctaaagcttcattttgatcatgtatgcaccttatccataaacatactttgtttctgcagcaactgtaatcaaagatgaagttgggctgtcacttgacaaggccgacaaatcagttcttggaacagttgcaaaggttgtccttacgaaagagtcgacaacaattgttggtgatggcagcacccaggaagaagttactaagagggttgcacagattaaaaatctcattgaggtctgaccttctcctattctatttgctcacttgactntactgctcangtgaaagtctgaagctctgttttctgaacctaaatt

SEQ ID NO: 16532 - DNA, 397 bp, Zea mays
  unsure (1)..(397): unsure at all n locations
agcttacatgcggtaaagaagaggatataaccaatggtgttgttatgaaaacatcgctctcaattgagataggagattagagattttagataacagacataatgtaattacaaggtatgacagagtgatgagaagggttaaggaaataacaaacaaaagcacaacaaaggatagagtaaaaaacaagcaggtgacaaagaagaggatacgaccaagggaaaagtggtaaattacaacgctcagattgagatagaanagaggagatttaaagggcaggtataagataaacctcaatgtgagatatagaggtgtcaaaggtgaaggtgataataatgaaaaacataacaaaggatagagtttagacaagactcgcgaagtggcaaagtggagaaaacaa

SEQ ID NO: 16533 - DNA, 444 bp, Zea mays
  unsure (1)..(444): unsure at all n locations
agcttcngcgcgatggcagaagggggaaccgacttatagatgaaaagacttcggnggcctcgacagatttccataagccgttaacaaatgtaatggacatggatgtaattttacgtgggctgcgtcccgcgtctataaatagatgaacagtactcccgtactgttcacgctgactgggcattggcttttgcgtcacgcttgtactttttaccttctctcangaccgaaggtacatttgtaatttgaaatcatttctatttctccatgtgaataaaatagaaatgattntatgttgatgtttatatttcacgttttatatgaatccttcggcactattttatttacgaaggtatgtcttttatgaccttcgtcctanagcattatttcccgaaggggcatatatgttcgaaggacgaaggaccttaatggttaacattttttatg

SEQ ID NO: 16534 - DNA, 433 bp, Zea mays
  unsure (1)..(433): unsure at all n locations
agcttgaactntttttacagacctacatgcattaaacggaaagttctcagaccatacacgtcctctatgttttgcaagcacatatatatagatcaaactcatcgaaggtacattatctaacgggtgaacatcatcgtcttattcgatggtctacttttttttatttctccactaataacaaactaggacaaacaacatacttattattcgcaaacaaagaagttggctggagcatgcatngcatattgcatcgtcgtccggccacactgccgcctgcctcgcacgcgcgatctcacgggcagaaggtgacctggtagttgctggtgccgctgcaggcatgggtcttggtggtgtcgctgggaaacaggtangcgtctgggcagctgggcccgccgcagttgagggtcacgccggtgctgcacgagaagagcat

SEQ ID NO: 16535 - DNA, 451 bp, Zea mays
  unsure (1)..(451): unsure at all n locations
ttacatagacgaacaacgagaacagttgcaacgtatctgttgggatatacaaaatgatcatgaaaggctagtacgtgtgcttgataagtctactatgtcaaatcttccttcgcacgaggttgaattgagggagtacacacataattcatcggctacaggttgtcacgaccagtcacaacccctttatgggatgccgatggacatgtaccctatgcaacgacaggctcccacgcacatcagcgataaatttgccgatctgcgcatgtccggaccgtccgcacgtgggcgcggaccgtccgggtcagcggcggccgatcccatttttagaagcgaattaccgagacctgcacccaagccgccacatgccgtgcaaaccctagatagcccatntggaccgtctgcgtatggcgccagacagtccgaatataatgtctgacggtccggcacggag

SEQ ID NO: 16536 - DNA, 451 bp, Zea mays
agcttgtggcaaaagctagttacaccgtgttgatgccataacatgaaataagccccaacaaaatatggacgtacgccaccaaaatgttaccgccacttgttggagagcttggctccaaaaggattactcctaagagttgtgggtgaatgaattgctggcgaatcacgtgatgtctgtgagaacagaaaagacagcaggcaaattatgtatagataatatcatgaaagaaatcgccctttctctatcagccagcgatgcttcaacctgcttgttcttggacatctatctcaagacagccacaacctactacactacggtctggaattcttcgtagattgcagcatgaggtacctgtgaacagacatttcagattcatgatgctaacatatagtgtcatacacgcgcatcaagaatcaagtgtcatatactgaatataatattaaatgataga

SEQ ID NO: 16537 - DNA, 423 bp, Zea mays
  unsure (1)..(423): unsure at all n locations
agctntgcctctggtagactaataccagagaggccaacacgtatctggagtggagagatggcgagagtagcgtgtaccctccgtggcaagaggctagacggtggtgtatctgtgctctcggttggcgtgaacccggtctggtcttaagaaacccggtggcgagttgacatatgcaagggttaagtgctacatatgtcgtgtgattggagatccccagctgggtattaatccgttcagatcgctgttacttctcggacatgaagacttggtcactgccctacacgtagaatcccagtgaacttagaagggtgataaaagacatctagtatagtccaagtgctcgaactangatagaaagaatcctagatgcgggtaattttacttaacctgaccattaaatttgggatttaaggatctactatt

SEQ ID NO: 16538 - DNA, 429 bp, Zea mays
  unsure (1)..(429): unsure at all n locations
agctntatcttaccagatcagatctagagccggaagcagatccgcagaccatcggtgatggagaagacagaggagaggcagatccacagatccagtacaccgaagtccatagttgtcggcgtttcgagaccggngggtccctaagccgacgagtgagtgtgctgcgtgccccagcacagatgggtcgagcgcgtgggcgagcgtgaaggggggagaggcgatgtggccggagactggcgtgagagaggtggaagtcccgcggccttcgtgttcgtcccgcgcccaggtcgggtgcgcttgcagtaggggggttacaagcgtccacgcgggtgagggaagcgagcggccccaagagagcgcctgtcccgtcctcggtcccgcacggccaacctcctctgagaaggccctggtccttccttttataggcgt

SEQ ID NO: 16539 - DNA, 422 bp, Zea mays
  unsure (1)..(422): unsure at all n locations
agcttgccaattcttagcaaagcagcagcatctaccagcacatcaactgcaaaccatacccgtgacatggccatgggcatgctggggactggacatgattggacccttcaagatagctcagggaggatacactcacgtgttggtcgctattgacaaattcaccaaatggatagaatacaaacccattgcttctctgacttcagccaaggtagtggagttcatacaagatataatattcaggtttgggataccgaatagcatcataaccgacctgngatccaatttcactagctctgaattctttgatttctgcgaacaacaaagcatccagattaaatatgcatcagtagcacatccgagagccaacggccaggtggaaagggctaatggaatgatactggaagcactaaggaagaaagtct

SEQ ID NO: 16540 - DNA, 383 bp, Zea mays
  unsure (1)..(383): unsure at all n locations
agcttggcttccaagctcccgcatcgaaacatatggtagacactccaaaaaaaacaacagaaaaaagatgctactgtacttagaacctaagtctggctctggcatcacctgaactgagttcaacaaacagaggaacaagagatcggccaagcctgacaaaaaaaagttcaagttctttcacctgcttggcctcacaagctttgacgaattcgccgagcatgtagatgacgaaagcgttggccttctgcagcctncgcttcctccccctccctcctgcatgacaggacagagagaggcatggacacctgatgggcaggcacaagcagagcagcggaaacaagaaagcgggtgatggtggatcgactaattaccgaggacgtgca

SEQ ID NO: 16541 - DNA, 434 bp, Zea mays
  unsure (1)..(434): unsure at all n locations
agcttctttcttcctcctcatcctcatttgtgcttctactatcattttcattagccacacaacacatgtgggaatcgaaatgggaagacaaaccttttggagaggtggattcatcgtttggtctccatcgttcattttctccttcttccttgtaagggttagtatcacaaaaactaaagaaagtagaggcatcaaatgaactattatgtttggactcatcaaatttgcttctaattctagtccaaatatcatgcacatcatggacggattcgtcatagtttgatatgaaggcatgataatcttctttgctaagagaattagttaagatgtcaaaagctaggtagtttaagcgataacatctttgatcctcctcggaattaattnttccattaaaactagagggaanaatactcttgtcaataatttgntctaat

SEQ ID NO: 16542 - DNA, 402 bp, Zea mays
  unsure (1)..(402): unsure at all n locations
agctttctcgactaagtcggagatagggcctcatggacgggcgaaagtacgcgtaagcggcaaggccgaccgagccgagggactcccacgcctctgggatacggatacctcactcgtcaccttccgcgagaagcaactctcgcccacgcaaatatccctgttaccgacggaaagtccagatgctcgaaataagaggaaagaagacgcggctntacaatgcagcgagggtgtgttttctggcctcggcgaccgcagaaggcacacgctacaagacaatctgatcctgcaggctcgggtcttcacgctgaagggggccgtaacaccctcggcatcgacgacgtcttcagcaaggtccgacccagcctcggatggcgacgcggtccagggacttctccgggaatc

SEQ ID NO: 16543 - DNA, 440 bp, Zea mays
  unsure (1)..(440): unsure at all n locations
agctttagacagggaaccaaatacccactaatgccctgtttggttgggtagggattgcagggattgaggggattaaatccctctatattcaatgttgactagcaaaggacttaatctcctccaatccccctcaatccacccctaaccgaacaagccctanagtgctactctactttgcgtcgtgactattgaaactcaaccgcccgttgcagtctgcacataaagatatgctaaccgtccctcgttcatagatgtgtttaatttaaagatgtctggaatgggagggttctattccatgtttttgggttacgaacttgggatgggtcttgctgtagttaggtgctatttggttctatctactgcaaattagtccatgtcaaatagatgctagctaggagtattaaatatagactaactataaaactaattatatagatgag

SEQ ID NO: 16544 - DNA, 441 bp, Zea mays
  unsure (1)..(441): unsure at all n locations
agcttaaccttgtaacgaggataagcctaccttgttccaaaggtggagattccttaagtctctttgaaatctttaagggtaattgcttaaaatggttccaacatgctttcataagtgcatagtctgtcgtgagcatcacactnttattatgatacattgcacttcaaaatttctatgatataaatatgttctcattaacctagttatgtgcacttgacatttaaggccaaaatctgtattcctctccaggcacatatttagggggagcaatctatattatatagaactatntacgcttaattggcatatccttttaaccatgtatctttcctttggtaccattgcatatttcctatctctcttgtgccaaggctaagactaatatgtttccatgagtatctcgtgtattaagtcttagattgaaaggaaaatggagtattc

SEQ ID NO: 16545 - DNA, 379 bp, Zea mays
  unsure (1)..(379): unsure at all n locations
aatcatttgtttcttacacgaatattntcttgcttttctgcccatggtgctgcgtcaccctattttggcccaatgggtcgtgtatcaaattaagtccattaaggacgcatcctagggttgcagcacgaccccaatacccttgtggtcgtccttccatatntatagaccccctagccgccaccaagaacaacgggttttgttagatcaagtttagctctcgctacttgcttgcaagcgcgcgtgctagttcagccgcccgtcttcttttcttcggaaccncaccatattggagtttgactntgaaacctacatttagatctagtaattcagtacttgttcttgctagttcttcgatggcttgcaggacgagttccctagt

SEQ ID NO: 16546 - DNA, 450 bp, Zea mays
agcttcggcctctctttttcttctctggccctcagcattcttgttcagtcgcgcatagtcaggatattcgaagcccagtgcatcaagcactcggttcagccttcgcttcggacgggtaccgaaggctgctgtcatcaattgatcttcttttttcgaataatttccaagaatttcattacacatcacctcaactgtgtccagccactcttggcagggcttcttaaaatatttcttgaatttgaagtggtaaggaagccggacaagatccccttccttcttctccccctttaactttggcatttcccattttttcagagtagggaaaactttgaatgctaagaattcttgaaccagatccctggtaccaatatgctctgcaatgattctgaattcatccattgcccgttgagtttgaccctctggtgtcatgttgcagtgtggtcgggtttc

SEQ ID NO: 16547 - DNA, 453 bp, Zea mays
  unsure (1)..(453): unsure at all n locations
agcttatcgatcaatcaaaacagtttgaacaagaaaagctatagcttaattctaaacttgaagccgaagtccaagccaactcaaatttgaagaaatcattaacaagccttcacgataaatgtttgaattttagcaacaattgtatccaacaactaaagaagatcttttactcagttggagccagcagcgggaaatttaccccttcggatgaagatttaccaaaagccttcgatcatatcgaagctgaaattgaagaacttgacgaagttatagctgggcacggtgacttctgtgcctgngtagcttctcggggtactgctgcagcattcctgaaggctggctgcgagcatggaaagatcgtcaacaggcccaacttcaccctgtctccatcaatcctggacgatatacctgacctcgcccgaagtatctcaaatagatntataaaaatgatat

SEQ ID NO: 16548 - DNA, 429 bp, Zea mays
agctttatcaaagcataaaaaaccaattcttagcattatatcatcacaaaaactaaaatcaaagataattcctcaagaaagaggcaaacagcttaacacaactagcaatatctccaaataacacatctcgccctcttgaatgagaggaagcccgaaagacaaaattctccccctagatagaggaatcgagaaatctcaaaatcgcccccctttgtgacaagtgaacttatcaagcacatacatgggtataaagaaaaaactcccccttaacaagagaaccccctgagaaaagcagaaatgcaacagagagtatgaaatagagaaaatgcatgagcttcaggagtataccagtcagagtgtaaaaaatgctctaagtggtgttgtgctaagtgtgcagcaataaatgcagatgctcaaactggtcatatg

SEQ ID NO: 16549 - DNA, 447 bp, Zea mays
agcttcggatgtgcatagactacaccagcctttattatgcatgccccaaggacccgtatccactgccgcgtatagatcagattgtggactctacttccgggtgcgacctcttatccttcttggacgcttactctggtttccaccaaatccggatgggtaaggtggataggaagcttaccgcttttgtgatagtagatggactatactgttatgttataatgccctacggtctgaggaatgcctttgccaaccttgttcgggcaatgagtaagaccttcggagacctgatctgggataaggtggaaatttacgtcgatgacatcgtggtcaagactagggaagggtcggctatagtggaagacctggccctggttttcggcaagctgcgggcaacccgcaccaagctgaacccggagaaatgcatctttggtgtctccgcagggaagt

SEQ ID NO: 16550 - DNA, 448 bp, Zea mays
agcttgtgaagattcttcattccaacatgggctagtctacgatgccagagtcaacccatattagtcttagcaattaaacaagtgttgagttcagttgtgttctcattaaaattaactagatatatctgaccctctaacactcccttaaatgctattgaatcatcacttcttctaaagacagtaacacctacatctgtaatcagacagttgtaccccattttgcataattgagaaacagaaagcaaatggtaatctaaagaatctacaagaaaaacatttgaaatggattggtcaggggatatagcaattttacccaaacctttgaccaattcttgatttccatccctgaatgtgatagctctttgaggatcttgatttttctcgtaggaggagaacattctcttctcccattgttggaacttgctctctgcagcaaggaggccaacaa

SEQ ID NO: 16551 - DNA, 439 bp, Zea mays
  unsure (1)..(439): unsure at all n locations
agcttggtcattntattgctaactgtcccgacaatgatagtgatcaggaccaagggaacaagagggagaagaagaagaactataagaaggcaaagggcgaggcacatctaggaaaggagtgggattcggattgctcctcctccgactccgacaatgaaggactcgccgccaccgccttcaacaagtcatccctcttccccaacgagcgtcacaaatgccttatggctagggagaagaaggtatgtcctcgagactctacttatgcttcttcaagtgaggacgaatctagtgatgaggatgaaatagattattcatgtctatttaaaggcctagatagaaccaaggtagataaaattaatgaattaattgatgccttgaatgataagaataggcttctagacaaacaagaagatctgttgatgaagaacatgacaaattt

SEQ ID NO: 16552 - DNA, 245 bp, Zea mays
  unsure (1)..(245): unsure at all n locations
agcttgcngaccgagtggttcgggcgagggactccgttcctcctcgctgtcgtagcgccccccacgcctgcggtggtaacctcagcgcaccttctcgttgaggtgggctcgacggtcgcggcggtggtgctcgttgccgaggcgacctgaggctgcatgtgttgcctcccgcgagcgcccggtgtggaccgaggcttcccgcatgaattgggaagactcggcgcgacgcttcggagggtacccct

SEQ ID NO: 16553 - DNA, 436 bp, Zea mays
  unsure (1)..(436): unsure at all n locations
agcttatgttgccttntacaacgtggtgtacataaaatcgaaacttggatattctgggagggacttcttgttttacaagaaacgatgtggcattgatcgatccaggctattggcacttgattacatccaccaagaagaggccatgctgtctgataacatggatgagagaaaaataagttttgtgctcacaaaagatccacccagtgatctagaggtaagcataactcccatcaaccgtccaagacagcgaacaaatgttgatgaagaaactatagaagtgtcgattgatgcatataaggagtggcttgcaatactacaacatgataatccagaaacgggtaagttaagatgtcaaactcattacattaaatacatgatatgttatagtttccacagntaaacttacatattggttaagtgcagattaatggatgac

SEQ ID NO: 16554 - DNA, 445 bp, Zea mays
  unsure (1)..(445): unsure at all n locations
agctttagcagaatgactgcgattattcttcactctcaaattggcaggaatgtgctgacttatgtcgatgacatcatagtaaagagcacaaagcaataaaatcatgtagctgatttgcaagaaacatttgccaatttcaggcaagctggtctcaagttaaatccagagaaatgtgttttcggagtgaagaagggcaagtttcttggttgcctggtatcaacaaaaggcatagaagctaatccaagcaaaatcgaagctatccttcggattgagccaccaaattcaaagaagggggggctcaacggttagcaggaaggctgacatcattgaatagattcatatcaagatcagcagagaggaatttaccattntttgaaatactgaagtcagccgaagtcttccagtgtgggccgacttaactgatagccttcgaagagtaaagcag

SEQ ID NO: 16555 - DNA, 442 bp, Zea mays
agcttcagaaatcccatattcttcgctatctcccggcagacagatatttccatgttgtccgggagacagtatagaaaatcatcttcgtcggtgccattgtacaccaaggcccccttcgggtacttcaactcccgggcatagtgtctggcttccgtgatttcctcttcagacaaccttttacccgaagcatgtcgaataataaagtcaagatcttcagaaggtgcttcgggagtagtagatttaactttctcaggcgcgtcttttttctccagagccaaaccaacgttcgaagattcttgttccgttctttgctcatcgccagcaggctctacttcagtgggcactgagggcccaactttggtttcaatgtgagttgtagcaactatggcagtctcctttacaggagcaggagttgatgcccttgtcgactccatgacagcgt

SEQ ID NO: 16556 - DNA, 377 bp, Zea mays
  unsure (1)..(377): unsure at all n locations
agcttattagaggtaccaatctatgaattagtatattattattctaattaaatctacaacaaaagaaaaatattatgtgattgctaataatgacataagcgattcaaagtgcacgggtgattcacagatagaaaatatccacataatatccataatcaggatacatgaattgcccatattaagtattcagttttatgggtacagacctaagctttcgagtctttgagtagagatcaccagctacgcgttcgtgatctttgccactacaaccatatcacttatttgtaagaataattgtgaacgaatcaatganggttagctggaatacattgccatggcgttagcacaatcatatacttactaccattctcatctga

SEQ ID NO: 16557 - DNA, 372 bp, Zea mays
  unsure (1)..(372): unsure at all n locations
ctcaacttggtttaagttttacccctttatccactatttagggttaagtccattaaccagggtttcatttgcaaaaatattaaaacaatacaacttgtttgaaatttttgcctagtgaatgcactctatatgtgtcaaacatatgcaatgccaatgctcatgatgccatgctcaagttttagttatagtaacaccaggggtgttacatccttccccccataaaagaatctcgtcccgagattaaaaatcctanggtagggaatggtaaaggaaacacatcacatttttatttctttaactttggtacaaggcangggtgatgtgggggttacttctttattacacagctatacagactttacaatttacatg

SEQ ID NO: 16558 - DNA, 359 bp, Zea mays
  unsure (1)..(359): unsure at all n locations
tagacaccaatcacacacgctagttatcttctatttcttcgaccggctcacgtctttgtccaattccacgggcaccgctcatgcctgctataaattgagcatgccgtgagctccataaggtaatcacccatccatagcaccaacgcttgtcttcaattgtccaccaaagaccgcgaatcgctcatttcccctaatctgtgtttccgccaccgcgaaaagagacctcgccgtggtcaatgcatctcaagtcggttcatattctctggtcgcttgggttagtatctttaagttctcctaatgctgcccgacccctncaattgagctagagtccctaggatcgccgggaacacatttgaatg

SEQ ID NO: 16559 - DNA, 320 bp, Zea mays
  unsure (1)..(320): unsure at all n locations
gcttctaagggagaacacgtgataggtttgactaacgtacaattcgaaaaaatagaccttgtgcagcttgtcaagcaagtaaacaggtgggaggagcgcatcacagcaagaatgtgatgaccacttcaagacccctggagctgctgcatatggacctcttcggacccgtcgcctatctgagcatatggggaagtaagtatggtctagttattggtgatgacttttcccgcttcacttgggtgttctttttgcaggataagtctgaaacccaagggaccctcaagcgcttcctcangagagctcaaaatgagtttgagctc

SEQ ID NO: 16560 - DNA, 258 bp, Zea mays
catttacccccatctaaatgaaacatgttaacacaagctacatcacttcaaagcaatattgtctacacggaatgactgggtggatatgataaatatgaggatgatcgatcgtttcaagggaagcagatgatgtaccatagttttgacactgcggtggatgatcctaataactattacccatcagagtttctaaacacgctgactcctaatggactaccgccgcacattctgaagctcaaagatggatgcccaatcatg

SEQ ID NO: 16561 - DNA, 385 bp, Zea mays
  unsure (1)..(385): unsure at all n locations
agcttaccgcatttgaagcatgaacgcttttctttgtcttggccttgcttggctgtccctttcgaccttttagcgccgtcttgaatctcttgatgatgagagccatctcttcatcattgagccccggcgcctcaacttgcgccaccttgctagatagcgactccttgctcctcgttgcctttagagcaatgggttgaggctcgtgaagtggaccgttcaacgcgtcgncgacgtatcttgcctccttgatcatcatccgcccgctcacgaattttccaagtacttccttcggcgtcatcatcgtgtacctgggaatctcacgaatattgttcacgagatgaggatcaagaacggtaaaggacctgagcattatgcggacgacgtc

SEQ ID NO: 16562 - DNA, 313 bp, Zea mays
  unsure (1)..(313): unsure at all n locations
attttggatactttatgtaggaaatttgttaactatcaagctttgntggtcatgttactacatgtcaaattatgttggacaggcccctggcaccctattctcatcattactgcaagattttatctgtcagactttgtgctgcaccttattcagcaacaataaattttagagtaaaaggtttaacctactcagtacttcctcaaggtacttcatcatcttgaattctgattaacttattcgtgaagtatatacatgtaaaccttgatattccctttggcttatccatttacatgtaaataccatcttctcatgt

SEQ ID NO: 16563 - DNA, 303 bp, Zea mays
aaattatctcaaacctggtttcttaccaaagcaaaaagggtgctcatcttctatcaacatctcaacaaaagcagccctaagttcattttgatcgaaccttcacgtgctaatggcttcaccttgaaatgcttgtagaagaccttgtgttggatcttgaataaacttgtgtggattgggcttacatacattgaagtgtctctttaaagaagaagtaccatttggctttggatctggcttcatgataccatggcaatatttgcacttagcactcttaagaatatttgtatcatctttgatcttaat

SEQ ID NO: 16564 - DNA, 437 bp, Zea mays
  unsure (1)..(437): unsure at all n locations
agcttgtgccttataacaagaggatacaagaagttggagtgcttttttgaaggctttngcgaaacacttgaagagttagtacttttgtgaatgattntgtaaagtgtttgcaaatatgtgcaaaacataataaccgtttgtgaatgattttgttgtggtgcttgttgatggtttatgtgatgtggatctatcattgtgcaatactaattaatttggatatctatgtgattatgtgtataaaaattggtgatttgtgatgcttttgtatatataacagttgttgaatgctaattaatggtatattatcattactaacgactataactaggggcaacttttctgtggttgctaaatgtatagtataacgactcacaattgggtgctanatctatagtacaacaacccaccggtggtcgcttaatatacaatattaacaa

SEQ ID NO: 16565 - DNA, 432 bp, Zea mays
  unsure (1)..(432): unsure at all n locations
agcttgcattgcatatttaaattccttgtattgcatctagggcttgtctaacctagttgagataaccgccaacaaagcgagtgaaaaagcttaactcgggtcaaacctgacaagtcttagtttttaagcttttagcacttaaattcttacttttcatgcaattattggttcttaaaatatgcatgaggtactgcacttagggggagtattcaaaactcaaatcactcttgaaaacccctagtgcaagcccaaatgcaaatttcaccatttgcctattttctctaaaaattatctagcctatggcaaaatattntgaaaagtatatgagggtgccaatacctgtcccaacaagtgttattttgtgtgattataagttgggatttggtttggttaggagttagatagaaaaattcannaatttctaaactcccc

SEQ ID NO: 16566 - DNA, 445 bp, Zea mays
  unsure (1)..(445): unsure at all n locations
agcttgaagccatggtaagtatcttatgccaataatatacgaattgactcaagcctagctacgggtgcataggtttcaccgaaatccaaaccttcaacttgtgaatatcccttggccacaagtcgggctttgttccttgtcaccacaccatgctcatcttgcttgttgcggaacacccacttggttcctacnaacatttgattaggacgtggaaccaaatgccatacctcattcctagtgaagttgttgagctcctcttgcattgccaccacccaatccgaatcttgaagtgcttcctctaccctgtgtggctcaatagaggaaacaaaagagtaatgctcacaaaaatgtgcaacacgagatctagtggttacccccttatggatgtcgccgaggatggtgtcaacggggtgatgttggggacttgttctcaaatgctatgagt

SEQ ID NO: 16567 - DNA, 355 bp, Zea mays
  unsure (1)..(355): unsure at all n locations
agctntaaccgatgccatgacgaagcagcctgtgaaggtgtacaaatgggacatggatgagacacttattttgctcaagtcacttctggttggctcatatgttagggattttgaaggcctcaaggatcgtgagaaaagtactcaaacaaggaagcgatgggagaacctcattttagaactctatgatgagcacttcttttatgaggaggttagttagtgcctaaaatcagtactcaaataccgctgctagatgttccttgtttgatttactagttttttcaattctgattntgcagcggagtgccggtccaagagagattcaccaagccttttcagtcatgccaggaacatcatg

SEQ ID NO: 16568 - DNA, 275 bp, Zea mays
  unsure (1)..(275): unsure at all n locations
gcttaaggatatatatatctctaagccacacatcttcccagaagaaatattcgngatggctcagggaacataagctntagtgttacctctatgagccactcatcttcccaaattataatacttgtgttggctcaaagaagataagctntagcagtacatctcttagcaacacaacttcccagaagataatattctcgccatcattggtttttaatggtgctccacatttgaagtcatgttgaactcttttcagcctaccaaactgacatcctctg

SEQ ID NO: 16569 - DNA, 417 bp, Zea mays
  unsure (1)..(417): unsure at all n locations
agcttactattggttcgagactcaatcttcattttattatggtttggacactaaaaccttttagttttggtgtttatggttaaggtttaaggataagatttggggtctaggtttccataaaaacgtgtgctatagctcacttgtggcaaanatatcgtaacgacttccccgatctaaaacgtatgtggcaggttggatacatgtaaatggctatttggccacggaaacatgtgctatagctcgtgggaggccaaaaacacctttaaggtgcacttgggaccataacgctggtggtggaacgcgtacataataatagctcacgggaggccaaaacagccttaccagtctcagtggccaaatcatgggtggcggacgggaggcacataatctatgttcgatgacaaaaacatgggtcac

SEQ ID NO: 16570 - DNA, 369 bp, Zea mays
aacgagttggctcggctcgactcattaagaaaccgagacagagaaccagcttgactcgacttcgttgtgagctcgagctggctcatttagttcgcgagccacaacaaaatatagtatacctggatatataccacaatataatcaattggctagtaatttcatactaatttaatactagcaaagggctaacatactcataattttatatatcacatcatttaaatcctaaactaacatattccatcacttattaattcatccatacaagtataagctttggtttacagataaatgctagctcattcgagctcgtgtcgagctggctcgttaacgaaccgagctgagatggtagctcagctcgtaataaaa

SEQ ID NO: 16571 - DNA, 187 bp, Zea mays
cgcgttatcgagaacaattacacaacaaccaaacaagccatgtgattaatattgacaattcgaatttatttatttcaaaattaatgaatacaatttttacgtatcatttatgcagcgtgaaatgcgaaccaaaccaagaaaaatgaaaaagaaatgtgaaatgtgaatcttgtaacacttgagcttt

SEQ ID NO: 16572 - DNA, 370 bp, Zea mays
aatggacgtgagaagtgccttcctcaatggaccaatcaatgaagaggtctacggtgagcaaccttccggctttgaagatagtgagtaccctaaccatgtttataggctctctaaggcgctttatgggctcaagccagccctaagagcatggtatgaatgccttagagatttccttatcgctaatggcttcaaagtcggcaaggccgatcctactttattcactaaaactcttgacaatgatttgtttgtatgccaaatttatgttgatgatattatatttgggtctactaacgaatctacatgtgaagaatttagtaggatcatgacacaaaaattcgagatgtctatgatgggggagttggagtatttt

SEQ ID NO: 16573 - DNA, 351 bp, Zea mays
  unsure (1)..(351): unsure at all n locations
agctntatagtcgatagcttcngcgcttctttggatataatttgccgaaggtgttcatttctttaggatcttcagctacgaagcatacccccaacactaagtgaatcacatggtaggattgcttgctttcaattcatatacttaagcaaacctacatggcttaaaacgtttatttaagcacgacacatagcttctatttcactccatagtaaatgatacatcaatngatattctcaaatgctacaagtgtaaaacgcttatattctacaatttgtatcatttaacttatatgtgccaaagttcggattacagatgaattgcccctcttaatatcaaatcaaagtgcatgtc

SEQ ID NO: 16574 - DNA, 383 bp, Zea mays
  unsure (1)..(383): unsure at all n locations
agcttctaaagggagagcatatttngggactaaccaatgttcattttgagaaagacatggtttatagcgcatgtcaagcaggaaagcaagttggtgttcatcatccacacaagaacatcatgacgaccgacaggccggttgagctactccacatggatctatttggcccgatagcttacataagcatcggcgggagtaagtactgtctaggtattgtggatgattattctcgcttcacttgggtgttctttntgcaggaaaaatctcaaacccaagaaacattaaagggattcttgagacgggctcaaaatgagtttggcttaggatcaaaagatagaagcacaacgggatggagttaagaactcacaaatcgaagctttttg

SEQ ID NO: 16575 - DNA, 380 bp, Zea mays
agcttatgaagattcttcatcccaatgtgggctatttggcgatgccagagccaacccatgttagtcttagcaattaagcaagtgtcgagttcagctctattaaagtcaactaagtatagctgaccctctaacactcccttaaatgctattgaatcatcacttcttctaaagacagcaacacctaaatctgtagaaagacagttgtagcccattttgcataattgagaaacagaaagcaaatttgtatctaaagaatcgacaagaaaacattgtaaatagaatggtcatgtgatatagcaattttaccaagtcctttgaacaaaccttgacttccatcctcgaatgtgatagctcggtggggatcatggttcttctcataa

SEQ ID NO: 16576 - DNA, 279 bp, Zea mays
agctttagctgacttaggggtccttgttggaccattcctaagatctgcttctccatctactgcatgatgtatcggcttaaggctctgccgctggacagtgacatgaaagcttactgcttactgcgtatgacactacattgtacttggcttggtgataatgcatttacggatcatagtccttcctaagctcaatgcatcccctttgacgtatgttccatcctgactgggtgaagatatacttaaggcttctgtgagcttggtaaatgtgacacatattat

SEQ ID NO: 16577 - DNA, 227 bp, Zea mays
gctttattctagtgcacccatgaccacgaagaataccttcaggcgtatgttcgaaggttcctgcgtctaaaggcacaaacaccaacagtgcccaatgaaattgtcattgaggccatgattaaagggcttcggccgggaccttcagctcaatactttgccaggaagcctcctccactttggagaagctactccaaaagatggacgagtatattcgagctgataatgac

SEQ ID NO: 16578 - DNA, 336 bp, Zea mays
  unsure (1)..(336): unsure at all n locations
agctntccgcgagcgcgctggcgtcgtcttcttgctcgggatcagcgtgtcgcggggggacagcgctcgccttcgtctcgaacgcgaggtcgacgcccggcgtgcctttcgtcggggcgctggggatgtcgattcgctcgacggccgacgaagcgcggcctcccgcttggccttgtgtgccccgcctcctcctccgttggcgggggagaggacggggcgagctcnaatgttgttcttccaccgcgcggngaagatgtcgtccggtccgccgccggcgggcgggatgtccgccggcattgtcgttgtcgcgcggcggtggaaggagtatcatgtcgt

SEQ ID NO: 16579 - DNA, 447 bp, Zea mays
  unsure (1)..(447): unsure at all n locations
agcttcaaagggagatcatgtgttagcactaaccgatgtctgttntgagaaagacagaccttgtgcagcatgtcaggcagggaaacaggtaggaagcactcatcacagcaagaatgtgatgtcaacatcaagaccactggagcttcttcacatggatctcttcggacctgttgcctacctcagcatcgggggaagtatggtcttgtaattgttgatgattttccccgcttcacttgngtgttctttttacaggataagtcagaaacctaagggaccctaaagcgcttcttaaggtgagctcaaanataagttgagcttaaggtgaagaagataagaagcgacaatgggttcgagttcaagaatctacaagttgaagagtttcttgaagaggaaggcatcaagcacgagttctncgctccctacacaccacagcaaaacgatgtggta

SEQ ID NO: 16580 - DNA, 327 bp, Zea mays
agcttgcacctaggtacattggtccattcttggtacttgagcaatgtggaccagtggcataccgactctaactacccgaaacattgtctgctgtgcataatgtgttccacgtgtcacaattgaagaagtgtcttcgggttcccgatcgaaccattgaagtgactgatgttgtcctggaaccagatttaacatactcagaacatcctattcgagttctggatcaaaaggacaggatcacccgaagaaagactctcaagttctacaagatacagtggaaccaacattctgaagatgaagctacttgggaaactcaagacttcttgaata

SEQ ID NO: 16581 - DNA, 427 bp, Zea mays
ctgcagcttcacattaagaaaagagtatagaactcttcttctattctgaacagatgagcatcttcactgacttccaacacaggcaaacacaacttctcagataaagaggaaagttgaacaaaagggcttcccaactagataactaatttttattaacatttaacaggtaaaccaaagtgcaggagatacccacaccctggcgacagtcattacaaagatccaaatccaacatagttcatcatgacaaacataaaggcatatgataagcaaactaccctgtctaactaagactaactaagagtaagactgatgctaagactatagctcctatatatataattttgcattaattacaagatctaacgctgacaatctatggttctaaatttatcttggtcctgcaatcagggttaccataagcatggtg

SEQ ID NO: 16582 - DNA, 331 bp, Zea mays
  unsure (1)..(331): unsure at all n locations
agcttaatgcccncaagaaattgtctaactttgttatggaaaagctaccatggctcangataacgagggttacattttatatcctgctggttatcccgaacacaaaattagtagaattcattataggaagtctcactttggctctcatcatgcttttatgtataagagtgaggcatctagttctaagcaatccacacatgttaaattgcctaaaaagaaaactcctattgcatcaaatgagcctattatttcatttaagacctttgatgcttcatatgttttaactaacaaatcaggcaaagtagttgccaaatatgttggggccaaacac

SEQ ID NO: 16583 - DNA, 290 bp, Zea mays
agcttcgcatctctgaactagctcggctgcatcattctttgctgtcggccaatagaatcccgacctgaaaaccttcccaactaatgttctggatgctgcatgtattccgcactggcctgcatggacttccttcagaagttgcttcccggtggacgggagaacgcacttcatgaagacgcctgacgcgcccctccgatataatacctccccaatgagtgtgtagtgagctgattgtcttgcaatgcgctctgctgagttcttgtcatctggctcttcttcattctttatat

SEQ ID NO: 16584 - DNA, 386 bp, Zea mays
  unsure (1)..(386): unsure at all n locations
atatttcgacagcatcagcttataacctctcttcagcatattctgcaaaatactgtatagcgatgcttctgttcatttttagtacttcctctgttccaaattatagacggtttaatatttctagatacgtagtctttactacgtatctagaaataatagcttatatatatctatgaatctaaaacgccttataatttggaacggatagagtacaatagtnttgtcagtgctgaaccatctgaaaattcaaatatgcatatcttccctcatattattgttacttgatgcactgaactatatttatgtttctacacacgggaagctgtgacgtctatgatatccctgttcctaaaggttgcttgtatggagcatttatctacagcaca

SEQ ID NO: 16585 - DNA, 204 bp, Zea mays
agcttgtacttcgcttcaacacagcctgattggtgattggcgcaccgcttccgcgcgtttgctgacgtacccaccgccaattcgccttcggtcacgccaactgccatatttgtctccgcggctgactgacccgtggcccccatgcctgtgggtttcattgggccacgcgcggggcgcctcgataccgctgctttgatttaaaaa

SEQ ID NO: 16586 - DNA, 429 bp, Zea mays
catgcaacttgacatgaggaaatgacgctcattatctagagcttccaccaaatcctcaagcaaaggagagggagaaattacaagtcccactccaagaaggtttgctaccggtgtggtaagttcggtcatttcatatcaaaatgtccaatttctaatgaaagtgataggaacgacgacaagaaggggaagaagaaacaaaagaagaggtactattagaagaagtgcggcgatgcccacatatgtcgggaatgggactccgacgacagctagaaaacctcacattgtttctcatcatgcatttatgtataaaaatgaggcttctagctctaggcaatcaactcatgttataatgcctaaaaagaaaactcccactgcatcaaatgagcataacatttcatttaatacttttgatgcatcatatgtgcttac

SEQ ID NO: 16587 - DNA, 319 bp, Zea mays
agcttctaaagggagaacacgtgataggtctaactaatgtacatttcgaaaaagatagaccttgtgcagcttgtcaagcagggaaacaggtgggaggctctcatcacaccaaaaatgtgatgaccacatcaagacccttggagatgcttcatatggacctcttcggacccgtcgtctatctaagcatatgaggaagtaagtatggtcttgttatagttgaatgatttttccgcttcacttgggtattctttttgcaggataaatctgaaacccaagggaccctcaagcgctttctcatgagagctcaaaatgaagttga

SEQ ID NO: 16588 - DNA, 307 bp, Zea mays
agcttatgaagattcttcatttcaacatgggctattctgcggtgccagagccaacccaagttagtcttagcaatctagcaagtgtcgagttcagctctatcaaaatctaccaagtatagctgaccctctaacactcccttagatgctattgaatcatcacttctttaaagacagtaacaccctacatcagtaatagacagctgtagcccatttgacataattgggatacagaaagcaaattgtaatctaaagaatctacaagaaaaacattggaaatagtatggtcaggtgatatagcaattttacc

SEQ ID NO: 16589 - DNA, 342 bp, Zea mays
  unsure (1)..(342): unsure at all n locations
agcttgtggagggtcttcattcccacatgtgctaatcggcgatgccacagccagcccatgcaagtcttagccattaagcatgcatctagaccggcctcttcttttgcaaaatcaactaagtaaagcttgccgtctagaatacccttaaaagctagtgaaccatcacatcttctaaagacagacacatctatatttgtaaacaaacacgtatatcccatattgcataattgactaacagatagcanattatatccaagagactctactaaaaacacattagagatagagtgctcatttgagattgaattntacctaacccctttactttgctttgattcccat

SEQ ID NO: 16590 - DNA, 334 bp, Zea mays
agcttaccgcatttgaagcatgatcgcttccccttggtcttagacttgctcggctgtgcattgcgaccctttatcaccgtcttgaatcttttgataatgagggccatttcttcttcattaaaaccggccgcctcaatttgcgccaccttgctgggtagcgcctccttgttccctgtggctttgaaaacaaaaggttgcggctcgttgatcggtccattcaaggcgtcgtccacataccttgcctccttgatcatcattcgcccgctgacgaaattttctaggacttcttcgggcgacattttggtgtacctaggattctcacgaatattattca

SEQ ID NO: 16591 - DNA, 372 bp, Zea mays
  unsure (1)..(372): unsure at all n locations
gcttggaaagtgagcttgcaagatatgantggtcttatggtgagtcgcttcaatcactctttgatcggttgatggtgttggtcaacaaaataagagtacttgggagtgaagattggagtgactcccaggtcacaagattgttcatgagagcttataaagaaaaggataagagtcttgcaaggatgattaaggatcgtgatgactatgaggatatgacgcctcatccattatttgcaaaaattcaacaacacgagtccgaagaagcccccatcaagacaagagactctcatgccttgatcacaaatgaacangacacaccccagaagaacaaagaccaccaagcaaagaaagtggtcgagatctcaagtgatg

SEQ ID NO: 16592 - DNA, 349 bp, Zea mays
  unsure (1)..(349): unsure at all n locations
agctttctcgactaagtcggggacagggcctcattttcgggtttaagtacgcgtaagcggcaaggccgaccgagccgagggattcccacgcctctgggatacggatacctcactcgtcccttccgcgaaaagcagctcttgctcacacaaacatccctgttaccgacgaagtccagatgctcgaaacaggaggaaaaaaggcgcagcttcgcaagtgcagcgagggtgttttcttctggcctcggcggccgcangaagcacacgctacaagatgatcggatcctgcaggctcgggtcttcacgccgaagggagctgtagcaccctcggcatcgacgacgtcttcagcaa

SEQ ID NO: 16593 - DNA, 400 bp, Zea mays
  unsure (1)..(400): unsure at all n locations
gcttgagatggttgaagaaatttatagtaatgctgtcgtatttttcgtcacggtctcctggctataccatgggcgatggcaattattagttggaaaatagcttccatttctatctctacgacgatttttttccataggaatacctaccaacacttataataagagatattttttctccatctccattcctgctaagataaaatctcgagagatcctcggtgtagcttaaattataattagaacatacgtcttttgttactaatgccaaacatttgcacttatacatattatcagatataagaaattattatatgtatatcaaaataaacataattatataatgagtgatctctttgacagataattnnattattntatcattaattattatacatcacat

SEQ ID NO: 16594 - DNA, 429 bp, Zea mays
agcttgttcaaaacatgacggcacagagcgacccatggtttgtataatatttgttgcacgccggtggtggaactgaggaagcgaacaacgatggtgatgttcatcttccaaatgaggtatgtgtgccatatactggtaatgaccgcgaccttgatagactgatagatgacatttaccccaatctaaatgaaaacatgtctaacacaagctacatcacttcaagagcaatattgtctacacggaatgactgggtggatatgataaatatgaggatgatcgatcgtttccaagggaagcagatgatgtaccataagtttgacactgcggtggatgatcctaataactattacccatcagagtttctaaacacgctgactcctaatggactacccccgcacattctgaagctcaaagtggatgcccaatcat

SEQ ID NO: 16595 - DNA, 333 bp, Zea mays
  unsure (1)..(333): unsure at all n locations
agcttttatgggcgtgataaagatgatttatattattcatcagataangangccagagctttatggcatgaaccaccgcaactagctccagatcatgagtaggataatgctcctcatgtcggcgcaactgccttgaagcatacgcaattactcggccttcttgcattagcacacagccgagaccactgcctgatgcgtcacaatacacatcacagggcttattaatatcctgttgagccaataccggagcagtggttaataatatcttcaattgttcaaaagcttcattacactttgaagaccaattgaatttaatatcattcttcaataaac

SEQ ID NO: 16596 - DNA, 317 bp, Zea mays
  unsure (1)..(317): unsure at all n locations
agcttaagccatggtaagtagcatatgtctttattatactaatngactcaagactagctacgggtgcataggtttcatcgaaatccaaacctttgacttgtgaatatccctttgccacaagtcgggatttgttccttgtcaccacaccatgatcatcttgcttgttgcggaatacccacttggtacctacaaacatttgattacgacgtggtactaaatgacatacctcattcctcgtgaagttgttgagcctctcttgcattgccaccacccagtccggatctcttaattcatcctctatctttgatggctcaata

SEQ ID NO: 16597 - DNA, 432 bp, Zea mays
agcttatctccgaacgtcttagctatctcttcccttactatatcaatagcggccgatggtcgtccatatgcccttcggtccagcataggtgtgggtgtttaggtattatgtcgtcttcctgcccacgggtttggattctgtggggcattaatgcttgccctggtggttcatatgtctggtcatctctttccgaccttctaggggtgtcgaaaagtactcgcccccacgtgtctgggctatcgtattatgaaactgaggtgtcgcggggtgtaacggaaggtttggctgggacaggtgtatggaaaacgattttacctatagggtctatggataataagtttggctagtggtcaccaaattgggagggtccgctggagatggtacgcattgtgcatggtaatgcatatttttggtgaagattcgcatgggaaa

SEQ ID NO: 16598 - DNA, 376 bp, Zea mays
  unsure (1)..(376): unsure at all n locations
agcttcacacctctgaactaactcggctgcatcgcttttcactggtggccaatagaatccagacctgaagacctttccgactagtgtcttggatgctgcgtgtattccgcattgcccagcatggacctcatctagaagttgcttcccagtagatgagagaatgcacttcatgaggacgcctgatgcaccccttctgtataatgtttccccaatgagtgtgtagtgggctgactgtctggcgatgcgctcggctatacttttgtcatctggttcctctttgntccttatatatctgatgatcggccttctccagtcatcagagtctgactctggttgattcacgatgttacactgttcggcctgatccattgagatg

SEQ ID NO: 16599 - DNA, 338 bp, Zea mays
agcttgctacatgccttcttctttttctccatagcaggaaccttactggaacactatcccacttaaaatgaatgagggtagaactcttgaatcttggggatttgaactctttgaagtacctcataacaagggtgttacagggccttcttctgctgttgctgcttgaacaagctgcagagagatgactgacacaaggttgattctgggagaaccttcttcttatcttctcttcactatcttcttttcacttttcacttcacttctcacttttcactgcctctttctttctctttgctcttcccactcgaggattctatcgaagagtattaccatcatac

SEQ ID NO: 16600 - DNA, 355 bp, Zea mays
  unsure (1)..(355): unsure at all n locations
agcttctaaaaggagaacacantttgggactaacaaatattcattntgagaaagacaggatttgtagcgcatgtcaggcanggaagcaagttggagttcatcatccacacaagaacatcatgacgactgacaggccgctcgagctcctacacatggatctattcggcccgattgcttacataagcatcggcgggagtaagtactgtctagttattgtggatgattattctcgcttacttgggtgttcttttgaggaaaaatctcatacccaagagaccttatagggattcttgagacgggctcaaaacgagttcgacttaaggatcaagaaaaatagaagcgacaacgggacgga

SEQ ID NO: 16601 - DNA, 418 bp, Zea mays
agctggtgaaggttcttcatccccacatgtgctaagcggcgatgccacagccagcccatgctagtcttagcaattaagcatgcatctagaccggcctcctcttttgcaaaatcaactaaataaagtttgtcgtctaatacacccttaaaagctagtgaaccatcacttcttctaaagacagacacatctacatttgtaaatagacaattatatcccatattgcataattgactaacagatagcaagttatatccaagagactcaactaaaaacacattagagatagagtgctcatttgaaatagcaattttacctaatccttttaccttgccttgattcccatcaccgaatattattgaatcttgggaatcctttgttttgacgtaggaggtgaacattttctttctccccggcatat

SEQ ID NO: 16602 - DNA, 435 bp, Zea mays
  unsure (1)..(435): unsure at all n locations
agcttgcgcgaaaaaaaaatcaaacgattgagcggtggtggatagaagcgcagagaagattttcctcccgtgcgtggatgagaacgaagactagaaaaatctgcgtagtgtacgtgaggagataaggagagagaacactgtgagaaagatttttcttggattttgaaacaggaaacataattggccagcaatggttccgatttcgatttatttgaaaagcctaccccaaatagcgcatgtaccgaatttatagagatgacttaaatcgagcgaaatacttagacgaaaatcttagctcgtcttgaccgattaattnttaaactggcactagactcgatactttagaaaggaataaattttaaacccgtagagccgaatgcggcatcacaatcggagttcccggagacgatgccagcatcgtcacgggagcgagct

SEQ ID NO: 16603 - DNA, 388 bp, Zea mays
  unsure (1)..(388): unsure at all n locations
tgaattagagtcccttggtggatgattcccatatttagcttttccatttcctgacacaaagtgttctcggagatcttcgccataagacagtggcaggaggtcttacgactcagcgcatctgctaccacattggccttgcctgggtgataatggatctccagttcatagtctttaataagctcaagccatcgtctttgtctcatatttaattctgactgggtgaagatgtacttcaaacttttatgatctgtatatatgtgacagatatttcccagcagatagtgacgccagatcttcanggcatgaaccacagcagctagctccagatcatgagttgggtaatgctcctcatgtcngcgcaactgcctttgagcatacgcaattactc

SEQ ID NO: 16604 - DNA, 361 bp, Zea mays
gcttcataattcacaacttttgtaccttcagactgttgtatgcaaggctatccgcaagaacttccttcgtcatggcacaaaagccagtttcgagctttggaaaacccatacttctagccatctcccggcagacgaataattctttgttgtctggaaggcaatacaaaaaaacatcttcacttataccattaaacactaaggcccccttcgggtactttagttctcgggcatagtgtttatcttcaaaaatttcttcttcagataatctttttcccgaagcatgtcgaataacataaccaagatcttcggaagatgtttcgggaataggagcggcagatttttcaggcaaagtctgttctat

SEQ ID NO: 16605 - DNA, 387 bp, Zea mays
agcttgaggagaaacatcttcaacatcaagtcgactcaacccgtcggttctccgagcttgaggaggagtattcccaaggtctgatcgacctggctcgggtttctgcttctttggacgacgtgcattctttgaattcttctctcaatgctcaacttgactctgaaagggcagctaacgaagtaaacttatttaattggctctgtcgtgctttactgtttactggatgcttgagagttgattcttgtttgtaggaggagatacgagcacttgcagcttctcgtgacaatctggataagttgtaccgtgacgccagcaattccttaaccatcttggaaaggagccaccgctttactatgtcagatctcgatcatcatcgtcgcgaactac

SEQ ID NO: 16606 - DNA, 353 bp, Zea mays
  unsure (1)..(353): unsure at all n locations
agctntgaggatgcagcaagatctagaagataagaatcacgattctataattggaaaattagagagccagataaaagaacaatcagcttttattgaaaagaaagacttctaacttcaatcacacgaaggcttgctggcagaaactgaagcccaagtagcagaattggattctaaacttctttggcaatcaaaacaatttgaacaagagaagctagaacttaattcgaaacttgaagcccgagtccaagcccactcaaatttgaagaaatcattaacaagccctcaggataaatgttttgaatttagcaacaatcgtatccaacaactaaagaagatcttttactcagttggag

SEQ ID NO: 16607 - DNA, 416 bp, Zea mays
  unsure (1)..(416): unsure at all n locations
agcttatgaagatacttcatgccaacatgttgctattctgcggngccagagccaacccatgttagtcttagcaattaaacaagggtcgagttcagctctatcaatntctaccaagtatagctgaccctctaacactcccttgaatgctattgaatcaatcacttcttctaaagatagtgacacctacatcagtgaataaacacgtgtagcccatattgcataattgaaaaacggacagcaaattgttatctaatgaatctacaagaaaaacatgggaaatagaatggtcaagagatatagcaattttacccaatccttngaccaaacccttgatttcatccccgaatgtgatagctcagtggcgatcttggttttctcatatgagaagaacaatttcctctcccctggcatgtggt

SEQ ID NO: 16608 - DNA, 367 bp, Zea mays
agcttgtgaaggttcttcatccccacatgtgctatgtggcgatgccacagccagcccatgctagtcttagcaattaagcatgcatctagaccggtctcctcttttgcaaaatcaactaagtaaagtttgccgtctaatacacccttaaaagctaacgaaccatcacttcttctaaagacagacacatctacattagtgaatagacaattatatcccatattgcataattgattaacagataacaaattatatccaagagactcaactaaaaacacattagatatagagtgctcggatgaaatagcaattttacctaacccttttaccttgccttgattcccatcaccgaatattattgaatcttggg

SEQ ID NO: 16609 - DNA, 407 bp, Zea mays
  unsure (1)..(407): unsure at all n locations
aggctttctccttcaattagatatagaggaaggtgtggactatacagtgagacgttagcaaagagggacagtagacatcaaacgcatagaagagtggcccattctatacgagaggaggttggtgcaaatgatacacatattaaatcatcacagttcatggatgatactcttttcacatgaggatagtaacgaaaggtatgtgttatttacaaaatatacaacgtttgatctaagatggacgatgatgattaatatatacatcaatctctcatgtgcaccagataccttctctcaaggccagttctggagtgggtagggtgtgctncnnataatctccactccatacttcttataccttatctcctgtgacttctttctcttccataaatttgccttctgcttaacgt

SEQ ID NO: 16610 - DNA, 420 bp, Zea mays
  unsure (1)..(420): unsure at all n locations
agcttacctaanaagttaggtgaattntggaattatttattattctctaaaantctagaagtaggggttttggctattttaaatgctccaaaaatcccttatttgaacttaaaatcaggaaactatctttattaaatactataagaaattagaagtctagcaaaattggtctggtatttttagcatttttccacaattttctagaaattctntaaccttgacagaaaaagaaaaggaataagcatgaacagtcctggaccggaactggcccaagtcggcccatcaacaggcggaagcgtgcgcgcccgcgtccgctgtgccgactttgcgaanaggccctcgctatttcaaataacttggaaagcgttcccggactattccagagtactaacatataccaaaaggccctctaggttattt

SEQ ID NO: 16611 - DNA, 332 bp, Zea mays
  unsure (1)..(332): unsure at all n locations
agctngactcaggtatccacacattaatccttaattcattnttcccgtctcatggacaaggcatcctccctggatccaagtccatagaccaacatagatcccgttatcaagacgaatacaatcaattcctgacctcacgcgagtgctagaaaaatcactcgacttctaccgagatcctgattagcaagcagctactcgacctagcatactagtattcatctcaaaaaggaatcctaagttcatgcaactagaggtttcaagcaactcctacacttaagtgcacattacaatcctacaagcattaagtgtagtaaagtagcatataataatat

SEQ ID NO: 16612 - DNA, 372 bp, Zea mays
  unsure (1)..(372): unsure at all n locations
agcttgatcaaacgcacatctcatagcgacaccttttacatcgagagcatatgtctctattcaatggtgttgccaagtttcaagtaaacccggcttttgtgtagctgtaaacctgcaagagcaactccaataggctttttatatcctttataattgccgagaatatatattttggtaaaaacaaatatactctgatggcttcttgaaatgattatctaaatataaccatcttcttctagtctagatatctctctcgtcaaaaataaaaaatgagaatggctccggtatctatgcaaatgactctgtanataataatttagagaataaagttagaaaggtccttgaaattctctctagtccacatatagaaaa

SEQ ID NO: 16613 - DNA, 451 bp, Zea mays
  unsure (1)..(451): unsure at all n locations
agcttaaacatttatgagggatcgtcctacttttattatcgcacgcaaggacatatatgcaatatgaacaagtagaacattaagaatggcattcacacaacagttgtgattcggtatggcttgccatcacatggtgatccccatctccaataatctgtccatcacgatgatctccatctgcatgatataggtatgccatccttcaggtgatgagtccttcaagacctatctaacgtatgctggtaaacaaattacatatacgctntggatcatcacatgttgacacgcaggtcattacattaaatttggacaatacatgtggctccagccgtattgccctggtcacgacacgcaggtcatgaataattcattaatatgcatcatatacacacaatagccataccgatcacaagatgtcctgcaaaatatgttagacaacatgtttctatat

SEQ ID NO: 16614 - DNA, 369 bp, Zea mays
  unsure (1)..(369): unsure at all n locations
agcttcggcgatggctaaatattttggcagcaaaactttgcttatagcaatgaatggctgggtaacttcacacctactcgtctgtttatatagtactgcaggtaagaaggcgaagcgccaggatttttacaccaggcggacacccgctcgcactcactgtgtggtggaccgcaaagaccaaacagtaactctgcaaggtgggaccgctacgcgctgggaaactgaatcgtttctcgacaacgagctcagggaaggtgttttttagaccttcggcgccccgaagcttaagagactnntttcacggatcaagctcgttacgaanaacgatctatcaccgcgaaaggggctactggttngtctatgcttcgt

SEQ ID NO: 16615 - DNA, 461 bp, Zea mays
  unsure (1)..(461): unsure at all n locations
agcttcngcgtaacagcaaagagtggaaccgacttaaagatgataatgctattcagacctcgatagactactatagagttattatcaaatgtaaagggcatgaatgtaatttttgaagggctgtgtcccgtgtctataaatatgtgaacagtattcccgtactgttcacgctgacttggcatttgcttttgcgtcacactcgtattttcatctccttctcaagccgaaggtacatttataattcgatattggttctatttctctataatgatataataaagctaaatggataatgttatatgattattcatgctatcttctatgtttcatatgcttcgtctntcattaatgtatatcgtgatgangaangntcatccttcatgaccttcgtccgaagatcgctatatcctaagggaaataatgcttcaagggcgaaagacattatcgtataacattctctg

SEQ ID NO: 16616 - DNA, 382 bp, Zea mays
  unsure (1)..(382): unsure at all n locations
tattccaatgacgaaagttacaaacaccagatgggctatgctatctggntcttcttgtagggtcacatgtttatgcatgccacttaagtgcattaccaatgtcccaagaaggtaaaggtacagtctgatgtatctgaaaggattgctaatggaactaatgttcatggtaatactcatactcctgttcaaaatttgaatctggatattgaagagcaatcacataaacacttgatttcacacatcgaggagccaaacactaattattcacaaagatctctggctggtgctgtataagatgtactccgcatgcatgatctttcaagcttaatgaatatctagctgttcatcgggaagaatgtgcagctacgtgtaagcagtgtct

SEQ ID NO: 16617 - DNA, 401 bp, Zea mays
  unsure (1)..(401): unsure at all n locations
agcttagaanaatctggtatgaatctgcgataatacccagctattccaagaaaacttcggacttggtgaacagttgttgggggtttccactccagaatatctttgaccttgctaagatctgccgcaattcctttagctgataacacgtgccccaaaaattgaatttcttccagccagaacgcgcacttgctgaacttggcatatagttggtgttccctgaggcgcgtcaatacaatccgtagatgctgagcatggtcctcttcattcttagaatatatcaagatatcatcgatgaagactaccacgaatttgtccaactcgggcatgaacaccgagttcatcagataagtgaaatgggcangagcatttgtgagcccgaaagacattaccaagtattcaaa

SEQ ID NO: 16618 - DNA, 391 bp, Zea mays
  unsure (1)..(391): unsure at all n locations
gcttgaagccaagttaagaggcatgtttcaatatantttgtttccgaagatcttagtttgtcaaagaaaaattatacagagctggagaaggtactgtatgctgtcttgatggcctccacgaagcttcggcactattttcaagcttacaacataattggtccttcttcacaacctctgaaggacattatgaggaaccgagaagctactggaaggaatggaaaatgggctgcagagctcaatgaagtttgtattgaatatgttcatagatcttcgattcagtcccaggctttagcagacttcattgctgactggacgccaggggctcaggaggaagaaacaaataaagacgccgaagcatggacangtgtttgcgatgggtctttgggaacct

SEQ ID NO: 16619 - DNA, 367 bp, Zea mays
  unsure (1)..(367): unsure at all n locations
agcttgtgccataatactttgtatttttttctattcttattcaccagnttctatcatttgccctttagaacatttaagtcatatctgtaatcctgtttttcttgtatgcttcaaataggtacggtgatcaaattgtagcgataaaggttcttaaccgtggcagtatccctgaagaaaaacaacacttgaaggctgtttcatccgaagtaaatatgatgtgtaaagtgaaacatgagaatcttgtcaagatacttccgggtcttaatgctagcttatgtgattcgtaaattgttagttcttttggacctcacaaccgtttatgcactcctgcagtttattggagcttgcaaagaaccattgatggtga

SEQ ID NO: 16620 - DNA, 365 bp, Zea mays
  unsure (1)..(365): unsure at all n locations
agctttggaatagaacatacaagaccaataattctgttttatctangaaagcccaactgattgctaagactaagcaaatgatcataactgcttggcaagagcaaaagaatactgacacccgtctgggactagtctttaacaacacatagtactactctcataaaaaggagtcatcgggactaaggagaatacaacaggtctccataagatatttatattttntatcacaaattaccatcactaacagtattgtggtcgagaattgtggctcttccaacgccaagaaccaaggacaaattaatgtcatatgtagtttcaagctctgtggtggtgtgggatttcacgacaattttctactcttttac

SEQ ID NO: 16621 - DNA, 383 bp, Zea mays
  unsure (1)..(383): unsure at all n locations
agcttctaaagggagaacacattntatgactaacttatgtttattntgagaaagacaggatttgtagcgcatgccaagcaggaaagcaagttggcacccatcatccacataagaacataatgacgaccgacagggcactggagctcctacacatggatctatttggcccgattgcttacataagcatcggcgggagtaagtactgtctagttattgtggatgattattctcgcttcacttgggtgttctttntacaggaaaaatctcaaacccaagagaccttaaagggattcttgagacgggctcaaaatgagttcggcttaaggatcaagaaaataagaagcgacaacgggacggagttcaagaactctcaaatgaaagct

SEQ ID NO: 16622 - DNA, 318 bp, Zea mays
  unsure (1)..(318): unsure at all n locations
agcttgcacacatagctcttttgaatacctttgatcatatctcttttatatgctatgactaatgtgtnttcaagtttatttcaaaccaagtcataggtatattgaaagggaattggagtcttcggcgaagacaaaggcttccactccgtaactcatgcttcgccaacactccgagcaactctctcttctttgggggagaaatgagcatcaaagaaaagaacttcatccctggggaagagagtaaaagctcaaaagcttcgctctttggtataatcntaactcatttattttatgaccaaggggaagtagcacttaaat

SEQ ID NO: 16623 - DNA, 444 bp, Zea mays
  unsure (1)..(444): unsure at all n locations
agcttctgacatgtgggctcgcctggatgtccggtgcacaccggacatctactgttccttgtccggtgcgccggaatgggcgcgcctgccttctgcgcgcacagagcgtgcatttaatgcaccgcanggagccgttggcgcggagatagccgttgctctggagttgcaccggacagtccggtgcacaccggacatgtccggtgaattatagcggacgagccgttggagattcccgaagctggcgagttcctgaggctgctcctccttggcgcaccggacactgtccggtgtacaccggacagtccggtgaattatagcgcgagtgcctctgggaaatcccgaaggtggcgagtntgagttggagtcccctggtgcaccggacatgttctgtggtgcaccgacactcttcggtgcacattgacatttcgggcccagaccaaagtg

SEQ ID NO: 16624 - DNA, 434 bp, Zea mays
  unsure (1)..(434): unsure at all n locations
agctngggttgtattatggtgaggaagctctggtatgttactaattttcttctattntctttttattacataggtcttttatattgntgagttttacaatagaatatttccctctgcagatatttatcacaattgtttatgataatcattggttattgatcgcgatctctgtcaaggacaagatcatccatgttctttattcactgcctggcaaatccagagagtcactgatttgttaaattataaaaaaacactaaaggagcatttgccataatcaaatgctaaatctaagtacaagatcggcgtagtgccagttcaaaaataaagcaacaccgtattttcagctctactaanatttgctttgttgggtgctgtgccgcttcttccttcattttatggggtgatttttcaggtatgactctggtttccacgtg

SEQ ID NO: 16625 - DNA, 398 bp, Zea mays
  unsure (1)..(398): unsure at all n locations
tgcagcttgtagntagctcatcattatgtgtggaaagggtttccattttacaattttcatagacttcttgagagctagctaacttagcttttagtctatgccattgcaatgaagtgccttccctatgtcattttcctcgttttctctatctactcactaacgtgtgaaaaggagaagagctggtactcatggatattttcttctatgataggtcgtgtgtgcattttggtaaacaactattccactctcccaccagtttatttgatgtgataacctgcattagttgtaccgtacatgatcttcataagatcccatgtacgtatgtaatactaattacaatacacatgccatttagttggtgtggcattcctgccaaaatcaaaggcgtgataaaaaaa

SEQ ID NO: 16626 - DNA, 423 bp, Zea mays
  unsure (1)..(423): unsure at all n locations
agcttttcctaaatgatattggtggctgaattgctccacacattatatttgtctaactaagnttgttctagattataaattctacaggtgccaaaggttcaacacaaaccaataaaaagtccaagaaagggttcaatatataaagagccaaagaaacctaaagcagccctggtttggcgcaccaaactgttcggtgcaccaccgagcagtgtccggtgcaccaaggtgaatccactcgaactgctcagcttcgggtttctgtaaatggctctccgctataattcaccagactgtccggtgtgccaagcggaataactgctacaacgccaacggtcgtctgcaaaagtgaacagtgaagctacagtgcacggacagcgcgcgcagagtcatagcangcgccagaaagcacacctgatagtgaat

SEQ ID NO: 16627 - DNA, 278 bp, Zea mays
  unsure (1)..(278): unsure at all n locations
ttatgaagattcttcatcccaacatgggctaatctgcggtgccagagccaacccatgctaggactagcaattaagcaagtgtcgagttcagctctatcaaaatctaccaagtatagctgacccttcagcactcccttaaatgctattgaatcatcacttcttctaaagacagtgacacctacttcagtgaaaagacaagtggaacccattntgcataattgagatacagaaagctgaatggtatctaatgaatctacaagaaaacattggagatagaa

SEQ ID NO: 16628 - DNA, 435 bp, Zea mays
  unsure (1)..(435): unsure at all n locations
agcttggctgagatcatgtaaggatcctatcantcttgcatgangnttctgncngcaaaatggatgtgctacgtatccaagtccctgcttcagggagaacctacttggagaaacaacatctaatatgacatgactgcatatgctgagatagtagtgctgcattattggtcttttttattctctatttcaattgaaagttcatggaatcatagttattttgtgcccgcaatttaagtattgattgatgaagctaaaattcaggtttatgtgcacttaactagcttctaaatctacatagaggagtcaccaagccaattgtactctctataggcatatttcctctcctcggaagataaatgattgtagctgtcttttcttaacagaacggagaaatacatgtactgtgaagatttggtactatgctagccttctacg

SEQ ID NO: 16629 - DNA, 381 bp, Zea mays
agctttgttccagtgcatgcaagatcatgaagaatacctccatgcgtatgtccgaaggttcttgcgtctgagggcacaaacgccgacggtgcccaatgaaattgtcattgaggccatgatcaaggggcttcggccaggacctatggcccaatacttcgccaggaaaccccctcagaccctggagaaattgctttaaaagatggatgaatacatccgcgctgataatgactttcgtcaaagaagggaggaagcctacaagttctctaagattaccaagggcttcagagggagaatccacccaaggcacgtcagatcaatccactccacccagaatgacgacagaggaagtcagcagcagaggccacaatattcctcacaagc

SEQ ID NO: 16630 - DNA, 399 bp, Zea mays
  unsure (1)..(399): unsure at all n locations
agcttcacaaagaagaaccttcggccatttcatacttacagcttccgccgaagactgcttctccctgtaagaccttcggcgacgaagcatagacccaacagtagcccctttcgcggtgctagatcngttttcgtaacgagcttgatccgtgaaaaaagtctcttaagcttcggagcgccgaaggtctaaaaaacaccttccctgagctcgttgtcgagaaacgattcgatctcccagcgcgtagcgaccccaccttgcagagttactgttcggtctctgcgggccaccacgcagcgagtgcgagcaggtgtccgcctggtgaaaaattctggcgcttcggcttctctcctgcagcactatataaacagacgagtaggtgtgaagtttccacagcattca

SEQ ID NO: 16631 - DNA, 429 bp, Zea mays
  unsure (1)..(429): unsure at all n locations
agcttatttaacatgttgcgccgagccaaaccagttatgtgcctcttctctaaccatccccacccaaactacatcaacctagaaacaaaaactgatccacgccatccggtttgacccaaaccaattccagcttcaactctactaggtccttgatttaattatgtgtcactatgataattacatattttaatgaagaagtttcagtagcttgaaatgaaatatagctcttacgcaacattgaactgaaattgatgaacaataagatagcattntagaaaaacaattgtggtggactcatgttgatgatgcaaaaataattgagcactatgtgttatactatcatatataggaacatcgtaaacttcttatgggtccaagagtctaaaacaataaaccacaatgangggattacattgaacctacattatg

SEQ ID NO: 16632 - DNA, 388 bp, Zea mays
  unsure (1)..(388): unsure at all n locations
agctngaagccatggtaagtagcataggccaataatatacgaattgactcaagcctagctacgggtgcataggtttcaccaaaatccaaaccttcgacttgggagtatcccttggccacaagtcgggctttgttccttgtcaccacaccatgctcatcttgcttgttgcggaacacccatttggttcctacaacattttggttaggacgtggaaccaaatgccatacctcattcctagtgaagttgttgagctcctcttgcattgccaccacccaatccgaatcttgtagtgcttcctctaccctgtgtggctcaatagaggaaacaaaagagtaatgctcacaaaaatgtgcaacacgagatctagtggttacctccttatgaatgt

SEQ ID NO: 16633 - DNA, 333 bp, Zea mays
gcttctcactaatcgagacaggctatgaacgggaaagacgcgaagcggcaggccgaccgagccgagggattcccacgcctctgggatacggatacctcactcgtcccttccgcgagaagcaactctcgctcacacaaacatccctgttaccgacagagtccagatgctcgaaacaagagggaaaaagacgcagcttcgcgagcacggcgagggtgtgttttctggcctcggcggccgcagaaggcacacgctacaagacgatctgatcctgcaggctcgggtcttcacgctgaagggagccgtagcaccctcggcatcgatgacgtcttcagc

SEQ ID NO: 16634 - DNA, 324 bp, Zea mays
  unsure (1)..(324): unsure at all n locations
agcttgcattgcatgtttaaatttcttgtattgcatctagggctggtctaacctagttaagataaccgccaacaaagcgagtgaaaaagcttaactcggatcaaacttgacaagtcttagttttaagcttttagcacttgaattcttactttntatgcaattggtggttcttgaaatatgcatgaggtactgcacttagggggagtattcaaaacccaaatcactcatgaaaacccctagtgcaaggccaaaatgcaaatttcaccatttgcctattttctctaaaaattatctagcctatggcaaaatatgagaaaatatatg

SEQ ID NO: 16635 - DNA, 463 bp, Zea mays
  unsure (1)..(463): unsure at all n locations
agcttgtgtgctctcataataaatttatggattcacatatcatgttagaaatggctcatgagggtgngttaactaatttgaaatcctaccaacctcacatatgcacatgtactcatatagaaactatattatcatgtgctaacaaatgttgctctcaagaaagccaatcttccattgagctagaattttcaggaacaagtaatgtttcctatgcaaaagaaaacaatgagctcaaggaagaaaatgagaggctaaaaaggagcttgactcaattgaaggtaaaatgtcatgctcaaccttctcaagataaccgtgataatatggtgaaaaagcttgagaaggggacaaccgtagcatgcacaaaaccccttcaaaagaataccaagctttccaagaagggcatgagcaaaattcatggtaagaaaattaatgctcatactatttgctctaacaatgtacctat

SEQ ID NO: 16636 - DNA, 415 bp, Zea mays
  unsure (1)..(415): unsure at all n locations
gcttgactgggacggcgatcacgacgaaggataatacgatcactaagctatgcgcagaagagcttcggcataacggcagaaagaggaaaccgacttaaagatgaaaagccaaattagaccccgaagaattactatagagttattgataaatgtaaagggcattaatgtaattttgcattggctgcgacccgtgcctataaataggtgaacagtattcccgtactgtacacgctgatttgtcattcacttttgcgtcacacctatattttcattccttcaagctgaaggtacacttgcaatttattaattgttgtgcgaggaatatgaatagaaatagattaatgataatgtttataaaaattatattgctttctgtatttngtatgaatgttctccatcttttatcatgatcatg

SEQ ID NO: 16637 - DNA, 234 bp, Zea mays
ggaaaaatggggcactcgaactttctttcttaggggggggcgggggtcccccccgaaaagaaaacccaaaacatccccccccccctatccaggcgcgcaacccccgaggactctttaaaataaaaaccctggggcacccccaaaaacagacccaaaaacccgttaaccaaaatgaaaacaaaacggcttttttggaaacccttcgaaacaaccccctaaaaaaaaggcaacccc

SEQ ID NO: 16638 - DNA, 301 bp, Zea mays
  unsure (1)..(301): unsure at all n locations
agctggtaacacagataagtattgaagtgcagatataaaaacgagtaaggcagagagtcaggatagaacagagacacagacgcaagggtttatcccgaggttcggccaagcctgaaatgcttgcctagtcctcgttggagttagccacacctgngcttggagtctatttcaactccttcctccgtttgctcagatctgtcaatatgacagatagagcctttcactattgagtggggttacaacagaaccgcggctgcttacaaacttcttggcagcactccggcagagtaacgatacgctc

SEQ ID NO: 16639 - DNA, 417 bp, Zea mays
agcttgtgaagattcttcatcccaacattggcatgtctgcgatgccaatgccatcccatgttagtcttagcaattaagcaagtgtctagttcagcttggttatcattaaaatcaactaaatatagctgaccatctaacactcccttaaatgatattgaatcatcacttcttctaaagacagtaacacatatatcagtaaaaagacagttgtagcccattttgcataattgagaaacagaaagcaaattgtaatctaaagaatctataagaaaaacattagaaatggaatggttaggggatatagcaatattaaccaaacctttgaccagtccttgatttccatcctcgaatgtaatagctctttggggatcttcatttctctcatatgaggagaacattcttttcttccctatcatg

SEQ ID NO: 16640 - DNA, 439 bp, Zea mays
  unsure (1)..(439): unsure at all n locations
agcttcttcaccacgcgcccgtggatatcttgagatagttgatcaaagtgtcttctcctcagatgtcggtgcttcttattcccacagaatttcttttgtgaccctaaaacttggtgctcaatcaatgattggctttcttttgagcaacaagggttagcacatgatgatatacaattcaattgcgcacacgtgcgagaatgagggtcacatgaatttaagtttgcaattataacctcatgagcaacattaagcatgatatggtcatcaactaatttattatgagaatatgacaacatatcatactttntacctagagcacgtttttctaaagccattggttctacttgactcttaagcatagaattttccgtntaagttgagcaatgtaagataaacatcatgactannttcttgctaattaaaacatattcataccttt

SEQ ID NO: 16641 - DNA, 288 bp, Zea mays
  unsure (1)..(288): unsure at all n locations
agcttcttcaccatgtgatcacgggtatcttgagattgttgagcgatgcatttcccttttagttgtgtcaagctcatttttagcctctcattttcttctttgagcttttgatatgtatcatcttttggtcctgcaaatattatctcaaaggaagaattgctttgtgatgcacaacaagcattagcacatggtgatgtagnttcaatttgaatacatgtgcatgagtgaggttgtttggattttaagttttctatcacaaccctcatgagcaatatctaatatgatatg

SEQ ID NO: 16642 - DNA, 287 bp, Zea mays
  unsure (1)..(287): unsure at all n locations
agcttctaaagggagaacacgtgataggtctaactaatgttactttcgaaaaagacagaccttgtgcagcttgtcaagcagggaaacaggtgggaagctctcatcatgccaaaaatgtgatgacaacatcaagacccctggagttacttcatatggacctctttggacccgtcgcctatctaagcatatgaggaagtaaagatggtcttgttataaatgatgaatattcccgctttacttgggtattctttttgcnggataaatctgaaacccaagggaccctcaag

SEQ ID NO: 16643 - DNA, 240 bp, Zea mays
agcttgggcaccctcgggcgtcttgccgcagccgaagcaccaagtctcctacttggaggtctcggggctaaactccttgggcgtggtagcgtcgcagagcctgctgatatcgcgccgagtgtagcaaggccatgtcccgagcctcttccagctggtctagtgagtcttctcggctggtctggttgctttggtcgtcgtacacccttgtccttcgggaaccgtattctaagtctgtgggca

SEQ ID NO: 16644 - DNA, 407 bp, Zea mays
  unsure (1)..(407): unsure at all n locations
agcttgtgctgnttcaggtgttggttgaagcaactcatgaagcgccagccgccagaggcccattcaaccagctttacagaattgtttggtttgtagtctggaattgggttagagtctgaagactctatgccagatattttgatggggaccctgattctgacaagatttcgttactctttttttaaaacttgtgtgtgtctcgatctatttttttagactaatgacaaagtttgcgtcaattttgacttgccaatgaaattgtggtctgctatttggttttgagcaaactgtacgacactgctgaatgcctgagatgatgcaataatatctgtagttcccagtggaacgcagtttctcaaacgcttgctccattgatggtagagatcaagaaatactttctaacattc

SEQ ID NO: 16645 - DNA, 301 bp, Zea mays
  unsure (1)..(301): unsure at all n locations
agctggacaggaccgntgtcttgttgctcctgttcacctgcaaccctgtgtggggtaggtatgcgcattgaatgctcctatcccttgcagacttcagctgagccttgccctgggtatgtcttccttactcgagacgggctcgggcgaggcggagatcgtcattctggggagaggagaccttggctgggatgaggattctcttgagaacacaccctatccgatggcaggctcggtgaggcggagttatggtgacccctgagaagggcctcgggctaagcgcaacttatgatcattcgtcctc

SEQ ID NO: 16646 - DNA, 466 bp, Zea mays
  unsure (1)..(466): unsure at all n locations
tagcttccaccaagagatcaactaagctaattatgggtactgatctgatctcaatatcctctgaggagcttgatgatttccatagtttctagcgattatatcttctaagggaaaagtagcatctagtcttttggtcctaacgaagcaagcaattgagccagattgattaaaagttatggagtcctaggattgaatatccgcttgatcttcaaatttcgcttccaacttcattggatcttgaagagccacatcaaccgtgccccctcaaatgttgagaaggacaactctgcaccgctagttgcatatttcctaatcatccctatttttgcttgcaatcaatagccgcccgacctgctgtgcacccatgtgnggatgtttagttccatcactaatggtcggctatatgaagatgtatcactgctcatatctatacagcggaatattgggaatgcctcttgcacccaat

SEQ ID NO: 16647 - DNA, 456 bp, Zea mays
  unsure (1)..(456): unsure at all n locations
agcttgataacggtacattggatatgcagactgttaatatagttatcctaccacctagacttgaaaatctaccctgtccaccagcgagccttttgtacaattattcaatcatgggaacccatagacatttatttatcttcttattatcaaatggcacaccaagatatttcataaggagacaagctatangacaggtgaagataccagcatacaaatagtcaatatccttagcttttacataacacaaaatctcacttttgtgaaagtatattttcaccccgacatgtcttgaacagacacaaatgtattaagatttctggcccttctaaaaatctttgataggaaaatggtttatcacatattgacgcacacatccgtttgatatatacgaataaacctaatacaacctaactgcttatgatatgccccaccatcgaacaatgacaaaggaaaaag

SEQ ID NO: 16648 - DNA, 488 bp, Zea mays
  unsure (1)..(488): unsure at all n locations
agctntaatgcacatattctccccctttgacatctaacaccataaccatattcaagcaagaacatatgatgatgtcaagggacagcagggtgttaaggaggagagacacattatcaaaactcccccttacttattgagcatatgcactaccaagatataaatacgcaaaaagattaatacttccttttgtacctttaccatgtagtaatgtacttcccatcttgaaagtatttaatctctcgagagcttctccacacttgtgcctgattctttatcctaaccttttcttggtgctaagacaccaaacttagaacaagttatagtattgggcacaggaagaaacttctattctagtgattaccanaagataccaattgaagcacactaccaaggctaccatttaaaaatcattactgcatagctcatgatattaaagatagcatcangatcacaactatatagagcacgacaaccttaatcgtattact

SEQ ID NO: 16649 - DNA, 391 bp, Zea mays
caaacactcagctcaacttagatctttcactaagtaatgattgtttatgccagttgaaactctctcttagtggttagatttattcttaggggagacctaatatatggaattccttgaatattaatgttcaatagtcatataatttacatcacttatgtgtgcactaattaaaaaattaattatccttgggttcaaaatgatgattattctcatcacataaaggattatatttggaaacctccttggccttaatgctttttctaatgttcataagctctttcaaggtttaaatggattaaatctatgatatagagcttggtgttaatcatgagttcatggtctcatataagatgttgaccagccaataatgaattaaatcgctgttgagaat

SEQ ID NO: 16650 - DNA, 190 bp, Zea mays
  unsure (1)..(190): unsure at all n locations
accctggaggtgtagtatctgattatgtgagctgacctgtccaagtcacatggctgggctcgagctcgagctccttgctcgcaccggagacagagtgggagcggacgacgagtcgattgcctnggccgcaataatctaatatcgatcatatctcttgcctcctccgaccctcatgaggacatctttgttg

SEQ ID NO: 16651 - DNA, 440 bp, Zea mays
tagctcgtgaagggtcttcatgctcacatgtgctattcggtgatgccacagccagcccatgctaggcttatctattaagcatgcatctagaccggcctcttcttatgcaaaatcaactaaatatagtttgccgtctaatacacccttaatagctagtgaaccatcacttcttctaaagacagacacatctacatttgtaaatagacagttatattccatattgcataatggactcacagatagcagattatatccaagactctctactaaaagtacattagagatagaatgctcattagaaattgcaatcttacctaaccctgttaccttgccttgattcccatcaccgaatataattgaatcctgggaatctttattcttgacgtaggaggtgaacatcttcttctcgcccgcatatggttgtgcatcgctggcgaaat

SEQ ID NO: 16652 - DNA, 423 bp, Zea mays
  unsure (1)..(423): unsure at all n locations
gcttacaccattcaaactattgtgtggtgactaattcttaactccgaaagaagctaaagcaggatcaataagaatagtagcttcggcagaagacgatactgaagctgattactctgtggaaaaagatgctatagaagggatcacgcttcaagttgtggaaaacgtcaacaaataacaagctgaaataataaaatggcgtgatagaaaggttaagctagagaacattgaaccaggacactttgtgcttcgaagagtagccaaccctgagacagtatgcaaattacagctgaagtgggaaggaccttttttggtatattttcgcaagacccggttctacagattgaggatatggacggcacgacattcctaaatcatggatgcggatgacttccgnatattatgttagcttgtggaattttctat

SEQ ID NO: 16653 - DNA, 348 bp, Zea mays
cttctcagaagtctacgtggtctctacatatgtgaatgtggacccctttttattgtggagccttatccatcgcctctgttgcataaactcataaccggccctatgtgggcccggctgctgcggaaaccataattgcttcgtgtacgtgactactaacacttcgacatcacggtgaaagtgcgagcggcttcttggccagaacgtatcggcgatgatagacagagccaagtcatggccgggaccacatgtcagccggtcagcggtggctatgttcgtggaccttatagtagaggatcctgctgaggtgaaaatagttctctccatgttgtgctcacccacgtgttgatg

SEQ ID NO: 16654 - DNA, 425 bp, Zea mays
  unsure (1)..(425): unsure at all n locations
ccaccgcgatcttatatctactgccgcatgcaacttaagataaccaaatggtagctctatttctttgntcttcgantagaggcacacaagcaacaacaatgggtgctagttccatgcttcatttcatgataccgacatggatagtggtgtatctggtctgatacgacaaatggccctcggaagggattccttctaaaaatgaaaagaagaacgctgcatcgactatttttgatgccaccaagtacttaagccgactccatgagttaaacggaatataactccagaggagtatataaaagggaagggatgcacacctcgttttggaaggcaaaccacatgctaactatgtacgtgccaggatcagaactcacgtacacagcgagtacataaattaacatcatcacacaatgctcgagtaatatcat

SEQ ID NO: 16655 - DNA, 301 bp, Zea mays
  unsure (1)..(301): unsure at all n locations
cttcatccctacatgtgctaagcggcgatgccacagccaggccatgctagtcttagctattaagcatgcatctagaccggcctcctcttttgcagaatcaactaagtagagcttgccgtctaatacacccttaaaagctagtgaaccatcacttcttctaaagacagacacatctacatttgtaaatggacagttatatcccatatgacataattgactaacagatagcaagttatatccaagactctccactagaaacacattagagatagaatgctcattggagattgcaatnttacct

SEQ ID NO: 16656 - DNA, 364 bp, Zea mays
  unsure (1)..(364): unsure at all n locations
ctgctggcgaagatgagaaaccgatgcagcagcagcagcacagcagcaaaaggtggttctattttacatcatggcttgatcaatttggagatctactggtcttaactaatgtttgtcgcggtaggtatactctttcctgtactggccctcctactggngttggtagctccagaacgaaccctctttcaaatccaagatggaagagggtgcttctgaagaattggggcactgccctatgtggagcagctcatcaaaatgttgatcccaaggtagtttatataatctgatggtgatagatctaatttgatgctttccctaatgttatggactacaattntgtcacttcgtcaggtgattatgctga

SEQ ID NO: 16657 - DNA, 419 bp, Zea mays
  unsure (1)..(419): unsure at all n locations
agcttaatgcccncaagaataaaatctcntaatttgttaatggtaaggctcacatggttcaggatagagaaggctacattttatatccttaanactatcctgagcataatattaggaggattcatgctagaaagcctcattatgtttctcatcatgtttttatgtatagtaatgaggcatctagctctaggcattcaactcatatcaaaatgcctaanaagaaaattgcaaatgcatcaaatgagcataacattccatttaagactttngatgcttcttatgtgctaactaacaattcaggcaaagtagttgccaaatatgttgggggcaaacacaagagtcccaagacttgtngttgggtacccgaggtgcttatttctaatgtcaaaggaacccaataccgttgggtacctaaaaac

SEQ ID NO: 16658 - DNA, 479 bp, Zea mays
ctgagctgcagctgcagaaccgttagatgggtagcagtattattctattattactataaatgtgtcgcatctgctgtagcatattacatacaattcatatcatatcgatgtgagaatgagaccattacatctgcattgccgatgaagcaactggcataccacagatgcatcttctcattggctagcagaagcagcttgtattatcatatttgtggcagtgtatggtgcagacacgccagctgatctagccaaacgctaatgacagtgctatgtcctgctcttgctctgtctgatgttcaggagctcatgaagaagctctatatctagtgttcttaactgcactgtacatggacgtagccaataggacaggctgcatgtgataccataatacatgaacatggctaagtgggcgttccaagtatacagcctactgccgggtgactgagttgtaccgtcaagtcgtaaatgttgtctttttt

SEQ ID NO: 16659 - DNA, 493 bp, Zea mays
  unsure (1)..(493): unsure at all n locations
agcttggcttatgatgaatgttagtgagaactaatacctagttggtatgagtagagtgatggagagaggactcttctcttgattgctcctttaatatgtgtattaaaattaggagcaatattgcaagagtggataactcaagaagatagtaatcacaataaataaagagacaagtgacacaacgatttttaacatggtttggccaatgcctactctaagttttggtgacctcctttggtcaaagggtgcactcaacccatctcaagtgatccaaagatcaaacttgagtgccacaatatctttcttatatcaagaatcctattgtgaggaatctccacaaatgggagtctctcacgccttacacanaatgttacaatcaaaatggagtaaggaggggagtagaaacacacacaagaacacaatctgcacaacaacatgcacacaagttaagaagagataacaagagtataacgacagagtacagctcaagacg

SEQ ID NO: 16660 - DNA, 349 bp, Zea mays
ggatcttaagtacgagcgcacctggggctagaggactactactttttgcttcctactgccgcttcatcggacctgcggcactgcttaagaatcggcacgcaaccctgcgcgtccgccgcgacatttatgtgaactatatcaattttgcttcatcgtatatccttattagctacaccatcgttaaggcccatactgctaaaaaataccccgcctgcctcttgagactgtgaattattagcatctgcgactgaacctacaacgctgtaaccgatgcacggctacccttgtgctgcgttaattgccagggaaacggcaaaattgcctatgcccgttaataactgggactacc

SEQ ID NO: 16661 - DNA, 393 bp, Zea mays
  unsure (1)..(393): unsure at all n locations
catgctaactcgcgcctggacgacttcgagtggttttcttgttagtagntgcctctacagatcatctgactgtgaactagggcttgtgtgcacttcaatatctaaatcctggattattttccgtttcttttcagcacccgagtggtcgacctgatcctgcacatgaacagcaccaagtaaatgaacaaactgatgaaagcatgcatagagtgatgatagcattcatagagagttgtgtttctttcccggaagtgcttccgagaataaatttttcttatctgattgtctaaaacctataattggtgtatgggatcgtagtggttggttgagcattgagtgactcactatttgacaagtctatgtgttatcggtaaacttttaacggtcattcta

SEQ ID NO: 16662 - DNA, 425 bp, Zea mays
  unsure (1)..(425): unsure at all n locations
agctngatggtgcacagaagagtgcagtcgatgctcgatcgggctttataagcgcgggcgcgggccatggtgtcggctggtcgttggcgcgacgcggtgcgcgcgcgggcgtgctctggcgcacacagagcgcgtcgaacacgtggagcttttcttctgcccgtgttccacagctcacccaagtcgcaaacgtgtgaatcttggcaaatatccggcgcgagtcttttcctggcacctatggctgtctctcatccgtgagctgcaatggcagatatggcctatgtagggagatctttggtcgccaaatcgggtgtgtcacactgcccacctcacgacanaaaccatgccaaggcatgtcanacgttcaagtctcggctcagctttttccagtgggtgccttaagtggtatgccacatttttggtat

SEQ ID NO: 16663 - DNA, 417 bp, Zea mays
agcttaacctgataagaatagatgtacaatttacttatattatattccaacaatcacatcattcgcattcccaattaattaaatatttgaaaagacaataatatagagattacatgcctacatggatcgctagacatatatgtcaagtattagctatattgtctgaagggaagaaggaaagagaaataaattaaatgcatcaacatacacgcaacctagatatgatgtgatcgatcaattgctctttatgcactacgcttgaagtggccgggtaacggtgtcgtcgacgctgaaattcaccggcgagcacacaaacttagcgaatctagggtggttcggcgccccagcatgacgactaatgaggtgttcatggtcacctccaccacccctgtgaagctagtatgcccttcatactct

SEQ ID NO: 16664 - DNA, 403 bp, Zea mays
  unsure (1)..(403): unsure at all n locations
agctngtggatgactagctgatgcaacatattcttcatgatgattacccacatattntggtatgtaaggtgagtgacacgaagcatcgtgcatgacctgcttcggttgactctgccatgcttcagcttctgcgatttgcttctgcttttggatagtgatttggcacattcttgtagtatggcccttgtcttcaccacaaaatagacaagaaatcttcctaggttggttcccatatcttcctccgaagcccctggcgcctctgcctcttggagctggtggccgaaaggagattttgtgctgtcccacagattatgaaaaatactgcggcctctgcacgtgacttcttctgtcatcattctgagtggagtcatgaattgacctgacatgcctcgggtggattctt

SEQ ID NO: 16665 - DNA, 487 bp, Zea mays
  unsure (1)..(487): unsure at all n locations
agcttgtggaatatagtgttgaatttactagatcatctattcacccncccctctaggtgctctcaattggtatcggagccgtactcttcatctaagggactaaccgcctgaagagatggatcctaagggaaaggcgatggtggtcaacgacaaggaaaaggagtccatattcaacgagccaagagacgacaagcctactgactcacgctcaagtcataagaagagagaagggaagaagaagaggcgcattaagaagatcatctactacgacagcgatgcctcgtcttcttcaccacacgacgacgacgactcttcataaagaaaaacggtcaatcacagttattcatttgattactcccgtactccatttaattcaaatgctcatgtgctatcaattaccacttngaaacctccacactttgatggagaagactactnncctttggagtcataaatgcgtagcatgtattttctctccatcctagta

SEQ ID NO: 16666 - DNA, 237 bp, Zea mays
  unsure (1)..(237): unsure at all n locations
ctgataagatatgttcacccggtttgttcaatacaatgcagcatttgaatcttcatctcccctatgaagcaccaatggnggggcccgtgcagggacgttggtgctatccaatcgagagatgtctaatgactatactagagacatgtagaaataaatgtaaaatcgaggcttccattgcagaggcatacattctagaagatgtctcacacttcacaacaactattatggtgacaaact

SEQ ID NO: 16667 - DNA, 412 bp, Zea mays
  unsure (1)..(412): unsure at all n locations
agcttcagcaagacatactgaatcttctgaagctccagttccaaccttgccacattctccgaccctttctgcacctgctcggagatcttcctcctgctggaatacccttctcgctcggtgctcatattatctgacagtgtggggtagttctcagccgtcctagtcaatttgttgttcagattgatctgttccaagacatggccctctgtctcatgcacctgagcgctcacactgctgtactcaagagttcataggggaatttccctttgactgcccctccattttctgcttcaactcttcaatgctcgcttggatgctcaacagcctctgagcatcagaagtgagcctctcaagtacgttcttgctccacgcctcatgaggctctgcagctnccttcgacgcttctagctta

SEQ ID NO: 16668 - DNA, 381 bp, Zea mays
  unsure (1)..(381): unsure at all n locations
actgcangcatgcaagcttgacacataagagaagagtatagaatcctttctctttactgaacagatgaacatcttcactgacttccaacacaggctaacacagcttctcagattaagaggaaagtagaacaaaagggcttcccaactaggtaactaattctattaacacttaacaggtaaaccaaagtgcaggggatacctacaccctgacgacagtcattacaaagatccacatccaacatagttcattatgacgaacataaaggcacatgataagcagactaccctatctaactaagactaactaagagtaagactgatgctaagactataacttctatatatatatatatctgcattaattacatgatctgacattga

SEQ ID NO: 16669 - DNA, 482 bp, Zea mays
  unsure (1)..(482): unsure at all n locations
agctntgcgcgaggtaactacgtttccatatagttctgctgtttgcaattttntatttttgttggcagcagcttaccatttactatcttctgtattccaaccagttgggtagatctgttctcttaaaatcagtcaggagcacattgtttggtttagacactgttttttcaggacttgaaattgaatctccccactgttttcttaaacttacacagctatgtagatccagtttgatatgctcttgctcctcacaaatttccaaaaattcataaggaanaccacctgttagcggcagttaagaacagagcacacgaataaaaacttgacaatggaggatagatatctaagcatatagcatgtgccgcacagtagattttaaggcgatgactaatatgcantcagtcattatatgcaagcgagctttcttgcccgttaggtcatgatccaaccgtatatataactgtggtttgtttacacacaca

SEQ ID NO: 16670 - DNA, 436 bp, Zea mays
gccaaggcttctgcggaagggttggagaccagcctagaaaaatctattgcctattctgtggagaagacaaaggtgataccaccaggatgtgccacgttaccatccagaatcagatggagatagcagaagcatcagcgcaacaaagtcagccgaagcaggtcatgcatactgcttcgtatcactcgccttatattccaaaatacgtaggcaaccactctgcagcttctgttgctttagcgagccaaccccaagcatcttgtgaacagccttcaccggcacctgcgacccagcgagggcagcagccagaatggagtcagcacaatcacctttagagggatttcagagaatagtctgaagctcgcacagtcaatagcactgtgccagagtcgaagcacatttatttgacaatatcctaccttaacagcagttctttcgc

SEQ ID NO: 16671 - DNA, 465 bp, Zea mays
  unsure (1)..(465): unsure at all n locations
cttgattgaagtgcaggacatattgagacatgttcttncattccgctgcaacctactcgaagagtcttctcactccactgtgtaccaagtcttcgagtagagtaagaatctaagttttaaagtaataagttntattcgcctattcaccccccccctctaggcgacatctagattctgttcccgggccaaagggaactttcaattggtatcggagctaggcctctccagtgtgggcttagccgtccggagataacgatgtcgtcacaagaggtaactgtagaacttctcttatgcgatggttctaattacaaatcttggtctgtctctatgtatagtgctttcatgagtgttgatcctgatttgagacagatctttagtagaaatatctttccatctaatattagtagaaatgctttcaatgaagaactaagatgtctaactctaaatcaccatgcatgcaacatc

SEQ ID NO: 16672 - DNA, 453 bp, Zea mays
  unsure (1)..(453): unsure at all n locations
gcttgacaatgaggagatggcgctcgtcatcaatagcttccgccanatcctcaaacaaaggagggggaaagactacaagtcccgctccaagaaggtttgctacaaatgtggtaagcccggtcatttcattgctaaatgtcctatgtctagtgacagtgaccgatgccacgacaagaaggggagaagaaaggagaagaataggtactacaagaagaagggcggcgatgcccatgtttgtcgggaatgggattccgacgaaagctctagcgactcctccgacgacgaggacgccgccaacatcgccgtcaccaagggactcctcttccccaacatcgtgcacaggtgcctcatggcaaaggacggcaaacggaaaaagggtaaatctaactcctccgctaaatatgaatcttctagtgatgataatgctagtgatgaagaggataaattacgttc

SEQ ID NO: 16673 - DNA, 437 bp, Zea mays
tagcttgtgagtaatacaagttcagaagggatatatctgcttcggctgatcagccgaagcccatgctcttatgtgaggatatatcagatcagaaggtgctattgggatctcaattgtctgaagagcacgagaaaaccttgataaggtttctgttcaacaataaagatgtgtttgcttggtcagctaatgatacttgtggagttaacagggatgttattgagcactcgctcaatgttgatccatccttcagacccagaaagcagaggcttctgaagatgtctgatgacaaggccgaaggtgctcggaatgaagtgaaaagactcctcagtgccggagttattagagaggtaaaatacccacaatggctggctaacattgttatggcgaagaaggtcaatggtaaatggagaatgtgtatcgatcttactgatctcaat

SEQ ID NO: 16674 - DNA, 403 bp, Zea mays
  unsure (1)..(403): unsure at all n locations
ngcttacgtctatgacatcgatgtcaagacgaattattcttccgacctcctctctgacctngagacaacgttcaagtgtttgagagtgaaaggtgtaaaactcaatcccgagaagtgtgtcttcggagtcccctgaagcatgctcctgtggttcatcgtctccgagcgaggcatcgaagccaacccggagaaattcgcggtcatcaccgacttgtgaccgaacaaagattgaaaggagtacaaagggtcattggatgccttgcggccctgagccgcttcatctcgcgcctcggtgagaaaggcctgtccttgtaccgctcttaagaaagccgagtgcttacttgacccccaggccatgaaccctcgaaacctaagaactcttaccatgctccatcttgtgccc

SEQ ID NO: 16675 - DNA, 350 bp, Zea mays
agcttgcacccaggtacattggccattcctgttcttgacaatgtgaccataggataccgactccaactacccgaaaccttgtttgctgtgcataatgtgttccacgtgtcacaattgaagaagtgtcttcgggttcctgatggaaccgttgaagtgacagatgttgttcttgaaccatacttgacatattctgagcatcccatacgagtcttggatcataaggacagggttacccggagaaaaactctcaagttttataagatacagtggaaccagcattctgaagatgaagctacttgggaaactcaagacttcttgaataagaatatcccaggctctctagcctcatg

SEQ ID NO: 16676 - DNA, 402 bp, Zea mays
  unsure (1)..(402): unsure at all n locations
agctcgcgaagattcttcataccatctttttcttgtctgagatgccagagccagtccatgtttgtcttatcaaataagcaagtgtcgagatcagatctatcaaaatctaccaaggatagctgaccctctaacactcccttaaatgctattgaatcatcacttcttctagagacagtgacacctacatcagngaatagacagattgagcccattttgcataattgagataccgaaagcaaattgtaatttagagaatctacaagaagaacataggaaatagaatggtcaggagatatagctattgtaccaagacctttgaccaaaccttgatttccatccccgaatgtgatagcgtcgtgaggatcttggttgtctctatgaggagaacatatcatctccatg

SEQ ID NO: 16677 - DNA, 486 bp, Zea mays
  unsure (1)..(486): unsure at all n locations
gtcacctgcggcatgcaagcttgacatttgttccctggtggaagccagtgccatccttaatgccagagcatctcccattatagagcatgctcctagcanaatttaattttttcattttctatctcatgctcattgattttagcattaagttgagctatgtgatcattttgttgtttaattaaagctaggtgatcatggatagcatcaacattaatgtctctacatctagtacaaatggaaacatggctaaccgtagatgtagagagtttgcaagcatttaattcatcaatcttagcatgtaacatgacattctcatttctaagattggaaatagaaacattgcaaacatttaaatccttagccttagcaattaatttatcanttctcaatttaaggctagaaatngattcattcaactggtcaatcttagcaatcaaactagcattctcatctattagggtgacaagagaatcatcacanacactt

SEQ ID NO: 16678 - DNA, 264 bp, Zea mays
actgcttcggcaagagagcttccgtacgttaagacttgttcggtccacggagtcgctgtatccgaacgcgagttacttatcgcagaaggtgatgagtgaggtatccgtattccggaggcgtatgagtccatcggctcggtcagccttggctgcatacgtgtactccgtcgtttccaggatcccgtttccgaagtagtcaagaagcacgaaagacatcctgctaaaaagagatccttcttcgaggaagatttcaacgcagagggg

SEQ ID NO: 16679 - DNA, 497 bp, Zea mays
agcttagcgataatgtttctgtgtactttaatctgctttttgtaagttaactattatcctgttcattcgggaggaacaatacattatttatgtcggtggcataaatcttagaagtacactactttgcaacatcgtgtttatttttccagagttcccaagttagctttgagtcagtagcagtgcaataagaagatttgctgattttttataggttggctgcacccatttcttgtaataaatcgtgtatcgtcatctcaggaattcgacgcgttattgaaaatgttgaactaaaaccctgcaactctgctgcatcttgcgtcatgttagtgtgtccctgataaatcggcgagcaacttctgggttacacatcatactgatagatacactctctcgatctgtatgcagctgaagatgtgcaaggacggtgcatattgtgtagcttactgaccaatttgcgcctttgtgcatctactcaacgactcaactcaacgattatg

SEQ ID NO: 16680 - DNA, 448 bp, Zea mays
  unsure (1)..(448): unsure at all n locations
agcttctccaaggatagaagtggctttcttgcaaaatattgtgccgttggttctcgtctaagccccttgatcatggcctcaatgacaatctcattgggcactgtaggcgcctgagctctcagtctcaagaaccttcaaacgtacgcatgtaggtactcgtcatggtcctgcgtgcactggaacaaggcttgggcagtgactggcttcgtctaaaaaccctggaagctagtgactagcatatactttagcttctgccatgacgtaattgttctcaaccgaagagaagaataccatgtttgagccacacttctgactgccatgacgaaggatntcgcaatgacaacagtgttgcccccatatgaagatatggttgcttcgtatctcattaagaaccgcttctgatctgagtgtccatcatacatggngagctgaggtggcttataagatg

SEQ ID NO: 16681 - DNA, 471 bp, Zea mays
  unsure (1)..(471): unsure at all n locations
agcttttgaacgtactaagcacatgccaggaaaaatggttaccggtaaacctagtacctgatggaagccgggcgcggccttaatccctcatgcgacctgagactgggtctcccatgctagctatggtgggtacaagtgcggtcactgcacggcggcagccggggtcagtggagcattgtatgccaaggcggtgaggcctgnacgcgaacggngaatcgatggggactgttgtcatgtgtggtgtcggagtaccctgacatgccgtgtgtttaggtttaccttgcaaggttaaaactcgattcatatcgtctgttctcgcagctaatgagactgcttgacccgttgtactgcatcgagtaagaagtgaaataaggttacatgagaataacttgttgattgaactatgatngtaccatgtatgcttagaaggagcanatctagctaagttaatgatgacataatntgaaaagc

SEQ ID NO: 16682 - DNA, 452 bp, Zea mays
  unsure (1)..(452): unsure at all n locations
gattcttagagtcacctgcggctgcagcttcatgcacgtggcgccccatcggtttgcgtttctttccggcgaacttatctggaccggtcgtatggcaagggggtacggcggcctaccccgagtctcatccgcggcgaatatcttttcaccttgtagcataatctgggcacctatgagcacgaatcacctaggcggcgcgaatccagacgtgaggttcaccggcatgaatgtgcactgcacctgggatcctcttcattactataccattggaatccctattcaaagcgcctgacagagtgaaaggaagcgcgtatatctccaatattatgtgagaacttgttaatccacttggtacanagttctanccctataatctagctacaattttgctatatgaaccatactcaaatactcactggattatcttcaatagagctcccagatgtcatccc

SEQ ID NO: 16683 - DNA, 495 bp, Zea mays
  unsure (1)..(495): unsure at all n locations
agcttctcttgtacaagcgccacacttactgcatagtgcgaagctgccacatataacagcaatggagcccctagcacgggtggagttaatgttgttaaattaatcaggtattgattcagctcttcgaaagctttctgttgagttggtccccattgaaaaacttcatttgactttagtacttcaaagaatggtaaatttctttctgctgatctagatataaatcgatttaaagatgccagtcttcctgtcagccgttgggcccccttctttgtgcttggcggctccattcgaaggatagcttcgattttgcttgggttggcttcaatccccttcgttgaaactagacagccaaggaatttgcccttcttcactccgaagaacgcattttctggatttaatttcangccagcttgcctaanactggcaaatgtttcctgcanatcagtaatgtgggtttcttgcttcgtgctcttcactatgatatcatcaacatat

SEQ ID NO: 16684 - DNA, 500 bp, Zea mays
  unsure (1)..(500): unsure at all n locations
gcatcaagcttacaatctgtctcagctggtcgcaagcgttgtctagcatcatggatgaaaactccttggcccgtgctgaaaggctgaacgtaatggaggtaacagcccatctccctcctctaattcatgtaataaagttttgcaaattcctttgaacttggctatttcgaatcttgacgcgattggtatctctctaggtgtagaggaatcccatttagctaagtcaatccaggttcttaatagctatgataaaggtatggtgagtcacgtgggtcgggatggcgtggtagaagggactggttatgacatagtggatgaggagtcagatgatgaattatacagacttactcnttataatcttcgtggnggtatcatggatgacttaatggataacggtagtgacaacaatgcggtctgtcaaattcactggactangtagtgaacacataggatgatagtttatcgaataatgttgaagaattatcgtgcaaaacaaagtt

SEQ ID NO: 16685 - DNA, 472 bp, Zea mays
  unsure (1)..(472): unsure at all n locations
ctcttagtcacctgcggcatgcagcttgaccgaagacccgcgtcaccggaatagtgttatcgtgctcgccggagttcatcaccccgccggcgcacgtagaccgggtacatcactgcgccatttttcgattcaatgcacagatagcctctacatcaccccgggaagctcaccgtgccgttggattggactatgtcgccgtggtttggccggcacaccccccgccgacaaggacacccgcctgcgcacgtggaccgagcgattactgccatcctcgccgtcaagccgtacatcgttgtgaccgtcagaacctncccgagccaaccctgcccctcgccggacctctctcgttaccggtaagccgcgccgcccctttcttctctacggatactgtttacacctgtgagggatcgcggnggagaggaagagaaagtcatggtggttttgcgcattgtaagtcacacagaggaatagt

SEQ ID NO: 16686 - DNA, 480 bp, Zea mays
  unsure (1)..(480): unsure at all n locations
gcttcgcacctctgaactaactcggttgcatcactcttcgctggtggccaatagaatcctgacctgaagaccttcccgactagtgttctggatgctgcatgtattccacattgcccagcatggacctcctccagaagtcgcttcccagtagatgggagaatgcacttcatgaggacgcctgatgcaccccttctgtacaatgtcttcccaatgagtgtgtagtgagccgactatctggcaatgcgctcggctgaattcttgtaatctggntcctcttcattctctatatacctgatgataggccttctccagtcatcagagtctgactcgggttgatctataatattacactcttctgcttgatccattgagatgctcggctgtagtatttcttgcacaaagacttcangtgggacctgagttcgactggatcctatcttgacaacacatcggctgctgtgttcgatctcttatacatga

SEQ ID NO: 16687 - DNA, 352 bp, Zea mays
ccacttggtcataaatgcttgaatgaagcttatgttgcaatgccatgatgaatgtatgtgaaatgaatgccgaagcgtatgtccgaagcccactcatcatattttctaagacaaaacacacgtagctctgattcccttggaacgacttggtcatctttgctttacttcgcagatcagcgtgacttttcctgaagctctgatcccctatgacgactttggagcttttcgcttttacttagacagataagcttgcattccttggaacgacttggagcttttcccttttacttcggggaatcacgttgactttcctgtagctctgatcactaggacgcttcgactatttctcttt

SEQ ID NO: 16688 - DNA, 515 bp, Zea mays
  unsure (1)..(515): unsure at all n locations
agctngccagaagcatctcttcttcatcanagtaatacttaagtcatttgctaactccacaagacttaaggttaactactacaaaatcaaatatttatcccattaacgtgtcttaccaaaatatgagtattctatctagcactcttcagtgctagattgatgtctatccctttacatacttgggattgcctataagtttaacaaatccaaatctgatagctttcctacctctggtgcaaaagatcaaatgtagattgtctccaacatctctattcctatcccaagctagacacttgcaaattgggaactctatattcttagttntacctacctattagttgtgcactctcaactcctagcctgagtggtcaagcaaatcaacatatatagaanaaattacctatgtagtggagcatacttagtaaggaaacaatcataagttgcctgcaattggcctgcaacccaaaactctagaaggattgagaatccttaatctttgcacacaaaatgaagcg

SEQ ID NO: 16689 - DNA, 366 bp, Zea mays
agctttatatcagcgtatccaggaccaccaagaatctctctcggcgtacgtccgaaagtttcttgcgtctgagggcacaagcgccaacagtgcccaatgaaatattcattgagggcatgattaaagggcttatgccgggaccgttaacgcagtactttgccaggaagctcccacaaacattggagatactgctccagaagatggatgagtactttctatctgacttgactaccctcatggaaggatgaagcatctgttctctgaatgacctgggcttcgaggagattcacccgagcacgtaggtcacttctaactctgtctactgatgatcggggagtcaacagcaaagcccaaactccaacagct

SEQ ID NO: 16690 - DNA, 451 bp, Zea mays
agcttcacttctgccacccgccacatcacccacttgtcttcgttcgtagaggatgaagacaccaaccatgcattctggtgtgccacgagactctctctaacgcctcgccgaagatgtggacacaccacaatccctcatcctggttcgcactattccccgacgaccatggcttctctcaatccagtggcatggtgaacatggcgagatgaggcgaggtgcgaacggcggctttagatatatatatggccagggctacatcgcgccatgggttgatgcgccatgcgcggagtccgttcgacggtgcctatcacgcaaggtcaagcagatctaggcacgagaatcctaggcagattctggtggtacgagcgaatctggcgcagagtatgcgccgaattctggagagggtggacctggccgtctggcaccatctgctgagaatgaatgccgagct

SEQ ID NO: 16691 - DNA, 470 bp, Zea mays
agcttatgcctgatggtactatagaaaggacaatgtgttgcttgtaattaaggctattcacagaaggaaggtgaggatttctttgatacttattcacctgtggcgctgatgaccacaattcatgcgctactttctctggctgcctctcatggtcttcttgtccatcaaatggatgttaagacaactttactaaatggagagctagatgaggaaatctacatgcagctagctgggtttgtagcaatcggtcaagaaggcctggtgtgtaagatattgaaatctttatatggcctaaaacaagcacctaagcagtggcatgaaaacttcgacagaactttgacatctgtcggctttgctgtgaacgaagcagacatactgttataatattggtatggtgagggcaacggaagtatcttatgcctgtatgtcgatgacattctaatcttggggacgagtctcgatgtgattaa

SEQ ID NO: 16692 - DNA, 394 bp, Zea mays
gagtcgactcaagcctagctgccggagcataggtttcaccaaaatccaaacctgcgacttgtgaatatccctcggccactagacaggctgtgttacatgccaccacaccatgctcatactgcatgtggcgggaaacccacctgggtactacaacattttgataatgacgtggaacaagatgccatacctcatatctcaggaagttgtagagtctctcttgcattgccaacacccacagccaattcccttattgagtcgtcaccctgactggcttatacacgacacaaaggagtaatagtcacaataatgagcaatacgagatccaatggctacccacatataatatacgcgaggatgggatatcgaggcgaactcttgtatcgctatgatggac

SEQ ID NO: 16693 - DNA, 428 bp, Zea mays
  unsure (1)..(428): unsure at all n locations
agcttctgcttctaagcgcactttctggtcatcattagcatccattatggcatcangactgatcgcgctctgagtgagatcatacaacatgatgttaattcacaaaactgaatcaccgcataaaacaatgttaggggtgagaaaaggatgcttacatgaatgccctgagcaccaaaaagactcttcaaaatgctcgattcttcgtctgcttggtcagagttatcatccactttactgttaccaccattagatggttcagcttcactggtgcttgacaaagccgaagcaatatgtacctgatcctgtcgaccatcatatggaactccaacgttcacatctttggacaattggccgacaatatttgacgtttcatttgaaccattcccttcatcatcttgtagagagaataaatccttcatgtctctggc

SEQ ID NO: 16694 - DNA, 512 bp, Zea mays
  unsure (1)..(512): unsure at all n locations
gatcttaatcaccgcggctgcaactgagatagaaaactgagcaagtgttttctattaagaaaagtgttcctaaagatgaagaaatcaatatgagcttggacaaaggtaaagattcaattaatcatgttgtttgcactgaccctctctccatgtcattcaagtacaaaaagggaaaaggaaaaaggaggtgtctcaagtgcaagaagttatgccacctcatcgcgttttgtccgtacaaagacaagaatgaagggacaaggagttgntttggatgcaacaataaggaccacacgatcacttcatgtccggtcatgaagaatcaatgatgtgcatcctccaaggtgaccctcaccaaggaaagtgacacacaactagcgtcatgtcaggttgagcgacgcttctgctacaagtgtggtgagcagggtcatatatgcaaagtatgttataaaggttatattcctaagcaagtgaattngcgtcattcttattcaccgtggagaccacaatataca

SEQ ID NO: 16695 - DNA, 494 bp, Zea mays
  unsure (1)..(494): unsure at all n locations
agcttggatagtattctgcgatgggtcttggtgaaccttcggtgcacgagcggctgcagtcctagtggcaccttcaaaagtcaaaacatgttatgcagccaagcttgatttcagttgcacaaataatattgctgagtacgaagcacttctgctggggcttcgaaagttaagggcaatgggaataagaagggccatcctaaaaactaattctcaagttatttctggccatgtggacaaaagtagcaaggcaagagatccgaagcttgaaagatatctggatacagttagaaggttggaggcttctttcgaaggtttttctgtcaagaatattccaagaggtgaaaatgagcatgcagatttgagagcaactagaggggaggggtgaataggtgatcctgtataaacttgaaacttanagccacanacttgattaagtgttagcacaatgaaatcaagtggctaaggagagctcttgtgaacacaattgcacagtg

SEQ ID NO: 16696 - DNA, 496 bp, Zea mays
gcttcaataactccttagccaaatgtatgcgctctgattgtggctttgcactgaaaaacatttcttgcaacaaagatatcttgctaacaattggatacattgcatcagatgagttcttacttatagcagtagaaagttcacgtgcttcaagtctatttgacatgttcttgacttcattcctttcactggctgtctgcatttggtaagtctgtagccgttctacctcggcaatataatcactgccagtgttcagtaagtcaatgatgcgaacaacttctcgcaaacattgattgcaggattactaagtgtaataaaacagattgtgtattccatggcattgccctcctccccgcgtcgcgcccgattcacaatatatattatgtaatatgaaatttcacagtataatataagatccagaatacatgtcataaacagaacattgattgcaggattaccaagtgtaataacataaatacaagcatatgagaagaaatat

SEQ ID NO: 16697 - DNA, 354 bp, Zea mays
  unsure (1)..(354): unsure at all n locations
tcgtcgagacctggatcttatagatagaaagacatggacggctacgacataccaaggtcttggaatgccgataagctttgatgatattatgtgtgaacaatgtaattntcttatttttccctatggcaccctttttctttcaagtggggagaaaggttttcaatggagacatatgttgtaaatttcattttttgtttagccctatgcaatacaagggccaaattcccccacatgtaaaatttaacatcaaggaccgcaccatcgagtgcaagaggccatggagaagctcanaagtcgtccctatagggatgcagagctaaaatgtcacctaagaggtgaataagctacaaagtc

SEQ ID NO: 16698 - DNA, 378 bp, Zea mays
  unsure (1)..(378): unsure at all n locations
agcttaagcatatcgtagtgcgcaagagctaaaacttgagttagtggaagcagttggcctgagagcgtgtcatatgcgtttgcggtatggccctatttatacgccaagtgcgttgaaaattgaaagaccccgcttgtcagtgaatattgctattctagcaaagggaaggtgtnttttcggaccttcggcgcatagccttcgtccagatcgcaatctaaatttattaatttgaacaaattaatattgcgaggggctactgttggggaccttcggcattcgaaggtcctcaaaaacaagatttaatagtgtntctggagtataatgtgtgaacaggtatcttcggactcgagtcaagcatcactgtagaccacaataata

SEQ ID NO: 16699 - DNA, 451 bp, Zea mays
  unsure (1)..(451): unsure at all n locations
gagctttggaagccgccatggagtatgtctcgggcttctctattatgacggatgatgaattcgatcaactaaagctgagactaaaggtttggtctcgttacccgcctgtgaaccttttgctagtgcgatgatggtgtgatatgctatataagaaggatggagcatccagacgaccagagaaaataaccaatataaccaacaatattatgatcggagtatactttagagaatataacgagacattcacaccagcggcaacactcataatacgaaagcgagagtctcgagttctcgacttcaatcgagctaaagcaaagagcacaaacctaaatcatccaaggcaactagtgaccggatgatttggaaaantttctcggcaccttatgaaacccacgtaagagacaggatcatgcatgatacggacacccgaagctcaataacacaataagct

SEQ ID NO: 16700 - DNA, 365 bp, Zea mays
  unsure (1)..(365): unsure at all n locations
agcttctatatatgtctaggtgacaaatgatgaaggtgtattggttttacgaagggcgcagctaatcaacttcgtcgggtgcccatcattcctcggctttcaaggcgtttcctcaacaaagaaatatctctgcatatgacgttggcaaagaatggtgtacgtctcgtcactgatccagacataatggtccatcctgcggacagtgatgcttggaaagcatttgacgagtttgatcccgaattttgaaacgaccctatgagtgtacngcttggtctatcgacggacggaatcacacctttcaataccagtgcaagcccttactcgtgttggcctgtcttcattgtgccatatacacgtccctctga

SEQ ID NO: 16701 - DNA, 386 bp, Zea mays
  unsure (1)..(386): unsure at all n locations
agcttcngcatctntatttgctacttctttctgatcctctggtgtccaatcagcgaagaagtctgctaacgctcgagaccgaactgaagatctatgcacataatcaatgctgaactcgatgagttccgcagcccactctccaattctttcagtagcattgtgtgttcctcatgatattctttaaaagctgcgatgaaggaacaattatatggaatgcttgaaaataatgtcgaagctttctggagggcattaatacagcatacaacaccttctccaactctgtataattnttctttgatgagcctagaacttcggagacaaagtatacatgggcttgctttttgaattggccttacaatttttctgcacatgcgccacactcactg

SEQ ID NO: 16702 - DNA, 507 bp, Zea mays
gtcacctgccgcatgcaagcttatggaggggggactacaacatgagaggttattttgacatacaatctcgtcgaatagtggtaatggaaacactatagttattaatgcgttattctttctttagactccaaactagataaacgacttcgttaatgacttgttcgcttatgaaggtggtggtcacaactcaaacgaaccatatatgtgatgatctgactcttgtggtgaattgtgagtttgtgttatattgtaatggactatgtgtggtcacaactcatacgacccctatttatgatggaattgtgagtttctattagagtgtaatggacttgtaaggtattttagtgaattgtgatgtatttgcgaagaattgtgatattttgtgttaaatgtgtgtaattattactgtttctgtcatactatcgtgattatattgttgttgaaatcgcttctttctacatatattcatattttctctaaattcttatttcggaccatattggccgc

SEQ ID NO: 16703 - DNA, 353 bp, Zea mays
gctgcaacttaccgcacctcaaaatggactatgatattatactgtagaagctcgcacccgcaagacagatccgcaagaagaccaaaagccaacgatgtcagactgagcagaaggaagaataccctccaaggaacccgtccgacaccgatgagatgtccctggccagccttgatgaccttctcaaagaacttggggacactttaaagaatgagttcgggagtaccctaaataacactcatgagtgatgagcatgtggtagcaagtgggctgtggtatgtaatggcttgatgtaatgaataaaataactcagttacaaaatggcatgtgcataatagtgactctttcccatggca

SEQ ID NO: 16704 - DNA, 508 bp, Zea mays
  unsure (1)..(508): unsure at all n locations
agcttataccactacaaacaccctngcactactatgcttgattcttaaactcaccgaataaattcaaatgaaatgacggnggacaaaagcaagctaggttaacgtattaactatactgctactactacgaggttactgactgcggtacatcaattaagcatacatgcgcgcgcgcacagcattgtgggagatataattaagtttctagttaatcatgacgcggcgcgccttcatgccaaatgaacttcgatcagatgcctggaacgctaatccctgctggccctgaaccaccagcaccggccgcatccgtaacgacgacggcccttgtctcccagttgagcccggaagcaactctgtcgtagtacgggacgtattcctgttgtataataacatatatgtactgtagtacgttagcgatgatccagaggcagcaggaaaattatgtgcacacatgcagaacggtcaaccactgcagaaatttgttttctgtcnggtanttgtaatttat

SEQ ID NO: 16705 - DNA, 158 bp, Zea mays
  unsure (1)..(158): unsure at all n locations
agcttaaagccatggtaagtagcataagctaattatattctaattgactcaagcctatctacgggtgcatatagttcaccgaaatccaaaccttcgacttgngagtatcctttggccacaagtcgcgctatgttcctttgtaccacaccatgctcatt

SEQ ID NO: 16706 - DNA, 294 bp, Zea mays
tatgttgagcaacctcccgactttgaagatattgagtaccctaaccattgttataaactctctaaagcgctttatgggctcaaacaagccccaagagcaagtgatgaatgccttaaagatttccttatcactgatggattcaagtcggtatgccgatcctacactctctaccaaaacaccaaaaatgatttcgttgtatgccaaattctatgttgatgatattatatttgggtctactaacgaatctacatgtgaagagtttagtacgagcatgacacaaaaattcgagatgtc

SEQ ID NO: 16707 - DNA, 450 bp, Zea mays
  unsure (1)..(450): unsure at all n locations
cttcttcttcttcatattatgaaccttgctggaacactaccncacttaaaaagaatgagggtagaactcttgaatcttggggatttgatctccttgaagtacctcataacaaggggtgtacagggccttcttctgctgttgctacttaaacaggctgcggagagatgactgacatagggttgattttgggagaaccttcttctaatcttctcttcactattttcttttcactgaccctttctttctctttgctcttcccactagaggattctatcacagagtattaccatcatacagaggaggaaaccaaagactatgaaccatgtgcaacagtcttcaacccaagaatcaccaagcattgtgatcttatgggcgagggagtggaaaatggagttgctgcgattggcagagggatttataagtggctctcttggatgggactgaggagtg

SEQ ID NO: 16708 - DNA, 479 bp, Zea mays
  unsure (1)..(479): unsure at all n locations
aagcttcttgatcaggcttcagaccttggcttctctcggcccacacgaagatatttagccttataattgcctcgggagtaagttgatgaagatagacttcgaagattttcaacacctccacgacgaagctactcaagggaaatcgtagcccaggtttcagaaagcttcggtatactacgacttcattttcttcagggtgtggacaagtcttctctccttcatcggccctcacaatggacaaatcccgaaaataccttcctctcatgttgacaagatgattctctntgatagttgatttaccataaactgaatggctnggtcgccagggacgatcttcggagtcttcgctaccgctgtccacatcataactgtcactgtcaccagtatcctcagacaagccttccagaatttccttagtaattntttccgtggttgtcttcgacatcgctataagaaaccncaagtttttctcctcatca

SEQ ID NO: 16709 - DNA, 493 bp, Zea mays
  unsure (1)..(493): unsure at all n locations
agctngntccttttttggcatcatttaccagtcaagtcatatattcacagtaagttattgctattttatcttgtaaatatgctgaataagatgcgcatgtactggttcaaaaaagtataactattatagattcaggagtaaacttcatactgtttgtgaaaaaaacatctggaatagcacaaaataaacttcatactgttttggccttgcaaagtatgtatgtaggggatgataacataccatcccttggtctctttactgatagggtttacaacacgtttattagtggcggcttaaattactcatatatatgtttacaacacgttgtcaggcttttcaatgtggtaatcacaccaaccttatatcattctctataacttttaaacttagcatgctacttttcttcattgagngagatgatctgggttactccacctattcttacttcagatatgtttttactgtgtccatctattatatgaaagtagataca

SEQ ID NO: 16710 - DNA, 400 bp, Zea mays
  unsure (1)..(400): unsure at all n locations
ctaagtcacctgcggcatgcaagctngcacacatagctcatatgaatacctttgatcatatctcttctatatgctatgactaacgtggttcaagtctatgttcaaccaagtcatatgtatattgaaagggaattggagtcttctgcgaagacaaaagctttcactccgtaactcatgcttcgccatcactccgagcaactctctattccttgtgagaaatgagcatcatataaaaggactctattcttgggggagagagtaaaagctcaaaagcaaaaggaccggacctcgtcnttggtataatcntaactcatttacttatgaccaaaggggaggaacttacttcgaggactctaatgattccgtttttggcgattcatgccaaaaagggggagaaatg

SEQ ID NO: 16711 - DNA, 303 bp, Zea mays
ctgcagctgcactcttaggagacacattagactaacttgttcatttgagaaaacatggtttgtatcgcatgccatagcaggaaagcaagttggttcccaccattcacactagaacatcatgacgactgactggccgcttgagctactccacatggatctattcggcccgattgcttacataagcattggcgggagtaagaatagtcttgtgatagtggatgagtattctcgcttcacttgcgtgtgtcttttgcaagaaaaatctccaacccatgagaccttaatgggattcttgagatgggc

SEQ ID NO: 16712 - DNA, 479 bp, Zea mays
  unsure (1)..(479): unsure at all n locations
agctntcttgggcattctcatcccacttaaactctctttccttctccagaagcgaggtcataggattggcaatcttagagaacccttcaataaatctccgataatatcctgcaagtcccaagaaacttcgaacctccgtaactgtagtgggtatgctccactccattatctccttgactttagcaggatccactgatattcctccattagaaataatatgtccaaggaatggcacctcaccaatccaaaactcgcatttactgtactnggcgtagagttgattatctcgtagcttctgtagcaccaatcacagatgttcctcatgatcactatcactcttggaataaataaaaatatcatcgatgaagaccacgacgaatctgtccagatcatgaacaccttattcttcagatccataaaatatgctggtgcattagctattccagatgatataacggngaactcatataaaccatatc

SEQ ID NO: 16713 - DNA, 450 bp, Zea mays
agcttcggcatctttatatgctacttcttcctgagcccctggcgtacagacaacgatgaagtctgctaacgcctgtgactgaattgaagatctatgcacatagtcaatactgaattcgttaagctccgcaacccactttccaatccttccagaagctgctctggtcctcataatatccttcagaggctataatgaaggaacaattatgtggtatgcttggaaataacgccgaaacttcctagaggccattaagatagcatataacaccttcttcaattctgtatagttgttctttgacaaacttagaacttcggagacaaagtatactggggcttgctttttaatttgtccttcaagcctctactatacaagcgacgcactcactgcagagtgtgaagctgccacatataatagcaatggagcccctgacgcatgtggagtcaatgttgt

SEQ ID NO: 16714 - DNA, 290 bp, Zea mays
  unsure (1)..(290): unsure at all n locations
tgcagcatgcaagcttcaggagaacaagacttctggacatttctctttatacagatagctctttgttgtcaggcaggcatgttagaaagtcatcttcattcgttccatagaatattactgcccccttcggatattttagttcctttgcataaaggatggcttcatgagtttcttcttcagatagcttcttccncgaagcatgtcgtatcatgtaatcacgcatgctggcacgtgcttctgggatggcggtgtcagtatcttcaactaatactggctctggaattattatt

SEQ ID NO: 16715 - DNA, 332 bp, Zea mays
  unsure (1)..(332): unsure at all n locations
tctaatctgcgatgccacagccagcccacgcttgtctgtgctattaagcatgcatctagaccggcctcctcttttgcaaaatctactaaataaagttagccggctcatacacccttataagcgtgggaaccatcacttcttctagagacagacacgtctatatttggaatagacaggatatcccatattgcattactgactcacagatagcagattatatccaagagacttcactaaaaacacattagatatggagcgctcattataaattgcaattgtacctanacctcttacctggacttgattcccatcaccgaatataattgaatctt

SEQ ID NO: 16716 - DNA, 495 bp, Zea mays
  unsure (1)..(495): unsure at all n locations
agcttctaaagggagagcacatnttgngactaacaaatgttcattntgagaaagacagggtttgtagcgcatgtcaagcagganagcaagttggtacccaccatccatacaagaacatcatgacaacggacaggccactagaactactccacatggatctattcggcccaatcgcttacataagcatcggcaggagtaagtactgtctagtaattgtggatgattattctcgcttcacttgggtattctttttgcaggataaatcatagacccaaaagaccttaaagggattcttgagacgagctcaaaatgagttcggattgagaatcaaaaagattagaagcgacaatgggacggagttcaagaactcacaaattgaaggcttccttgatgaggagggcatcaagcatgagttctcttcntcctacacacctcaacaaaatggtgtagtggagaggaagaatagaactctactggacatgacaaggaccatgc

SEQ ID NO: 16717 - DNA, 413 bp, Zea mays
  unsure (1)..(413): unsure at all n locations
agcttgtgaagattcttcatcccaacatgggctagtcntgttgtgccagagccaacccatgttagtcttagcaattaagcaagtgtcgagttcagctctatcaaaatctaccaagtatagctgaccctctaacactcccttaaatgctattgaatcatcacttcttctaaagacagtgacaccaatatcagtaaaaagacagttgtagcccatttgacataatngagatacagagagcaagttgtaatctaaagaatcaacaagaaaaacattggaaatagaatggtcaggagatatagcaattttaccaagacctttgaccaaaccttgatttccatccccgaatgtgatagctcgctggggatcttgggttttctcataggaggagaacattttcttctcccctgtcatgt

SEQ ID NO: 16718 - DNA, 487 bp, Zea mays
  unsure (1)..(487): unsure at all n locations
agtcacctgaggcatgcaagcttggaagcgtcgattggtatctacttggtgtattctcctccttcttctactccgntgccttgaatgcaacgggttgggcttcngatgtggtggcatcgtcaagctctgtgatcttcctcgagccttcgatcatgcactcaaaacttacaaaattcccgataacttcctcgggggtcattttggtatatctaggattgccacggattaattgaacttgagtaggggtaaggaaaataagtgatcttagaataaccttaaccacctcgtggtcattccactntacgctcccgatgttgcgcgcttggttcaccaaggtcttgagccgattgacatgtgttgtggtcctccctttgcgaagcgaaccgacgactcccctaatcgttcccgttgggatctggtgactatacctcatcgcggctgagtaatccaaatctctgggctctcacccttgacttgtatactcttt

SEQ ID NO: 16719 - DNA, 496 bp, Zea mays
  unsure (1)..(496): unsure at all n locations
agcttcttcaccatgttaacacggttatcttgagaatgttgagcaatgcacttcccttttagttgtgtcaaactcgttcttagcctctcattttcttccttgagctcttgatatgtaacattatttattcctagaaattcaagctcaaagaaggatttgcttgctggcgagcaacaagcattagcacatggcaacatagtttcaatttgaacacatgtgcatgagtgaggttgttgagattttaagtttgttatcacaacctcatgagcaatatttaacatgatatgatcatccatcagaattttatgagaacatagaaacatatcatgtttattttgaaaagctagaatttcacattttagcctttctacttggtccttaagcaaggtattcctatttactaattgagcgacacataataaagagttatcttgctcaattngaaatagttcatacctttggaccanatcaacatgagagcactctagcttctcat

SEQ ID NO: 16720 - DNA, 395 bp, Zea mays
  unsure (1)..(395): unsure at all n locations
agcttgtctttggctcatcctccttcatccaaatntgatgataacctgagtagcagtccagtaaactcataagttctgaagaagcttctacatctacaaggtaatctattcttggtagtgggaattcgtccttcggacatgccttgttgagatctgtgaaatcaatgcacattctccattttccattagctttttcaccatgacagtgttggccagccactctgggtatgttacttctctgataacaccagcacttagaagtctcttcactttatttcgtgcacctttagctttatcatcgaacattntgcgaagcctctactttcttggtctgaaggacgggtccacattaagtgaatgtttaatgatgtctctattgacaccacagagatcat

SEQ ID NO: 16721 - DNA, 332 bp, Zea mays
  unsure (1)..(332): unsure at all n locations
agctancatgcctaccatcgaacctcatatttcctatgtcgagcccccagcgacggagaggtaccgattcaccggtagtggacggacggcgcgcacaactctctctccctagctttatttccgtctggaggaagcacagacagcatacaaggtcgcatctaaatggccaaggggagggcgcatggcgtgtgttcttatatgcacgtgaacccaggcagttacaaccgcccggattcgtggccggtgaggacaggcttgacgacaagctcgcgattcgttcacggagtgcgctagccgcggaatccgctgaggaagacaactgacaagcatgg

SEQ ID NO: 16722 - DNA, 442 bp, Zea mays
  unsure (1)..(442): unsure at all n locations
tgctgcatgcaagctttggaactatgcccgcatccaatctgcctgtttctgaactataagagcatgccagatgcccccgttcctgtcgaccacgaccagcacccaacataagacttccctagttatttatccaagaccagagccatgatagttctcatggtatcactgctttcccgggtggtcactccatgttccaattaatatgcaacaatcttgtttaaccatcggggtaacaacaataatgtaaacttaccaagtttggaacattaatatcatatgcgggagtgactgcataaagttaagttgtagcaatagcatagctactaatgtaaagtataattcctatgctggatcaaggaataanggtggaaaggttatctaaataggtaaccccgcaaattatgcacatatatccacaagaatatactntattaaatgtatt

SEQ ID NO: 16723 - DNA, 410 bp, Zea mays
  unsure (1)..(410): unsure at all n locations
ggatcttaagcacctgcggcatgcactttgctaagactgttaatcttttttttttattacaggctaataatcataatttaggcactaatcaattaagctaacatagttgtatgtggaatatatttggatactattattggccatttatgtaagatatttatgtgctatatttctattagaggagagggaatctaagatcgttttataaatctcacaataaaaatatagtctggtgatacataaaatcaatttttagccctcaccctattaatttgatataagtttatacttaaactntaaaagttggtggaaatggtaaatttctaagtattaagtagattataattcctctaaaatgagtatatccaaacgggctctaaagtaaaactcaagtacgtgcatgcacatta

SEQ ID NO: 16724 - DNA, 485 bp, Zea mays
atcttgtaccttagatcgttactgctgcatctaattgttctctatgtatgagcacctgtgacacttagaagtacaatagagaacaactgctatctaagtgctgaagaccttccgaagaatacgaccccaacaatttataccctacatcatgtatgttagaaaataaattacattattaaaaaagaaatttttgagacgatgcaggaaacaagtatccaagatgtagtatatatatttgggacccttcatgtgctgccctatatctttctggaaaaaatataaaataaagcattattagagttgtgtttatgagtcacaccctatattgtagataagaaactcatttaacgcatggctggagatgcacttaccttatttctatgtataacatatctacaataactggcattcttattaaataggtgattgtatctagggatatgaatcggacatggtcgatattactccgtccatatctatcatat

SEQ ID NO: 16725 - DNA, 487 bp, Zea mays
agcttcgtgagcgcctcaacactcattgggctgacagcttcaaagaattggtcaaccctgccatatcataggaagactatattgtagctcaccgagcagagaagaatagaaaggcaccaatgtcatgaccctcagctccacccgagagattccggattgtctccaacagtcagagcagaggattccagcagcagacaaaaagatgggttattaagccgcctcagcagcaacagcaagcacccaaccgttaccccactgcgctcccgctccaaggaacaatcaacagcagcagttccgccaagggaatggaaaaaagtgcttcacgtgtggcaatgtgggccactatgccaagaattgctcacggaatcacccaaggcagataccagcaccagaccaaaacatagggaggaagcataaagtgcaagtcagacaagggaagctcaacttcactactttggaggagctacctgaaggagcacctatcatg

SEQ ID NO: 16726 - DNA, 442 bp, Zea mays
  unsure (1)..(442): unsure at all n locations
cgaccggatcttaagtcacctgcagctgcagctaagaatgagctaacatcttatattctcataacttcgatggagaaattgcacacattgctcatttatataccttngatcatgtctctttcggttggtacaaatgcatatttcttattcttcttgtgccatgtggcaaaacctctaagttattgggcccacatgcacctgtcctttgtccaaagacctcagacggctatgcatgtgcaccagataactcaatagaatctgtctgattgccccaaagacatcggataaaccacttacaaccagaactgcgggattaggtaatacaaatcacacacatcaacatttntgcagcagaaatcttattaccaaattntacaagttacaaaaattttacattaatttatcgaagtgaatacaaaagtatnacgttgaaatatatact

SEQ ID NO: 16727 - DNA, 451 bp, Zea mays
  unsure (1)..(451): unsure at all n locations
agcttcatatcatctgcttctcttccaaagcttgtcaagcatatattggtacccatctcttgattggtccatcaaggttagtcaacaaagatctatgaacccaaacgtcctttgtgctagcactatgtaaactcattacctttctagcacaagttgcaattttgggttgcctagttacatgagaattaattgacaagctaggagtgggattattaccaatgggacaatccttgcattgatgtcccttctttcggatatgtagcataggcgatcctcaagtcttgaggatttcttatntccttgtttctttcttgctacatggttagtgaatattntcttttctaacactatgcctttntgtttcaaatggggacaagatttaataaagtgtcccttctttgaacattaaaacaaagttatcattcttgtactaatcaagtatttntaatat

SEQ ID NO: 16728 - DNA, 318 bp, Zea mays
  unsure (1)..(318): unsure at all n locations
actcacgtacacagcgattacctaatggacattatcacacattgcttaaagttaataggcgaaatgtaccctattacatcaagaagttcaagacatccacagagtctataacatttacattaacatattcaaagtgcggaatacgaaacgtagcatgataatgccttcacaggcagttgactggtggttngccactaacataactaaaacttgtcgtagtcctgaaactcttcaaagtcttcatgttgcctcatctcctctgagcactgagtcagtggggacacctgggtggggggttttaaagcatggtggtcacat

SEQ ID NO: 16729 - DNA, 338 bp, Zea mays
  unsure (1)..(338): unsure at all n locations
cttcatccccacatgagctaagcggtgatgccacagccagcccatgctagtcttagctattaagcatgcatctagaccggcctcttcttttgcaaaatctactaaataaaggttgccgtctaatacacccttaaaagctagtgaaccatcacttcttctaaagatagacacatctatatttgtaatagacagttataccccatatgacataattgactaacagatagcacagtatatccaagactctctactaaaaatacattagagatagaatgctcattagannatgcaattntacctaacccttttacctttgctttgattccatcaccgaatat

SEQ ID NO: 16730 - DNA, 303 bp, Zea mays
cttaatgggcggaaaagtttacactgacatctatgcatatggtggccgaaaaatagctcacgaaattatgaagaagagtgaaaaagacattcatgacgcctgagtacaagcttagcaagctgaagacgctgtatagcgccagaggcgcataagtattgtttcacgacatctagctttggcatttggttttatgacttcaaaatgattaattttttctactgtaactgaacttgtctcttcacaggaaccgttcgaccccctagctgatccagaaacgaagaaagcgatagaaatcatcaatat

SEQ ID NO: 16731 - DNA, 371 bp, Zea mays
  unsure (1)..(371): unsure at all n locations
agcttctaagggagagcacatttcaggattaacaaatgttcattttgagaaagacaggatttgtagcgcatgccaagcaggaaagcaagttggcactcatcatccgcataagaacataatgacgaccgacagaccacttgagctcctacacatggatctattcggcccgatcgcttacataagcatcggcgggagtaagtactgtctagttattgtggatgattattctcgcttcactcgggtattctttntacaggaaaaatctcaaacccaagagaccttaaagggattcttgagacgggctcaaaatgagttcggcttaaggatcaagaagataagaagcgacaacgggacggagttcaagaactcac

SEQ ID NO: 16732 - DNA, 366 bp, Zea mays
  unsure (1)..(366): unsure at all n locations
agccttgctagtgtgttattcatatgcttcctgctgtattatatatgttgcatcatatggactagtgcttccgttgctatgaattaattggcatctattgtgttcattctgaaatagatagtcatgtggttaatggtgctattaagattgctttcaattagtgtcttagtttgaattggtatcttaatgatgaatagtggtaggttgatatttctgtgatatatccactacatcgaatggtgttaactctgattatgtgcatttgagtgtatagcatcatggttngattcttgcacaatgcatactaaanagtgctaaggtgtagaaatggttcgatttgcctaagtatgtgcaaattggcgtctg

SEQ ID NO: 16733 - DNA, 331 bp, Zea mays
  unsure (1)..(331): unsure at all n locations
catgatagaaggggagttatacaagcgtggggtctgtttcccaatgctcaagtgtntatccacatccgaaggtatagaattaatgaaggaaatacatgcaagcctgtgtggatctcacattggatctaggcccttgcttgggaaagtttttcgccaaggattttattggcaaaggcagcttcngatgcagcggatctggtccaaaagtgcgaaggttgtcagaaatgtgcaaaagatcaaaaacaaccttcgtctttaacccaattaatacaacccacttggccgttgcaaggtggggcctcgattactatgccattccaccacacagggg

SEQ ID NO: 16734 - DNA, 322 bp, Zea mays
  unsure (1)..(322): unsure at all n locations
gcattatttgaaagctatactctttactaagcagaacttagattttatactccgataattggtcctcttgttctaaccactaatcaaaggatctagttgggggaataagttntaattttcaggtttcccctattcaccccccctctaggcgactttcaattggtatcagagctaggcacttcatcttgagtctaacaactccaagtgatggctcgtagaagatcccaaaagaacaagaagactcctccaacgaacgcaactcaaaaggaggtaactcttgagatatacttgatgattgtctaattatgattcatggtctact

SEQ ID NO: 16735 - DNA, 347 bp, Zea mays
  unsure (1)..(347): unsure at all n locations
catccctacatgtgcttattggcgatgccacagccagcccatgctagtcttagcaattaagcatgcatctagaccagcctcttctttggcgaaatcaactaagtaaagtttgacgtctaatacacccttaaaagctagtgaaccatcacttcttctaaagacagacacatctacatttgtgaatagacaattatnatccatattgcataattgactaacagataacaaattatatccaatggactcaactaaaaacacattagatatagagtgctcatttgatattgcaattatgcctaagcctttcaccttgccttgattcccatcaccgaatatgattgaatctt

SEQ ID NO: 16736 - DNA, 289 bp, Zea mays
agcttccaatctcttcaagttccacaattgagacttgtgatcattagtgattaatgacttgagagagagtgattcatgtttcatttgttggtcttggtgctcggtttccttaatgacttgagagagagagagtgattcgtgtttcatttgttgctcttgttgctctaagtgttttgtaagcttgcaagagacacctaattgtgcggtgatccttgcggggtcttagtgacccgtgagattaagaagaagcactcaactggtctgagtgaccggttgagagaggaaaatg

SEQ ID NO: 16737 - DNA, 332 bp, Zea mays
  unsure (1)..(332): unsure at all n locations
agctnttatttacttcctacatgcttttaatgtcttccttttcggtggatgatgccaaagggggagaagtttatggaccaaagcaatgaaaaccatatcaaacaccaatcaccaccaatttaaaattntatatctacaaatggtttttcaagtggttttggttatttggtccaaaaataggaagtaagtgaattatggagttagggggaggcttaagtccataatatcacattgtanggacaaacatgcaccctagcaagtagaatgcatattntaattcaaatacttgtattattngcttgctttggatgtgttgacatcaatcaccaaaa

SEQ ID NO: 16738 - DNA, 288 bp, Zea mays
  unsure (1)..(288): unsure at all n locations
tatacttgattctcggaactttgaatganacaatgcacacattggtcaattatatacctttgatcatgtctctttaatttgatacaaatgccatattttcttgtgccacgactaagactaatatgcttncatgagtatctttacaattagtcttatattgaagggaaatggagtattcggcaaatgcaaggcttccactccaactctggcactatcatttatcctttgccttactcataaactctcaattggataaactttcactcatatcctttatttccaaagggg

SEQ ID NO: 16739 - DNA, 432 bp, Zea mays
  unsure (1)..(432): unsure at all n locations
agcttgtcaagcatattatggtacccatcgcttgatgggtccatcacggttagtcaacaaagatctaggaacccaaatgtcctttgtgttagcgctaggtaaactcattacctttctagcacaagttgcaattttgggttgcctagttacatgataattaattaacaagctaggagtgaggttgttaccaatgggacaatctttgcattgatgtcccttctttcggcatatgtagcataagcgatcctcaagtcttgaagatttcttctttccttgtttctttcttgctacatggntagtgaatattntcttttctaatactaatgcctttttgttcaaatggngacacgaattaataaaatgtcccttctctgaacatttaaaacaaaggttatcatccttaataatcaagtcatttttcttacttctctt

SEQ ID NO: 16740 - DNA, 330 bp, Zea mays
  unsure (1)..(330): unsure at all n locations
cttcaagaatggcatggcgaagtccattcatcatgctcgtgtgctcatcaggcaacgccacattatgtacaaacaataagatttgttcccctgaagattnatgttttgtgatatgatggttaactagtaacacatttacttaaacaaagctaatgccatgggatgtgtagtatttacacctgtattntactggataactttntcttacaagggtgtgggtgtatataagtttgtgtgagcacactgttttatangtgctgttgtcaattaaactatctatcttcctgtntatgttctggggcatatgatngagaaacttatgccactcac

SEQ ID NO: 16741 - DNA, 400 bp, Zea mays
  unsure (1)..(400): unsure at all n locations
agcttctacacgtntgccccagtggtcggctaagtatgtctgaatggctctctggntagtcgctccaacgttattgagcccaaacgatatggaggtatatcagaaagctccaaatggggtgatgaatgctgtttattcctcgtcttcttntgccacgctgatctgatgatacccggagtagcaatccaagaaggacaacacagaacaccccgcggtcaagtctaccacatggtctattctatgaagtccgtaaggatccttctgacagtgtatgttgagatccgtatagtcgacgcacatgcaccagatcactttattctttttgagtacaagaacacgatttgctaaccactcaggatgcagtacttctctaatgaatcctgtctcgactatacgagct

SEQ ID NO: 16742 - DNA, 453 bp, Zea mays
  unsure (1)..(453): unsure at all n locations
agcttcctccagcgttcttgagcccctcggcatccgaagataacaatatgtaccactgggggttatgaagctagttnttggctcatcttctttcttcatccagatttgatggtagcctgaataacaatctagtagactcatgagctctgacgaagctgctgcgtctactagagaatctattcttggtaatggaaattcatccttcggacaagccttattgagatcaataaagtcaatgcacattctccatttaccattggccttcttcaccatgacagtgttggctaaccattctgggtacttatctaatgatgcaaacactaagaagtcttttcacttcgttccgagcaccttcggcttcatcatcagacatcttccgaagtctctgctttctgggtctgaaggatgggatcacattgagcgagtgctcaatgacatcccctgtcacaacac

SEQ ID NO: 16743 - DNA, 297 bp, Zea mays
  unsure (1)..(297): unsure at all n locations
accttcgacttgtgaataccccttggctacgagtcgagctttgttccttgtcaccacaccatgctcatcttgcttgttgcggaagacccatttggttcctacaacattttggttaagacgtggaactaaatgccagacctcattccttgngaaaatcgagagcatctcttgcatcgccaccacccaatccgaatcttggagagcttcctctaccctgtgtggctcaatagaggaaacaaaagagtaatggtcacaagaatgagcaacccgagatcgagtagatacccccttatgaat

SEQ ID NO: 16744 - DNA, 166 bp, Zea mays
tcggcgctgaacaggggcagaggcaacgggaacacgtgttcgaccgcggctgacacccctggttaacgcccgttcgcgcaccgcgccttccagtgcacgcccgcgcgcactcgccggtccacgaccgtccgtgcaccgcgccgtgcctataaagccctccaggcgc

SEQ ID NO: 16745 - DNA, 357 bp, Zea mays
agcttcttgcaggaaagtgggtgccgagtagacttctctatggaggggagaccctgaaggtgaccatcacagcctctagcattggggggcaagcgcagacgggaagacagttgcatgaacccgtgctgtgcatcacggacagtccgccgttcagacgcggacggtccgacgcttcgccggacggtccggaggactctggcggacggtccggccgtgctcaagacctccagcgaccacgtaccttcaaaccacgacgacccgagataggtacgtggaaaaccaatacatttaaagcagctggtcggctgatcaagcctggcccgactttcgatcaattgttgtctaaatacgtgaaaa

SEQ ID NO: 16746 - DNA, 315 bp, Zea mays
  unsure (1)..(315): unsure at all n locations
agcttgcttttaatctgtatggcctctcaaccgtatgttattgttgttcagctatggtttatggaagatgctcatcattggagataatctggtctataaaactatctgatatttctctaattgccaacttttttatctaacaccaaaccttgaaattccattctttcttgacatgataaactagtctaatcatcttgcactcgtttttctccatagaatgttctagaagagtggtagttgtttataggtgaccagcgaccacatattaactgcagtttctctataggcattgtaatgtaaacgaanacaacactt

SEQ ID NO: 16747 - DNA, 435 bp, Zea mays
  unsure (1)..(435): unsure at all n locations
agcttcaatactatatgntgcaattgttatggatccataagtttagctcagtgttccatttntgtaggcgtccgataggaggttctgatttaaattagtaataagagtagcatatctgaagtttgttttgtttttagaataatccgatacgtggttatggtaatactatgtccatatgctgatcctgactaattntgttgtgatgctaacaggtatgactggtgaaaccggtgggttgttactcatttgtattttattccggaatgaccattcttttgatggcagtgtctttgttagcttgcagcttgcacatgctacatgatgctnttcagctgctttcagctaatttatgcaacttgggctacttncattnttatgaggtgtgttcacttgtagaaatctggtctagaanaaagaggtaccaaatccaatcta

SEQ ID NO: 16748 - DNA, 327 bp, Zea mays
  unsure (1)..(327): unsure at all n locations
tttatgctctctngatagctattaatatatgagaactccgctaatggtaaacaatcattccatttctgcggaaactcccaaacacatgctcgcaacatgtctttaagtatctgatttaccctcttagtctgaccactactttggggatgataggccgaactgtggagcaatttagtacccaaggacttatgaagttcttcctagaatttggatacgaattgagggccacgatccgacactattgtcttctaaacaccgtgcaaactgagaatgcgagcaatgtacagttccgcatatgcgattactggatactttactttgactggg

SEQ ID NO: 16749 - DNA, 305 bp, Zea mays
  unsure (1)..(305): unsure at all n locations
agcatgaagccatggtaagtagcatatgctaataatatacgaattgactcaagcctagctacgggtgcataggtttcaccaaaatccaaaccttcgacttgggagtatcccttggccacaagtcgagctttattccttgtcaccacaccatgctcatctttcttggtgcggaagacccatttggttcctacaacattnttattaagacgtggaactaaatgccatacctcattcctcgtgaagttgttgagctcctcttgcatcgccatcacccaatccgaatcttgtagtgcttcctctaccct

SEQ ID NO: 16750 - DNA, 316 bp, Zea mays
  unsure (1)..(316): unsure at all n locations
catcgctatctcggcgcactaggcctgaatcatgatccgcagggatccgtccattcagactcgcgcgcgcactggacaagtaggtgacgcccaaaggggatgcggccgtcgagggatctataggcgaccaccgcacaccgtaggctcagacacaggcatcangcatgcatgcacttcttcttaccgacctgtaagccgatgatgcgcatgcaatatatcatgcaccggccggcccgttggtggcgctcgcgtcacggttacacctgcacgtctccatgtacatgtcgttggtcggtcggtcggtccatgcatggat

SEQ ID NO: 16751 - DNA, 316 bp, Zea mays
  unsure (1)..(316): unsure at all n locations
cgtactgtcaggtcattcttcacataaaaccattctgtcatccagtcgccaggccacctcttncgaaagggtggcacgggacagcttgacccggaccgagaaacgaagctgtagcagccaaaattattgtgatactgttccttaccccaagttatgtttcgtatgataatacgtgtatattgcagaaaacttttgcatcaggcttcagaccttggcttctcacggcccacacgaagatattcagccttatgattgcctcaggggtaagttggtgaagatagacttccaatattttcagcacctctacaatgaagct

SEQ ID NO: 16752 - DNA, 431 bp, Zea mays
  unsure (1)..(431): unsure at all n locations
agctntcttcggcggcatgacgaaggtgatgtatgccgaatgtgttcaaaactcaaaaaatggaagtgagttcaccggaggtgggcgccaatgttggggacttgttctcaaatgcttcgagttaagaacaaggcaacataaaaagtgttaagtattaaagtccttcgtctatcaagacattatgtcccttcggatataatgaattccggacgaagggtatgaaggaaaaaaccttcgtaaacacaatgggtgataaggaagaattcatatacgaaatacacaaataatatagatatcatcatcaacttatttttatttgcattttcatattcggaataacaaattataaatataccttcggtttgacgganagtaaggtacatgcgtaatgcataaagcgaatgccaagtcagcgtgaacagtacgagagt

SEQ ID NO: 16753 - DNA, 334 bp, Zea mays
  unsure (1)..(334): unsure at all n locations
agcttctaaagggagaacacgtgatagggttgactaacgtgcaattcgaaaaagatagacacttgtgcagctttgtcaagcaggtaaacatgtgggaggagcacatcacagcaagaatgtgatgaccacctcaagacctctggagctgctacatatggacctctttggacccgtcgcctatctgagcataggaggaagtaagtatgggttaattattggtgatgacttttcccgcttcacttgggtgtctttttgcaggataagtctgnaacccaagggaccctcaagcgcttcctcaggagagctcaaaatgagtttgagctcacagtgaaga

SEQ ID NO: 16754 - DNA, 384 bp, Zea mays
  unsure (1)..(384): unsure at all n locations
agcttcagcaactggggctgcagctctgcaaccgctggactccaatcatgagactctctcccttcgggaggcccgaagccagaagaggaaggctgtcagcccgacacaacaagaggatgagctagaccaagaaatcagagacatggagatgcttcaccaacaggtgcagaggaagaaggaaaagatggccaggctagctgaactgcaaaggcagatagacgaagcctctgaagaagttcgtcatcttactcaggatgagcagaaccgaaggcctcagcacaaagaccttcatcaggaggatctcttcaacgaagatgactggtatgagaatttccaccactggaaatntgcttttgatgatgcttctcctctgtctgctgagct

SEQ ID NO: 16755 - DNA, 344 bp, Zea mays
atgcaagcttgcatgcgtatacatgcaaggacttaatcattaatatatcggcgaatgacagctcttgcagaaaccatcctgtataaaatattgagcacattataacatgaaaacatgagcatttccaaaagatgtaaacacacatgaatctagtgcaagaatctttttgtcattacaaaagctcataagaaaacacattacttgagagtctttgcaattgttctctaataatcagcactagtatgaaagagtacacttgctacttaagaactcaattctgaaaatggacactggctactgaacggagaagaaaccaatttccttctgttccatccttcactaca

SEQ ID NO: 16756 - DNA, 341 bp, Zea mays
acgcaatgggagtggagagatggcgagagtatcgtgtaccctctgtggcaagaggctgaatggtggtgtatctgtgctctcggttggcatggacctgatctggtcttaagaaccccgatggcgagttgacatatgcgagggttaagtgctacatatgtcgtgtgattggagatccccagctgggtattaatcgattcggatcgccgttacttctcgaacatgaagacttggtcactgtcctacacgtagcattccagtgaataagaagggttgataagaaattggctagtatatgtcaagtgcttgaactacggtagaaagaactctagatgcatgtaact

SEQ ID NO: 16757 - DNA, 408 bp, Zea mays
  unsure (1)..(408): unsure at all n locations
nagcttattcgctatgtcccaggttcacataccatcttggatgaangntgacttcatcaatccttgactagtatctaaaacatgcttcagcgtataatgtaacacttaaggacctttggcaatagatgcttccaacacttttgtatatgggatttcgctatgatgatcctaattgttttgctatagcacgtggcacgcctgcagtggcgaacctaaagtgaatgaagggagggtgcatacgctctgagcgtgtataataatatcttgtaaatgatgcatatatgataaaaatctattctattctactggttttataaatcttcgtgggtgcatgtacacccacacgtcactacctataagcttgctctgcaggcctgagtaaatatataaaggtatattttcacaacc

SEQ ID NO: 16758 - DNA, 389 bp, Zea mays
  unsure (1)..(389): unsure at all n locations
agcttgtgaacagtacatattcagaatgtataattcagcttcagcagatcagccgaagcccatgctcttatgtgaggacatagcagagcagagggtggctgtgggctctcaattatccgaagagcaggagaaaaccttgatagggttttgttcaacaacaaagatngttttgcatggtcagcccatgatcttttgcgagttaacagggatgttattgaacactcgctcaatgttgacccatccttcagacccagaaagcagaggcttccgaaaatgtctgatgacaaggccgaaggtgctcgtaatgaagtcaaaaggctcctcagtgcacgagttatcagagaagtaaagtacccagaatggctagctaacactggtatggtaaaaaa

SEQ ID NO: 16759 - DNA, 374 bp, Zea mays
  unsure (1)..(374): unsure at all n locations
agcttctaaagggagagcacattntatgattaacaaatgttcatattgagaaagacaggatttgtagcgcatgccaagcaaggaagcaagttggtgttcatcatccacacaagaacatcatgacgactgacaggccactggagctcctacacatggacctattcggcccgatagcttacataagaatcggcgggagtaagtactgtctagttattgtggatgaatattctcgcttcacttgggtgttctttttgcaggaaaaatctcatacccaagaaatcttaaacggattcttgagacgggttcaaaatgagtttgtcttaaggatcaagaannatagaagcgacaacgggacgggagtcaagaactctcaa

SEQ ID NO: 16760 - DNA, 425 bp, Zea mays
agcttcatgagtggtagctacggtcatcatgtattatcagctttagccgaagctgtttcttcctacaggaccttcggcgacgaagcatgatcccaacagcaggtaagtagacataaattaaatgttatagttaactacaacaattagttcacatctcatattattcttgtagctgaaagtaaatgttctagatgtctatctcatacggagtgtcaaaaaattacccatactcaaagctagtttgatgcacgacgagcaataatttcggtttgtaggcccttgtagtattgttgcaattgtctgccattgaagtaatatccattgtcataatcctctattcctctaacattctcttcacttgcatttcatgttccttatctctaattctttggtctcatttgcagcccgtacttgttctacaaaaa

SEQ ID NO: 16761 - DNA, 414 bp, Zea mays
  unsure (1)..(414): unsure at all n locations
agctntatgaagaggaaccttcggccatcctatacaaacagcttcagccgaaagccgcttcttcctagaagaccttcggcgacgaagcatagacccaacagtagcccctttcgcggtgctagatcgtttttcgtaacgagcttgatccgtgaaaaagtctcttaagcttcggagcgccgaaggtctaanaaacaccttccctgagctcgttgtcgagaaacgattcaatttcccagcgtgtagcggccccaccttgcagagatactgttcggtctctgcggtccaccacgcagcgagtgcgagcggatatccgcctggtgtaaaaatcctggcggttcgccttcttacctgcaacactatataaacagacgagtaggtgtgaagttaccacagcattcattgctatntacactg

SEQ ID NO: 16762 - DNA, 337 bp, Zea mays
  unsure (1)..(337): unsure at all n locations
aacctgcacgcatggggtaacttttccatcggctactgcttgaccaatgacttcatctacatgttcacctacagaaacagctagtgggaaataacagcataaagcgttaaaagtgaggctgagataccctcaggtntaataaagaacanaaaaaaacaaaataggtgctaattgtataatctaaggtataataaagggacaaaaaataaacacaatatgtgctaaatgtagagtgaaggaaaaagggaaattcattgggaatgtaaatagaaaaagtcacatatacacattttgcagagactataataccatgactgcaggagctctccttctcaag

SEQ ID NO: 16763 - DNA, 359 bp, Zea mays
agcttcaactccatctatattatggattgtctttgtatcagtccagcttccttcggcccttctggcagcttcctgactcccatgaatagcaataggcccttggtccgaaggtatcttcatgcagagataagctgggtgaagaaatgcttcaaaagcatttatggtaccacgaccaatgatggcgttgtaggggtattccatgtcaacaatatcaaatacaatttgctcagtcctttgtgtattaacaaatccgaagggtaccggcatggtaatctttccgagtgccacaatctgccgccctccgaagccacaaagagggtgcgtagcatcatgaatcttgtctcacgttctgcatctgt

SEQ ID NO: 16764 - DNA, 330 bp, Zea mays
  unsure (1)..(330): unsure at all n locations
cctttaatccctatttagggttaaatctcctatccagggttctatttgcaaaatgttataacaatacaacttgtttgtaaatttagctagtgaatgcactctangtgtgtcaaacatatgcaatgccaatgtttatgatgccatgctcaagttttagttgcagtaacaccagaggtgttacatcggtgactcgcagccggagtggatggcccctccgagcggagccgccccgtccccgccaccggngtatgtgctgagcttcgtctcttttcacgagcggnggttcggagtgctggcaagccgttntatgcangcgattctgcatgtcta

SEQ ID NO: 16765 - DNA, 444 bp, Zea mays
  unsure (1)..(444): unsure at all n locations
tcagagtcacctgcngcatgcaagcttctcacaattctctattagatcgttgtgatatgtctcgagctcctcacaagacacttggagggttttatacaattccttcaaggtcttaaacatttctttttctttgtgcatgtagtcatcagcctcacctaacattctaacaagatcatcatatgaatagccatcatcctcaacatcatcaacatcatcatcatcatcatcatctatatcatttacaatcggtgaatgaattttaccttggcatctcccttngccatgagacaatgaggggatgagaaaagtgaaggggcttccttgatggcaattccgacattaagcttggatgaggtgtcatcatcatcatcatccaagctatcatctgaatcccattcaactangtaggctttgccatctttcttcctgttgtagaattcttct

SEQ ID NO: 16766 - DNA, 327 bp, Zea mays
gcttttctttttggacataacggaacataaattaccacttctttcttttgccggagcaaccacttatgaacacaaatgctatgaatgaatgcttatgaatgccaatactatgatgtaatgtgcgaatgaatgtccaaagcatataaccgaagccacactcaaccattattttcttggaatcaaccacacatcagctctgcattcccttaggaacgactttggagcttcctcgtcttttacttagacggtataaactctgcattcccttatgaacgtctttggagtttcttcgcctcttacttaggcggtataagctctgcattccct

SEQ ID NO: 16767 - DNA, 368 bp, Zea mays
  unsure (1)..(368): unsure at all n locations
agcttgagttatnttattacagaccagaactaatatgcgagtgcagagtagtaatattatacaaaccaagggaggcacaaactcctcccgataagctataagtaaaagatcctatgtggaggaccgagtcctcccgcacttcagtcttggttttcttcttttggaaccaccttggcacagaagcagcaaaagtctgctacttcctcacctaaaaacaacgaagggataaaccctgagtatggaattactcagcangtcttacccgactaagaaaagactctcaaggggatgctggttatatgggagtcaaggtaaggcttttcaataatcaagactctngtntgcagaaatgcttactaaagtggatc

SEQ ID NO: 16768 - DNA, 380 bp, Zea mays
  unsure (1)..(380): unsure at all n locations
tccaacattttgaaccatgggtggtggttattaacctctcattcatattcacctatcccattaaaacacatatttttaatgtttattatttaaccacataaaacacatattttcttgccacaatctatcgtggtacacgccaggacaagacaacctctgctcttggctgaatggcgtgagccgtgctggctgcangcatcggaaaacatgactatcatatttgtctctttgctgatgtgcctggagcacatcttgtgcacctaacatngtagctcattcacatcttcatgtangctgtctccttgtaggtgaggactctctgcagtgagcatgctagatcgcttcgactgttcctatattccacgcactattttagcgct

SEQ ID NO: 16769 - DNA, 483 bp, Zea mays
  unsure (1)..(483): unsure at all n locations
agcttgctccaagatatgtatgaccttatcaggttatcgaatggaagggagaagtggcctacaaaattcagttgtctgaggacatgaacacgatcttcccatgtttcacgtatctcaactaaagaaatgtctcagaatacccgaggagaaagtagaagtcaaggatctgaagattggagcagacttggtatatcaagagcaacctcccgaagttctagacagtaaggatcgaattaccaggaacagtacggtcaagacgtataaaattctgtggaatcaccatgacgagcgtgacgcaacatgtgagatggacgcctatatgtgagaagtttatcctgacttttaccanaaacggatagtaatcttaaatctcggggcgagaatcctttaaggnnggatgtacacccgtggtgttaacatattcatccatggcatgtgcatcacaatggcattatcatgagcatcatcaatcataatatcact

SEQ ID NO: 16770 - DNA, 428 bp, Zea mays
  unsure (1)..(428): unsure at all n locations
agcttctgacaactgggccaccggacagtccggtggtgcaccgggcagtcactgttcactgtctggtgcgccctctggcgcctgctctgactctgcgcgcgctgtccgcgcactggtcacgcattcttcacttttgcagacgaccgttggcgctgttagccattgctccgcatggcacatcggacagtccggtgaattatagcggagggcaattccagaaacccgaaggtggcaggttcggagttgatctccctggtgcaccggacactgtcaccggacagtccggttcgccagaccagggctgccttcagttgtctttggctctttntattngaaccctntcttggacttnttattggttggtgtgaacctttggcacctgtagaacttatattctagagcaaactagttagttcaattatttgtgt

SEQ ID NO: 16771 - DNA, 337 bp, Zea mays
  unsure (1)..(337): unsure at all n locations
tttattggctctcttgcaatttgtggtttcttgnggggagaagtattgattatgggaaatagtggggagttttgaaatctttgatcaatctcttttggaatgactctctttatacttcaacatgtgtcgttgacttagagatagagatttgagtttgatttgcaaaaacaaaccaagtggtggcaaaggatgatccatatattgccaaaatgaatcagaaccaatttgagttnttatttgaagtgagtttgcacttgttccacttgctttatgttgtgttggcataaatcaccaaaaagggggagaattgaagggaaatgtgcccttgggccatttc

SEQ ID NO: 16772 - DNA, 361 bp, Zea mays
  unsure (1)..(361): unsure at all n locations
agcttagtgcccctaagagatggtctaactntgtttagggcatagctcccatggctcaggataacgagggttacattntatatcctgtctgttatcccgagcacaaaattatgagaattcattttatgaagtctcactctagctctcatcatgcttttatgtataagagtgagacatctagttctaggcaatccactcttgttcaattgcctaaaaagaaatctcctattgcatcaatgatcataacacttcatttaagacttntgatgcttcatatgttntaactaacaaatcaggcaaagtagttgccaaatatgttgggggcaaacacaaggggtcaaagacttatgnttgggtaccc

SEQ ID NO: 16773 - DNA, 389 bp, Zea mays
agcttgacatttcaaagagaaacttatcctctttatacgatcaagagaaactcattctcttcaaagaactacacaaattcactaaaagaaaatgttagtctttaaggacacaagatatagaatgagctcccgctaaatgtatgcatcaagtacttgaattacttgtaacatgcacttgattcaattaagattcttagaggagttcatcatatatcttggtcaaggcataatatatttgaaacaattgaatttatgctagagaacacatatcgttccccaatagaactaatccatggggtgacatgtggtaaatatatgatcatttccttggaaccactcatcctcatttgatgttctccaaggtgtgagactacaaaacattgacttga

SEQ ID NO: 16774 - DNA, 354 bp, Zea mays
  unsure (1)..(354): unsure at all n locations
tcttcggttcccattaatcagattttctgttgaagtgttaaagatatatcagattcttcgtcatcaacttactcccgaagctataattagaatgggcttgtttgtttgggctgtgagaagtcaagggctggagccaagcgcgaagtatttttgcagcatgcacgaaatgttgtacgagacgaaggccactatcatagagcactatcacaacaacttcgggtggtatggattcactgctcgttctaatgcacgctacccggatacaacatttcggaaaaggtggcccggtgcctggacggangaatggtattatgtcaaanatgatctggttaaaagagaagacataaaggggat

SEQ ID NO: 16775 - DNA, 334 bp, Zea mays
  unsure (1)..(334): unsure at all n locations
ccctacgcatgtcagatcgatccacaactccagccagagtgatgacagaggaagccaacttcaaaggccacagcatagctcacaatcctcanggcaacagcaaagctcttttatgccaccagccccaaggggtagaggcagcatgggctactgaggaaggtatggggaatatcccagaaggctctattgtttattctgtggtgaagacaagggccacactacaagaacatgccaggtcaccattcagaagcagaaggagaatgacgaagcataggcgcagcagaatcagccgaagcaggtcttacatactgcttcgtgctattctccctatata

SEQ ID NO: 16776 - DNA, 372 bp, Zea mays
  unsure (1)..(372): unsure at all n locations
agcttctaaagggagaacacagtttgtgactaacttatgttcattttgagaaagacaggatttgtagcgcatgtcaagcaaggaagcatgatggcgttcatcatccacacaagaacatcatgacaactgacaggccactcgaactcctacacatggatctattcggcccgatagcttacataagcatcggcgggagtaagtactgtctagttattgtggatgattattttcacttcacttgcgtgttctttttgcaggaaaaatctcatacccaagagaccctaaagggattcttgaggcaggctcanaatgagttcggcttaacgatcaagaaaaatagaagcgacnacggaatggagttcaagaactctc

SEQ ID NO: 16777 - DNA, 377 bp, Zea mays
  unsure (1)..(377): unsure at all n locations
ngccttatcaaatggatgtgaagagggccttccttcttggaccnatcaaggaagaggtctatgttgagcaacctccctgctttgaagatagtgagtactctaaccatgtctacaaactctctaaggcgctttatgggctcaagcaagccccaagagcctggtatgaatgccttacggattctctcattactaatgaattcaaagtcggaaaggccgatcctactttattcactaaaactagttgaaaagacttgtttgtatgccaacattatgttgatgatatcatagttgggtctactaacgagtctacatgtgaagagttagtacgatcatgacacaaaagttctagatgtctatgatgggggagttgaagtact

SEQ ID NO: 16778 - DNA, 392 bp, Zea mays
  unsure (1)..(392): unsure at all n locations
agctntactgttatgttgttatgtcgtacggtctgaataacgccttgcctacatttgtgcgggcgatgagtaagactttctgngacctgattatggacaaagtggaagtctacgtcgatgacatcatggtcaagactaagagagggtcgaccctagtggaagacttaaccctggtcttcgacaagctgcgggcaacccgcacgaagctgaacccggagaaatgcgtttttggtgtctccgttgggaagttgctggggttcctggtttcatactgnggcattgaagcgaacctggagaagatcanagcgatcgaggcaatgaggccccctgcccgagtcaaggacgtctagaagcttacgaggtcattagcccgccttagtcacttcattttg

SEQ ID NO: 16779 - DNA, 358 bp, Zea mays
  unsure (1)..(358): unsure at all n locations
gtctctttgaaatccttaaaggaaaatgcttaanatggttgccgtatgctttcataagtgcataaactgtcttgagcatcactcatatactatgacacaatgcacttcactntctctatgatatagacttgttctcattaacctaattatgtgcacttggcatttaaggccaaaatatgtattcctctcaaggcacatatttagggggagaaatctatattatatagaactatgatcatgcttaattgacatatctcttgatcatatctctttcattttggtacaaatgcatatatcctattatntccgtaccatgactacgacctaatatgtttcaagtatattactatgctaagtc

SEQ ID NO: 16780 - DNA, 343 bp, Zea mays
  unsure (1)..(343): unsure at all n locations
ngcatggaggtgtcgattggtagcctacttgatgtatactcctncttcttttctaccgtcgctttgaatgcgatgggttgcacttcgggtgtggaggtggccccttgctccaagatgacaatgtgtttggagtctttgatcataagttcaaagctcacaaacttcccaatcacttccttgggatacattagtttatatctaggttccccacgaattaattgcacttgagtaggattgcgaaaaacaagggatcttagaataaccttgaccatttcatggtcatcccacttggtgctcctgaggttgcgcactttggtgacaattgtctttagccgattataca

SEQ ID NO: 16781 - DNA, 382 bp, Zea mays
agcttatgaagattcttcattccaacatgggctagtctgcggtgccagagccaacccatgttagtcttagcaattaagcaagtgtcgagttcagctctatcaaaatctaccaagtatagctgaccctctaacactcccttaaatgctattgaatcatcacttcttctaaagacagtgacacctatatcagtgaatagacagttgtagcccatttgacataattgagaaacagaaagcaagttgtaatctaaagaatcaacaagaaaaacattggaaatagaatggtcaggagatatagcaattttaccaaatcctttgaccaaaccttgatttccatccccgaatggtgatagctcgtgaggatcttgtgttttctcatatg

SEQ ID NO: 16782 - DNA, 363 bp, Zea mays
  unsure (1)..(363): unsure at all n locations
agctggaatagtgccgaagctttctggaggccatcaagacagcatacagtaccttctccaactctgtataatntntctttgataaactaagaacctcggaaacaaaatatattggggcctgccttttgacttgaccatcaatcttctcctggacaagcgctgcacttaccgctgagtgcgaagctgccacatataataataaaggagcccctggcattggtggagtcaatgtntgtagatctatcaaatactgtttcagttcttcaaaagccttctgctggagtggccccattgaaagacttcggctgacttcagcacttcaaagaatggtaagtttctctctgctgatctagatatgaatct

SEQ ID NO: 16783 - DNA, 415 bp, Zea mays
  unsure (1)..(415): unsure at all n locations
agcttagcaagtgcgagttctggatcagtgaagttctattcttgtgtcacattataaaccgagagggatnggctgtagatccaaagaaggtaacaactatcttggactggaaagcaccaaaagatgtccgaggagtcaagagtttcatctgaatgaccggttattatcagcgtttcattgaaggtttctccaagatcgctatgccaatgacagccttgctggcaaagaaggttgagttcaagtggaccctatcatgctagaagtcctttgagacattgaaggagaagttgacaacggcaccagtactgattctgccagatgttcacaagccattctcagtatattgcgatgcttcgtacaccagactgggatgtgttgttatgcacgaatggagagtaatggcatactcttctcg

SEQ ID NO: 16784 - DNA, 397 bp, Zea mays
  unsure (1)..(397): unsure at all n locations
agcttgccaatacttgtcaaagcaacaacatctgtcagcacagcaactgcagaccataccagtaacttggcctttcgcatgctggggactggatatgattggacctttcaagaaagctcaagggggatacactcatgtattggtagcaatcgacaaattcactaaatggatagagttcaagcccattgctttntaacctctgctaaggccgtggaattcatacaagacataatattcatattcgggataccaaacaacatcataactgacttaggatccaacttcacaagttcagagttcttcgacttctgcgagcaaaagagcattcagatcaagtatgcatctgtagcacatccaagagccaacgggcaggttgagcgagccaacgggatgatat

SEQ ID NO: 16785 - DNA, 404 bp, Zea mays
  unsure (1)..(404): unsure at all n locations
agctnggcaaaagcactacataactgttataatcaccaatatgtgattccaggtttaattaaatcaaacattacanttttcgaaatctgttctgacagaggacagaacacaacaaccagtttgtaaaattcataactcttaaactaccaggcctatggttatgaaatttcaatacaagaaagatcagaanagcatatacaactttcttataatgaccatgaacagattngcaaattaaattgagcanaaaatgcagtttctgaaatctgtacagaatttggacagattcagttactgaatttgtaaaaagcataactcctaaactgtcagacctatggctgtcaaatttcaacaccagcangataataaagttatctaccacttttctatagcacatatctaca

SEQ ID NO: 16786 - DNA, 381 bp, Zea mays
  unsure (1)..(381): unsure at all n locations
gcgatgctagagccaacccatattagtcttagcaattaagcaagtgtagagttcagttgtgtttatcttaaaatcaactaaatataactgaccctctaacactcccttgaatgctactgaatcatcacttcttctaaagacagtaacactctatatctgtaaaaaagatagctggtacccattttgcataaatggagaatacagaaagcangtcgtaatctatagaatctacaacagaaacattggaaatagaatggtcaggtgatatagcaattttaccaagtctattgaccagaccttgatttccatccccgaatgtcatagctctttggggatcatcgatnttctcatatgaggagaacattcttctctctcaatcat

SEQ ID NO: 16787 - DNA, 353 bp, Zea mays
  unsure (1)..(353): unsure at all n locations
gcttctactgaagcttcggctcaacaagctgaatctgaagctgggccttcagagccctacaaggagcaaccttttgaagccgaagcaataaaaattccagaaccagtattagttggagaaactgacaccgccatccccgaagcacctgtcagcatgcgtgattacatgatacgacatgcttcggggaagaagctatccgaagaagaaactcatgaagccatccattatgcanaggaactaaaatatccaaagggggcagtaatattcaatggaacgaatgaagatgacttcttatactgcctgcctgacaacaaagagctatctgtctgccgagaaatggccagaagtattgg

SEQ ID NO: 16788 - DNA, 330 bp, Zea mays
  unsure (1)..(330): unsure at all n locations
ttattacttctacatgctttaatgtctttcttttcggtggttgatgccaaagggggagaagtttanggaccaaagcaatgaatactatatcaaacaccaaacaccaccagattaaaattttatatctacaaatggctctacaagtggttttagttgtttggtccacaaataggaagtaagtgaattatggagttagggggaggcttaagttcataatatcacattgtggggacaatcatgcatcttagcaagtagattgcatattttcactcaaatactngtattatttgcttgctttggatgtgtcgacatcaatcaccaaaaacgggg

SEQ ID NO: 16789 - DNA, 355 bp, Zea mays
  unsure (1)..(355): unsure at all n locations
agctngtgaacagtacatattcagaagggagaattcagcttcatcagatcagtcgaagcccatgctcttatgtgaggacataacagagcagaaggtgctgttgggctctcaattatccgaagaatatgagaagaccttgataatgtttttgttcaacaacaaagatgtttttgcatggtcagccaatgatctctgcggagttaatatggatgttattgaacactcgctcaatgttgacccatccttcagacccagaaagcagaggcttcggaaaatgtctgatgataaggccgaatgcactcataatgaagtcaaaagactcctcagtgcatgagttatcagagaagtaaagtcc

SEQ ID NO: 16790 - DNA, 118 bp, Zea mays
  unsure (1)..(118): unsure at all n locations
agctntatttcaatgcacccaggaccatgaagaatacctttatgcatatgtccgaagttcctgcgtctgagggctcangcaccaacagttcccaatgaaattgtcattgaggccatga

SEQ ID NO: 16791 - DNA, 379 bp, Zea mays
  unsure (1)..(379): unsure at all n locations
agcttgctcactgcttccgcaaccgaagctatttattttgctcaagcttcataacgagaaagagcttcagcaaaggtaagaaaaaatttcaacttcattcgaaaaacaagaaattcaatcaccagatggcccgagtacgttccacagctatggttactcgtgacagagaggaggccgaaggtgccgaaactgccccaatctacgaagtgatgaagcgctcanggctggtagcatcggaggatgcacctgccgctaaagccgggtaggctgatgtcgaagaacttgagtctgaagatgattacagcgcagtgccaactaaacccagccacctggagtttgggaaatccaccatatctgaagatgacatgtcgaagctgat

SEQ ID NO: 16792 - DNA, 320 bp, Zea mays
  unsure (1)..(320): unsure at all n locations
agcttcacagcctcacggtgaagctgtccangggctatggcgaggctggngggcgttagaaagggttggtcacgacggccgtgctcgggcagtgatggtgggcggtggcgctcgctttccacgacgaactccagtgatctttggctcgggcggngctttgggtgcacgagtgcaaacggctaaggcctctggtggcacttataggcgagggcaaggtgcagacacgcggggcagggcgaccacgcgcggggcacgcgctaccgcggacagtccgcgctcggccggtcaggcaagtgattaacacgtggcctcctcggtct

SEQ ID NO: 16793 - DNA, 365 bp, Zea mays
  unsure (1)..(365): unsure at all n locations
agcttgtcgctntagcttggtttctgggcttataatgtattaaaagctggtttacaggataaactaagcttggccagaccaacactctgagctatgcatccaagtgggtacccagtgttttctaggtcagctgaggggttcacggacaagacaatcatctactgcgagcaatgcgagcgagaatgtaagtcgtattcttctcttctcttctactataatagngtgtgtacagtgtacctcctaattaacgtatataaataaataaacagatcatgtgggatgcgtgagacgaggaggtttcgaggaagaaagcgcagcggagtggtgccgccgactatcagaatcagagggaccagaagaagaat

SEQ ID NO: 16794 - DNA, 471 bp, Zea mays
  unsure (1)..(471): unsure at all n locations
agctngaattctatgcaacgttagttatttgatgtcttgattgtatttatcatgcagatttcttggtcccatgaattcttgtctccaactgttccctaaaatttgccttttttaatggatttacctcgtggaactcgagtctttgttttttttttttgcatacaagtatttttgttagagtgcccatgggcagctaaagaaacatatatggtctttccactacttgataaaaggatcttgngactatcactaaaaatgatatttccctcgcgttcggctataacaaaaaccctctcatgcccncaacttagggggtacgaatttgcgagtttaaccgtactatatcccaagtatttattgatacgcggccccagattgaactggggtaaggattacagtctctgcttaccactgctatgccgtaaaatctgactaaatcgagaaaagctatatatttacaatttttactat

SEQ ID NO: 16795 - DNA, 396 bp, Zea mays
  unsure (1)..(396): unsure at all n locations
agcttattagcatattgagagtagctagtctacatctattgttctcattatccttgatatggctaagggagaagtttatgcttataactcttggtgatcggcatcatacaaatggtttggtgatgatgatgaattcactgaccacacagagagcttgtgcatgacctaacttatgtttgtacatagatgtgagcggctcacgatgctacagagacaaaaaaccagcccatatagagcacttggtcattgcgtacacaagagagagcgacactgntatgcaaatgctccaacgacgactaatgtagagtgttaacttttcgacattaaggcctttctaatatttatttacttngaacatctataatcgagccatttattttaagcatttacattact

SEQ ID NO: 16796 - DNA, 357 bp, Zea mays
agcttgaaccgaggacccgcgccaccggaatagctcaatcgtgctcgccgaagttcggaaccccgccggagcacgtggaccgggtaagcctctgcaccatttcccaattcgttgcgcgcatggcctctacatcaccccgtggagctcctcgtgcactttaattgaactataccgtcgtgggttggctggaacaggagccgccgacgacccccgccgcctgtgctcgtggccagggtagctccaaccaccttcgacgccgacccgcacgccgacgtgaccgtcgtgacctccccgacgtcactgaccaccccgccggagctctactggtgacggtaagcctcgccgccgtaatctatg

SEQ ID NO: 16797 - DNA, 287 bp, Zea mays
agctcgtgagcaatacacgttcagaagggagaatgctgcttctgccgatcagccgaagcccatgctcttatgcgaggacatatcagagcaaacagtgctattgggatcccaactatccgaagaatatgatgaaaccttgataagggtttctgttcaacaacaaagatgttattgcatggtcagctaatgatctttgcggagtcaacagggatgtcatagaacacttgctcaatggtgatccatacttcagacccagaaagcagaggctttcagaaatgtctgatgac

SEQ ID NO: 16798 - DNA, 292 bp, Zea mays
  unsure (1)..(292): unsure at all n locations
acccgacctcgctgcaacatgacaccagaaggtccaacccaacaagcgttggatgaattcagaattattgcagagcatatcagtacaagagacctggttcaagagtttttggcttttagggtttttcctagnttaaaagaatgggaaatgccgaagctagaaggggagaagaaagaaggggaacttgtgccggtaccttactattacaatgttaagaagtactttaaaacaccttgtcaagagtggttggatacaattgaaataatgtgcaatgaaatactcggcaattact

SEQ ID NO: 16799 - DNA, 385 bp, Zea mays
  unsure (1)..(385): unsure at all n locations
agagtttagcatgattacatcaattgcccaaaatgactcaactctatctagcctagtacctcaaaggtgcaaaagctaagctagctgcgaggagttctaccatcaccaacgtctaactctactctggacatctagtgagcgaatgaggcaacactcgactcgggggaaggtggtctttccgagccagcagtgtccacactggaggcaggctcatctnctccctcgatgtcgacgtcctcgttggcctccaggtcctggatctcctggtgatgcatatccaggtgctcgttagcctcagcaagctgctgctgagtgttaatgagctgatcctctagaacctcgatgggtgtctccctggtgccactagctcctcaactcttggata

SEQ ID NO: 16800 - DNA, 330 bp, Zea mays
agcttcttccatgccagaatctatctgcttgtttttaatatggcgggtctgtctgtagtaatgcagcgtctctgtgtttcggttgcagggccgttggacaagacgatattcgacatcgagatgcgcctggctgcggctagagccgcccaggcgatgagccactgcatgtcatcgggcgactcggactcggagggcgactcaggaaccgcgcggtgtaagatgtcttttgtcatgggcgtattcaccactcttgctaaccggaagcggagagattctataacgcagacgtggatgccacagggcacatgcctatccctttcattttgtact

SEQ ID NO: 16801 - DNA, 329 bp, Zea mays
agcttatagtatacaaccaactgaaggtatcattactgatgaatagtgaagcgctaggtagtaacttcacctgaatgacccacatgcttcagaaagcctctatgcagaacaatgccaattcaatgaagtctaagatctggaggtcacaaataataggcagtgactcgcttctgatgtatgtttcatttgtcttttcaggaaatatatgtacaatcatatcctgtggaattctggttactggactctgaataataacggtagactcactcaccccgacaatgacgctgtcgtctaataaactgattgctgggaaaatcccactgcatgat

SEQ ID NO: 16802 - DNA, 327 bp, Zea mays
  unsure (1)..(327): unsure at all n locations
agctngaaaatatctggatatggttctaagagttgaagcttccttcgaagggttttctgtcaaaaatatccctcgaggacaaaatgagcatgctgatttgctagctaagtcagcagcacaggggctgcccttaccttcggatgtgttcttcgaaacaataaaagcaccttcggtggaacttcttgaaagagcagtcctcaacatatctcctgtttatagcgaggattggagaactgagatcatctcttaccttcagggaaaattcctttcagatgacgaagcttataacaggaggatagaggcaagagctcgtccatatgtcatgat

SEQ ID NO: 16803 - DNA, 460 bp, Zea mays
  unsure (1)..(460): unsure at all n locations
ctctcgcgagaccttttctcatttctttctaaccaangtaaattcattatcgtatgtgatattctatgcattctactttatttggtctcttgtatggagtactggttgtttcctaatatgaatggatgggtgtatgtatgcttgcaatcgcatagagaacgatccggttgaagagcccgaggaactcgcangagaagcccctgagcatcagtcggttggtggaggcaagtgtcccttgacctatctctgtcctatacattctntaattcacctnccgcactacacatttatacttaaggattgactaagntttgttatccatgtccttgtttacctaattgngttgcgatatttattgctacngttatgctattgcttaactctaaacaatgaacatgatgagattatctatgatacgcttgtntcccctctcttattatgatgttatacttgtggtctt

SEQ ID NO: 16804 - DNA, 205 bp, Zea mays
  unsure (1)..(205): unsure at all n locations
ngctntacgacgggctgctgcacgacctcctgattgagctcgagaacgacctggtgatggacgacatcgtcgcgtggatgaaccccacggtatgacgccgtccgcgcgttgcggtgctggccgtacgacgcgagcggcgtttcgatcatctgacggccaacgacgccatctctccgggtggagggtgatgacgcggtctggtctg

SEQ ID NO: 16805 - DNA, 422 bp, Zea mays
agatatcagatgaactaaatcatgatattcatgaggtcatggagtactgtctctattcagcattaactggtcgtttctttatcgaacagggatccaacaatctgtttgcgacattacctgctgttgatggtgaacgtgttgaagtcaaacgaatccataactgccgcaggtatgctttgtatgtttaatattacaattgtcttttctcggcttgactcgtgttcttttcaaatgcactaggtgattgtactctgatttttcctatatttgtgtcactgtgactgctatatcttgcctgaattttggttatacaaaactactatagtttctcaatatctgatggtaccttaaacttgataatgtacaccctgaatctattttggactagtaaaatctcaacggcagaattaatgactttaatg

SEQ ID NO: 16806 - DNA, 382 bp, Zea mays
  unsure (1)..(382): unsure at all n locations
gcttgtggaggttcttcatccccacatgtgctaagcggctatgccacagccagcccatgcaagtcttagccattaagcatgcatctagactggcctcttcttttgcaaaatcaactaaataaagtttgccggctaatacaccctntaaagctagtgaaccatcacttcttctaaagacagacacatttacatttgtaaataaacaattatatcccatttgacataattgactgacagatagcaaattatatccaagactctccactaagaatacatctgatatagaatgctcattagaaantgcaattttacctagccctcttaccttgccttgattcccatcaccgaatatgattgaatcttgggaatccttattcttgac

SEQ ID NO: 16807 - DNA, 440 bp, Zea mays
  unsure (1)..(440): unsure at all n locations
ttaagtcacctgcggcatgcaagcttcaactccatctatattatggattgccttggaatcagtccagcttccttcggcccttctggcagcttcctgagtcccatgaatagcaataggcccttggtccgaaggtatcttcatgcagagataagctgggtgaagaattgcttcaaaagcatttanggtaccacgaccaatgatggcgttgtaggggtattccatgtcaacaatatcaaacacaatttgctcactccttgngttattaacaaatccgaaggttaccggcatggtaatcttcccgagtgccacaatctgccgccctccgaagccacaaagagggtgcgtagcatcatgaatcttgtcttcaggctcttgcatctgtctgaaggctatggcaaatataatgtcagctgcacttgctgtgtaactangacattgtg

SEQ ID NO: 16808 - DNA, 390 bp, Zea mays
  unsure (1)..(390): unsure at all n locations
agcttcttggaacagcctccgcctccacctccgttacagtaaggccagcagccagaagggagtcagtatgctccacaccaaagggacttcagagagcagtccgaagctcgtacagtcaacagcaccgtgccagagtcaaagcacatctattgacaaatatcctaccctaatagcaatcttttccatccagttttgttttctgaataaaggacattgtttaggtttcatataaatactttcgttggttcccacaaggaaaatatattttccacaggcttaaattgttgcaattgaaagacttgtgataattacagaagaccttcggactatcgaaaatcattcgaaacagcagaaagccgntctaaggaacgcagagtaagttgccgagtc

SEQ ID NO: 16809 - DNA, 100 bp, Zea mays
aaaatacagttacgaaaacacacccagtttaaagacaaaaccaatatatgttatgtttcttaggtgaaacaaatggcagttgctactttgatggagtcac

SEQ ID NO: 16810 - DNA, 430 bp, Zea mays
  unsure (1)..(430): unsure at all n locations
catgcagcttctaagggagaaacatgaaggtctacttatgtaccttcgaaaagtagaccttgtgcacttgtcagcagggaaacaagtgggaagctctcatcatgccaaaaatgtgatgacaacatcaagacctctggagttacttcatatggacctctttggacccgttgcctatctaagcataggaggaagtaaatatgggccggttatagttgatgaattttcccgcttcacttgggtattctttttgcaggataaatctgaaaccaagggaccctcaagcgctttctaaggagagctcanaacgagtttgagctcaacgtgaagaagataaggagcgacaatgggtccgagttcaagaacctacnagtggaggaatatcttgaggaggaatgaatcaagcacgagttcttcgctccctacacaccac

SEQ ID NO: 16811 - DNA, 355 bp, Zea mays
  unsure (1)..(355): unsure at all n locations
gctntattccagtgcacccaggatcacgaagagtacctttatgcatatgtccgaatgtttctacgtctgagggcacaggcaccaacagtgcccaatgaaattgtcattgaggccatgattaaggggcttcggccaggaccttcagctcagtactttgccaggaaacctcctcaaactttggagaagctgctccagaagatggacgagtatattcgagctgacaatgattttcgccaaagaagggaggaagctctcaggttttctgaaatgaccaggggcttcggaggaagggtttatccgaggcatgtcaggtcaattcacaattctacttcaaatgatgacaaagggagtcagc

SEQ ID NO: 16812 - DNA, 411 bp, Zea mays
  unsure (1)..(411): unsure at all n locations
agcttgttccatgtattctgatcacgtgtttaatctcttttttgtgcccctcttagttgcattcattntattcaaaatgtgattcgcttataatatttctagggaacttatattctttcaatacagtggcagagcttaacaacagattatgcccaaatttttccaagtcaacatggccttcaatttaggaagtgggaaataaggatgggatcatttgattccatgtttggataattgaattgaagatagggatagataaataaagactacacccatctcatgccctcttcttttgtctcaacccattnttatttccctatccaatccccatccaaacgttcacatacaaattattcactaggctagagtacttataaaggtgaaaggacaacttctgatgcacaagaagtt

SEQ ID NO: 16813 - DNA, 412 bp, Zea mays
caagctattagctactactacgtgtgcgtgctaatctctcgattgatcgccaaggctgccagagcggagctgctcctggccactgcccatggccttgcaggctgcatccgatgacagcgcgacctactgtccgccgtcgccggacccaaaaccgtcgacgccaacgcccgacggtcaccaccacaggtcgtgctccgggacacgatgaagtcttgcgtgtgcaccgacgtgctgcgcttggtgactgccaaggtcagttcgtcgacgtacgagccgagctgttcgatgttggacacgctcgatgacctggaggtcgacgttgcctctgcaccgcatcaagccaacattctcggtgtaacacgtaacctcccatcgagctaaccttatcctcacaactgtggaaaactgccca

SEQ ID NO: 16814 - DNA, 408 bp, Zea mays
  unsure (1)..(408): unsure at all n locations
agcttagcagatcacagtgcacaagagctaaaaaatcagtgagcaggagtggttggccagaaagcgtgcaaaataagtttgcggtatggccgtatatatacgcttgatgcgttgaaagttgaaagaccccacttgtcattgaatgttgctattctagcaaagggaaggtgttnttttcggaccttcggcataaagccttcgttcatatcgcaatctgaatttattatttcaaacaaattaatattgcgaggtgctactgttggggaccttcggcgttcgaaggtcctcaaaaacatgatttaatagtgtttctggagtataatgtgcaaacaggtatcttcggactcgaatcggtatcacagagggagaagctcatagcatacgaaggttgatacagcaccgaagctg

SEQ ID NO: 16815 - DNA, 332 bp, Zea mays
  unsure (1)..(332): unsure at all n locations
agctgggaaagcttcacggtctctctaggaagctatccgcgggctcggatcgagcggaggtgggcgggaatggtttggccacgacaggcgcccttcggcggatctggcgggtcgcggggaggtcgctggagctgcgggctggctctggaaggctaagcgcggtgcggagggggtaacacggaagatggccgtgcatgagggcgggctatatagacactcgcgggcatgacacgggtgtgggcactgtggcggtcganggcgcgcggtggcgcgcgtgcgatcgtgctctgggcgcgttcccgagtcccttgcccacgtcgaacacgtggtgg

SEQ ID NO: 16816 - DNA, 301 bp, Zea mays
  unsure (1)..(301): unsure at all n locations
agctngacaatgaggaaatggcgctcgtcatcaatagcttccgccaaatcctcaaacaaaggagggggaaagactacaaattccgctccaagaaggtatgctacaagtgtggtaagcccggtcattttattgctaaatgtcctatatctagtgacagtgaccgaggcgactacaagaaggggagaagaaaggagaagaagaggtactacaagaagaagggcggcgatgcccatgtttgtcgggaatgggattccgacgagagctcaagcgactcctccgacgacgaggacgccggcaacat

SEQ ID NO: 16817 - DNA, 501 bp, Zea mays
  unsure (1)..(501): unsure at all n locations
ttaagtcacctgcggcatgcaagcttcaactccatctatattatggattgccttggaatcagtccagcttccttcggcccttctggcagcttcctgactcccatgaatagcaataggcccttggtccgaaggtatcttcatgcagagataagctgggtgaagaattgcttcaaaagcatttagggtaccacgaccaatgatggcgttgtaggggtattccatgtcaacaatatcaaacacaatttgctcagtccttgtgttattaacaaatccgaaggttaccggcatggtaatcttcccgagtgccacaatctgccgccctccgaagccacaaagagggtgcgtagcatcatgaatcttgtcttcaggctcttgcatctgtctgaaggctntggcaaatataatgtcagctgcactgcctgtgtcaactaggacattgtgaaccagaaaccctttgatcacacaagaaatgaccatagcatcattgtgaggatagtcctt

SEQ ID NO: 16818 - DNA, 463 bp, Zea mays
  unsure (1)..(463): unsure at all n locations
atgcttcgcacgaacccttgtgactngattcgcatgtgctatactatatgaggggctncagtaatactccgttgacggggatcaccttcggcacgcngaggggctcctggngctcctagagtagggaagctcgcatagttctcgcttgtgcgactctcgcngtagagatcctgtaatgctcttcaggtttccggtgaccgtaatttagcatggggttagactgatcacccttctgtgtatagcttagtctcccgactagtaccgaagtcccagctttggtgcttgaggcgcttggcctcattgacatcactcgggtggtagtatccttgaagaaacagtgttattggggcccgccaatctttagtcataatgaggttgtcgatgcgatggccttcggcgttcgtggttacttgtaatccctctaggttgcagacggctagtgtgccaatgacgtggtagaaca

SEQ ID NO: 16819 - DNA, 266 bp, Zea mays
gaacatcatgacgactgacaggccactcgagctcctacacatggatctattcgcctcgatagcttacataagcattcgggggggtaagtactgtctaattattgtggatgattattctcgcttcacttgggtgttctttttgcacgaaaaatctcatacccaagaaaccttatagggattcttgagacgggctcaaaatgagttcggcttaagggataaaaatattataagcgacaacgggacggagttcaagaactcacaaatcg

SEQ ID NO: 16820 - DNA, 466 bp, Zea mays
  unsure (1)..(466): unsure at all n locations
agcttcatagtctcccccacatcaattcctatcaaggcgtgcagtgatatgcccagctcggccactgcctcctcttctccagtgtcatcttctaattccagcaagaaaacccctcgagcagcacatttgtggtccactgagtacttctctgtgcagtgatagcattccccctttgcacgcttcgctgctagttcttccggtgatagccgtttgaatcgaggccggngcgcagcagctaccttagatggcgtgctgttgccggcctccttgaataccaaactcttcccagcaactttgtaacctccccttttccctgcttccagttcccttctctcataggcccttgccaggttcatggcgcgctgcanatttccaggagcttgtagttcaacatctgtgcgcaggggttccccaagaccggctgtgaacatgttgacctgctgcatggcagtaaggtcgttgcatc

SEQ ID NO: 16821 - DNA, 166 bp, Zea mays
catcatatgcatacatattggttgatcaccaagcacctcacttagattctatatgctaaacactgagagtatctacaaaataatattgttccaaagaaaaagatgcacaacgggaaatatgaattagacaagaaaaagaaaaaaagaaaagcctcccccccctgct

SEQ ID NO: 16822 - DNA, 453 bp, Zea mays
agcttcgcacctctgaactaactcggctgtatcgttttttcgctgtggccaatagaatcctgacctgaagaccttcccgactagcgttctggaggctgcgtgtattccacattgcccagcatggacctcctccagaagttgcttcccagtggacgggagaatgcacttcatgaggacgcctgatgcaccccttctatataatgtcttcccgatgagtgtatagtgagccgactgtctggcaatgcgctcggccgagttcttgccgtctggttcttcttcattctttatatacttaatgattggccttctccagtcatcagagtctgactcgggttgatctatgatgttgcactcttctgtttgatccattgagatactcggctgtagaatttcttgcacaaagactccgggtgggacctgagttcgactggaccctatcttggacagtacatc

SEQ ID NO: 16823 - DNA, 480 bp, Zea mays
  unsure (1)..(480): unsure at all n locations
agcttaaccttgtaatgaggataagctccttttgttccaaaatgggagggtccttaagtttctttgaatcttttaagggtaaatgcattaaatgtttagtataatgctttcttaagtgcatattctatcatgaaagtcacaaccatattatggcatattgcacttcacggntgctatgatataaatatgttctcacctattgacctaattatgtgcaattcgcatttaaggccaagatttgtattcctctcaatgcacatatttaggtcgagcaatctatatcatagaactctaaaaagcttcattactatatctttaatcaagtatgtctcttctaattggtacttgctcttcattcacatttttgcttgttccaaggtttaatgtgtagaacctgtattcctgngtcttacggtccanagtgcaatgattcacaagtattcatcacttgtattcacgaaattanggggagcaatactt

SEQ ID NO: 16824 - DNA, 356 bp, Zea mays
cggtgtctactcctctctactgcgatgaaccaaccgcactgtgggaggaacctcttcagccggaatctcgccgactaaggaaccgacgccgaaatatccggcgatatcatgaagccggagatcgggatccagcatagcctatgtcccgagatgagatctcagaggtaggagaaactccataagaacgggtcttcagggaaagaacgaattcccgacgacgtgatcgccgactagcccaagagcacgccgaacaggaggcgagacaaccctcagagaaccctcttcttggacggaatctgaaccccgatttcgcccgagccatgaacacaccgagcgaggtctgtggagtattggct

SEQ ID NO: 16825 - DNA, 422 bp, Zea mays
  unsure (1)..(422): unsure at all n locations
agctngacatgtagntctaggtgctatattatctacatataanaaggttggaagcagaaagaaaagaaaaaaaattattntaccgagtgtcaaaataagacactaggtagaagtcctctttgcctagtgttccagtccgacactaggcaaaaagaccttctttgccgagtgttgaaggcagatactcggcaacgttaacggttggtggatggtgttagatgacgacgctagtttatcaagtggttttctttgcctagtgtctggcactaggcaaacgtccggtttgccgagtgttttttttgcctagtgtctggcactaggcaaacgttcgatttgcctagcgtttttctttgcctaatggcggacactcggcaaacgactgatntgcctagtgtcttgattngccgagcgtaacactcggc

SEQ ID NO: 16826 - DNA, 475 bp, Zea mays
  unsure (1)..(475): unsure at all n locations
agcttaagcaaggcgggaatactgtcacccaatatctcaataaattcaaccacttatcccaatacgcaatcgatcaagtcaacacgaatataaagaagaggaattgcttcatgagaggcttgaatgatcgaatgcaaagaaagttggccacctgcatcgatctttcctatggaagggttgtcagcacggcgctggcagtagaagctaaatatgcagggtccgganaatcaaaggggaatggaggtgacaggcccaatcaggggcctgagaaaagacaaaggttggttatccgacctttcaatcagaatcgttcttcatcgcgcccaccctcctttcctttcaagcaaccagttntcatccgtcctaccgctgcccccaccgctacaaatcagccgggtttccctggcactcgtttccctgctcttcccaactcatcaacaggctgcttcaactgtggaaagtccaggcattttat

SEQ ID NO: 16827 - DNA, 466 bp, Zea mays
  unsure (1)..(466): unsure at all n locations
agctntcgntccttaatccttcatcagctgtgactccttttccaatcatcacatacacaggagagcagcgcaagtaccctgtcaaaatgacggatcgacgaagtcgctgctcacggcgcggcgtcgaaggacggcaacgttgcatcaactagcaacagcaaacgatgttgtaccaacggcagggccgaaaacgacgatggcagggagcttcgacggctgggcgcgcggcgaagagaaggaacgctcggctgggagcttctgccggcgaacaggaagagcagagaatggacgcgacgcagggattgggcatcgagcatctgcgtgagccagtataccgcggaacgcccgaaggagatgcggctgacaggggaaaaggaagaaggagcgcgcaggcagccggacttgggcaggggcgcgagatccacggcacacaggggagctggagcgggaggagggagacgaccga

SEQ ID NO: 16828 - DNA, 122 bp, Zea mays
gaggatgaagcttctccacatgtcgatggtaacaattgttttttattctcttaatgacctacgacagaacgatactaagaacactttccagaaccccaatgaactgattatgcgtgcctctg

SEQ ID NO: 16829 - DNA, 483 bp, Zea mays
  unsure (1)..(483): unsure at all n locations
agctggctcgtcgcacgatagcctgcctctcctgtgaaagaaagtcgacgctgcttcccggcgagacagctatcacagacatgatcagcgtgatcaatccgtggcagcccgcgcaccatttcttcttcggctagacgtctcaagcttcgaaaattaaggtgtccaaggcgtgcgtgccacctccatgctgcgctgcctccttgcgcagcgaggcagactggctntgcaacgtcaagatccagctcgtacagccggttcaccgaccgcggcacacttgccagtagctgacgctgagtatcccagatcttcagacgcccgttcagcattagaatcttgtgtccaccttcttccaattgtccaaggctcacgatattcgtggtgagcctcggaatgtagtaaactcccgtcagagtcttgtggtcaccattccggcagtggagaagaatggattcgtgaccacaaatggccgtgactgaaccatcg

SEQ ID NO: 16830 - DNA, 444 bp, Zea mays
gcagcatgcagactttacttgaagacgcaattgcgacctatatgtttacatctcataagacggacaacgacctcgcatgtgccattagacataatagattccatctcactccttactgctatcttccataagtcagcatcatgagaggaacatgcctcactaatggtagtaggtgtgtcttccacaaggtatcactataagtcattaccaaaaggatctggcaaccctttgacactagctctttcgagtgactatcagagcatcctcctcagggatgtgcacgagagaatcctcagcatgatctatacgaatggacaagtcgtgctcatggcgaattatagtctcatgacttatattactaagtgtattcttcataggaaactcattctcaaaagatgttgcgtctcttgagtccatgatagtatcaacatacatatcaagcac

SEQ ID NO: 16831 - DNA, 425 bp, Zea mays
  unsure (1)..(425): unsure at all n locations
atactgacacccattatcttattttattcaaccacttatcccagtacgcaatcgatcaagtcaacacgaatataaagaagaggaattgcttcatgagaggcttgaatgatcgaatgcaaagaaagtnggccacctgcatcgatctttactatggaaaggctgccagcacggcgctggcaataaaagctaaatatgcagggtccggaaaatcaaaggggaaaggaggtgacaggcccaatcacgggcctgagaaaagacaaagagtggttatccgaccttccaatcagaatcgctcttcatcgcgcccaccctcctttcctttcaagcaaccacatatgatccgtcctaccgctgcccacaccagaacaaatcacccgggtttccctggtactcgatggcctgctctcccaactcatcaacaggct

SEQ ID NO: 16832 - DNA, 456 bp, Zea mays
tagcttgcctcgtgcagactaatagcagaatattattacacacaacgggagtggagagatggcgggagtagcatgtaccctccgtggcaagaggctggacgatggtgtatctgtgctctcgattggagtgaacctgatctggtcttaagaaccccggtggcgagttgacatatgcaagggttaagtgctacatatgtcgtgtgattggacatccttagttgagtataatcgattcggatcgccgtaacttcgtggacatgaagacttggtcactgacttacacgtagcattcgagtgaataagaagggttgttaagaaattggctagtataggtcaagtgcttgaactaaggtagaaagaactctagaactcaggtaatgacttaacttgctaataaaactggacttttaaggatccactattagtaagcatgtctgcaaacagagtctgtgatta

SEQ ID NO: 16833 - DNA, 469 bp, Zea mays
  unsure (1)..(469): unsure at all n locations
agcttataccaaagaaagagacaatctatggtggtcacaagtttacatgaattntcaaacaataaaaattggtaacctcttgcatgcatgcatgctggtaggtaccgttggtcttggaagtttttgacagcaagagacttctatgctatactccagcgcgcgcactgatcgaagctcatcatcagacatggctagatgcttctccccggtcggaggccagaagaggcgaggacgctgtttctttgctgcattgngaggccttgctgttcatgtagatcgcgtagacgatcagctggatggtgccaagcacgaagcctatcccatngnggatctgcatgcagagagcgatcgagaggttctgtttagtatgggtagcggacaagacnagaggtgnggaagaagatcgagaagaacagagaggctttaaacattaccccgaggaagatgtcgcggtcaagcaccgcgtacg

SEQ ID NO: 16834 - DNA, 469 bp, Zea mays
  unsure (1)..(469): unsure at all n locations
agctntacactgcagtctgggctatatgtttgttatgttaggcgtgctttatgcaggatgaccatatccagcatttgagtagtgaggactctacggagaagcctcgtagtgagaccctggccattcacctcggaagtgaatacgggtctagctaacccgggctatacgggaatcacgactcatgggttaagatgctccacctttgcacagagtgaaactgatatatcagccgtgctcacggttatgagcagcctggactgctcacatgataattgaacttgacgatggaaataaatcgagatccgacgatctgccaatggtttgcttaagtggtcttacttaagtgttttgatatactcttatacctctggttaatgggaatactggggattcacacttattaagaatacaggtgttgataataaaatgtagacaaatggaatgcttactactcaagctcagactgacc

SEQ ID NO: 16835 - DNA, 438 bp, Zea mays
  unsure (1)..(438): unsure at all n locations
agcttctaaagggagaacacgtgataggtctaactaatgttcaattcgaaaaagatagaccttgtgcagcttgtcaagcagggaaacaggtgggaggctctcatcacaccaaaaatgtgatgacgacatcaagacccttggagatgctgcatattggaccttttggacccgtcgcctatctgagcataggaggaagtaagtatgggttagttattggtgatgacttttcccgcttcacttgggtgttctttttgcaggaaaagtccgaaacccaagggactctcaaacgcttccttagaagagctcanaatgnagttgagctcanagtgaagaagataaggagcgacaacggatccgagttcaagaaccttcaagtggaggagttccttgaagaggaagggatcaagcacgagttctccgcttcctacacaccacagc

SEQ ID NO: 16836 - DNA, 463 bp, Zea mays
  unsure (1)..(463): unsure at all n locations
agcttcatgagtggtagcttctgctctacgtttaaacggatttgccgaaggtgttcttcctgcacgacctttcgtgacgaagcatggccccaacacgaaccaaactcattcgaagatgacccacatgacactttcgggcaaggcaagtggattctccctctgcatattctatttgtacccaagtaatgcatataataatgtttactttttggatatattgcataatttgatgggatttgcctaaataaggatttcctagaattatcaaccctattccttgaattaccctgagataaatgctttgcatagcaattttttgctattgctcaacttgatgaatatgatgtcactctnttaatgatactatgttccgganatgaagtttatntatgttgttaacctgatggttaaacaagaacacatggtgttaaatggaacatggagtgaccaccctggataacag

SEQ ID NO: 16837 - DNA, 471 bp, Zea mays
  unsure (1)..(471): unsure at all n locations
agcttctaaagttgagcctatgcactgtaattcatacttagccattggagcacaattgtggcctttttgcaaataagcccaaaacttagggtttcatttgcaaatctccaaatatgtgaaccatatgactaaatataccctatntccatgattnttgcacttaagtccaaaatgtgcacacttttacaaatacccnctagggtttcagtctagggttttctaggggtttattagggtttctgacacttctagggtttggatgctatcaaatcttattagagtggatatctcatgaccatttctaataagttttgaagttttcttttatttaagctntgtttgctctttaaagcccagtttaaggttaggtaccctactctagggttttacccacaaaatgtcatatcaatacaacttgttngaaatttttgcctagtgaatgcactctatgtgtgacaaacacatggtatg

SEQ ID NO: 16838 - DNA, 462 bp, Zea mays
  unsure (1)..(462): unsure at all n locations
agctgggtttgagtaattggtcttgaacgtaattagcgtgtatgtccgacaagtagtccatgatgagagtgctaagagactnntttggagaagacttagatgacacgattagagctatacatattagtgagaagctttntataggagatctcaatgggcacgtaggtacaataagtgtaggttttgaggcggttcatggaggttttgagtattgtagtaggaataaggagggaaaggaagtcttggactttgcgatagtttttgacatgctgatagcaaatactttctttaggaagagaatcccatttagtgacctatattagtgatcaacactctggtcagattgactntgccctcacaagaagagaggataaacgagcatgcttggattgcaaggtggtatctatnggagtgtgtgtctcttanaataagcttgcggtgccgtggtggcgatattccgtt

SEQ ID NO: 16839 - DNA, 442 bp, Zea mays
  unsure (1)..(442): unsure at all n locations
agcttgtcattaccacaacatatcgtaatctgcttatcctgagtattgaacacatcaaaaggtgccatgtagggatggcgatttcccagacgttgtggtgacttcccagttgcgatatatgccatcagaccatgctccagaaaactcagcgtggcatcaaacatcgctatatcgacatgcgcccctctctggctcttttcgcggccataaagtgcactcactattccgctgaataaatagacaccgccgcatagatccgcaagagatgtaccaacgcgcactggcggagcatcaggatatcctgtttccatcattatcccgctcattgcctgaatgatggtatcgtaggcaggagcatcttttagcggaccggtatgtccganacctgacgatgaagcatatatgacgtcgcgggtgatttcttgaagcgtttccatgaaac

SEQ ID NO: 16840 - DNA, 480 bp, Zea mays
  unsure (1)..(480): unsure at all n locations
agcttagctgggtgtccatggactcatgtagttttttccaaatagcgtgagggaaatgggttcctcgatccgatacgatcttctttggtactccatgcagacaaacaatcctcgacatgtataattctgctaactaggctcctgtgtaagttgtcttcacaggtataaagtctttcactttagtcaacctgtctacgatgacccatattgaatcatagccatcccgagtacggggtagtccaactatgaaatccataccaatttcctcccatttccattcaggtaccttgagaggttgtagtaatcctgctggtctttggtgttcggctntaactcgctgacacacgtcacacagtgcaacatgagtagcaacatctcttttcaaaccataccaccaatacttttcctttagatcctagtacatctctgggcttccagggtgaatagagtaagccgaatcatgagcttctctcataataa

SEQ ID NO: 16841 - DNA, 484 bp, Zea mays
  unsure (1)..(484): unsure at all n locations
agctntcttcggcgccataacgaaggtttatgatcgtcgaaggtgttcaaaaaactcaaagagtggaagtgagttcaccggaggtgggcgccaatgttggggacttgttctcaaatgctataagtcaagaacaaggcaacatagaaaatgttaatcggtaaagtccttcgtccttcgaagcattattcctctcagggtataatggttttcggacgaaggttatgaagggcataccttcataaatatattgtataatgacgaaggatgaattataagaaatataatgaacaacataaacaactatgtcttattatcatatataaacagaaataatcattgaattacaaatgtaccttcaacttgaaggaaatgaaagtacaagcgtgacgcanaagtgaatgcccagtcagccctccacagtacgggggtactgttcacctatttataggcacaggtcacagcctatngcataatacattcatgc

SEQ ID NO: 16842 - DNA, 455 bp, Zea mays
  unsure (1)..(455): unsure at all n locations
agcttatcaatcaatcataacaatgtgagcatgagaagctttttctgaattcgaagcttnaagccgaagtccagaccagctcagaattgaagatagcattaacaagccttcaagacaaatgcttgaactttggcaatagtggtgttggacgattaaagaagatatcttactctgttggagccagcagtgggaaatctaacccttcggcggaaaattgaccccatgccctcgatcatattgaagctgacatcgaagagcttgacgaatttatagccgggcacggcgacttctgtgcctgtgtagcttcttcgggtaccgctgctgcatttctgaatgctccgtgcgaacatcgcaaggttgtcaacaggcccaacttcaccttatcttcatcaatcctggatgatatgcccgacctcgcccgatgtatctccaatagatttatataattggatgga

SEQ ID NO: 16843 - DNA, 456 bp, Zea mays
  unsure (1)..(456): unsure at all n locations
agcttgtgaaggttcttcatacccatatgtgctaagcggcgatgccacagccagcccatgctaatctcagcaattcagcatgcatctagaccggcctcctcttttgcaaaatcaactaaataaagtatgctgtctaatacacccttaaaagctaatgaaccatcacttcttctaaagacagacacatctatatttgtagatagacaattatatcccatattacataattgactaacagatagtaaattatatccaagagactcaactaagaacacattacagatagagtgttcatttgatattgcaatcttgcctaagcctttcaccttgccttggttcccatcaccaaatatgattgaatcttaagaatccttattcttgacgtaagaggtgaacatcttcttctgccncgtcatatggttagtgatccgctgtcnataatccagcttgaacccc

SEQ ID NO: 16844 - DNA, 433 bp, Zea mays
  unsure (1)..(433): unsure at all n locations
agcttctaaagggagaacacgtgataggtctaaccaatgttactttcgaaaaagatagaccttgtgtagcttgtcaagcaggtaaacaagtgggaggagcgcatcacagcaagaatgtgatgaccacgtcaagacctctggagctgctacatatggacctcttcggacccgtcgcctatctaagcataggaggaagtaagtatggtctagttattgttgatgacttttcccgcttcacttgggtattctttntgcaggataaaactgaaacccaagggaccctcaagcgcttcctaaggagagctcanaacgagtttgggctcaaggtgaagaagataaggagcgacaatgggtccgagttcaagaaccttcaagtggagaaataccttgaggaggaagggatcaagcacgagttctccgctccctacacacc

SEQ ID NO: 16845 - DNA, 467 bp, Zea mays
  unsure (1)..(467): unsure at all n locations
agcttcagaaggtgccatcttgatactttcttgtataatgntattgtatgaaaactccgctaagggcaaacattcatcccattcctgtgggaattctagaacacatgcccgtagcatatcttccagtacttggtttaccctctcagtctgcccactggtttgaagatgatagatcgagctgtggagcaacttaatacccaaggatatatgaagttcttcccaagatttggatacgaattgcgatccatgatccgacactatggtcttcggaacaccatgcagactaagaatacgagcaatgtacaattggcgtatacagtaaccgggtgatctgtcttgattggcagaaaatgagatattttcgtaagccgatcaacaataacccagatagagtcatacccttttgtaatcctgggtaatcccatgataaagtccatacaatatcttcccatttccacgtgtgcaac

SEQ ID NO: 16846 - DNA, 471 bp, Zea mays
agctgaatctagtcatcaattattattttataggagaaagaagatgatgccactcagcaaaaccaccagaggattcttcctgtttgggctcgaaatttctttcggccaccatcaacaattcaggtattcaatcatatggacaatagcaacaccttatatacgcatatatcccagaatgcaagctctgagaccacaaatagatccaggagttgataacccatcaacaacaccgaatacaaagtacacagtagaaagcatggcaaccaaaactatacagtttgtgtcagttaatatcgtatagtttgtgatcagaagagacttgaatccccgtctacgctcttgtctgctcacggccaacatcggaaacaatacaacagcaaaggctttgcgcgcgaccttcacacttcgtcacgacgggctgcatcatgtgtgatatcatccgatcacttcagcaggatcctcaattactca

SEQ ID NO: 16847 - DNA, 441 bp, Zea mays
  unsure (1)..(441): unsure at all n locations
agcttgccatccgntatgttccttacggaatcaacaccatcattgttgtccgaacaatcaaggaaaaaaaccaatacatggcccacaaggaccagtttcaccgggcatccaaaaatcaacctattgaagcactcagtcgataaatgtccacataaattcaaagcaaaattgataagacataacaagtaccttggacatggaaggcaagatttttctgctcctatatatttctgcaaggtatttcttgactcgtcgaccgaactcaaacaagaggacatatcaccactaaagtatgaggcatatattctagactgaggtaacttgtatttctgcatattgaagaacgagccatcaataggtaatgagaaggtggccttaaatagaacatcactaggagatggcaacctcacgtgctgattttccccgaaataggaagaaaat

SEQ ID NO: 16848 - DNA, 397 bp, Zea mays
caaaaatgcatagatgtaggaatgagatctttaagacgttaaactaggtatgaagcacggataatgcataaacatgctttctcttccttttatacaagatatgcaaggaatgtgtagaacaggaagatttatgtataagtgtaaataagaggaaggaggtttacctctttgtaccttcacatagagatgctctcttcattgtgctttgtgcttagtcttgattacttaagtcctatattcacaacaatatatggaaatattttgcacaaaagagagttctacgactagtgatccttttctaagcattgatatcatatatcaagtggatcacaaatgcataaattatcctgagtctccttttacttagtgctatcaaaagatattgattgatgtatat

SEQ ID NO: 16849 - DNA, 466 bp, Zea mays
  unsure (1)..(466): unsure at all n locations
acccgggaccttaagtcacctgcngctgcagcttatgaaacaggattgattgtgtttttagttcggcctatcatcctcaaactaatagccaaactgagagaactaaccaagtactggaggatatggtgagagcttgtgcccttaagcatggaggcagttgggacaagagtctaccatatgctaagttctcttataataatagttaccaggccagtctgaatatgtcaccatttgaagctttatatgacagaaagtgcaggactcctctatattgggatcagactggagaaagacagttctttgggcctgagattattcaagaggcaaaagaacaagtctgtataatccgggagaacttgagggtagcacaaactcggtagaagagctatgctgataatcgaagaagaccactggaatttgaagaaagtgatcacgtgtacctcaagttgtcaccaattcatggaat

SEQ ID NO: 16850 - DNA, 452 bp, Zea mays
agcttcgtgcactaactctagcatgaagtttccttttaacgttttctcaaggctaatagacaaacgtgtaacccaacggtgcaagcaaattaggcagccttctcgcttccgctcaatggacacgccaccagcccatcacaccactgctgcgagggaggcggaagggaagcaaagaagtaagcagcccagcgagtgaaatcaaaccgaaaatcgcgcgcgattcctgagccatctgagacgagtcacagacacaggcgaataaaaccgcggacattcattccgcggaagggcaggccgttaccttgggtaccccgcggagccatggtcgtcgacgccgtgacggtccgcctgacaaccccaccggttccccttactcctccaccacccggtgtacagaaggaccgccgcgcccacctccgccggctgctcgcgccggctccgccatccgtccc

SEQ ID NO: 16851 - DNA, 431 bp, Zea mays
agcttccttcgaagggttttctgtcaagaatattcctcgaggacaaaatgagcatgctgatctgctagctaagtcagcagcacaggggctgcctttaccttcggatgtgttcttcgaaacaataaaggcaccttcggtggaacttcttgaaagagcagttcttaatatatctcctgtttttagcgaagattggagaaccgagatcatctcttaccttcagggtaaatttctttcagatgacgaagcttataacaagaggatagaagcaagagcccgtccatatgtcatgatagaaggtgagttgtacaaacatggcgtttgcgctccgctgctcaaatgcttatccagaaccgaaggtatagagttaatgaaagatatacatgcaggcctgtgtggatctcacatcggatctaggccgttactcggagaaa

SEQ ID NO: 16852 - DNA, 465 bp, Zea mays
  unsure (1)..(465): unsure at all n locations
agctntatcaaatggacgtgaagagtgcctttctcattgttctaatcaaagaagaggtctatggtgagcaacctcccggctttgaagatagtgagtaccctaatcatgtctataaactctctaaggcgctntatgggctcaagcaagccccaagagcatggtatgaatgccttagagattttcttatcactaatggattcaaagtcggaaagcccgatcctacactctttaccaatacacttgataatgatttgtttgtatgccaaatttatgttaatgatattatatttgggtctactaacgaatctacatgtgaagagtttagtaggatcatgacacataaattcgagatgtctatgatgggagagctgaagtacttcttgtgatttaagtgaagcatctccaagagggcaccttcatcagccaaacagagtatactcatgatattctaagcaagcttgggat

SEQ ID NO: 16853 - DNA, 456 bp, Zea mays
  unsure (1)..(456): unsure at all n locations
agcttcctccaaagctcaagctcaagcccataaacgctaaattaaagatcttcagaaacagctagccagagctaaagaagaacgtatacttgaggagacaaaacgagagcttagtgatcaatgggccaatcatttagaaataaatgttaaagagcttcgtgcatcccagagaagatgctatgataaatccatagtgtgtttaaggaagataaaatcgagcttcgccaacgttggcgcattctctagcgacgagaatttctcaagaggcaatctcgaaggtccgatggaatggatcagtcacgaagctgaggccttcgaagaaatcctaaatagtcgcggagacatatgtgctttttcgggtgctagaggaattgctactgttntggagaagaaaggttgtgagcatgtaaaatctctagcgcaatccgaagctaccttgtnctccgaagacattaa

SEQ ID NO: 16854 - DNA, 238 bp, Zea mays
ccacaaggtaccaaaaaattgttgtttgtatgttgcttctaatggaacctgaaacctatgtttgcacaaggttcgaacaacaacttctatggttgagcacaattccatggttcaaacatgagcttctatgtcacatagtttggttcagaattaacatagacttaaaacttggctcaaacagatctattaatgctatctattcaatagctataatgaaacagatgttgacatcaatgac

SEQ ID NO: 16855 - DNA, 477 bp, Zea mays
agcttctagaaactaccacctcattatcttctataagaggaacgatattctcccctccggccctcacaatagaaatatcacgaaagtatctgcctttcatcacttcgatctgcccttgcttaatagatgactttccaaaaacaacatggctaggcctccgcggtcgatcttcaacttcatcattcccgctctctacatcgaaactctcgctttcgctagaattctcagacaacccagccaacatctcattggtgattttttctatattcgccttctccatagcttcgtaaaaaccagtcagtgatcttcttctcctcagccatttagacgatggttgcacagatgccaaaactcataagttaatcaagctcaagatagcaaagacactcaaaatggcaagcacagcgcaaccagctagatagcatgaaaaatactcacgacacaggctcctatatatatgttcagaaccccacatat

SEQ ID NO: 16856 - DNA, 449 bp, Zea mays
  unsure (1)..(449): unsure at all n locations
agcttgaatntaaatgtgaattcaaattgatattgtaaataacgaaaaataagacaagaaaaaggaaaaggttaaaacgttgcttgggccggctcaacctcagttcggcccatctccccatttcacttcgcgcgcgcagcagcccaacttcaattcttggcgccgactacccggccccacagggcagccgctgagcctttcccccttgcaccgcttccgtccacgagttgagtcactatggggtgggacacattcgtcagccttccatctctggtgcgcgctctggtaatgcgttgggtcactgaccggtggagccacgccgtaagtcaccgcgccctatggatcttcttccccgattcctcgcggcggtaacgacccgcccggactacctgccgatcttcgcgccagctgggttccgtaaccctcctcctcctctccctgcactcgaa

SEQ ID NO: 16857 - DNA, 477 bp, Zea mays
  unsure (1)..(477): unsure at all n locations
tgcgcatgcnatcttatgcggatgacgaggcgctctttgtttatttctcagaacatctcattgaagagtacagctggtcttcaacagtctgcggggggatccacggaagcttaatcttgaaaagcgtgtctttggagtaccagcaagaaaattgcttgggtttattgtcaaccaccggggaattgaggctaatccagagaagatcgaggctatcatgacaatggatgcacctctatcgcataacaaagtgcaaagacttactggatgcatggcagctgtgacggaacctcccaagtaattacgcccacctacagttgttcttgtccaacggacctcagacaaccctcgtggtgcccctgaaccacttgacaagttcggtatctgctttcttacctatccaggagcgtctcacccgtcttgcagatattacagaacatccgagatatagagatgcggaagcgattacataaacttaca

SEQ ID NO: 16858 - DNA, 431 bp, Zea mays
agcttgctctcattccgacatgttatgtaatttatttaaatggatatatggttttggtactacattatttgcaatgcgtcaactctaatttatgatctaataacttatcttgaagaggaagacgaagacatggtatcagttttttatttatgagcaaatcaatttgattgttgtgctcattgagtcaacactgggactaaaatatattatgttctcttcatttataggatgaatctgagacaaccgatgtgaattaagcttgcaagcttaccgctttttggaatgtatattattgtggctttgtgagctatattgtaatgttgttgatcgtagctctttgtgacattgcgacttgagagtagtgtgctactgttaatgacattatggcttgcgaacagtggtctattgtttgtgacatagtgagctgctct

SEQ ID NO: 16859 - DNA, 450 bp, Zea mays
  unsure (1)..(450): unsure at all n locations
atccttaagtcacctgcgggcatgcaagcttgacccggtttcggtggtcaccttcttattctgctttgggtggttttgccaggggattcaatgtcttcccgcttgctgaccgggtttccgcttcacggttcttccaggatgttgggtttcacatctacaattctaaatgcattgntcgtccggaattcaaagctttcttcaacctgtggaactctggtggaccaaattggaattatgaattcagattattccttcaagaggagaatgccaactggtggtttgttaagggcaggaaaaaatgtcgttcgctgatattgttaggcgtccgccgttgacgggtgcgaacgctgtcccaattcatcgtcataatctaccctttcgcttcgctggaaatttgaatgcgccgaggatttctgtcttcaatagatngggatcctcctcangagctcg

SEQ ID NO: 16860 - DNA, 473 bp, Zea mays
  unsure (1)..(473): unsure at all n locations
agcttcatcccatttgaactctctacctttctctagtagagaggcaagaggtttcactaactcggaaaaaccttcaataaatcttctatagtatccagccaatccaagaaaacttctgatcttggacgcatcctttggttgcttccaatctagtatctcacttatctatcctgngtccactttaattccaccatcgataacgatatgccctaagaaagcaacttccttaagccaaaaatcacacttcgagaacttcgcatatagttggatgtcacgaagcatttgtaagactagccttagatgatattcatgtgtgtcttcattcggagagtatatcagtatgtcgtcaatgaatacgaccacaaactgatccagatattccataaatactntattcatcaagttcataaagtatgctggtgcattagtcagtccaaacgacatgaccaagaattcatataatccatatattg

SEQ ID NO: 16861 - DNA, 450 bp, Zea mays
  unsure (1)..(450): unsure at all n locations
agctnnttgcatcangttccaagccttggctcctcacagcccacacaaaaatattcatccttgtgatcgcttcgaggataagctggtgaaggtggatttcaaatatcttcagcacctccacaacaaaacggctcaggggaaatcgtagtccagctttcaagaagcttcgaaatattacgacttcatctttctcaggagttgggaaagtcttctctccttcgtcggcccttacaacagacaaatcccggaaatatcttcccctcatgttgacaagatgattttctttaatacttgatttgccgaaaagcgcatggctnggccgccaagggcgatcttcggagtcttcaccaccactatccgcatcataactgtcgctatcaccagtgtcttcagataaaccttccaaaatttctttagtgatcttttctgtattggtcttcgacatagatc

SEQ ID NO: 16862 - DNA, 480 bp, Zea mays
  unsure (1)..(480): unsure at all n locations
agcttctaaagggagaacacattntaggattaacaaatgttcattttgagaaagacaggatttgtagcgcatgccaagcaggaaagcaagttggtgtccatcatccacacaagaacatcatgacgactgacaggccactggagctcctacacatggatctattcggcccgattgcttacataagcatcggcgggagtaagtactgtctagtaattgtggatgattattctcgcttcacttgggtgttctttttgcaggaaaaatctcatacccaagagaccttaaagggattcttgagaagggctcaaaacgagttcggcttaaggatcaagaaaattagaagcgacaacgggacggagttcaagaactcacaaattgaaggcttccttgaggaggagggcatcaagcatgagttctcttctccctacaccccacaacanaatggtgtagtggagaggaagaatagaactctattggaca

SEQ ID NO: 16863 - DNA, 380 bp, Zea mays
  unsure (1)..(380): unsure at all n locations
gcatgcaagctcggccgacgacttgcatacacgcaatagttctattttttgtataattggtggactacacacgagagtactcgaataaaggagcatggatcattacttctacacgtgcagcgcagaagataaagagcgtgccgtagtacaggaagaagttgcacatgatcatgtaccagcagccacaacatcgttccccataggccttaagtacggtgtaggataacatcatagacacaacaacaatggctgtataggatccacatatagagtaataaaaaagctcggggacggtgactaacaccgcacgaacgatgagagatggcgataggtntaagcgcccacaatactaacgagagagacgacgatcctctgacaca

SEQ ID NO: 16864 - DNA, 477 bp, Zea mays
  unsure (1)..(477): unsure at all n locations
agctcgccagtacttgtcaaaacaacaacatttactatcacatcaactgcagaccataccagtgacttggcctcttgcgtgctggggactggatatgattggacctttcaagaaggctcaaggaggatacactcatgtactggtagcaatcgacaaattcactaaatggatagaattcaaacccattgcctctttgacctcaactaaggccgcggaattcatacaagacataatattcagatttgggataccaaacagcatcataactgacctaggatccaacttcacaagttcagagttcttcgacttctgcgagcaaaaaaacattcagatcaaatatgcttctatagcacatccaagagccaacgggcaggttgagcgagccaacgggatgatactggaggcactcaagaaataggtcttcgataagaatgaaatgtccgcangaaaatggataaggaattgtcctatgtcgtc

SEQ ID NO: 16865 - DNA, 400 bp, Zea mays
  unsure (1)..(400): unsure at all n locations
agctnggctctatgcggccaatcctcagctctgcttgtcacaccggactgtccggtacgctaggctggtccgcgtgaaaaggccgctatcgggactcgacgacggcgtatggctataattcatcggaccgtccggtggtgcaccggactgtccggtgagtcatccgcggcgaactcgtcgccctcgggaaaagcaaaggggcgacgtggctataattcaccgaactgtctggtggtgcaccggactgtccggtgagccaacggtcggccgcgcaatcttcacgcgacacgtggactgctccaacggtcggctggtgcgccaatcagcccagaggagcaacggtcagatatgccaaatttggaaggagatcaagcaccggaccgtctacaggacctgtccg

SEQ ID NO: 16866 - DNA, 422 bp, Zea mays
ccactacactcaccaaccttatcaaaacaagtgacactctcttccttagctacagagcctaactttggtccgctagtttccctcttgaactgactgaccatcatgcccaactagggctcactacacgacacctagctcaagactgattgaaggtatgtgttttcttcctcaatcccagtcttgtcgtgtctacagggctcaagaggagactacaaaccctcatagagtgcacactacacatgtttagatgcagtcactaagctaaccttctcaaccaaggttatcctagaatatccctctactagctcagtctgcaagccagaacaagtctgaaacgcacccaacaagctagacatagactaaagctcttcacactcatctagcagagtggcgtacttggtttgaaagtagcaatgcaacat

SEQ ID NO: 16867 - DNA, 447 bp, Zea mays
  unsure (1)..(447): unsure at all n locations
agcttctatagggagaacatgtgatatgtcttacccatgttcatttcgaaaaagatacaccttgtgcagcttgtcaagcagggaaacaggtgggatgagcgcatcacaagcatgaatgcgatgaccacttccagacccccggagctgctgcatatggatctcttcggacccgtagcctatctaagcatagggggaagtcagtatggtctaggtattggagatgacttttcccgcttcacttgggtgttctttntgcaagataagtatgaaacccacgggaccctcatgcgcttccataggagggctcaaaatgagtttgagcttcaagagaataagataaggagcgacgacggatccgaatatcacaccctttaagtggatgatttccttggagaacaacggatctaacaccagttctccgctcactacacaccacagcagaatggt

SEQ ID NO: 16868 - DNA, 475 bp, Zea mays
agcttccactgcacgtcgatgctacacagatctcgtatgtcagggcgcgagaagattgctccagcagcaaacattaggagctccaagtactacatccattgtgttcctgggcccacatgtcggggctcagtacccttgtacgtgccccccttgagctataaaagggagggcacacagcgttacaaggaggctcgctcagaccaaactcagactctcagctctcaatcttcgacagcaatccaaaacacagtggagtagggtattacgctccggcggcctgaaccactctaaaccctcgcatgttcatgtgctcaacgatcgcttacacagacaggcaaaacgcttaagccccttcctcatcttacgatttatggcgggtgcactccgccacccggtcgaagaattccctctccgacagatatgctcgctatcttgtgacctcaacacactatggacggatgcgaagacatatcat

SEQ ID NO: 16869 - DNA, 422 bp, Zea mays
  unsure (1)..(422): unsure at all n locations
tatgaaacttgagcatgtgaaatttatacatgggccatgattgatcatatacctatgcctcataaaagttctagccccacattatatagttccatatgatgctaacataacacccattttataattacaagagccagtgaacaattaggattaaacacaatcatgcatgtttcatggaatgcttgagttacaccttacaaccaattagaggttaaatggttatgccatggcggactaaatctaaatattagtagtgcttcatcgtagttttgcgtgatgtcggacatgtgtgccgaagtgcttactttggtgaatgcatttgtaattgtgtggcattctnctcacgagagacttgataaaaaaagagtaagtcacttgttggcctcattgaatattgtaatgtaacatacggttaagtgtta

SEQ ID NO: 16870 - DNA, 341 bp, Zea mays
taccggcttcgggattggagcaagacttctctttaggactgaacgaaaggcgtggcgaaaaatggagtgagatccatcttcccgcacctccagaactacccactagatctagctccaatgttcttgaccagatcttaccaggactcatgtgaagtcctcactcgaagtctggagaaccaccgcccacgcggtggatagccccatgacaggatgggagatattctgagacttgaaccgcgctcgttcgctgggtccatcaatcctctcgatgcagatgacttggcttcgcacaatcatgaggaagctggaagccatcgcttgttctgagaatcagcgtattc

SEQ ID NO: 16871 - DNA, 189 bp, Zea mays
  unsure (1)..(189): unsure at all n locations
tgcaggataagtctgaaacccaagtaccctcaagcgcttcctcaggagagctcaatatgagtttgagctctatgtgaagaagataangagcgacaacggttccgagttcaagaaccttcaatggaggagttccttgaggaggaanggatcaagcactagttctccgctccctacacaccacagcataat

SEQ ID NO: 16872 - DNA, 333 bp, Zea mays
agcttgacaatgaggaaatggcgctcgttatttatagcttccgccagatcctcaagcataggagagggaaagactaccagtcccgctccaagataagttgctacaagtgtggtaagcctggtcactttattgctaaatgtccattatcaagtgacagtgacagggataacgacaagataggccagatgagagataagaataggttctacaaaaagaagggcggcgatgcgcatgtttgtccggaatgggattccgacgaaagttcaagcgacttctccgacgactaggactccgccaacatcgtcgtcaccaagggactcctcttacccaacg

SEQ ID NO: 16873 - DNA, 472 bp, Zea mays
  unsure (1)..(472): unsure at all n locations
agctntgtcgtcagcctcatagaagtctgtcttccccatcactggaagataaagcttcgaaccaagcaacaaaagactgaagaaagaagcccaatataggatcaacatgttggtgtccaagggtcctacattaaatccaagtggtcccatatatcaatcactttctttcaagaaagccttcggctcaaagattacccaccaagagatgtttaggtaatatcatgtgtcctaaaaggctccatagtccataatgtattggtcgataaaggaagtgcagcatatatcatctatacaaaagccttcaaacaaatgccagaaccagaagataagattcaagaatcagatacccactctgtggctttagaggaacacatctggctcttagaagattacctatcaccttcgactatattgataatgctagaatagaaaaagttgtgtttgaaacattatatggagctccatataatgc

SEQ ID NO: 16874 - DNA, 474 bp, Zea mays
  unsure (1)..(474): unsure at all n locations
agcttcgacaggcaattggagtcttggtgatatctatgtttagatcctctcctttaaaatttaaagctctaaaaaatntacaaaaaatcgaaaagactgtttagatcttcttctttaaattatcaagttctaaaaaattaaagtactttcgctcattttttaatctaaagctctaatataagatgggctgtttagaactaactctaaactacttgcttgagactntgactatgaaatttaaaggtctgaagtttaaagaaacagatctaaacaggcccccaaaagtacaaaactgcaacaggccccgtgtaataatgatctgagtccatagtctataaaaactgcgaagacacagctgctgatgagaagcgcangtttagcatagtactgtacttctgaattctaatacaatgcggcaccatcaaggtacaatgtactnttcccattctaaaatatactgtantttgctttggt

SEQ ID NO: 16875 - DNA, 470 bp, Zea mays
  unsure (1)..(470): unsure at all n locations
agcttgtgaagattcttcatcccaacatgtgctagttggcgatgccagagccagcccatgttagtcttagcaattaagcaagtgtcgagttcagctctattgaaatcaactaagtatagctgaccctctaacactccgttaaatgctactgaatcatcacttcttctaaagatagtgtcggggaccataattaggggtaccctcaagacgcctaattctcagctggtaacccccattagcaaaagctgcagaggcctgatgggtgcgattaagtcagggatcagtccatacgagtgactcgatcacgcttcacccgagcctagcctcggactcgggcagccgacctcgagggacttccgtctcgcccgaggcccccctttntacggcggacacatctccggctcgcccgaggccttggcttcgctaagaagcaaccctgactaaatcgccgcaccaactgaccgagttgc

SEQ ID NO: 16876 - DNA, 470 bp, Zea mays
  unsure (1)..(470): unsure at all n locations
agcttgcagccttgcacaagtcacatatactaatatgtgcgcctctaaactctgaatatttaaagatagttggtgtgtagatacaacaggaaataaaaccatactgctctaaactcagaggcagcaactgtcctcaaacactaatataatccatcgagcaagacatagcagataacgactgcagatatctggctgcaaaaatccaaactaagagacacagtggattatcacagcatgcatgcaaccacaggagctgcagctgacgaataagtgcagccgatcagctcaagcccaactntgtgtatcctttgccttactgattgaatctaactgatgcanacttaatcattcctggagaacattaacttgtgctgttgtgcactacggaaagggataagcatgaattgagcgcacaaatctagaattcagcaagaggaactcggagtactagtacctggtcctgatgggat

SEQ ID NO: 16877 - DNA, 381 bp, Zea mays
  unsure (1)..(381): unsure at all n locations
nagcttgccacctgggtntatctcanactatcttatgctatcattgccatcggaacctagtgctaatagataaagtcgactccagcaaattagcggtatgatcatgtaaaacattgtactatactatagactgtattggtcatagagttcgtttgaaatatgagatgagagaagtgatatgatggatgagcaatctgactcatccttcacaatgtgtgatacctgatatgcaagcgctaggattttaggattcagagccatgcgtgcctcctgtcacagtcagtcagacggtgcctagtgcgtgacgacaagacgtgagttcaatgcagccaatgattgaagtctggacatcagcccatcatatacactcatcgaattcac

SEQ ID NO: 16878 - DNA, 467 bp, Zea mays
  unsure (1)..(467): unsure at all n locations
agcttataacaggagaatagaagcaagagctctaccatatgttataatagaaggggagttatacaagcgcggngtctgttccccattactcaagtgcttatccagatccgaaggtatagagttaatgaaggacatacatgcaggtctgtgtggatctcacattggatctaggcccttgcttgggaaagtttttcgccaaggattttattggccaaaggcagcttcggatgcagcggatttagttcaaaagtgcgaaggttgtcagaaatgtgcaagagatcaaaaacaacctttgtctttaactcaattaatacaacccacttggccattgcaaagatggngtctggatttgctaggtccattaccaccagcacaggggaacttaagatacgtggtggtggcagtggaatatttttccaaatggattgaggcgaagcccttagccacaataacttcatttactattc

SEQ ID NO: 16879 - DNA, 118 bp, Zea mays
tttatggcaaatgagcctctctgagggtgaaggtatacttatgcaatgaagggggggtctttacctccaatctcgattcctctttaaaatccgcccatatttgccctaaacccatttt

SEQ ID NO: 16880 - DNA, 464 bp, Zea mays
  unsure (1)..(464): unsure at all n locations
agctntagtgattagagagagtgatttgttgtgttcatttgagctcttgcgcttggatcgcttcttttctttctcattctttcttgcgatcaactcaattgtaaccaaggcaagagacaccaattgtgtggtggtccttgcagggaagtttggttcccggctgattgagaagagaagctcactctgtccgagggaccgtttgagagagggaaagacttgaaagagacccggtctttgtgaccacctcaacggtgagtaggtttgcaagaaccgaacctcggtaaaacaaatccttgtgtctcacttcttattcgcttacgatttgtttgtgcgccctctctcggactcgcatttatttctaacgctaacccggcttgtagttgtgcttaagttgttaaactttagattcgccctattcacccnctctctatgcgactgtcagacaccctctgtaatntttggac

SEQ ID NO: 16881 - DNA, 357 bp, Zea mays
aaaaggctctaaaaactcttgtaataactggtgtaaagaatgatgtaattaaattttacttcgtgaactctgtctataccttgtaatatattcttacctttccatcaatgtataaagtgctttggtgtgaacgaaattagcatttttgagccgaaggcgaaaaacaccttcccttcttttcgtacacaacaaagcataaaactgcttcttttccttttttccaaagccttctctttagagccgaagcaactgtctatgttatgatgatgatgatcctatgtatgtctaaatgaatgttcatgaatgcaaatgtatgatgtaatgtatcgtgcaagtagatgtccaaagtcacatatg

SEQ ID NO: 16882 - DNA, 470 bp, Zea mays
agcttatgaagattcttcatcccaacatgggcaagtcggcggtgccagagccaacccatgttagtcttagcaattaagcatgtgtcgagttcagctctatcaaaatctactaagtatagctgaccctctaacacacccttaaatgctattgaatcatcacttcttctaaagacagtgacacctatatcagtgaaaagacagttgtaacccattgtgcataattgagatacagaaagcaaattgtaatctaatgaatctacaagaaaaacattggaaatagaatggtcaggagaatatagcaatttaccaagacctttgaccaaaccttaatttccatccccgaatgtgatagctcgttggagatcttggtttttctcgtaagaggagaacatcttcttctccccaatcatgtggtttgtgcatccgctgtcgagtatccaacttgagcctccggatgcataaacctacaa

SEQ ID NO: 16883 - DNA, 472 bp, Zea mays
  unsure (1)..(472): unsure at all n locations
agcttcgtattcagcaatattatttgtacttctgaaatcaagtctcattgcgtagcatgttctgactttggaaggtgcaattaaaacggcagctgcacctgccccaaaggttccccaggaaccatcgcataatactgtccaagcttcggcatctttacttgcttcttcctcctgagcccctggcgtctagtcagcgatgaaatctgctagcgcctatgactgaatcgaagatctatgcacataatcaatgctgaactcattgagttccgcagcccactttccaatccttccagtagcttctctgtttctcataatattcttcaaaggctgtgatgaaggaacaattatatggtatgcttggaaataatgtcgaagcttcctggaggccattaaaacagcatacagcaccttctccaattctgtatagtttntctttgataaactgagaacttcagagacatagtatactgga

SEQ ID NO: 16884 - DNA, 407 bp, Zea mays
  unsure (1)..(407): unsure at all n locations
agctnggtgccaatggagaagcaaaaatccttgaagtcttggctgtcaaactgcttgtcgttgtcaactgttagctcggacggtactccgaagcgacaaacaatgttttgccaaaagaatttttgggcagtctttgatgttattgtggaaacagcccttgcctcgatccatttggtgaagtattcgacagcgacgaaggcgaacttaaggttcccctgagccgtgggcaggggcccgacgatgtccaggccccagcgctggagaggccatgtgtgggcgatcagctttgtaaactgtgaggggctgcctgatcgaggagaaaacttctggcaggcttcgcaggcccttgtgacctgatttgcggcgcagatcattgcgggccagtagaaaccttggcggatcacctt

SEQ ID NO: 16885 - DNA, 473 bp, Zea mays
ccttagagtcacctgacgcatgcagcgtgttcgaggtgctctataggaatgatataactttctttgcccaaacaacgtatacgaaggtgaatttggaagcttcggctccacgattctgatactaagctcgagattagttggatgatagaggattttgacaaatcacacgaagggaaagcctgaatgctctgctaacacgatttaaggaaaattatgatgatgcccttagtgtgtttcgtagtttgtatacatcgaactgtggatatgattgtaatgttatacgaagatgtacactgatccaccactataaatagaggcatagtgtcatgcacggggggctctcgagaacaaaattgctccgcctccgaagatacgccgcctagacaccttctaattgctatgacaactctatgaaggtataattgtaattatttgtaatcgcgaaggaataataaaaggagtataccaatagt

SEQ ID NO: 16886 - DNA, 395 bp, Zea mays
agcttcctgcactgataacccgagagcgccagttctatacttgtatattaatggcgcaccggacatcgcaccgtactgtccggtgtgcatcggacagggactgatcactgtccggcgtgccatgagtctaacggctatctgtcacactatccgctggaaacgactcgtggagcaccgattgggcaccgatggcgcaccggtggcgcaccggactgtcccgcgttaccatactcatagagatgcctgtaacctcttgttggtgtgcaacatccaatccgagtcttttagtgcattctctaccctgtatgcgtcattagacgaatcaaaagagtatgttgactatcttgactgctcgagatcgattgttaccctctatgaatgtttcaaggatggag

SEQ ID NO: 16887 - DNA, 436 bp, Zea mays
  unsure (1)..(436): unsure at all n locations
agcttgtgaacaatacanattcagaagggagaaagcatcttcagcagatcagccgaagcccatgctcttatgtgaggatatagcagagtagaaggtgctgttgggctctcagttatccgaagaacaagagaaaaccttgataaggtttttgttcaacaacaaagatgtttttgcatggtcagccaatgatctctgcggagttaatagggatgttattgagcattcgctcaatgtcgatccatccttcagacccagaaagcaaaggcttcggaaaatgtcagatgataaggccgaaggtgctcgcaacgaagtcaaaagactcctcagtgcaggagttatcagagaagtaaagtacccagaatggctagctaatactgttatggtaaanaagccaatggcaagtggcgaatgtgtatcgattntacagatcttaaca

SEQ ID NO: 16888 - DNA, 301 bp, Zea mays
  unsure (1)..(301): unsure at all n locations
agcttgcttcgtcgtattctacttgagatatgtcaaattttttctagtgacaaagctcctgtaatacttaatagtatactgaaaacaaatagatagccgtgtttttgaggaccttctaaagatgaaggccttcaacagtagccccttgcagtattagattgttcctttgtaacaaattcagactgtgacatgaacgaacgcctttagtcgaaggttcgaanaaacaccttcctttcgtagaatatcaaaaccttatgtattatgcggcccatcgtgcagtggtgctttgcatatatatatg

SEQ ID NO: 16889 - DNA, 443 bp, Zea mays
cacgcatgtcagctacttcttccataacttttcttctatcatgactcacaatataatcgtatatggtggaagttccttcggagacagcagtatcaatatcttcaaccaaactacgctctgacatttgcatttcttcagatgaccttgcaatatttgcttcttctgctttcaaaggtattaccttggttggttctgaaagcccagttccaacttcagtctgttgctgtggagcctcaccagctggatacttcagcaggcgcctcagaagtctcaccagtcttctatgaggttgcgtttggaagtttaattgcttccaaaacattcaatacgttaaccattctctttcttttaggggtcattgttggcacctctttaatttttgatacttcaatatctgctgaaggacataacatttctgatagtattgctctctcagatgatgc

SEQ ID NO: 16890 - DNA, 477 bp, Zea mays
  unsure (1)..(477): unsure at all n locations
agcttcttcaccatgcgtccgtggatatcttgaggaggttgagcaatgcgtcttctccttagttgctttgctttcttggtcctttcttttgatcctgcagcttgatgctcattcaaaaatttgctttcttttgagcaacaggggttagcacatggtgatatattatctaaatgcgcacatgtgcaagaatgaggttcacatgaatttaagtttgcagttacaacctcatgagcaacatcaagcatgatatggtcatcaactaattcattatgagaataagatagcatatcatatttttcacttagagcaagtttttctaaatttatcatttctacttgactcttaagcatagaattctcagttntaagttgagcaacatcagataatacatcatgattatttctttgctcaaataaaacagattcataccgttggaccaaattatcatgagagcactntagctccctcatgtctttg

SEQ ID NO: 16891 - DNA, 365 bp, Zea mays
taccgatcatccgaaaccacgctctctgagctcgttgatgagaaacgatatgaattatccgcgcgctaggtggccccattatgcaacagatgcccgtgccctgacgagtcaacctacctggacactgtgggccactgttcactgagagcgggtgggctgttacacggagtggaagaccttgacgattcacctttccacctgcgacactatataaacagacgggttggtgtgaaggtaccacaatattcattgctattgcactgttttgctgccaaaaatttaaccagagccgaagcttgatcatcgtgttcgaacgaagcgccgctcttgattctgcttcatcacaagacgaagagcttcagaaa

SEQ ID NO: 16892 - DNA, 432 bp, Zea mays
  unsure (1)..(432): unsure at all n locations
agcttgtgcaaagtccacttgaactaatcttctgagaaacccgacctcgttgcaacatgacaccatgaggtccaacccaacaagcgttggatgaattcagaattatttcagagcatatcagtacaagagacctggttcaagagttgttggctttcaaggtttttcctagtttaaaagaatgggaaatgccgaagctagagggggagaataaaagaaggagaacttgtgcgattaccttactatttcaagtttaagaaatactttaaaacaccttgccaagagtggctggatacaattgaagtaatgtgcaatgaaatactcggcaattactccaaataagaagatcagttgatgactgcngccttcggcacccgtccgaagcgaagatagaatcgagtgctggacgccttgagttttgaataccctgactac

SEQ ID NO: 16893 - DNA, 456 bp, Zea mays
  unsure (1)..(456): unsure at all n locations
agcttgaccggaacannaggagatcacgacttaggaaaagacgatcacgaagctatgtgcagatagctttcgctacggcagaaaagggaaccgactaagatgaaagccaattagacctcgaagaattactatagagttattgctanatgcaatgggtattaatgtaattttgcatgggctgcgacccgtgcctataaatatgtgaacagtattcccgtactgttcacgctgacttggcactttgcttttgcatcacacctgtattctcatcccttcaagccgaaggtatatttgtaatttaccattatttacatgagtaagataagtagaanataaattaataataatgtttacagaggttgtgttatttcttatatntctgtgttaaatactctntatcttttgttatgttcatgaaggttngtccttcatgaccttcgtncgaagtccattata

SEQ ID NO: 16894 - DNA, 174 bp, Zea mays
atcctcagagcttacctgcacgcatgcaatcttattacacacgagtgttacctatggtatcctcgaactgcttctctaacgtgactgcaattgtcatacaggacgttatctagacgtggccaaggtcttgtcctcagtgtctgactgcgttctgtgagggtactcttgctgcag

SEQ ID NO: 16895 - DNA, 439 bp, Zea mays
  unsure (1)..(439): unsure at all n locations
agctntcttgcgcgtagctttggaactggttcaaccttcngcctgaccatgcttttcatattgtgtacaactatattctgagtccgaaagttcctgttcatatattacactcggaaaacattgctagtcatggttttgaggactttcggaagacgaagacccgcaacaatgtccttctaaactctctagtgacttataaagctagcacgagacacctaagtgtgtggtggtccttgcggcgtcttagtgacccttgagattaagaagaagcactgaaccagtctaagtgatcgattgagagatgaanagggttgataaagaccaggccttcttggtctcctcaacggggagtaggttcattggaatcgaacctcgagaaataaatcgttgtgttcatttgtgttgatcattaccttgatttgattcttcctctccctct

SEQ ID NO: 16896 - DNA, 476 bp, Zea mays
  unsure (1)..(476): unsure at all n locations
agcttggtgccgatggataaacaaaaatccttgaaatcttggttgtcaaactgcttgccgttgtcgactgttagttcggacggcactccgaagcggcaaacaatgttttgccagaaaaatttctgggcagtctttgacgttattgtagaaacagccctcgcctcgatccatttggtgaagtattcgacggcgacgaaggcgaacttaaggttcccctgagcggtgggcaggggcccgacgatgtccaggccccagcgctggagaggccatgtatgggcgatcagctttgtatactgcgaggggctgcctgaccgaggagaaaatttctggcaggcttcgcatgaccttgagacccggtttgcggcgcagatcattgcgggccagtaaaaaccctggcggatcactttggcggccaaggcccttggcccagcgtgtgagccgcacgtgccactgtggacttcacgtangatctgcat

SEQ ID NO: 16897 - DNA, 400 bp, Zea mays
ccatttcttggcgtagcatgatgtcagaagtcttcactgtaagacaatgacatgaagccttgcgacttagtgcatttgccaccacattgtcctatcctgggtgatagtgaatttctaattcataatccttaatcagcttgagccatctcctcatgctcatatttaatcctaactcgggaaatatgtacgtcaaacttttatgaactgtatatatatgacagatattgcctagcaaataatgaacccatatcttaagggcatgaactacattgagctactctatagcatgacgtagatacatgttctaacgacggagcaactgtctggaagcatatgctataactcacgccttctgcttaaaacactccgagccactgcctgtgcatacaaacacatctaa

SEQ ID NO: 16898 - DNA, 438 bp, Zea mays
agcttgccttcgcctcagtataccacccgcattccaacggagttgtggaacgcgccaatgacaaaattatcacagctgctaagacgatgctccttgatgacaaaagggcaagtgggccgatttgttacctgaagcggtctgggcattaaacacgactgagtgcatggcgactggattcacccctttccgccttctgtatggatcgaaggctatgaccccacaagatataaaacatgggtccccacagacagtcccgtcagctgttcccgacgtggacgagcccacttcaaaggacctgatcgacggacaccgggtcttcgcactacaggctctaaacaaataccaggcccaaacaaaagcatggcgtgaccacgctgtcatcccgagggaatttagcgaaggagacctcgcactcttccggaccgctcggacagagtc

SEQ ID NO: 16899 - DNA, 391 bp, Zea mays
  unsure (1)..(391): unsure at all n locations
agctngaanatctagcgagagctagtgagcaagaactaatatgttgagaaaaataatgcaagtggcagaaacagtgtatcaaatgcaaccggtgtgagttcatatttatactcctagcacgctgcaacttggagggccccgtctgtcattgattgttgctctagcaaagggaaggtgttnttttggaccttcggcttaaggccttcgttcacatcgcagtctgaattcattattataacaaattaatactgcgaggggctactgttgggggccttcgtcttccgaaggtcctcataaacatgattaacaatgtttcccaagcgtaatgtatgaacatgaatcttcagactcaggatgaagttgtacataatatggaaaagcagggtcggaa

SEQ ID NO: 16900 - DNA, 462 bp, Zea mays
  unsure (1)..(462): unsure at all n locations
agctnnttgcacggagttcttcttttttttaatagcgcggactgcttagctattctgttggagctgctctaagagcaacttcaaaagactaggtataaatcctagctaaatttgaagtattgagagctgtaaaaaaatagataagttcataatatgtgagtgtatccaacaaactcttcaaatatagatgatgacctataaaactctcaactggccaactcatacggttctttctttggcgcatgaattttcatctgctgtagttgacggacatggcgcatgatcgttctgaatcggtctgacacccagacacaacatttggtgccaatttcaagcacataatacagacacaaagttgttcggtccacttcaacaaactagaaaagaatgtggattatgttgtcattccacttcaacngactagacaatctgngttcaagaagccataacaacacatctgtc

SEQ ID NO: 16901 - DNA, 478 bp, Zea mays
  unsure (1)..(478): unsure at all n locations
agcttcatgcaactgctgccagaaatgagatgtgaactgagttcctctgtctgacactatcttctttggcacaccatgaagacaaacgatccgagacatatacaattctgccaatactgcactgctgtagttggtcttgacaggtatgaagtgggctgacttggtcaagcggtccactactacccagatggaatcgtagccggctcgagtgcaaggcaatccgactatgaaatccataccaatttcatcccatttccactgagggatctgcaacggttgcaacaatccagcaggtctctggtgctctgccttaattcttcggcaactatcgcacatagccacatgctcagcgatttccctcttcattccgtaccaccagaatttcttcttcagatcctgatacatcttctcactgccagggtgaatcgaataagctgtctcatgagcttncttgagaatcaactcccgaatggactgg

SEQ ID NO: 16902 - DNA, 452 bp, Zea mays
  unsure (1)..(452): unsure at all n locations
agcttggccaaaacaattanataaaaccctaaacaagcctctcaagtgggatttcattagggaattctgaaattcagaattctgaatttcagaccttgagccaaagatcaagcgtgttcaccttgatccctaactcaaatcctaatggccccattgacaaaaacgtgcataactaacctctctgtcttgtgccagaagatggcatctggacgcgtgccttggacacgtcaaaccagagatcttctccctgtgtgcggcagtgagacaaaccagatttcttccctctctatctcttaatctagtcagccaaacctgctagcctccacacacaaacgacaaaggaacctgagaggaagagatctctcaacgggatcatggccataatctcaaagatttggggccaatctgcgctcgaactcaacctctctctgcgctgcctcgtgctcgacgct

SEQ ID NO: 16903 - DNA, 376 bp, Zea mays
agcttcctctgaacacaatgatggattcctatctattcagaggcggacccagcacctaggcacctcaggcggtggcctgcgctgcctctcaggttctgattaatataagcacgcatatgtgccttgaaacaagcgagcaacgtttcatgtgcactgcgaaagtataagcgcaaaggatcacattgtaatctgacctacgctgtctctaaatgctgggtccgccactgtatctaaccccgtataactcactgttggcagtcttttaaaagtgcaccctacaagaaacaatggtgtgggacatgacaaggcacttcattagggcctaaaaggcactgaaactgaaaaaacgtacaagtacgtattaagcctgttggac

SEQ ID NO: 16904 - DNA, 167 bp, Zea mays
  unsure (1)..(167): unsure at all n locations
agcttcagtctacgagtgatcaaagcaggatgttacaataagaagtcattttcttcaaatcacctgcaagctggacctatgatctttgggctgattacctctaaattaacccaaagatcggnggcttgtgggggatagatatcccccgggtccactaaaagagtaaa

SEQ ID NO: 16905 - DNA, 463 bp, Zea mays
agcttcacatctctggactaactcggctgcattcacttttgctgtcggccagtagaaaccaggcctgaagaccttctcaactagagttctggatgttgcgtgtattccgcacagtccgtcgtgaatctcatctagtggtttcctactagtaactggggaaatgcatttcatgaggactcctgttgcacccttctaaacagtgagtcccctacgagggtgtagtgggctaactgccttgcaaggcattctgctgcgactttatcatccggttcttcttcattctttatatacctgatgataggccccctccagtcattagagtctgactctagctggctcaaagcattgcactcttctacctgatctgaggaaatgcttgggtgtggcacctcctggacaaaaactccaggtgggaccctgagttcgatggatcctagtttcgacaatgcgtctgctgctgcat

SEQ ID NO: 16906 - DNA, 452 bp, Zea mays
  unsure (1)..(452): unsure at all n locations
aagcttgaatgtgttttcctccaatcatttttgatatgcaagtacacctaatcatacatctcgtggatcagattaaaatattagggccactatatttacatcatatggttcaggtggagcgatacctgggagtattaaaaggttatgtgcgaaatcgcgctcacccagagggttcaatcatggagggatacactacagaagaagtgattgagagctgtatagattacatcagtgacggaacaatgataggtgtgcctgtacctaaacatgagggtaaactatgtgggagagggagaatgggcaagaaaacttttcgtgttgaggattacaagctagtacattgtgctcatggtagtgtactacaacatctcacgatagccgagccttacatagaggaacacctgaatgagcttcgtanagaaaatcagaaccgcacagaggactggatcatg

SEQ ID NO: 16907 - DNA, 425 bp, Zea mays
  unsure (1)..(425): unsure at all n locations
agcttcatgagtggtagcttcggttatcacgtataagcagcttttgctgaagctggttcttcctgcaggaccttcggcgacgaagcatggtcccaacactgcttcttaagtccttttatctcttctacagacatcctatatggccgtttagaaataggagcagtctcaagtaagagatcaataacaaactcaacttccctatctggtggcattcctggtaactcctctggaaagacatccgaaaaatccctaaccacacggatgttgtcaccaacaaactcctcagctataaagaacatcgcacgtttggaagaggtggttactgcaatttgaacttgaaatctttctcctttagaactggtgagttctatggntcctttagcacagtgtataaaatgcatttacctttattaaccacgacatac

SEQ ID NO: 16908 - DNA, 378 bp, Zea mays
  unsure (1)..(378): unsure at all n locations
agataattctttggtgtctaggaggcagtataagaagtcattttcgtctgtgccattgaatactaaggccccctttggatacttcagttctcgggcatagtgattagcttcaaaaatctcttcttcaaataatctctttcccgaagcatgtcgtanaatataatcgagggctttggaggatgcttcgggggcagcagtgccagtttcttcaaccaaaattggttctgctatttttgttacttcggcttccaaggattttaccttggtgggctctgaaggcccagcttcagtttcaaattgttgctttgaagcttcggcaacataagcttcagtatgcacttcggaagtttcaaacaatttcttcggagttatgcttga

SEQ ID NO: 16909 - DNA, 412 bp, Zea mays
agcttgacattgtctccctttgggaagccaatgccttccttaatgcctgtgcgtctcccactataaagcgttctacgagcaaatctaaaattttcattatctaattcatgctcggcaattttagcatctaattttgctatatgatcatttcgctgtttaatcatagccatgtgatcatgaatagcatcaaatggtaatatctctacatctagtgcaaatagtaacatgctcaacggtagatgtagagggttgcaagttttaactcaacaatattagcatgtaaaatatcattttcatctctaagattggaaatggaaatattgcaaacatttaagtctttagccttagtaattaatttttcattctcaatcttaaggctagcaagagaggcatacaaattatcaatcttagc

SEQ ID NO: 16910 - DNA, 413 bp, Zea mays
agcttctgacttgtgggcccgccagggtgtctggtgcacaccggacatctactgttccttgtccggtgtgccggagtgggcgtgcctgccatctgcgcgcgcaaagcgcgcattaaatgcgcggcagagagccgttggcgcggagaagaccgttgctccggagtcgcaccggacagtccagtgcacaccggacagtccggtgaattatagcggactagccgttggagtttcccgaagctggcgagttcctgaggccgacctcccttggcgcaccggacactgtccggtgtacaccggacagtccggtgaattatagcggagtcgcccctggaaattcccgacagtgacgagttcaagttggagtcctctggtgcaccggacactgtccgatggcgcaccggacactgtccggt

SEQ ID NO: 16911 - DNA, 406 bp, Zea mays
  unsure (1)..(406): unsure at all n locations
agcttctttgcncgagtatttttattgggcactctgtaaattctttgccgagtgccangcagtgactcggaaagaaaagcagccgtcacagaaacgggtgaccaagaccgcgcctttgccgagtgtctgccgacctgcactccgcgaaggatccaccaacacggccctttgtcaagatctttgtcgagtgctctagaaggcactcggcaaaacttgcctctttgtcgagtgtcaaggccacaacactcggcaaagaagctatactagtgcccaggtattgcttctctgccgagtgctatgaccctgacactcggcaaagaacctataccggtgatcaggtattgcttctttgccgagtgtgttcctgtgccgagagtcttgctctcggcaaacaccatccttaccg

SEQ ID NO: 16912 - DNA, 397 bp, Zea mays
agctttttgaaagctggattgcgattccccttgagcagcttcgtcgtggaggtgttgaaaatcttcgaagtctatcttcatcaacttactcccgaggcaattataaggctaaatatcttcgtgtgggccgcgagaagccaaggtctgaagcctgacgcaagaagcttctgtaatggtcatgaattattatatgaaacaaagccttggggcaaagaacagtaccataacaactttggctgctacagcttcgtctctcggtccggggcaagctgtcccgtaccaacctttcggaagagatggcccggggattggatgacagaatggttttatgtgaagaatgacttatcagcacgagaagacatcaaaggtataattatgcgtcctatttggcaaagct

SEQ ID NO: 16913 - DNA, 417 bp, Zea mays
agcttcgagctttttgccggtgaccatctctctcttggcgtgttctcccggcatcacttcgagttgttaaactctaatgaaacaccgggctccgataccaattgaaagtcgtctagagggggggtgaataggcgaaacctgaaaattacaaacttcaaacacacactttacccggggttagtgttagaaataattcggagtgcggaagatagtttctcttgctatgagttgctcaatcaatgcagataactttcgggagcaactcaaaacgatgtgagcaagagaactttagagagagtggagaggggagaaacaaatcgagtgaaggtcaacacaaatgaacacggcgatttgtttcccgaggttcggttccaaagaacctagtccccattgaggaggccacaaaggccgggtcta

SEQ ID NO: 16914 - DNA, 407 bp, Zea mays
agctttatcatatggacgtgaaaagtgcctttctattggaccaatcaaggaagaggtctatggtgagcaacctcccggctttgacgacagcgagtatcctaatcatgtctataagctctctaaggcgctttatgggctcaagcaagccccaagagcatggtatgaatgccttagagatttccttattgctaatggcttcaaagtcggtaaagccgatcctactctattcacaaaaactcttgaaaatgatttgtttgtatgccaaatttatgttgatgatatcatatttgggtctactaatgaatctacttgtgaggaatttagtaggatcatgacacagaagttcgagatgtctatgatgggggagttgaagtatttcttaggattccaagtgaagcaactccaag

SEQ ID NO: 16915 - DNA, 412 bp, Zea mays
agctggctaaaatagcctcagggcgaacaactgtccccccggacgtcttctcccgagatctgcatcagccctccgtcaagatcgacgacatgcccgagcctgaggcaccctcggcccagctcgaggtaccctcggcacagtccgaggcgccctcgactcggcccgaggcaccctcggcccagcccgaggtaccctcggcacagtccgaggcaccctcggttcggcccgaggtaccctcggcccccgagggcgagacgctgcacgtcaggggggagcgaagtggggtcacgcctgatcaaagctggcggaccccgtacctgcaatatctccaccgaggagagctaccctctgaccgagccgaagctcggcggctggcgcggcgcgccaagtcgttcgtcttgctgggagatga

SEQ ID NO: 16916 - DNA, 358 bp, Zea mays
agcttcatactcggctgcattggtagaggccgggaatagcaactggagagcattacttgaggtgctcgcctccaggtgcagtgaagagaattcctgctcctgctccctgcagcttcagcgagccatcaaaatacattcgccatacttctgcgggttctggattatccggcacttgttgttctgtccactctgatacgaaatcgaccagtgcttgagttttgatggcagtgcgaggtccgaactcgatatcatgggatcccaactcgcaagcccacttggctattccgccaatggcttccttgttgtgaagaatggtccctattggaaaaccagtaactactatgactttgtgatcgtc

SEQ ID NO: 16917 - DNA, 415 bp, Zea mays
agctttattccagcgcactcactattactaagaataccttcaggcgtatgtctgaaggttcttgcttctgagggcacaggcaccaacggtgcccaatgaaattgtcattgaggccattgtaagtgcaatcaaccctaattgagggttttggtgattaatgacaaaacaaactatgattctaacaagtttgctcctagtgtgtacacagtatttctacagacaggagaagcacagatcctacgataataaaagtataaagcacagcggatttaaaattccacatccaatggcgtgctccaagtgctatgaaacaacggcggtgctaagtttaaaattcttgagtcataggaatcgccgtacaattaagagggatccgcgacggttaagtaagttgtgaaacgagccaagttcaatt

SEQ ID NO: 16918 - DNA, 424 bp, Zea mays
agcttgggaactatgcccgtatccaatctgcctgagccggtactataagcgcttgccaggtgcccccgttcctggtcgaccacgaccaacacccaacataagacttccctagttatttagccaagaccagagccatgatagtcctcatggtagcactgttttcccgggtggtcactccatgttccaattaatatgcaataatcttgtttaaccatcgggttaacaacaataatgtaaacttaccatttggaacattaatatcataaacaggagtgactgcataaagttaagttgtagcaatagcatagctacaaaggtaaagtataattcccaggtttgatcaaggaataaggttggaaaggttatctaaataggtaacccgtcaaattatgcatatatatccaaaagaataaactttattaaa

SEQ ID NO: 16919 - DNA, 439 bp, Zea mays
  unsure (1)..(439): unsure at all n locations
ttaagtcacctgaggcatgaagcttataaaatgagtggcccgcaagaataatttctattatgtggtcggaatatcaagtcctacaaagggccgagttcaaataacaatctcacctgtgtagcttttctattcgtggtccaaatgtctgcactgtgagagactcatgcttcctgcagttgacaatttcttggagatcttctatgcaggtaaccatttgagataatgcactttcttcatccagaggagtatttgctatgcatcgtgcaatatcagcaagttcgacaatctgcaagaattgaaagaaattattattacaacaactccatttgatatctagactctagtactctacaattcaaggtggagtcaaatatccagagtagaagtgttaatacacctgaatttgttntccttacaggcaaacaaagaataatgtgaa

SEQ ID NO: 16920 - DNA, 409 bp, Zea mays
agcttcactacacaattatgggacatctacttaatttatgaataccatcgtcacacacatcgactcgatttgaattaaccacacatgtctatcacatgaatggagcatttcaacaatatcctaaaacaaactacatcatcacacatcttgcattacaaacctacttgtccactcgaaaatatctattcgaagtaatgaacaccaccgtacactatgtgtgatgtgaaattcaataaacgcataaagtgtattggctcgacttatacacatagaggaagtgatgactactccggcatgtcaccacctctctatttaagcaaagacaatttccacctacaacgatcgaacattcatatcgagcacaccttactttaccttgtctcgcatacaaccatattgtggcgtgcac

SEQ ID NO: 16921 - DNA, 416 bp, Zea mays
agcttataattaaactatatttaatgcatgttattattattcgaactattgatgtgacagaaactaaattttagctggatagaacgaaacacctcctaagagcagtcccaaccgaagacactgctttttttttgaaaggaaacggcaaaagacttgcctcttcaatatattagaagagaaatagataacagacttcagaagacggagcaaaagaaaaaaacgaaaagaagaaaaacatacactaactcaatctaacatacactgcaactcccaatttgatctttcaccaattgtgtaacctggatagcagatctttgaagtctctgaaagattctgtcatttctttccaaccatatattccaccaaaaagagatgatgagtccatcgaaaagaagacactgcttatagtttctaac

SEQ ID NO: 16922 - DNA, 406 bp, Zea mays
  unsure (1)..(406): unsure at all n locations
agctngcacatagtctcgatgatgtatgcctgtacataggtgtgctatagnagagcaagctagccgagagaccagttgtacacgccttcacgagtccttccggagcactggatatggcacaagcggtggcagggcgcaaagcttgtgtgtcggctcgcaactatgcctcgacggaaccctggcacatctaatcactccggtctagggacgaaatgaatggaggagaggggagtgacagctngggtttttattggcacgggataaggggaggttgttatggtccccagtttgagcgaatcatggcagtaggtggttacgacgccggtgcttgcgcccgcgtttaaagaaggggttgaccccccatgtccacccattggtgacactagaaccgttgtggaagcagcgc

SEQ ID NO: 16923 - DNA, 426 bp, Zea mays
ggatcttaagcgacgcggctgcagctttatgaactttaactcttttttactgaactgggccttaaagcccttcaaggagcaaactttggaagccgaagctataaaaatatcagatccaattttagttgaagaaactgatactgccatccccgaagcgcctgccagcatgtgtaattacatcattcgacatgcttcggggaaaaaactatctgaagaagaaactcatgaagctaaccattatgcgaaggagctaaaatatccgaagggggcagtaatattcaatgggacgaatgaagatgacttcttatactgcctgcctgacaacaaagagctatctgtctgccgagaaatggccagaagtattggtttcccgaaacttgaatctggataagcgccatgacgaaagaagatctcgcagacagtctt

SEQ ID NO: 16924 - DNA, 410 bp, Zea mays
  unsure (1)..(410): unsure at all n locations
agctnggtgccgatggaaaaacaaaaatccttgatatcttggctgtcaaactgcttgccgttgtcaactgttagctcggacggtactccgaagcggcaaacaatgttctgccaaaagaatttttgggcagtctttgatgtgattgtggaaacggccctcgcttcaatccatttggtgaagtattcgacggctacgaaggcgaacttgaggttcccctgagctgtgggcaggggcccgacgatgtccaggccccagcgctggagaggccatgtatgggcaatcagctttgtatattgcgaggggttgcctgaccgaggagagaacttctggcaggcttcgcaggaccttgtgactcgatttgcggcgcagatcattgcaggccagtaaaatccttgtcggatcacctttgc

SEQ ID NO: 16925 - DNA, 403 bp, Zea mays
catgcaactctcaataatattatcctattatcattatcattactatttcatttaatgcacaaacatattactccagcatgatgcaattcttcttttattatggtattataggttttaattaaacactctcaattatatgagcgctctttttatgatgcatatatggaacataaaatgaggaaatcctctatgtatttcttgtacacaattgtgagtattacaaattctaccccccttaaaaataatctcgtcctcgagatttacgatgatctagggaaaaggtggggaaaatctataccaagctcttcttctcgctcccaatatcttcatcctcaccatggtgactccattgtaccttgcacatcttaatcaccttatttcttgtaactcgggtcaaagtgtc

SEQ ID NO: 16926 - DNA, 404 bp, Zea mays
agcttattgaacagaatcacggaaagtatattttttcttttatatttggaatgccgactctagtaaagcatcatgtgcgagcgccgagcgtctcgtgcgatacgcgaacgtacgatacgatacctttcttcgctactaacaatgagccgaatcactacaaatgggccttgaaaaaccactccaaaccaacatgataagaatccgtcatttacatcgctacgctcccacatagtaccaactcgctatctggatgaagacgagcgaccgaacggtctatactctttctcgggctttagactaagagtaggagttatatttgtttctatcatcttaaatgttctatatgcgatttttggaacactatgggactttgaacttaatctatttcttatgggtttcaaatt

SEQ ID NO: 16927 - DNA, 360 bp, Zea mays
  unsure (1)..(360): unsure at all n locations
agcttgcattgcatgattaaattacttgtattgcatctagggcttgtctaacctagttgagataaccgccaacaaagcgagtgaaaaagcttaactcgggtcaaacttgacaagtcttagttttaagcttttagcacttaaattcttacttatttgtgcaattggtgggtcttgaaatatgcatgaggtactgcacttangggagtattcaacactcaaatcactcatgaaaatccctagtgcaagccaaaatgcaaatttcgccatttgcctattttctccaaaaaattatctagcctatggcaaaatattttgaaaagtatatgagggtgccaatacctggcccaacaagtggtattt

SEQ ID NO: 16928 - DNA, 407 bp, Zea mays
  unsure (1)..(407): unsure at all n locations
agctctctcaacattattgttgcttaatgaatatactccaatgcttataattgccccaagccatgattttaaatttttcatacccttttccccaatttcttgaattatgcacatagggctcacttagggtttttattaggggtgcaacattattacctttttgaaagactcatttgttttgatcatgatacttttaagtataagcttggtggattcttcattcttaagtcaatttgatgctcatgctcaatttggttcacataaaatgatggntcttggtttagcactttgagagaaatcctacgtgacactggggtgtcacagagcatgccagcacctgctcctgtttttatcagcgacccatcgaagtacatggtccaaattccggttggatcagagctgttggc

SEQ ID NO: 16929 - DNA, 423 bp, Zea mays
  unsure (1)..(423): unsure at all n locations
agctntaacatagtagtaacaaagatagaagtagcagttaagggggaagtacatacagagatagcagttttagactactgctagtagcatagtaatttcagactaatactagtggcagttttagactactattggtagcagttattgtaaaaaacaactgaggacatcacatgaataaagtgagttcaaaactttagatagttcatcacttctagtcaacaatcgtattaggatgtaagtattgtcatcattagcaactgagcacatcacacaaagaaagtgagttcaaaactttagacagctcatcattgctaatagacaatgttctcagcatgaaaccagttcttacaaatatatgattaattgagcacagcacataaaggaactcaaacaaagagagtgagtccaaaactttagatagtt

SEQ ID NO: 16930 - DNA, 420 bp, Zea mays
  unsure (1)..(420): unsure at all n locations
agcttgnggagttatactctataaaatgtacctcatgctggagngaaccttttaaatctatgcattcgtactatgttaataatggaagcacttagtagttctgtacagttcatgctatacaattgttgcatggacattatacagtcgaaacgtttaatagatccctgtcccatctgtcacttggtcatggttattaaaacggtaaaacgttaaaacgttatgaaccaactttttaaagtttaaacgtttaaacgaacgttgaaacgtcttttcagacttgacatagaatttcaaatatagaataaattcatacataagttgagttcacaaaccaaatatcattagcaacacacagtagcctgcaattgaaattcactgccattgcaatttcactgccacacagcccacagtggaatgaac

SEQ ID NO: 16931 - DNA, 398 bp, Zea mays
  unsure (1)..(398): unsure at all n locations
agcttatcgacttctttagcactatatatttctgggtaaatttctatcaaggaacataacctgctgttgagcaatttctgctatgtccaaagatttcatctggttccctaagaactctgcatggttttgtgccccgtgtttccatctcttatctctacacatgactcttgtgccctaaattattaaagattaaagaaatggttattgggttcaggaaagtgtcgccttctgctgaatcagctggtctctgcattgatcatttatcaaggaatgttaatgaggctcacttganagagatatttggtgagtttgagtatatatctccattcactttattctgttggaacttgaaagtctactatgatgattatattcatagcgaagacattaaagatagt

SEQ ID NO: 16932 - DNA, 410 bp, Zea mays
tgcagcttgtgaagttcttatcccacatgtgttttcggtgatgcccagccagcccatgctagtcttagctattaagcatgcatctagaccggcttcttcttttgcaaaatcaactaagtaaagtttgccgtctaatacacccttaaacgctagtgaaccatcacttcttctaaagacagacacatctacatttgtaaatagacagttatatcccatattgcataattgactaacagatagtaaattatatcctagagactcaactaaaaacacattagaaattgagtgctcatttgatattgcaattttacctaacccttttaccttgccttgattcccatcaccgaaaataattgaatcttgggaaaccttattcttgacgtaggaggtgaacatcttcttctcccccg

SEQ ID NO: 16933 - DNA, 400 bp, Zea mays
agcttcctccagcattattaagccccttatttatcctgagaaagcactatgagccactaggggttatgaatctagtcttcgactcatcttccttcttcatccatatgtgatgatagcctgagtaacaatccaatagactcatgagcctgaagaagctgctgcatctactaaagagtctattcttggcaatgggaactcgtcctttggacaagccttgttaagatctataagatcaatacacattcttcatttaccgttggccttcttcaccataacagtattggctagccattctgggtatttcacctctctgataacaccagcattaagaagtctcttcactttgttccgagcaccttcagctttgtcttcagacattttctgaagcctttgttttctt

SEQ ID NO: 16934 - DNA, 417 bp, Zea mays
  unsure (1)..(417): unsure at all n locations
agcttcgtgaagatattntccgaagctacacttccgaagatcaatagtgtatctccttacgacttagcatgattttcccctttttcaaaacattcttctgaaaatcgatattgtgtccccttcttgtgccatatgcagcatgatgtatgatgcttatgctatgcgaaatgatgtgatgatgttatgctatgtaagatggtatttattccgaagatacacgcacatccctgcgataaaacacataatctttttgaatcagcgttgactttttgctataagcctcccttaggagcttcttcgccttttactttagcggaatcagcgtttatttttcgctgtaagcctcccttaggagcttcttcgccttttactttcagcggtattcgcgttgacttttcgcgcttcgccttttactta

SEQ ID NO: 16935 - DNA, 411 bp, Zea mays
agcttctgaagatcattacttcattctcttctggagtaggcacagtcctctcaccgtcatctgccctcacggtagacatgtctcgaaaatatctccccctcatgttatcaagatgactctgtttaatacttgattttccgaagcctatgtgacttggtcgccacggtcgatcttcggagtcttcaccccactttctacatcataactgtcactctcaccggtatcttcagataagccttctaaaatttctctagtaatcttctctgtatttgttctcgctatcgattcaaggaaacccagattcttctcctcagaaaggctcagtttcatttcagcaacagctttcttttcctgagacatctcttcgaaaatgctgaaaatgtgctcttagggccgaagctaaaaaaacta

SEQ ID NO: 16936 - DNA, 382 bp, Zea mays
catgcagcttatttatggacgtgaaaagttttttcttttggaccaatcaaggaagaggtctatgtttatcaacctcccggctctgaagatagtgagtaccctaaccatgtctataggctctttaaggcgctttatgggctcaagcaagccccaagagcatggtatgaatgcctaagagatttccttatagctaatggcttcaaagtcggcaaggtcgatcctactttatacactaaaactcttgaaaatgacttgtttgtatgccaaatttatgttgatgatattatatttgggtctactaacgagtctacttgtgaagagtttagtaggatcatgacacacaaattcgagatgtcgatgatgggggagttgaagtacttct

SEQ ID NO: 16937 - DNA, 415 bp, Zea mays
  unsure (1)..(415): unsure at all n locations
agcttgtgcaaactcttgtgagattctatgatgtggattccaatcccaaatcttttccatactaggaaaaggaagcaatggaccttgtgatggcaagggatggttagggtttccttggctactatatgatccgattgccctactcagctcatctattggaattgttgccattgtagccgagtttgcattaagcagggcatgtgtggaagaatgcaacatcggtgagttattagcacccttcatgaggtagagtgatgtaccgtcctcctccgtcgacgtggtggagctaagtgagggtgttgataggaacattgacgtctgaggcaccattgttactgctcgagctgcagctgatgatgttatggctatggcggtgtttgctccaccgtantggcttgtcatgtgagctgatgag

SEQ ID NO: 16938 - DNA, 411 bp, Zea mays
  unsure (1)..(411): unsure at all n locations
agctngatgtatataacaaatgaaataagattatgtttctattgtaacaaaactatgtaatatttggagtgtgtaatgttgaattgaatatataaattattgtagtttatttctttgcgatgcatgaaatttacacacataccgtttttgagccttcgacaaaaaaacaccttcccttcttttcatgattcgtaaagaaaaagatccatgattcgtaaagaaagttatccatgctttgtaaagagagatcccttcttgtgacaaggctgataaaactgtatttcccaaaacttacttcgtgccttagcacctttttattttgacgaagcatttgccgaagatcagcttcgtattcaattctcgtgtcattgatgcaatatgacgtatgatgtgatgttatgcgaaatgatg

SEQ ID NO: 16939 - DNA, 410 bp, Zea mays
agctttacaggaaaaggagatggtatgaatctttgtggtgcttgagagagtcaattcaattaactcaagctatcaatcttcaatgatctatatccaagattgacccaaagttattttgaattgttatatctaaaactcatatcatctcggggaagataacaatgttgtaggaaataaagaattaatcctatgccgaaaagtcaaggcctacaacatggaaggaagtcaaaggatggtaacaattatgcttttaagtgcaagtatcttaaattatcatttcttatgtgtcttgtgtagtcacatagaaaaagaaatcacttcaaatgtttttaaattatgtcaccattctttgaagaaattcctctcatatggtagattgtatattcatcgtttctataccatggcaatct

SEQ ID NO: 16940 - DNA, 415 bp, Zea mays
agcttgacattgtctccctgttggaatccaatgccatcctcaatgccagggcgtctcccattataaagcatgctacgagcaaatttaaatttctcattttctagttcatgttcagcaattttagcatttagtttagctatatgatcattttgttgtttaatcatagcaaggtgatcatgaataacatcaatgttaatatctctacatctagtgcaaatagaaactgttggggacttgttctcaaatgctaagaattaagaacaaggcaacataaaatgttaaatattaaaacccttcgcctgccgaagcattatttcctcaaggatttaatgaacttcggacgaaggttagaaacgatacaattacgaaggttgagtcttcataattgaactctcaaagatcataaaaaacaatg

SEQ ID NO: 16941 - DNA, 409 bp, Zea mays
  unsure (1)..(409): unsure at all n locations
tctttactctttgtgctttgcattatttatctagnctcgtaattggatgaggtctaggggattgtgggagtcttattgttcgggaccataattaggggtaccctcaatgctcctaattctcagctggtaacccccattagcataaagctgcaaaagcctgaagggtgcgattaagtcaaggatcagtccatacgagggactcgatcacgcctcgcccgagcctggcctcggacaagggcagccgaccccggaggatctccgtctcgcccgaggccccccttcagcggcgaacgtgttcccggcttgcccgaagccctgtcttcaccaagaagcaaccctgaccaaatcgtcgcaccgaccgaccaaatcgcatgaccatttaatgcaaaggtggtctgacacctttatc

SEQ ID NO: 16942 - DNA, 404 bp, Zea mays
agcttcataactatgatgatgcatgcgactttttttttttcgccgtctgccaacccccgatgggacggactattcgaccagaggtcaaagctagccctcggaagtaaactctgcctcacccgaagtcgaccctgggcttgggacaaacttcggcttcgccgagctcgaccttgactccttgctccctatgaatcacgtaggaggccactccttcaactgtggcgtgcacgtcatctaattttggaacgggctcggtcgcgacctcgggcggacctccgccttgcccgatgtcgactctgacctcgatatccgcaacagaaaggcgcccaacgtcaacatatattgcagagatgacgtatatttaggaagtttttttccatacttaatactgtgtcaaccactac

SEQ ID NO: 16943 - DNA, 409 bp, Zea mays
  unsure (1)..(409): unsure at all n locations
agcttaccgcatttgaagcatgagcgcctccttttttttctttgnctngcttggctggcgcctgggggcttttagcgccgtctcgaatctcttgacgattagagccctcctggcatcaataatgagcggccgcctcaatttgtgccaccttgcaaggttcatcttcttgcttcttggtgccttgagagcaagaggttgaggcacattgagtggtccgtttagagcgtcaacgacgtatcttgactccttgatcatcatcctaccgcttacctaaatattcgagagcctcctcggtcgtcatcattttgtacctgggattatcacgaatactggtcacgagacgcggatcacaaacggtataggacctgaacaatacgcggtcgacgtagggggcatccatcgtgtgctt

SEQ ID NO: 16944 - DNA, 393 bp, Zea mays
  unsure (1)..(393): unsure at all n locations
tgangcatacagcttataatgacgctaccttgacacaagtgaaaattcattttattttgtatatatgaagacagacgatgcaataaaagttgtataacctgtgttatacaacaaattatatatttaaaccaagccttaatttaatttctacgtacctcatacaatgccctcaatacagaatattaacccgtcccatgattcccattctttgaaatcatcgtagttcgggtcgaaggtcttgcgttcccaaatttttgttaaaccactcaagtttccccaaatataaaagctgttaataactattaaaggctcatcattttaaaagataacattaatggattccgtgtgacatgcttagaacttaattttacaagtctcactgaatctatccac

SEQ ID NO: 16945 - DNA, 405 bp, Zea mays
agcttgaagaaagcctgtcagtcttgtctattgatgatcttgctgatagtcttgcatacaacagtataaaggtatagaaattaactttgaagttgaaaaaatgaaccattttattgccatgctcaattctttcttcttctttgcagggattaattcttagtaatgccttgagggcacagaagagcaccgaagacgaaggctgtataatggctcttaacaaccttcgctcagaggtgattgaactgagaaacgaacgtctggagaaagacaaaattttgatttcattggtgaacaaaataaaggaagatgaagctaattacaatgctcaggctgaagctcagaataccgagattgaagaccttcgtagacaactggccgaagcttatgagaactgcgcgctcgcac

SEQ ID NO: 16946 - DNA, 468 bp, Zea mays
  unsure (1)..(468): unsure at all n locations
agcttgtgaaggggttcttcatccccacatgcttctctatgtcggcgatgnnccacagccagcgccatggccagntnncttagcaattagagcatgggcatctatgactcggcnccctcctcttttgggcaaannatcatactaananntaaagcttgggcccgtctaagtaccaccnnncttaaatggctaggtgggaaccatcacnnaccttctaatagaacagacacnnatctacatttgtgaaatagaaacagttatatcccatanttgcnnataattgactaacagatagcaatattatattccaagagactctactaaaaacacattagagatagagtgctcattagaaattgcaattttacctaacccttttaccttgccttgattcccatcaccgaatataattgaatcttgggaatcctcgttcttgacgtaggaggtgaacatcttcttctcccccgt

SEQ ID NO: 16947 - DNA, 412 bp, Zea mays
agcttgtggaggttcttcatccccacatgttctaagcggcgatgccacagccagcccatgcaagtcttagccattaagcatgcatctagaccggcttcttcttttgcaaaatcaactaggtaaagcttgccgtctaatacacccttaaaagctaatgaaccatcacttcttctaaagacagacacatctacatgtgtaaatagacagttataccccatatgacataattgactaacagatagcaaattatatccaagactctctactaaaaatacattagagatagaatgctcattagagattgcaattttacctaacccttttaccttgccttgattcccatcaccgaatataattgaatcctgggaatccttattcttgacgtaggaagtgaacatcttcttctcccccg

SEQ ID NO: 16948 - DNA, 413 bp, Zea mays
agcttgctgtgaacctgattcccttcccacgcctgcactttttcatgggtggctttgcaccgctgacctcgcgtggctcccagcagtaccgctccctgacggtccctgagctgacccagcagatgtgggactccaagaacatgatgtgtgccgcagacccacgtcatggccgctacctgacggcctctgccatgttccgtggcaagatgagcaccaaggaggtagacgagcaaatgataaatgtgcagaacaagaactcgtcctactttgtggagtggattcctaacaacgtcaaatcgagcgtttgtgacatcccccctcgtggcctctccatgtcttccaccttcgtgggtaactccacctcgattcaggagatgttccggcgtgtaagtgagcagtttacggccatgttc

SEQ ID NO: 16949 - DNA, 406 bp, Zea mays
agcttctgacttgtgggcccgcctgggtgttcggtgcacaccggacatctactgttccttgtccggtgtgccggagtgggcgcgcctgccatctgcgcgcgcagagcgcgcattaaatgcgcggcagagagccgttggcgcggaggtagccgttgctccggagtcgcaccggacagtccggtgcacaccggacagtccggtgaattatagcggactagcccgtggagtttcccgaagctggcgagttcctgaggccgaccttccttggcgcaccggacactgtccggtgtacaccggacagtccggtgaattatagcggagtcggctctggaaaatcccgaaggtggcgagttggcgttggagtcctctggtgcaccggacattgtccggtggcgcaccggacact

SEQ ID NO: 16950 - DNA, 409 bp, Zea mays
  unsure (1)..(409): unsure at all n locations
agcttgcaacaatcgagcttgcattgngagcacttgacacgttctatttgaaacattacctgcagataattactaagaagctntattacatatatatgaattaacttgcaattttctttgattttatataactgaaaatagtcctaactattcaatggcacctacaaaactcttcttccactgaaacaaacaaaagcaagcaacacaattagcgagacatgaacaacaactgttgtggataacttctttaacccaatggcatatcacctccaccgcccaccttgctggagaatccctacagcaacaggttttcctttttacctgcacatagtaaaatgtatgtttttagctgaagtggaattacccatattcattatgactcaccctgctatacacactgcattgaata

SEQ ID NO: 16951 - DNA, 413 bp, Zea mays
agcttatgaagattcttcatcccaacatgggctagtcagcggtgccagagccaacccatgttagtcttagcaattaagcaagtgtcgagttcagctctatcaaaatctaccaagtatagctgaccctctaacactcccttaaatgctattgaatcatcacttcttctaaagacagtgacacctacatcagtaaaaagacaattgtagcccatttgacataattgagaaacggaaagcaaattgtaatctagggaatctacaagaaaaacattggaaattgaatggtcaggagatatagcaattttacccaatcctttgaccaaaccttggtttccatccccgaatgtgatagctcgttggggatcttggtttttctcataggaggagaacattttcttctcccatgtcatgtg

SEQ ID NO: 16952 - DNA, 420 bp, Zea mays
  unsure (1)..(420): unsure at all n locations
ttaagcacctgagctgcagcttcgcccccttgtccagattggttattttctatntcctatgcttcgggcgagactggggatatcagttaaatctgctggtgataagctgaagttaggtctattgacgatcttcccatgcgtgcaaccagttttcatgaaagcaacagctgtgccccgagaagctagaagagcacagaagtcaccatgcccagctataacttcgtcaagtgcatcaacttcgccctcaatatgttcgaaggtgcttggcaggtcttcaactgaaggttcaaatttctcagaactggctccaactgagttgaagacctgttttagccgttgacgcatcggttgccgaagtctaaagatttatcctaaagctccttcaatgatttctgcanatttgaactcttttcgacttcg

SEQ ID NO: 16953 - DNA, 473 bp, Zea mays
  unsure (1)..(473): unsure at all n locations
cctctgagagacccgcacgcatgcaagctttaattgngtcaagggttccatattgtatttatttccatatttaacttcctccatttctttgacataatagtgaatgtgagggggttattcactcgtcaagacatatggcacggaaagcccttgctgacttatccgcattctgcccactcacattggcccctttcctggggtgattaatggatattctacaatcgtaattccttaatcaagctcaaagcccatcttctctggcctcatgtttaagttctgaaactgggtaaaaatataccttcagaacttttatgaatctgtatatatatcggcagatatttcccagcaaataatgacaccatattttaagggcatgaaccacagcatctaattccaagttatgagttggataatgctcttcatgccggcgtagctgtcttgaagcatatgctataactcggcccttctgcatt

SEQ ID NO: 16954 - DNA, 414 bp, Zea mays
  unsure (1)..(414): unsure at all n locations
agctntaccaaatggacgtgaagagtgccttcctttctgaccaatcaaggaagaggtctatgttgagcaacctcccggctttgaagacagtgagtaccctaaccatgtctataggctctctaaggcgctttatgggctcaagcaagccccaagagcatggtatgaatgcctaagatatttccttattgctaatggcttcaaagttggcaaggccgatcctactttattcactaaaactcttgacaatgatttgtttgtatgccaaatttatgttgatgatattatatttgggtctactaacgaatctacatatgaggaatttagtaggatcatgacacanaaattcgagatgtcaatgatgggggagttgaagtatttcttaggatttcaagtaaagcaactccaagagggcac

SEQ ID NO: 16955 - DNA, 396 bp, Zea mays
agctttcatccttcttcttcacaaatagtgctggtcatctcctaagctaaatgcttgggcgaataaaacccttattcagcgactcttgcaattgcttcttcaattctgccaactcagcgggtggcattcggtagggcctcttggaaaatggggccggtcccaggtgcaactcgatggcgaagttaatatcccagtcttgtggcattcctggcaattcatcatggaagacatctgcatactcacagaccactgggatcttcttcagacgtagctccgtcgtagagaaagcacatgactgagaagaaccctgactaagcagaattaaagtgaaattcccgcataacggataattaactaccacggtacgactggctacatcaagcacaacttggtgca

SEQ ID NO: 16956 - DNA, 411 bp, Zea mays
  unsure (1)..(411): unsure at all n locations
agctngctaaaggtcttttcatccagtggcttggtgaagatatcggctaattggttgtgggtgctaacacaggcaatttcgatatcccccttttgttggtgatctctcaaaaagtgataccggatgtctatgtgcttagtgcggctttgttcaaagggattatccaccatgcggattgcactctcattatcacataggagagggactttgctcaacttgtagccatattccctaagggtctgcctcatccagagtaattgtgtacaacaatgtcctgcagcaatgtactcgacttcggtggcggatagagctactgaattttgtttcttcgaagcccaagacaccagggatctccctagaaactgactagtcgctgatgtgctcttcctatcaatattacattcggcataa

SEQ ID NO: 16957 - DNA, 415 bp, Zea mays
agcttgtaacagcagggtaatcctccttgtatcagtttggaggctggtagcgactgtagggcatgttgccatcctcttgggctgctggctggccatgggctttgacacccataacagtcggataagagttgccaaacagaaagcaaagcacacctaatgattatttgcagaacaagcttcaggagtaaagcatgatattttttttctaaaaaagacatataatattatagtcaagcctggaaaactaatacccatgtaaagacacataaggaagcttatgcttgttactgtaggattggagaaacaaagccacaaatatctaatgtagaactattaataaatgctcaaaagaatgcaaaaacaatacatgtgtcctgcattttcgtgaaaaaaagtaatagtatcaaactgccta

SEQ ID NO: 16958 - DNA, 406 bp, Zea mays
  unsure (1)..(406): unsure at all n locations
agctntagctatgagagcgattgatttattttctctttctttgccaaacttatagcattggcttgagatttcttgaatatatcttgagtaagaatttcccccaatacttcggttggggaagttgtaaatagatcacttcttactaacatgggcacaatggtctcatacttctccggaagaaatctaaggaacttatgagtgaaatccacatccggtacattaaaaccaagtcccttgagttcatttactatctcatttaaccggttgaacatatcagatacactttcatcttctttcataatgaattgctcaaaattttcttttgcacacatatagcttggcactcttcacaatttgtagtccttcatgaatttccattagcttatccaaatctcatgagcagttg

SEQ ID NO: 16959 - DNA, 419 bp, Zea mays
agcttgtgaaggttcttcatccctacatgttctaatcggcgatgccacagccagcccatgctagtcttagctattaagcatgcatctagactggcctcttcttttgcaaaatcaactaaataaagtttgccgtctaatacacccttaaaagctagtgaaccatcacttcttctaaagacagacacatctacatttgtaaaaagacaattatatcccatattgcataattgacttacagataataaattatatcccaaagactcaactaaaaacacattagaaattgagtgttcattagaaattgcaattttacctaacccttttaccctgccttgatttccatcaccgaatatgattgaatcttgggaatccttattcttgacgtaggaggtgaacatcttcttctcccccgtcatatg

SEQ ID NO: 16960 - DNA, 389 bp, Zea mays
agcttgccttcgccttagtgtaccacccgttatccaacggagttgtggaacacgccaacggtaaaattttcacagtcgtcaagaaaatgctcctcgacgacaaaaaaggcaagtgggcagacctgttacctgaagcggtctgggcgctgaacacgactgagtgcagggcgactgggttcacccctttccgccttctatatgaatcagaagccatgactccgcaagaaataaaacatgggtcaccgcggacagtcgcgtcagccgtccccgacgtaaacgagcctacttcgaaggacctcatcgatggagaccgcgtcttttgcctacaggctctaaacaaataccaactcaaacaaagcatggcgcgacacacagtcatcccgagggaa

SEQ ID NO: 16961 - DNA, 381 bp, Zea mays
agcttatcaaaatcaccccacctatatcatatcacctctgtgggggatggtgtgattgaggagcctgtgagagcccctccgcagaaacaagtgtgggttctaaaccctaaccaccttaggaacacacttgatacccttcccaacatctctagtcatccccttcctagagccccaaagccatccaaaaagaaagctccctccaacaaacgaaatccacctaagagagaggtgaggttccattgtgagtattgtgagagggatgggcatctggcttatttttgctttaggagaagagagttgagcgttgagtttctgagtcaagcaggaagaacatgaaccgcccttctcatggtgttcatgctcaggttgttcatagacata

SEQ ID NO: 16962 - DNA, 418 bp, Zea mays
  unsure (1)..(418): unsure at all n locations
agcttatccaaaaagtttggtgatttttggagttaataaataatttctaaaattctggaggtataggtttaagcccttttaaatattacataattcatagtttgtactaaaaatcataaaactatttttattaaatactatagaaatttaggagcctaacaaaattggtcgcatatttttagcatttttctacaattttctatgaattctctaatcctggtagaaaaagaaaaagataaactaatgaacattgttgggctcagttcagcccggaacggtccactataggtgaaatgcccctgctcgcgcccgcgcggttggttttgcagaaatgtccctaccggttcaaaaatcagaagagcagtcctcggccctattcacgtgtctcactgacactntacattaaggtcctctattt

SEQ ID NO: 16963 - DNA, 415 bp, Zea mays
agcttgtacactatggcgatgacaaagattctttatggtggagatatctcaacctttgattccgcttaagacccatcaccaggagctaatttaggggtatttatcgaggttaggtgaccctgatcaaatttataaatattttaacaaaacactgttaaagttcataaatatctacattatataacaaaacttaggcttttcgtatcttcgacttcatttatttttggctctgttgtatgcttctaagctcttcaaagtgtttttcctttggctttggctgacaaccatatcctacaaaactacctaaacatggatttcatcaattcggacctttgagtggagatcttatcaccaacaattatgctcgtccaagctacagctagattaaaatttccttctttgtaggtaaatggga

SEQ ID NO: 16964 - DNA, 412 bp, Zea mays
  unsure (1)..(412): unsure at all n locations
agctngtcgtgggtgatatggtcttgaacgtttgcttatgtcccaagtatgccacgatgaaagtgctaagacacttttctatgaagacttagatggcatgaatagagctatatctattaataagaagcttttcataggatatcttaatggacatgtaggtagaccaaatgcacgtttcgaggcgattcatggaggttttgggtatgatagtaggaattgagaggaaaaggaagtcttggaatttgcggtagctcttgaccaattgatagccaacacattctttaggaaaagagagtatcatttagtgacctatactggccaacactctcagattgattgtatcttcacaaagaagagagaataaataagcgtgcttggattgcaggtgatacctaaagagtgattttctctc

SEQ ID NO: 16965 - DNA, 413 bp, Zea mays
agcttaccgcatttgaagcatgagcgcttcttctttgtcttggtcttgcttggctgtcccttgcgacctttaagcgccgtcttgaagcgcttaatgatgagggccatctcctcattatttagcccggccgcctcaacttgcgccaccttgcttggtagcgcctccttgctccttgttgccttgagagcaatgggttgaggctcatggattggaccatttaatgcgtcgtccacgtatctcgcctccttgatcatcattctcccgcttacaaacttccctagaacttcttcgggcgacatcttggtgtacctaggatcttcacgaatattgttcaccaaatgaggatcaagaacggtaaaggaccttagcattaggcggacgacgtcgtggtccgtccatcgcgtgcttccgta

SEQ ID NO: 16966 - DNA, 403 bp, Zea mays
agcttcggttttgatcaaaggaggtgcgacgaagctttcttcgttacgatgacgtaggaagatggcataggaagaaagtgttcattcaaactgctaggtgcaaatgacaaaaatgtccctgtgacatttgtaaaccttgtatgtattcttcgaggacacaaatgtaatatcgtacaaagctatatgattgcctatcaataggtgaacaatacccacatactgttcacgcaggactgtaactgcattcacgtttttaacttcaatcaagccgaaggtatcaatgtaatgtatatcttgatatcgtttagacattcaatacgaaatgaataaatggcataatattacatttgtaactatgtttttatttgtgaatgatgaagacctgttcttcatgactgttggg

SEQ ID NO: 16967 - DNA, 407 bp, Zea mays
agctttatatggacgacgatgtcggtcttctttaaattggtctgaacctaatgaaaggtacttcttcacgactgatatggtgaaagagaccgaagaaaaggcttagaaaataattcataatttgaagaaagctcaagctcgtcagaaaagttatgcggacaaacggcgaatgcctttgtattttctgattggagattatgtttatctgaaggtctccccgatgaagggggtatcacgtttcggggttaaagggaagcttgcaccccggtacattggtcctttccctatacttgagcaatgtggaccagtggtataccgactccaactacccgaaaccttgtctgctgtgcataatgtgttccacgtgtctcaactgaagaagtgtcttccggttccagatcgaacca

SEQ ID NO: 16968 - DNA, 411 bp, Zea mays
agcttgctctgagtgctttgctgccttcattccaaccttagccaacacaaagcaagggtgttattgctagaaatggtcagagagcaatctgcccctggactgtctttggtgccttcttcggatgtctcagagccgaaggttgaagaattgtccgtgatagcagaggccactgcttcccaagccaaagttgctgttgcagatccatctgaggacaacgatgatattgacattaaagaggataatattggcatccgtcctacgaagccaagtcgcgtgcactttgggaagtcaaagattaaaggaggacatattgaggtactcactaggtttgattatattgacaatgttgaatgggttcgattaggaggcaatgatttggtgccaaaaccaaaagaagatgatagttgtgtt

SEQ ID NO: 16969 - DNA, 411 bp, Zea mays
agcttgccagatcagttctgatgtgttgtttcgttctgcacatgtcacagaacaggcgtataggaggaaggcgtgctcaacacgagcgagccgctccgcaagaggaggtgccccaacagcagcacctgccgcccccgcccccgatgtccatcgagcagatgtttctgatgcagactcaagcagttcaagccatcggtcagactctggccgccattcagcagcagcagcagcagcaacagcagcaggctccaccccagcctcagatgcctcaaatgcctagagataagcgtgctgaattcatgagaggtcatccaccaacgttcgctcattcttctgaccccatggatgctgaagattggctgcgcacttgggagcgggagttgcatacccgtcaatgcgatgacagggaga

SEQ ID NO: 16970 - DNA, 413 bp, Zea mays
agcttctttaacccctgattcttagatcctttgtactaagcatctatttaaatcatcaaaggagtcatccaattggacatccatagtctcattctcaccattgaaaagattgtcaaaatacctctgccacctctgtttgatgtcttgtcctttcaccaagagttgatccatctcatccttaatgcatttaacttggttgaggtacctcgtcttcctttctcgaatcctagctatcttatatacatatttctccccttcctttgtacttagtcttcagtaaagatcatcgttggcttgaccctatgcctcactcacagctcgctttgcagtcttctttgccaccatatacctctctatgtcgatcatgcttctgtcatggaacaagctcctgcaacattctttcttctccttta

SEQ ID NO: 16971 - DNA, 205 bp, Zea mays
  unsure (1)..(205): unsure at all n locations
ggggggagacaaaaaattgggatgttcctgaccggtggggcaaaattgcacacttatcagaactattggattctgaagcttgagcgggaccttattaattatagaagacaacacattattggaagtttattctactcaatttttaaggtacaaactcttatgcatgtcccttttgaattttaactntcaaactttcagattttgc

SEQ ID NO: 16972 - DNA, 403 bp, Zea mays
  unsure (1)..(403): unsure at all n locations
agcttcatactcggctgcattgttagaggccgggaatagcaactggagagcgtacttgaggtgctcgcctccaggtgcggtgaagagaatccctgctcctgctccctgcaacttcagcgagccgtcaaaatacattcgccatacttctgcggtttctggattatctggtacttgctgttctgtccactctgatacgaaatcaaccagtgcttgagttttgatggcagtgcgaggtcggaactcgatgtcgtgggatcccagctcgcaagcccacttgggtattcggccaatggcttccttgttgtgaagaatgtcccctattggaaaaccagtgactactatgactntgtggtcgtcaaagtagtgacgcagcttgcgggcagttagaagtactgcatataat

SEQ ID NO: 16973 - DNA, 410 bp, Zea mays
  unsure (1)..(410): unsure at all n locations
agctttaaaactaanagctcattcttattttattgtgcaagagctaaaaattgagtgagcgggagcagatggcaagagaacgtgccaaatgagtttgcggtatgactgtatttatacgcccagtgcgttgaaaattgaaagaccccgcttgtcagtgaatattgctattctagcaaagggaaggtgttttttcggaccttcggcgtaaagccttcgtccatgtcgcaatctaaatttattatttaaataaattaatattgcgaggggctactgttgggggccttcggcttacgaaggtcctcaaaaacaggatttaacagtatttctggagtataatgttngaacaggtatcttcggactcaagtcggtatcacagcagaccagaataatacgaaggttgatacagcgcc

SEQ ID NO: 16974 - DNA, 405 bp, Zea mays
agcttgtggcgccctcgggcgtcttgccgcatcctatttaccaagtctcccacctggaagcctcgggaccgaacccctcgggcgtggtagcgtcatagagactgctgataccgcaccgagtgtagcaaggccacgtcccgagcctcttccaactggtccagtgagtcttcttggctggtctagttgcttcggtcgtcgtacgcctttgtcctcggggaaccgtattctaagtctgtgggcaagatagcctcagccccatagactagaaagaacggcgagaaacccgtggctcggcttggcgtcatcctcagactccagaccactgagggtagttcctttatccaccgcttgccgaacttgttgaggtcgttgtagatcctcggtttaagtccttgcagaagcata

SEQ ID NO: 16975 - DNA, 418 bp, Zea mays
agcttctaaagggagaacacattatgggactatacttatgtttcatttaataaagacaggatttgtagcgcatgtcaagcagggaagcaagttggtgttcatcattcacataagaacatcatgacgactgacaggccactcgagctcctacacatggacctattctgcccgatagcttacataagcatcggcgggagtaagtactgtctagttattgtcgatgactattctcgcttcacttgggtgttctttttgcaggaaaaatctcatacccaagaaaccttaaagggattcttgagacgggatcaaaacgagttcgacttattgatcaaaaagattagaagcgataacgggacagagttcaagaactctcatattgaaggcttccttgaggaggagggcatgcagcatgaattct

SEQ ID NO: 16976 - DNA, 415 bp, Zea mays
  unsure (1)..(415): unsure at all n locations
agcttctaaagggagaacacattctaggatttactttgttcattntaagaaagacaggattggtagcgcatgccaagcaggaaagcaagttggtgctcatcatccacataagaacataatgatgaccgacaagccactggagctcctacacatagatctattcggcccgattgcttacataagcattggcgggagtaagtactgtctagttattgtggataattattctcgcttcacttgggtgttctttttacaggaaaaatctcaaacccaagagaccttaaagggattcttgagacgggctcaaaatgagttcggcttaaggatcaagaaaataagaagcgacaacgggacggagttcaagaattctcaaattgaaggcttccttgatgaggagggcatcaagcatgagttc

SEQ ID NO: 16977 - DNA, 418 bp, Zea mays
agctcgcatatacaattaagagagcggacctattatttgtttcatataaaggtcctcctcaggaaatcaatgaatgaaatcactttggaagtccagtacttgccattgaacaccttcccgagaaaaagcaatatggccataaaaggcgtatattgatcgggttcacaactaaactgaaggtggcatcaaaatcaatcccatattgttgcttgaaaccattaacgacccaaagagccttgtacagattaatggatccatctaacttctatttgattttgaatatccacttggagtcaacaatatctatgctagcacgatgagggagaagatgccaagtcttattcttatgagggcataaaattcttctttcattgcataatgccataaaggatgccttatataggtgacatgtgatgat

SEQ ID NO: 16978 - DNA, 411 bp, Zea mays
agcttctaaacacaataacttcatcttctcttatctctggaatcacttcttcgccagcaaagcgaataagtttacttcctcccaaagtagcctagttttctcatcataactaggtcctcttctgttatagtagatttttctaattcaatatgactaggttttgatgggcttagaatactgttgtcttcttcgatttcgtcatcactcgtgtcctcaactacagcctgctcagctttggcagttccacctttggcaatagtttcttccgcacaagtagacctgatcgcctcatcacttccgatattggcgctgtttctatcactttagcctcatctccctcatgggacaccctagtagtggatcttactcgggccatttcaagtgttttggttccttaagacgaagctaatt

SEQ ID NO: 16979 - DNA, 409 bp, Zea mays
  unsure (1)..(409): unsure at all n locations
agcttcctccagcattcttgagcccctcatgcatccgaaggtagcaatatgtaccactggggttatgaagctggtcttcggctcatcttccttctccatccagatttggtggaagcctgagtaacaatctagtaaactcataagctctgatgaagctgcggcatctactagagaatctattattggcaatgggaactcatcttttggacaagccttgttaagatctgtaaaattgatgcacattctccattttccatttgccttcttcaccataatagtgttagctagccactctgggtatttgacctctctgataacgccaacactaagaagcctcttcacttcatttcgagcaccttcagctttgtcatcggacattntccgaagcctttgttttcttggcctgaaa

SEQ ID NO: 16980 - DNA, 414 bp, Zea mays
  unsure (1)..(414): unsure at all n locations
agcttctaagggagagcacattttatgactttctaatgttcattntgagaaagacagggttcgtagcacatgtcaagaaggaaagcaagttggcacccatcatccacacaagaacatcatgacaacggacatgccactggagctaatccacatggatctattcggcccgatcgcttacataagcatcggtgggagtaagtactgtctagtaattgtggatgattattctcgcttcacttgggtgttctttttgcaggataaatcacaaacccaagagacattaaagggattcttgagacgagctcaaaatgagtttggcttaaggatcaaaaagattagaagcgacaatgggacggagttcaagaactcacaaattgaaggcttccttgaggatgagggcatcaagcatgagtt

SEQ ID NO: 16981 - DNA, 414 bp, Zea mays
agcttccaatcactccaagtgccacaattaatacatgtgatcattagtgattagtgacttgagagagagtgattcgtgtctatttgttgctcttgttgctgggcttttaatcgtgctttcttcttctctttctaaactctatagtgacttgtaaagctagcaagagacacctaagtgtctggtgatccttgcggggtcttggtgattgttgagattaagaagaagcactcatccggtctaagtgatcgtttgagagagggaaagggttgacaaagacccgccttcatggcctcctcaacggggagtaggttcattggaaccgaacctcaggaaacaaattggtgtgttcatttgtgttgatctttaccttacgatttgattcttcctctcccctctctctaagttctcttactc

SEQ ID NO: 16982 - DNA, 411 bp, Zea mays
  unsure (1)..(411): unsure at all n locations
agctttgcactgaatcaaggcgcactgtttatctatcttcaganaaatcgcgccggcgataagaacgccaccgccgcgtggatggtcgtcggcggccacggtaaaaggctgttgcaacgtggcgttaaaacagggaggtggcaggccctggttaatcggcggccaccatgccatcaccgtggtcctgtcgaagctaggctcgtcgcacctcccttgcgcgtcgactgatcggataagacctcgccgccggccgattactgccgtgcgccacgtgcttaagcactagtcctcgtcgtggtgactcatgggttgcatgtccggtgatcaccggaataactgccacggtgaaagtcatttattccacgcatggagctcgtgtctcctccggccgccaacactgctcggtcgaat

SEQ ID NO: 16983 - DNA, 365 bp, Zea mays
agcttaccgcatttgaagcatgatcgcttcttcttggtcttagtcttgctcggctgtccattgcgaccctttaacaccgtcttgaatctcttgataatgagggccatttcttcatcgttgagtccagccgcctcaatttgtgccaccttgctaggtagcgcctccttgcttcgtgttgccttgagagcgaaaggatgcggctcgttgatcggaccattcaaagcgtcgtccacatatctcgcctccttgatcatcattcgcccgctaacaaatttcccaagaacttcttcgggcgacatcttggtgtacctgggattttcacgtatattgttcaccaagtgaggatcaagaaccggtaatgacct

SEQ ID NO: 16984 - DNA, 408 bp, Zea mays
agcttcggtattacagcatgtccgaagatgatggatcgaaccgacttaaagatagaatgactttttagtccataagggtctgagtcaatgttgtaaacttttatgaggggcatggttgtaattcctcacaggctgtgccctgtgcctataaatagtgaacagtattcctttactgttcacgcattcctgtaattgcaaacgcatcactcgggaattattgtgtgtcaaggcagaggtataaacgtacctaaacgttatattcaaacattttaaattcatataataagatatgtgaatgatgtcatttattttcaatatatttatcttcaatggtttacgttttacattactttgtattatctttacaagtttaattacgaaggtgaaaccttcgtaacattatgctcg

SEQ ID NO: 16985 - DNA, 409 bp, Zea mays
agcttctcttcttcatgtgaggtgaggtcttcgctgatagtgactgtctgcttgggcgtggactgatcgagggggacagtcttggtcccgtcttggctctgcaactgtgccttgtcgtgctgcttatcggttgggctggcgggcgcagggacctcgcgctgggtcgtgagacagtgtacgttcctctgaccaggcacgaagtcccgctctatgttgcgcgccgtctgctggttgccgtagatcgtaatagcgcctagcggacctgatatcttcatacataggtacagtccgtggatggcagcttcgaacttattgatggagccccggcccatgatggcgttgtatggatataccatgtcgacaatattgaaggttacttgctcacttcgggcattgggtgctacaccga

SEQ ID NO: 16986 - DNA, 414 bp, Zea mays
  unsure (1)..(414): unsure at all n locations
agctntgagaatgcatcgttatacctctcatctttttattgatagcaaagtcttgggtgttctagccagtagtccagcagtgaccaatggatatgtcatcatacagnttcttggagatgtactctataattgaaaatgtttttttatttttggtaaanagagtataccgtcattcatcaagaagcaaacaggtgtagtggactaagtttaattagttctccaaatccattgatagttgctagtttgctacagaagcatgtggctgtgttggattattctgttgggttggactggcgcacttgcttcacgaatctttggaattgaactatgtttacacatacacgtaattataaactgataagagctgtatagcatgacccttcaaggattgccataccattatctatctcaaat

SEQ ID NO: 16987 - DNA, 421 bp, Zea mays
  unsure (1)..(421): unsure at all n locations
agcttggaaccataaacacaatggagagtnttatctatttattattctctttatgaactatatacaaatgcattccttgaaaaaaatagttaaaatgaaataacttatgggaaaaatattgtgtgggttgcataaatcatttttctttgcaggaataaatgaataaattaattaatataaattatacttgcatcatgttggagtttgtttgtgcatctaacttaaaaatttgaaattcaaacatggatttggactgaaatagaaaacaggaaataaaacaagaaaaataagaaagaaggaagaatatatattaaaaataataataatcttaaaagcaaacagtagagtttaaatttccctttaggaacacgcttgattntttttggaatctggaaaactcaaaatagaaattgaatttggg

SEQ ID NO: 16988 - DNA, 418 bp, Zea mays
  unsure (1)..(418): unsure at all n locations
agctagttgtaacaagataccttaattggcttactatgctactgtcattnggcgattgcgtttaacacattgctactgctgggatttgtgggactaaattgttgtacaactcaaacatcatcaaggcccaagatgtcatctgcatgctcatgagtcagaagaatgtgttatcaacaaggaggagatgtgagtgtaccatgggtatgtagaacactgaatttatttttacagccatagtgaacactcttttagttggccttttgatttgaaataaaccactatagaacattgaatttttcttttacagtcatagtgaacacaagataccttaagcacaattataacagtttgtcccatccacatatccctcgtcatgcctttccatgccatcttcgccacctgcctgtaaccctcgggt

SEQ ID NO: 16989 - DNA, 408 bp, Zea mays
agcttctaaagggagaacacgtgataggttttattaacgtgcatttcgaaaaagatagaccttgtgcagcttgtcaagcaggtaaacaagtgggaggagcacatcacagcaagaatgtgatgaccacttcaagacctctggagctgctgcatatggacctcttcggacccgtcgcctatctgagcatatgaggaagtaagtatggtctaggtattgttgatgacttttcccgcttcacttgggtgttctttttgcaggataagtctgaaacccaagggaccctcaagcgctttctaaggagagctcaaaatgagtttgagctcaaggtgaagaagataagaagcgacaatgggtccgagttcaagaaccttcaagtggaggagttccttgaggaggaggggatcaagc

SEQ ID NO: 16990 - DNA, 411 bp, Zea mays
agcttgagttgtttattacagacctttcttatttgactgccagtatgaacatggtacgaaccaagggaggcacaaactcctctcgataagtttaataaacaaaagatcctaagtggaggaccgagtcctcccgcacttccatcttgtttttcctcgtttggtaccaccttggagcaaaagcaacaaaagtttgtcgcttcctcacctaaaaacaacaaagggataaaccctgagtatggaatactcagcaagtcttacccgactaaggaaaagactctcaagggtatgctggataaataggagtcataggagaggctttaccaaaaatcaacttatacttttgcagaagcagcttactaaagtgagtccttactttcaatcttttaacgccatattaagtattaatagact

SEQ ID NO: 16991 - DNA, 413 bp, Zea mays
agcttatgaagattcttcattccaacatgggttattcggcggtgccagagccaacccaagttagtcttagcaaccaagcaagtgtcgagttcagctctatcaaaatctaccaagtatagctgaccctctaacactcccttgaatgctattgaatcatcacttcttctaaagacagtaacacctatgtcagtaaatagacagttgtagcccatttgacataattgggatacggaaagcaaattgtaatctaatgaatcaacaagaaaaacatttgaaatggaatggtcaggagatatagcaattttacccaatcctttgaccaaaccttgatttccatccccgaatgtgatagctcgttggggatcttggtttttctcatatgaggagaacatcttcttctccccagtcatgtg

SEQ ID NO: 16992 - DNA, 404 bp, Zea mays
agcttttagctatgaagcttcggctttgaattcttttttttagtgtttccgaagatgtctgaagctgctaacaaggctgctgctgaaatgaagctgagtcttgatgaagagaagaacttagggtttcttatagcaatgtcgaagaccaacacagaaaagatcaccagggaaattctggaagggctgtctgaagatactggtgacagtgaaagttatgatgtggacagcggtggcgaagactccgaagatcgcccctggcgaccaagccattcagtttatggtaaatcaactatcaaagagaatcatcttgttaatatgagaggaaggtatttccgggatctgtccattgtgagggcggacgaaggggaaaagacttgttcacactctgaagaaaatgaagttgt

SEQ ID NO: 16993 - DNA, 406 bp, Zea mays
  unsure (1)..(406): unsure at all n locations
agctttgccgagtgatacactcggcaaacattatttctcaaaatatttggcactccgcaagaggctttactgagcttctttgccgagtactcgaaaaaaacacttggcaaaatatttggcactcggcaaagagccaaattctggtagtgagtagacgatatgttacaagtatttgtccaaaatgagaattactaaatatcataataccaaattattccaccagtcctaaaaagaaggtaatttggagtattaatctagacaaataacatctaatgaagacatcctaaaaataatccttatttgtttaatttggttggtgtcaggagtaatatttctgaaagaacatctanggagtgtttagactattccaggtttcaactcccggagctataatttataatataaa

SEQ ID NO: 16994 - DNA, 399 bp, Zea mays
tagcttagccaaaataattcaagattatccttctttcaaacttcttttgttgggactcattgggaattctgaatttcagaattctgaaattcagaccttgagccaaagatcagggatgttcaccttgatccctaactcgaatcctaatggccccattgacaaaattgtgtctaactaacccctctgtcgtgtgccacaagatggcattgggacgcgagccctagacacgacaaaacttgggatttgcctcgggtttaggcagggagacagactagattttctggctccatatctctgcaaccagtaagcaaaatcctatgacctccacacaagaatggtagcttgtagggaggagatgaggtttcgtgcactgaccaaggcgagagcaggctcggatga

SEQ ID NO: 16995 - DNA, 391 bp, Zea mays
agcttctaagattcaaaagctatttctaaaataaaatcttttggacactctatgagttcaactggagtgaggtttggtagacagagatccttcctgttgaaaagcagctgtgctttcctttagaaaagttgaacttgactctagttgagttaaacttttcttcagctcagttgaacttgacttcagctgagttgagcttttcttcaactgagttgaacttgactttagctgagttgagctttcttcagatgagttgaacttgacttcagctaagttgaccttaacttcaatcgaggtctcaggcaggttcaatcggggttttaccctcggacctctctagtcagaactgagttgaacttgacttcagctaagttgaacttaacttcaatcg

SEQ ID NO: 16996 - DNA, 413 bp, Zea mays
  unsure (1)..(413): unsure at all n locations
agctttttcaaatggacatgaagagcgcctttctcaatggaccaatcagggaggaagtctatgtggatcaaccacctagcttcgaggatgataggtaccccgaccatgtgtatagactctctaattgtcacacccggttttggaaggtaaaccaaatgcgaaccacgtacgtgccaggatcagaaactcacgtacacagcgattacataattggacatcatcacacaatctcgaaataaatagcggaaatgtattttattacatcaagatgtccaagacatccacagagtctaatacataaccatagggttcaacaataatatcaaagtgcggagtaacgaagcgtagaatgtaagcctacacaggcagctgactggngggttgccactaaagtaaactagaactcgtcatag

SEQ ID NO: 16997 - DNA, 463 bp, Zea mays
  unsure (1)..(463): unsure at all n locations
agcttgggtgcttgaaaagcaattcaatttttattaactcaagctatcaatcttcaatgatctatatacccaagattgacccaaaattattttgaatggttatgtctaaaactcatatcatcttggggaagatattgatgttgtaggaaataaagaattatcctgtgccaagacctacaacatggaggaaagccaaaggatggtaacaattatgcttttaagtgcaagtatcttaaattatcatttcttatgtgtcttgtgtagtcacatagaanaagaaagcacttcaaatgtttttatattatgtcaccattctttgaagaaattcctctcatatggtagattgcatattcatcatttctattctatggcaatctatatgctctaaattattgtaagcacctcatggaatcctttacactaattatcctattattgccatgttctagatatagaaagatat

SEQ ID NO: 16998 - DNA, 374 bp, Zea mays
  unsure (1)..(374): unsure at all n locations
gagtccattcaattcttatcaactcagactatcaatcttcaatgatctatatacatgattaacccaagggtattcttcaaattgctatgtcttaaactcatatcatctcgagaaagatattatattgtgtaggaagtgaagagatatcatatgcgaaaaatcaaggcctacaacatggaggaaagccaaaggatggtaacacttatctnttaagtgcaagtattttagaatatcatttcttatgtgtcttgtgtagacacatagaaaaattgaagcacttcaaatgcctctaatttatgtaccattctttgaagaattcctatcatatggtagattgcatactcatcatttccttcctatggcaatctacatgc

SEQ ID NO: 16999 - DNA, 444 bp, Zea mays
  unsure (1)..(444): unsure at all n locations
ctttcctggcaacgtacgagtgatgatggatggtctcagtgcacctcgcaacacgagcgcactgttcngcaatggaatggataagtacgccgctgctggatggcctatatgccgcatgccagctgagtggataggatgcattaaatgttgtacgaaggcacatcgtctgtgagcgggatagtcaggcggtgcgtcttcttcgcaatatatgcagagacagtgctggccagatgccttacgtcaggctccgcccgctggcttacatcacgcacggtaggccacgtggcaacatcacgtctccgcttgggcggggagcagtagcgttatgcggacaagtccgcaccaggctgcgtctggacacatgttggcaccggacacctacccgagcaaggcctaagtattctcttgcctgagtcccgggacccgactgtgggtagtcccgac

SEQ ID NO: 17000 - DNA, 474 bp, Zea mays
  unsure (1)..(474): unsure at all n locations
agcttcgtgaanacattctccgaagctatacttcgaatatgaagaatgtgtctcgttgtgacttaacacgattntcactctttcaaagcatacttccgaagatcaatattgtgtccccttcttgtgccatatgcaacatgatgtatgatgcttatgctatgcaaaatgatgtgatgatgttatgttatgtagatgacatttgttccgaaagatacacacatatccccacacaatatttttgtatcagcgctgacttttcgctgtaagctctgcattcccttaggaacgactttggagcttcttcaccttttacttaggcggtataagctctgcattcccttaggaatgtctttggagcttcttcgccttttacttaggcggtataagctctgcattcccttaagaacgtctttggagcaaaaaacttacactgcgctccctttggaacggctttttgtaatttcagcaacttac

SEQ ID NO: 17001 - DNA, 454 bp, Zea mays
  unsure (1)..(454): unsure at all n locations
agctnggaggcatcgattggttgactacttggtgtatactcctccttcttttcttccgncgccttgaatgcgacgggttgagcttctgatgtggtgggttcgtcaagctcgttgattttcctcgagccttcgatcatgcactcaaaacttacaaaatgcccgattacttcctcggnggtcattttagtatatcttggattaccacgaattaattgaacttgagtagggttaaggaaaatgagagatcttagaataaccttaaccacttcgtggtcatcccattttacgctcccgaggttgcgcacttggttcaccaaggtcttgagccgtgtgtacatgtgttgtggctccttccctttgcgaagccggaaccgaccgagctccccctcgatcggttcccgcttggtgatcttggtgagctcatatccctcatgcgcggttttgagcacatccc

SEQ ID NO: 17002 - DNA, 431 bp, Zea mays
  unsure (1)..(431): unsure at all n locations
agcttntgaagagattcttagcgactatggtgctttttgtgccttcgctggtgcttgagggggtgcagcgattcaggagacaactagttgtgaacacgctaaagccacaacccatgcagaagccggcttctccatagacaacgtgaaggagccttcggcctaagctactttgataggcgggaaatattattccaatgtgtggatgacgggtggccganagattgctgacgaagctataaagaaaaatgaataagaattccatgatgcccgagaagaagccaagcgagccgaagaggctgctgagcgcgccaggcgtataggtattattactgaatcttagcttcagtgttctcttttggcttcggattaacaacttgttctttactacaactgaactttaccaccacctatgcctatgattccgatgccga

SEQ ID NO: 17003 - DNA, 472 bp, Zea mays
  unsure (1)..(472): unsure at all n locations
agcttgtgaaggttcttcatccncacatgtgcttattggcgatgccacagccagcccatgctagtcttagctattaagcatgcatctagaccggcctcctcttttgcaaaatcaactaaataaagtttgccgtctaatacacccttaaaagctagtgaaccatcacttcttctaaagacagacacatctacatttgtaaatagacagttatatcccatatgacataattgactaacagatagcaaattatatccaagactctccactaaaaatacattagagatagaatgctcattagaaattgcaattttacctaacccttttaccttgccttgattcccatcaccgaatataattgaatcttgggaatccttattcttgacgtaggaagagaacatcttcttctcccccgtcatatggttggtgcatccgctgtcgataatccagcatgaacccccggatgcataaacct

SEQ ID NO: 17004 - DNA, 424 bp, Zea mays
  unsure (1)..(424): unsure at all n locations
ggagagtgagctcgcttattatgattgttaccaaggngagtcacttcaatcactccttgatcggttgatggtatcagtaaacaaaataagagtgcttggaagtgaagattggagtgactccaaggtcacaagattatccatgagagcatataaagaaaaggatatgagttcagcatggatgattagggatcgtgatgactatgaggatataacccctcatcatatatttgcaaagatgctacaacatgagtccgaagaagcccctatcaagacatgagactctcatgccttgatcactaatgaacaagacacccccatgaagaacacagaccacaatgcaaagagagtggtcgagacattcagtgatgaagatagctcatgtgtcgaagacacaactatgttcatcaaaacattcaataaattt

SEQ ID NO: 17005 - DNA, 434 bp, Zea mays
  unsure (1)..(434): unsure at all n locations
tgctngcacagtcaagggtgatcgatttgataacatttacggcacatcaaggatcactatataaggacgtgacttacaaccaatgaggtaacaactctagttacgtggtgtaagtcataaggctcaagatcaagctctaagaatgagattaatggcactagaaggagaacaagtgttaaaaccagaactggaagcagcccaaaagagctaagtacatcttgatcttcactttgggatgttcctatgattggagatgttctatgtgaccttcgcaggatgttggagctaagaaatgtcaatctagatcaagtcaagccatcttgatgatttatgagtccaacatcaaagctcaagcatgtgaaatgttgtagatataacaattaagagaaggtatgtttctagacttagaacattggtatttgagtactaacata

SEQ ID NO: 17006 - DNA, 497 bp, Zea mays
  unsure (1)..(497): unsure at all n locations
tcgacccggatcttaatcgactgcagatgcagcttgggacagctagcaaaactgtggaaatactaatggccttaatcacttgctgacatagcatccaacctcttagggagaacgataagataggctgaattcaagaacccaagtttatgagcatttccttgatgcaaaaatttcagggcagccaacagatcctccttaataatgctccaacaagtcttgtaaaacttccccgtaaacccatcaggccaaggagctttatcagaaggtaggcctgcaatagtatcccttacttccttctccaagaaaggactgtccagcgcactgagatccaacacattcctatgacagcttaataaatcaatagtagcactctgaaaatcagtgcctagaaggttggaaaagaaaccatccaggacctcctgaatgtcatcatgatttgtaaacacccttccatcctcctctagttttgaaatgaacttccgctttntacggtaaca

SEQ ID NO: 17007 - DNA, 454 bp, Zea mays
  unsure (1)..(454): unsure at all n locations
agcangntgntctattataaaataaaaaacatgtggcatttcaacttccacaagccaaaaactttcattctctatttccaaacacttcgtaattgaccctttgtcttccttaggttcacttttgccaccattagttcttcgatccactccaactttattgctctagtggttgtcgctcatccacaagagttttaatcttcttcaatagataacaaagatctgcaaaccctacgagttgatgtcatagaagaggataattcaatggcaagtgtctgacaaggaaccctactcgatgctggactaggaagaaattgtagtctttgctccattcttggtgcataagttcgtcctccctacttctaaattctttcgcaaccccctctaatattactaaaccaagttggttcatctgaaccctaactccatcttacatatcaaccatttgtccatatgt

SEQ ID NO: 17008 - DNA, 457 bp, Zea mays
  unsure (1)..(457): unsure at all n locations
agcttgataggtgatccaaagctcagatgattcgaagctcaatgatgtcaaagctggagaccttgctgaaaaaattctagagaaaatcttgtaatatcgttgtaaaaatatttgtaatttaagaatcaaatactaattctataaatttgtgcatacctttgtaatatatttttacctttccgtccatgtatgaactgctttgatgtggacgaaactagtatttttcggccgaaggcgaaaaacaccttcccttcttttcgtacacaacgaagcatgaaactgcttctttttctttntgccgaagccttatctttatagccgaagcatctgcatgtgtctgtatgttatgatgatgatgatcctatgtatgtctaaatgaatgtttatgaatgcaaatgtatgatgtaatatgtcgtgcaaataaatgcccaaacatacacatncgaagcttatccac

SEQ ID NO: 17009 - DNA, 411 bp, Zea mays
  unsure (1)..(411): unsure at all n locations
cctgaggcatgcaagcttgatagagaagaagagagaanagntcccttcacttcattgctcttacaagatgtaaattaaactaagagcactatcaaaagtgaatagagagaacttatgaagagagaaatgaaagggaaatgtgcccttgggccatttctaagtattttggtgattaagtgcccaacacaaatggtttaagtgttaatttgtgccaaagactcaagaagtgaaaatcaagatacaaggtatgattctagacttagtacattggtttttgtgtactaacatatttgtctaagtgctagaatcagagaaaatacaaaaggaaaaagacttggctggagcagccaagactctgcgcagtctgggtgcaccggactgtccggtgcgccaggctggagtctggtcaac

SEQ ID NO: 17010 - DNA, 467 bp, Zea mays
  unsure (1)..(467): unsure at all n locations
agcttcctccagcattcttgagcccctcatgcatccgtaaatagcaataggtgccactgggagttataaagctagtcttcggctcatcctcgttcttcatcatatctgatgatatctagagtagcaatccagcagactcataagctctgaataagctgttgcatctacaagagagtctattcttggtaatggaaactcgtccgttggacaggccttgttaagatctgtgaagtcaatacacattctccatttgtcattggtcttcttcaccataacagtattggctagccactctggatattttacctctctgatgacaccagcactganaagcttttttacttcattccgagcaccttcggctntatcatcagaatattttcgaagtctttgctttcttggcctgaaggatggattgacattgagtgaatgttcaatgacgtctctgttgacaccacagagatcat

SEQ ID NO: 17011 - DNA, 382 bp, Zea mays
agcttgtgtggaatgggagacgactgatcactctgatgtgtcttgtattgaatgctagctcttgtaatgtgtagaagtgggaaaacttggatgacttgaatgtgggggtgtgctctatcctataaccctctctcttctttcttacttcatcctttcctcactcttcttcttactccacatctcctcttatttcaataacactctctttctcatactaccacttctcttcttatcctttctccttccttcctctccacttctatccttctcactcgctcttcctttcccaccttttcttctttctcttctcttcccctcctctctcttccctttctccttttctcttttcttttcccaatcttcttctccctttttcttctcc

SEQ ID NO: 17012 - DNA, 470 bp, Zea mays
  unsure (1)..(470): unsure at all n locations
agcttattggtgttgtttagcaggtcatctattataagagcangtaaattaattggatctgttcaaaatggctagcatattgtggacaaggctatttacatcacaaaataaaccctattatgcagaattttttagtactatgatgttcttcctattctcatttgtcatcactgatcaactgtaccacccttgaaatgtctgaaatgtatgggtctgcatctgtgatcaactgtaccacacttgaaatgtctaatgtctgaaataacaacaaaccttctttgtgccaatatgtaaatactatcaaattagtactacgaactataataacataacaaaaatgcaatgatactttatctaaacagtaacaacaaatgtctgcttacataattggcttgtcctcaaatggtttcacctaatatatntttctacccttactggcctttaatctctctctactncacttgttcatg

SEQ ID NO: 17013 - DNA, 473 bp, Zea mays
  unsure (1)..(473): unsure at all n locations
agcttgtttgttaagggtcaagggttgtgatatgactatcacagtgttgtcctcacttatcccttanaattagattcttgcatgtgttcgtgtcctgactgtcccgcaaccaaacacactatcccaatgctagagaggacgccaggaaacgttcatatcctaactgtcccacaatcaaacacactagattcttgcatgtgtccgtgggtttcacctatggtgagcccgaaggatgtcttcttcctcgaggaaaatgtgggattgtgtcatcattaccacacaattgtctagatttgtctaggtgtcaccatatagtcgtatgggttttttcttcagtggcggtggtgtacacgatgacaacaggccatagccttcgacaaatgatgaggcttccatcttccaaatcttgtaagccaaagacatgccacaagtggctcaagcccgctagtgtgagtgtgacaccccacgtcttg

SEQ ID NO: 17014 - DNA, 430 bp, Zea mays
tttgagcccctggcggccaatcagcgatgaaatctgctagcgcttgggattgaattgaagatctgtgcacgtagtcaatagtgaattcattaagctccgtggcccactttccaatccttccagtagcttctctattcctcacgacatccttcaggggctgtgatgaaggaacaattatgtgatatgcttgaaaataatgccgaagctttctggacgccattaacacagcatacaacaccttctctaattctgtatagtttttctttgataaactcataacttcagagacaaagtatactgggacttgctttttagcttgtccttcaagcttctcttgacaagcgccacactcactgttgagtgcgaagctgccacatacaatagcactggagcccctagcacgggtggagttaatgttgttaaatcaatc

SEQ ID NO: 17015 - DNA, 436 bp, Zea mays
  unsure (1)..(436): unsure at all n locations
agcttgtgtgggggtgggggcttacctccgtctttatccgattctccgngcagagggattggatggaggtcgcgaaatcgcatggaggactaggggaaaaatgccttggagagaatgggcggtcaataaacgcagcttgaactccgaaacgcgtggatctgggcggagacgaggcgagaccacagacgagggggttgggcttggttccataaataaagcgacacggttgttaggttaggtcaatggcggaagcttctggagccgtctggtccaaattanaacgcgcgggtaggggacgggaagggaaggtgagggaggaaaggnggtccctttcgctttctctgtttgggtatccacttttcaggaagctcgcgaggccgaagagtttgggatggcctgcgccctgcgggttgctggtggtccgctgatatgaatc

SEQ ID NO: 17016 - DNA, 473 bp, Zea mays
  unsure (1)..(473): unsure at all n locations
agcttctaaagggagaacacantttgggactaacaaatgttcattttgagaaagacagggtttgtagcgcatgtcaagcaggaaagcaagttggcgcccatcatccacacaagaacgtcatgacgactgataggtcgctcgagctactccacatggatttatttggctcgatcacttacataagcatcggcgggagtaagtactgtctagttattatggatgattattctcgcttcacttgggtattctttntgcaggaaaaatcacaaacccaagagaccttaaagggattcttaagacgagctcaaaatgagttcggattaaggatcaaaaagataagaagcgacaataggatggagtttaagaactctcaaatcgaaggctctcttgaggatgaggacatcaagcatgagtcctcttctccctacacacctcaacaaaatgatgtagtgaagaggaagaatagaactcta

SEQ ID NO: 17017 - DNA, 476 bp, Zea mays
  unsure (1)..(476): unsure at all n locations
catgcaagcttgcggttgaggcggtgagtgcctcgtcgtggntcatgccgctatataaagccacggcggaccgacaagcgatcagcggccgcggatcaccttgctagcgcatggataccacgtagaggagaagtacagtgaggtagatcgaggcacgggtgacaccgcggcaaaagttgatcgagtcacggtggtcgccggtgaccaactccggccacacgtggctcggcccgcggaacgatgccacgtatcgagctacacccaggcgatccaatcctcaccgatccatccaagttcatccaaatcaacagcgtcatggatcttttggtattctttagatatgtgtcagggttcgatcttcaacgctcttctgaaccgatcaccttctaccctctttatctctggattnttgttaagaacagagcaacttcccttaataaaatntgctcactaaacatcagtctacacacttactt

SEQ ID NO: 17018 - DNA, 461 bp, Zea mays
  unsure (1)..(461): unsure at all n locations
agcttaccacattngaagcatgagcgcttcccctntgtcttggtcttgcttggctgccccttgcgaccctttagcgccgtcttgaatcttttgatgatgagggccatttattcatcattaagtctggccgcctcaatttgtgccaccttgctaggtagcgcctccttgcttcttgttgccttgagagcaaggggttgaggctcggtgattggaccattcagagacgtcgccacgtacttcgcctccttgatcatcattcgcccgcttacaaattntccaaggacttcttcgggcgacattttggtgtacctgggattctcacgaatattattcaccaaatgaggatcaagaacggtaaaggaccttagcatcagtcggacaacgtcgtggtccgtccatcgcgtgcttccgtagctccttattttgttgataagggtcttgagccagttgtatgtttgggt

SEQ ID NO: 17019 - DNA, 458 bp, Zea mays
agcttcacaaggaggaggtgcaaactaccagtggtattgtgttattgtgataaggaattggttattcacttgcacatgtattgtaccgcattcaggttgatgctatgcttcaagaattagaaaaggagattgatgatgtggatgcacaaattggaaaccgttggcagctgcttgataggtatggtgcttctatgttggaagttgtttaatgttgcataatagtcagctagtccgttttttaacttttaagtacccacttatctgcattcacaatattgtttcgtacatttttgtgaaagggcctctagccgagttggttaagtggtctgagtagcattccttaggtcctgagttcgaatcccagtgagagcgaattttatgccgaggttaaaaaatgtcacttgttggtttccctagtcatgtgcacatgagatggactgacctatgagggcggatct

SEQ ID NO: 17020 - DNA, 461 bp, Zea mays
  unsure (1)..(461): unsure at all n locations
agcttagttatgtttatgttgtctttttntgaagtgtctaanggtgtactggaaaaaatagactactatcgctctaggttcttctggcaaggagatcatcataaaaaaagtatagacttgcacgttgggatattctttgtcaacctaaagaccaaggaggtctaggtattcagaacatagaggttcaaaataagtgtttgtgaaagggaattangcttacacctagttcctaaatagttttggtggttgaattgcccaacacaaataattggactaactagtttgctctagtgtataagttatacaggtgtaaaaggttcacacttagccaataaaaagatcaagtattggattcaacaaaggagccaagggacaaccgaaggcacctctggtctggggcaccggactgtccggtgtacaccggacagtgtccggtgcaccaccggacagtgtccggtgca

SEQ ID NO: 17021 - DNA, 489 bp, Zea mays
  unsure (1)..(489): unsure at all n locations
cctgaggcatgcaagctntagggtaaaagtcataaaatgacccctataataaagatgaatcacatttatacccctgggataccagaaaccctaattggaaccctggaaaaccctgaaaccaaaccctaggggcttatatgcaaaattggtccacttttggactaaagtgcaaaaaccaagctaaataagtgttttaagtcaattggttcacaaatatgtggacttgaaagccaaaccctaagttntgggctcatttgcaaaaaggaccttgagtttgattcctatgctaagtctgaaaacagggttataggcccaactttggggctgtgtagctttcaaaatagtgagaattcatgttaggtgaccacatcaaagttgaagacctaacataggagaacaactttgcttatgaaggaaagcatagttattaagaaaaagtcagagataattaagcctcaagtttggctgcaggctggccattctgaattc

SEQ ID NO: 17022 - DNA, 467 bp, Zea mays
  unsure (1)..(467): unsure at all n locations
agcttatgaagattcttcatcccaacatgggctagtcgacgatgccagagccaacccatgttagtcttagcaattaagcaagtgtcgagttcagctctatcaaaatctaccaagtatagctgaccctctaacactcccttaaatgctactgaatcatcacttcttctaaagacagtgacaccaacatcagtgaatagacagttgtagcccatttgacataattgagaaacggaaagcaagttgtaatctaaggaatctacaagaaaaacattggaaatggaatggtcaggagatatagcaatnttaccaagacctttgaccaaaccttgatttccatccccgaatgtgatagctcgttggggatcttggttttctcatatgaggagaacatccttttctcccctgtcatggtggttgtgcacccgctatcgagtatccaacttgagcccccggatgcataaacctac

SEQ ID NO: 17023 - DNA, 441 bp, Zea mays
  unsure (1)..(441): unsure at all n locations
agcttgccttcgcctcagtgtaccacccgcattccaacggatgtgtggaacgcgccaatggtaaaattntcacagccgtcaagaaaatgctcctcgacgacaaaaaaggcaagtgggtcgacctgttacttgaagcggtctgggcactaaacacgactgagtgcagggcgactgggttcacccctttccgccttctatatggatcggaggccatgaccccgcaagaaataaaacatgggtcaccacggacagtcacgtcagtcgtccccgatgtggacgagcctacttcgaaggacctcatcgacggagaccgcgtcttcaccctacaggctctaaacaaataccaagctcanacaaaagcatggcgcgaccacacagtcatcccgagggaattcagcgaaggagacctcatactcgttcggacagcacggacagagtccc

SEQ ID NO: 17024 - DNA, 470 bp, Zea mays
agcttgtgaagttggatcctacgtctgttatgatgctatttggtattccaaacctgaatattatgtcttgtatgaattccactgccttagctgaagttagagaagcaatgggttagaactttatccatttagtgaatttgtcgataggaaccagtacatgagtgtatcccccttgagctttcttgaaaggcccaatcatatccagtccccagcatgcgaacggccaagttacgggtatggtttgcagttgctgtgctggtagatgctgctgttttgacaagtactagcaggcttcgcacctctgaactaatttggctgcatcacttcttgctgttggccagtagaaacctgatctaaagaccttcccaaccagggtcctggaggctacatgtaccccacattgcccagcatgaacctcttctagcagttgctttccggtggctgagagaatgcatttcatgaagactcat

SEQ ID NO: 17025 - DNA, 474 bp, Zea mays
  unsure (1)..(474): unsure at all n locations
ttagagtcacctgcngcatgcagcttgacatcgcctancatggcatgtttggtgattggcgcgtcgtttcaatgcgtctgctgacgcactccccgtcaatcagcctttagtcacgccaactgccatatctgtccccgcggctgacagacccgcggtccccacgcctggtggtttcgtcgggccatgcgtggggcacctcgataccgctgcattggtttaaaaattaccttctctgtcttctacggcagcccagaggaggcgcagtactggcgcgagctgcggttcactctttccgcacccgagaaccggcacccaaggagtatgactcgtgggcctaggcccccgtgtcatagactgggctgatgtttcttgcggcggagatgaagaggcacgctaccacgggcggcagtttgctcctcgtggtggcggtcgcctttntcgcactcggagaccggcacaccagctgtatgactt

SEQ ID NO: 17026 - DNA, 467 bp, Zea mays
  unsure (1)..(467): unsure at all n locations
agcttggtaaataaatcttataactactcattgtctcaantgatataaatatattattatcatacaaagactccaataaatatgatgcttgtaggtctcaaaaatcttatttntagttctcaaattatgttattatttaattcaacaaaatctacttaagaaaacaaactttgaattagtctctaaatataaggtgtgatctatctagacataagcacattgatacagtagtataaagtgaattaaatatattcttagtttttaaaaccagaggtgtttgcaccttattatatactagaacagaggaacagagggagtatataaattgtactccctcaatttcaaattataattcaattaaatcttttactttaagtttaatcgactcgtcttatttaaaanatcataattatctttaagttttacttgtatcgtttagtatataatataattgaggtatgattttg

SEQ ID NO: 17027 - DNA, 471 bp, Zea mays
  unsure (1)..(471): unsure at all n locations
agcttctaaagggagaacatgtgataggtctaactaatgtacatttcgaaaaagatagaccttgtgcagcttgtcaagcagggaaacaggtgggaggctctcatcacaccaaaaatgtgatgacaacatcaagacccttggagatgcttcatatggatctcttcggacccgtcgcctatctgagtataggaggaagtaagtatggtcttgttatagttgatgatttttcccgcttcacttgggtattctttttgcaggataaatctgaaacccaagtgaccctcaagcgcttcctcaggagggctcaaaatgagtttgagctcaaagtgaagaagataaggagcgacaacgggtccgaattcaagaatcttcaagtggaggagttccttgaggaggaggggatcaagcacgagttctccgctccctacacacctcaccanaatggtgtggtagagaggaagaacaggacac

SEQ ID NO: 17028 - DNA, 453 bp, Zea mays
  unsure (1)..(453): unsure at all n locations
agcttaccgcanttgaagcacgaacgcttccccttggctntggtcttgcttggctgtcccttgcgacctttaagcgccgtcttgaatcttttgatgatgagggccatctcttcatcattaagtccggctgcctcaatttgtgccaccctgctaggtagcgcctccttgcttcttgttgccttgagagcaaggggttgagacttgttgatcggtccattcaaggcgtcgtccacgtatcttgcctctttgatcatcatccgcccgcttacgaattttccgagtacctcctcgggcgtcatcttcgtgtacctgggattctcacgaatattgttcacgagatgaggatcaagaacggtaaatgaccttagcattaggcggacgatgtcgtgatccgtccatcgcgtgcttccgtagctccttaatttgttgataaggatcnttgagccggtgtat

SEQ ID NO: 17029 - DNA, 466 bp, Zea mays
agctggtggaggttcttcatcctcacatgtgctaagcggcgatgccacagccagcccatgctagtcttagcaattaagcatgcatctagaccggcctcttcttttgcaaaatcaactaagtaaagcttgccgtctaatacacccttaaaggctagtgaaccatcacttcttctaaagacagacacatccacatttgtaaaaaggcaattatatcccatattgcatagttgactaacagatagcaaattgtaaccaagagactcaactaaaaacacattggagatagagtgctcattagaaattgcaattttacctaacccttttaccttgccttgattcccatcaccgaatattattgaatcttgggaatccttattcttgacgtaggaggtgaacatcttcttctcccccgtcatatggtttgtgcatccgctgtcaataatccagcttgaacccccggatgcat

SEQ ID NO: 17030 - DNA, 468 bp, Zea mays
  unsure (1)..(468): unsure at all n locations
agcttcanattatattntaaggcaatcggtgtatttctcgacatttccatggcattttctctgcatgaacccttaataaattttgttgtagagttgatatagagttgtttgagcaagatgacaaggctttgttgaatttcaaaattcgcatttgttcggacgagcagtttcaagcatgtataggatttatctttttatgtgtgtatttggttcgaacttctagaaatctttagatacacttgatagatagagatgaatgatgatatagagaaaacaagtcgatttgcataagaattatttagaggttcacacaaagagatcctgcgggagaatgcggattcagattaagtatttggacgtagaccgactatcgagacaacgaattcggacatcgatcggataatatcacaactgtcaagagtccgaataaatgagtctggataggagttacgagacgatattgacttt

SEQ ID NO: 17031 - DNA, 429 bp, Zea mays
  unsure (1)..(429): unsure at all n locations
agcttagcaatggtgatggcgatactagtggcattgtctcatggcttctggtggctgagggttcgggatgtggtgggtaggggtgtggaggggtacgatttatagcccggtgtgctcaatttagatggaagagcaacggtgagggggtatgggtggagattgcctgtgacgaccgagatgctctcgggcattgctggcgccattaagaaggggatcgagcggngaaagggtctagtaatgttgcacatgatcttagctaactcctgacgaaagcagagagaccggttgggctctacaggggtgagatccacaaggaacacgcgacaggttggggatggcagctcgatccaacatgtgagacaccgagagagggagcacgttcgcatgaccgggtgaggaaatgatagcaagggttcacttgcagcaagt

SEQ ID NO: 17032 - DNA, 502 bp, Zea mays
  unsure (1)..(502): unsure at all n locations
acctcanagtcacctgaggcatgcaagcttacccatgacgaggcatgtggccagtttaaatgtcctcaatcatcaagcctacatctgtaaggtccttaatcgactcagacggagacactacaccgagacttccttctcgtgcaagtcacttgcccggtctcagctttattatttacaacccanagttttgtacctggcagaggtacatcgtttccgatgttgaacccatcatggccatgatggattcaccatcaagtcttctctttgaaaattcccatcccatatgaagcatcaccttttaaaaaaacaaaactttntgttgtctaaagcacagctaagcatcagaaaacttttaagtaaaataggtagcaaggaatggtaatcaattccaaggaagggaaatgcaacaattgtttagcacacaactcctataacctaatggcatcattcaagtgataaagatnttaaaataacaaggaaggggtaaatgcaccggggcttt

SEQ ID NO: 17033 - DNA, 474 bp, Zea mays
agcttattgtctttctccggggacatccgttttcttcattaagacttctacacacatgatagtcttgaaatcggtggtagtctcaaagactcggattatagagtaatatacacagtttgaatacttgtaggagacataaaatttgacttttaagatcaagtagaggcatatcatctataatccgaactttggcacatatagatcaaaatgatactatgttaaaggataccaaatgagaggtgcaagcaagtatcatttatctaggagtttaattaagctatgtgccctgctctactaaacattttaaaccatgtatgtttgctcaaaaagtaagaatttaaactaagcattcctaccataagatatacctagtatgcatgcaattcaattgaaataaataacaattgataagatataggcatggagaacactaattaaaaagcattacaattgagagcaaaactaggaagaatg

SEQ ID NO: 17034 - DNA, 476 bp, Zea mays
  unsure (1)..(476): unsure at all n locations
agcgcctgtggccccgggtcgcctcggcaacgagcactatcaccacaaccgtcgggcccacctcgacgagagggtgcgccgaggctatcaccccaggcgtgggggatgctacgacagcggggaggatcggagtccctagcccgaaccactcggtccgcaggctntcagccgtgccatacgacgggcgccattcccgactcagttccgaaccccgactactatcacaaagtactcgggagagacgagaccggaattgtggctcgcggactaccggctggcctgccaactaggtggaacggacgatgacaacctcatcatccgcaacctccccctgttcctctccgataccactcgggcctggctggagcacctgcctccggngcagatctccaactgggacgacctggtccaagccttcgccgacaacttccagggcacgtacgtgcgccctggaaactcctgggatctccgaagct

SEQ ID NO: 17035 - DNA, 447 bp, Zea mays
  unsure (1)..(447): unsure at all n locations
agctttngaaaataacaatttcatccttctctggctttggggtagtctcttctcccccgaagcgtaatagcttcttctgattntcattaaaaaagcccgacttcaccatcttggagagatcagccttcgaaacagtagatttcccgaaggccaagtggctgggcttgcttggcatggcaatgcgataatcatcttcgggatcagtttcctcaatatcttcttcttctgcttcagcgattgcttgttctgcttgttctgcatcatcgctagggatcttttccgaagtcaccagcccggatcgttgcatggcttcggagatgggaacagtctccgaagctttagtttcgcccccctcacgctcaaccctggcggtagagcgcactctggccatttaattatgaatntgtggaaatttaatactttnttcttctngaagttttcttctga

SEQ ID NO: 17036 - DNA, 470 bp, Zea mays
agcttaatgcccctaagaaattgtctaactttgttaagggcaaggctcccatggttcaggatagagagggttacgttttatatcctgcaaactatcctgagcataagattaggaaaattcatgctagaaaacctcatactgtttctcatcattcttttatgtataaaaattaggcttctagatctagacataccactcatgtcaaaatgcctaagaagaaaattcctaatgcatcaaatgagcacaacatttcatttaaaacttttgatgcttcttatgtgcttactaacaaatcaggcaaagtagttgccaaatatgttggggcaaacacaagagtccaaagacttgtgtttgggtacccaaggtgcttgtttctaatgtcaaaggacccaagaccgtttgggtacctaagaacaagggcctaaattgttttgtaggtttatgcattcggtggttcaagttggataatc

SEQ ID NO: 17037 - DNA, 460 bp, Zea mays
  unsure (1)..(460): unsure at all n locations
agcttgcattgcagggatgttgggtntggtgtattacattttattntcacatcagaatcaaggaagacaaaacaaggctggttcatgagagcaaaggaggcctccaagaagttgacctatntgggcgttggtttcgttcatttcgatgcgacgatcatcaggaaggccgtcgattgcttcagaagcaaagggctcatctaggccatgtgaatatgttcagctgtatgtctgtgattctgagaacagctacaagcaatacttagctgttagctcaaacaaaataaactgccagaattgaatgcattggaagggaccatcggtgtggttgcatggctccactgnggttaaaatattgatgtccatcttcgttgtatgcgagtttaatcaaccacccgttcggacttcggaggacataagttatgctcatttatctactccttccattgcaaactacagtcat

SEQ ID NO: 17038 - DNA, 455 bp, Zea mays
  unsure (1)..(455): unsure at all n locations
agcttcatcagcgatttcttttcctttcccttacgctgcggtcacggtctcttcggcggcggtcgtagtctcttctgcagccatgtctagcagtatttggtcaatgtgttcaattgtgctctccaggttcaaatcttcagctgaggcagcttcagcagctgctgcctccgaaggtgcaatttcaatatctgtcccctctgcagccgatggtatattctgggctgaagctcttggcggcgtcttgtcgatcacctctgtcacggtaataattctttgtttcttcgccttgattgttttcttcgatttttcgggctccttgtccttctgaaaaaactntgtcagttgagggcccagtggacttagcttcgcaggtaaggattcggtcattaccttcagaatttcctcaacgacagcagcagaaggtgaggcggnnggttcttctgcttcggacattt

SEQ ID NO: 17039 - DNA, 474 bp, Zea mays
agcttgactctcgcaaccagacgaagctccatttttaagcctacttcatcagaagaaaaagcttcggaagaaaaagtttcagaattaaatggccagagtgcgctctaccgctagagttgagcgtgagggaggcgaagccgaaggagcggagactgttcctatctccgaagcgatgcaacgatccggactggtgacctcggaaggaatccgtacttccgagacagagcagactgttgccgagacagaagaagttgttgccgaagcggaagaaggaaatattgaggaagctgattccgatgatgattaccatattgccgtgctaagcaagcccagccacttggacttcggaaagtcgattgtctccaaggctgatttctccaagatggtgaagtcgggttatttcagtgagaatgagaagaagctacttcgcttcgtgggagaagaaactaccccgaagccagataaggatgaaat

SEQ ID NO: 17040 - DNA, 469 bp, Zea mays
agcttcaagatccgagcctgcaggatcggattgtcttgtatcgtgtgtttcctgcggccgccgaggccaaaacacaccctcgccgtgtcgtaaagctgcatctcttttcctcttgtttcgagcatctggacctttttgtcggtgacagaaatgtttgtgcgagcgagagttgcttctcacggaaggtgacgagtgaggtatccgtatcccggaggcgtaggagtccctcggctcggtcggccttgccgcttacgcgcactcttacccgtccatggggttctgtcaccgacacagtcgagaaggctcgaagaatcgcttcggcagaagagcttccgaatgtgaagacttgttcggtccgtggaatctcttatccaaacgtgagttacttatcgcagaaggtgatgagtgaggtatccatatcccggaggcgtaggagtccctcggctcggtcagccctgactgcttacgt

SEQ ID NO: 17041 - DNA, 459 bp, Zea mays
agcttctgccacgacgtgatattcctttgttttagagaagaataccatgtttgggctacattccggactgccatgacgaaggacttcgccatgactacagtattgcccccatacgaagatatagttgcttcgtagctcatcagaaactgctttggatctgagtgcccatcatacatggggagctgaggtggcttgtatgatgggggccatggggtagcctgcagttctgctgccaagggagaagcatcatcaaaagtaaaggcatcatgattaaaatcatcataccatccatcctcgttgaataagccttcttgacgaagctccctatgttggggccttcgatcttgttcatcttgaacaagatgacgcacttcttcagtggcttcgtcgatctttctttggagatcagctagtcgtgccatcttctccttctttctttctacttgctgatggatgatc

SEQ ID NO: 17042 - DNA, 461 bp, Zea mays
  unsure (1)..(461): unsure at all n locations
agcttgctttcaaactttntggtcccttcatatttctgcagcgagtgggttccgtcgcctacagattggagctgccatcgacagctntgattcacctagttttccatgtttctcaactcaagccgttcattccaaagtacactccagtttttcagatatttctcaactggtagatttgtctggtgtgacagtgaagcctctgcagattgtggatcgtcggttggtgaagaaagacaacaaatcagtgatccaggtctaggtggtgtggtctggtttttccaactcatgctactacctgngaggactttgatgtgctcaagaatcattttcctgaggtgcttgattgggggcaatcaacttctggcaggggaagatgtcagcatggtggcgcgtgcgtgaaggcangaaggcgttgtgcgtggcgcgggaagtgaagaatagaatttcagttcggatatgct

SEQ ID NO: 17043 - DNA, 476 bp, Zea mays
  unsure (1)..(476): unsure at all n locations
agcttcttatctgaaatagtcagccccaaataagtgcaagggaaggaagaagaggagcttatagaatgttacacccttcatgcagcaaatcatcttcacatcttattgggattgctcaactcttgtgcaaattagttactgagcgtgaagcttccccaaagcagtcaagaatgagcttgacacagtttagctcctcctctctaggcttgataaacaagactacatcatctgcatacagtgataatctagtcttcacattggcaccttccagactagccaaattttttgagctatcttctgtttgattctttatttggatcattactttntaattgtgttgtgtcacacgtggttgaacttgatatgcaataaactacaccgtatttccttcatgacatcagggaaacgtgtgaatagtaatgtgatgaatgcttcanagaggccttttaagagtgactntcaatatggttcaagaa

SEQ ID NO: 17044 - DNA, 455 bp, Zea mays
  unsure (1)..(455): unsure at all n locations
agctttaggctntagctttagcatgcatcagcgccatgctgtatctatgatctatccctctcacacacaatgcaagctgaacacatgcatgtaatccatgcatggtggaaagtaaccataataatgtactctagctagcgacctttcaataattaaagaaccatatatatatacagagaagccacgtactgaactgcatggccccgtcgtacgcgcgtcgctgaacatctagtcagaaataacatgcatgcatggcaggctctgctggatgcatggctcttctcgactgtacgtacgttctatggatcgagagtagctagagccaccacgatcgacgacgtgaattgacgagctgtgctggccggacacgggccacctgttggatggtctcgacaggggcccggcccgttgtttaaggatcccgaanaggagaanggaagaaatccacatatgca

SEQ ID NO: 17045 - DNA, 489 bp, Zea mays
  unsure (1)..(489): unsure at all n locations
tgaggcatgaagcttgtgttcgtcacaagcaaatctttctttgagctatattttgcaggaacaaaagatgatacatatcaaaagctcaaagaagagaatgagaggcttaagatgagcttgacacaacttaaagggaagtgcatttctcaaccttctcaagataaccgtgatcacatggtgaaaaagcttgagatgggaacaaccgtggcatgcactatatcccttaaagaaaatgtcaaggacttgaggattgccaagaggagggaacaaaagaagaaaatcaatacctcttccaaaagcctcaaccatgcctccatacaaggtaacatccaaggtaataatcaagtcacacttcatactaagagaagtaagaagtgtattgaatgctttgaaaagggacactcgattaggtcatgtccctatattaaaaatgacttgattactaacaaggatgataaactnntgtttaaatgctcaaagaagggacac

SEQ ID NO: 17046 - DNA, 441 bp, Zea mays
  unsure (1)..(441): unsure at all n locations
agcttncccanatagatgtaaaatatctagagttatttttatatccgctgccgaagggtgtaagaagagtgccacatcatctgcatacatagaaacccgatgcagaggtcttctggggcaaagatccaagagcagaccagcgtgttcagctttagaaaacaatagaccaagaacatccataactagaataaagagcatggtggagagaggatccccttgtcggagacctcttctatattcaatatgtcctcctggaatgccattcaaaagcacctgagtgctagaggaggaaagaagcccacaaatgatgtccctccaaatttgtccaaagccaagatacttcataacttcgatgaggaaaggccaagaaaccgaatcaaaagctttagtaatatcaagcttgaggagaagacgtggccttttctgttgatggaaaagtct

SEQ ID NO: 17047 - DNA, 442 bp, Zea mays
  unsure (1)..(442): unsure at all n locations
agcttgcaagagtacgagtaacgacgaccttttcctactctttattatgctgatcagggtgacaagatgacgaagaaggctcacctaccctgngcattgcaattaaatagtcagcaaacaaattaatttaccaaaaaatgccactacacacaatttactaattaaatattaaagcacataaaattttgtgaagatgtcacacctggatttaagggataaagtcgggtgcgtctcatatgtgcgccaaaaaagaacaacacatataataacagaatgtatagagataaatgtcacaataacataaaagtaattattacatagcggaagtcttatgaaaataaaagataaatataaagcgaactaaggtccatccttgacgccataaagtcgattgggagacgccacctagatcaagtcgaactcctcgttgtgcggctcatct

SEQ ID NO: 17048 - DNA, 485 bp, Zea mays
atctctagagtcacctgcggcagcaagcttagagaaagttcgatgggattgagttcttacatgtccttcgggctaaaagtgaggaaacaaacatacaagccaaattggtctcctcaagttcacctatcctagaggcctatctagagatactaactatgcctaccattcaaaagatcatagagtcacctcaagccaagttgcctaaggaattagatccatagatgttataagccccttcagctaaggttatgactattgacttagactagtgggctctttttatcaagtaccgccaggatagagtcctctcatcaaatagatccacgctgttcagatacaacacaaagcaaaaacttacatgttggttaatgccaatctatacataaaaatgcttcgggaattctgatgagatgtgtcccgatcgatgtggggaaggcattacttgaagatatccactcaagcgtctatggcaatcatgcaggggc

SEQ ID NO: 17049 - DNA, 465 bp, Zea mays
  unsure (1)..(465): unsure at all n locations
agctngaacccggctattccatacatgatattactatcgcgcactgggagtggagagatggcgagagtggcacgtaccctcctggcaaaggatcgcctaaaaggggtggtgtgctctcgggtggcgcagacctgttcatgcagtggaggatcagtgggaatggtagacatgcaaggtttacgagaaacatatgtcgtgtggttagagatcatcatctgagtaaatcgattcggatcgctgntatatccccggagagtggagacttgatctccgacctacaacctaagtcaggatgtaaacattatgagtaaaaaatgatgttgtattgatgagatggtgaaattagactaggtgcaaacagagtctattaatatttaatctggcattaaaatatcgaaagtaaggactcactttagtaagctgtttctgcaagagtatctaagtagattcttgctagcagcctct

SEQ ID NO: 17050 - DNA, 431 bp, Zea mays
  unsure (1)..(431): unsure at all n locations
agctngtgaacaatacaaattcagaatggtgtaattatcatcagccgaagcccatgctcttatgtgaggacatagcagaacagaaggtgctgttgggctctcaattatccaaagaacaagagaaaaccttgataagggttttgttcaacaacaaagatgtttttgcatggtcagccaatgatctctgtggagttaatagggatgttattgagcactcgctcaatgttgatccatccttcagacccataaagcagaggcttcggaaaatgtcagatgataaggccgaaggtgctcgtaacgaagtcaaaagactccccagtgcaggagttatcagagaagtaaagtacccagaatggctagctaacactgttatggtaaaaaaggccaatggcaagtggcgaatgtgtatcgactctacagatcttaacaag

SEQ ID NO: 17051 - DNA, 451 bp, Zea mays
  unsure (1)..(451): unsure at all n locations
agctnttgaagctaaccactatgccaaagatctgtaatatccgaagggggctctagtgttcaatgggacgaacgaagaagatntcctatactgcctcccggacaacaaagaattgtccgtctgccgggagatggctagaagtatggggtttccgaagctcgaagctggcttatgcgctatgacgaaagaagatctcgcggacagtcttgcgtataatagcctgaaggtgtgggaattagacatttngtaaatttacaattcataactcattcttttattcttatancaaactcttttcatatagggtttaattctaagcaacgcactgagggcacaaaagagtgccgaagacgagagctatgaaattgcgttcaacaatctacgatcagtagttattaaactgaggaacgaagctctggaaaaagataaaattatgcttacattggtagac

SEQ ID NO: 17052 - DNA, 467 bp, Zea mays
  unsure (1)..(467): unsure at all n locations
agcttcttctcgtcgncgatgagtgacgcctacgtgagcgcctcctgctagtggtgtttgttcggggtttccaagcaaaaaacatggattcatcctcgggtttatgaaaatgactcataagtcatatccatggaaaaatattatagagaataaatgccacgcatgtaaaaaaggaatttaagttaaaaacattactgaaacaaaaaattgcatgcaaggctcttctttaaatactactccttccatccaaaaatataattcaagaatctcggtgatacttatctactactacgcattgtgcaagggtagtagggtaggcttggagagagatgtagtagatgtttgttctgtcatagatgtagacataaacacacatgtggtgtagtggtagctactacttgcatttgactgagagggtgtgggttcgaatccctttgaggtcaggttcattatgtttttaaaattta

SEQ ID NO: 17053 - DNA, 425 bp, Zea mays
  unsure (1)..(425): unsure at all n locations
agctntcaccatttttgggggtcactgctgatcctctgccgtcaggactcctacttcaccagcgacagtacgctcttgacattctggagtgggccagatgattgactgcaagccctgctctaccccagtcgacacgcaggcgaagctctctgaggacacggttgacccagtcgaggaccctaccgggtacaggagccttgccggtgcacttcagtacctcaccttcactaggccggacatctcctacgccgtgcagcaggtctgtctccatatgcacgacccccgagagccccacctcgcggctctcaaacgactcctccgctacctccggggcaccgtcgactacgagctgcttctccaccggtctacctcctccgagctggtcgtctacaccgacgctgactgggtcgggtgcncggacactc

SEQ ID NO: 17054 - DNA, 488 bp, Zea mays
  unsure (1)..(488): unsure at all n locations
ggatccttaagcacctgggctgcagcttcttatcatcttgcgttctttatataagaagagaaagcatgtctatgcatatccctgcttcattcctagtttaacctctcaaaaatttcattcctgtatttgatgcttttttgttaaaactgggtgaagtaattntttgtcaaagagcttaaagcttaaccttgtaacgaggataggctaccttcgtttctaaggtggagggtccttaagtctctttgaaacatcaagggtaaatgcatcaaatatctataacatgctttcttaagtgcatagtctgtcatgcgcatcacacctatattatgacacattgcacttcacattctctatgatatggatatgttctcattaacctaattatgtgcatttggcatttaaggccaaaataggtattcctctcaaggcacagatttatggggagcaatctatattatataaaactatgattaagcttaattgacata

SEQ ID NO: 17055 - DNA, 477 bp, Zea mays
  unsure (1)..(477): unsure at all n locations
agcttctgcattaggtgggaaatattactctgatgtatggatgaagggcggccgcgagatagcttatgaagctattaagaaaaatgagaaaggatatctcacgacgctcaagaagaagctaaaagagctgaagaagttgctgagcgcgctaggcttataggtacatttattatggtctagcttcgtaatctattttagcttcagaactaacagacacatgctacgatgcaacttaactatcttcccctccagagccatacgatccagaaaccgacccattcgtcaaagaggcgctggagattatcaaaattgcaaatgacgttattgacgaagctgtcgacaggcttctgaacgaagctgccgataaagtcctcaaggaggactaaaatctttgtattcttggtagttaaatgccctgcgaaatgattcttagatttgtaagaaacantatgtaacaatctgtatgtatattgatgc

SEQ ID NO: 17056 - DNA, 479 bp, Zea mays
  unsure (1)..(479): unsure at all n locations
agcttataacaagagaatggaggcaagaacattaccttatgttataatagaaggggaattgtataaacatggagtttgctcaccactccttaagtgtttatcaagaactgaaggtatggaattaatgaaagagatacatgcaggtctgtgtggatctcacattggatctaggcccttgttgggaaaagtctttcgacaaggattttattggccgaaggcagcttcggatgcagcaaaattagtccaaaaatgcgaaggctgtaaaaaatgtgcaagagatcagaagcaaccttaatctctcactcaattaatacaacccacttggtcgttgcaaaggtggggcctcaatatgctaggcccacttccaccagcacaagggaatctaanatatattgtggtggcggtagagtatttttccaagtggattgaggcgaagcctttagccacaataacttcggntactgtctagaaaatttttg

SEQ ID NO: 17057 - DNA, 471 bp, Zea mays
  unsure (1)..(471): unsure at all n locations
agcttctgatgcactacagcaagaaagggctgtacttgtattatcgcacggagagagccaacaagtcccggaccctgttcccacgagacgaccagcgcggcgactgagccggagaactgtctatcaaaggaggaggagcatctgcacaccgccctgaaagagccgcatacttgccttcagaatacgcaagccccaatgcaaatgcgaacgcgataccctctgctcagttcatgtccatgcagccagagatgtctagggggaacgtgcatccgagcatgccggatttctacgaactcgccgcgcgcattagtgctctgaggaacgcgtgagctgtgccccaagactgactgcccttcagcgacgcttctgttgtttcaagaacaaacctctaccatggaatctgaaacctgggggtgcctgcgagtcacggcctcacggnggataagaggacactcgaagagatacaactgt

SEQ ID NO: 17058 - DNA, 450 bp, Zea mays
  unsure (1)..(450): unsure at all n locations
tcttcaccttaatattatatatgaatgctcacagcanaggtatggaacaaatcgcttcaattggtagttgatcaataatagttcctctcaagtggcattctttcaattggtaataatatattctatggaaaggaatgtcaatatgaatgctaaatacctcttggcttaaatatgtaaattagtgcatattgtgaactcactgctccatgtgcattaacttaaaaggaatctaatttatgcctttacgcctcataaatgatgacttgttggccattcatatatagatatcatcattcattaaatacttccttgtactactaatacctcttttcatagtgtttcatcgactagttctaaaaggaaaagagataacaaagaaggaagtctccacaaatgatgatcagaagaatactaatgtgacaccaccacagatagtaagatctgtcaaat

SEQ ID NO: 17059 - DNA, 468 bp, Zea mays
agcttctaaagggagaacacgtgataggtctaactaatgttcaattcgaaaaagatagaccttgtgcagcttgtcaagcagggaaacaagtgggaggctctcatcacaccaaaaatgtgatgacgacatcaagacctttggagatgctgcatatggacctttttggacccgtcgcctatctgagcataggaggaagtaagtatggtttggttattgttgatgacttttcccgcttcacttgggtgttctttttgcaggaaaagtccgaaacccaagggattctcaaacgcttcctcaggagagctcaaaatgaagttgagctcaaagtgaagaagataaggagcgacaacggatccgagttcaagaaccttcaagtggaggagttccttgaagaggaagggatcaagcacgagttctccgctccctacacaccacagcaaaatggtgtggtagagaggaagaacagga

SEQ ID NO: 17060 - DNA, 462 bp, Zea mays
  unsure (1)..(462): unsure at all n locations
agcttagcaaaagagatgtctagaatcaagtatattgagctcatgcctaagtctggtaaaagattcttcatcaagtggcttggtaaagatatcggctaattgatctttagtattaatgtaagaaatctcgatatcccccttttgttggtgatccctaagaaaatgataccgaatggctatgtgcttattgcggctatgctcgacgggattgtcggccattntaattgcactctcattatcacatagcacagggactttggttaatttgtaaccgtagtcccgcagagtttgcctcatccaaagcaattgcgcgcaacaatgtcctgcggcaatgtactcggcttcggcggtggaaagagcgaccgaattttgcttctttgaagcccaagacaccaaggatcttcccaagaactggcaagtccccgatgtgctctttctattgattntgcaccccgcccaatc

SEQ ID NO: 17061 - DNA, 470 bp, Zea mays
  unsure (1)..(470): unsure at all n locations
agcttctaagggagagcacattntgngactaactcattgttcatttgagaaagatagggtttgtagcgcatgtcaagcatggaagcaaattggagcccatcatccacacaagaacatcatgacgatcgacaggccgcttgagttactccacatggacctattcggcccgatagcttacataagcgttggtgggagtaagtactgtctagttattgtggatgattattctcgcttcacttgggtgttctttttgcaggaaaaatctcaaacccaagagaccttaaaaggattcttgagacgggctcaaaatganntcnccttaaggatcaagataattagaagcgacaacgggacagagttcaagaactcacaaatagaaagctttcttgaggaggagggcatcaagcatgagttctcttctccctacacgccacaacaaaatggtgtagtggagaggaagaatagaactt

SEQ ID NO: 17062 - DNA, 417 bp, Zea mays
acccaagtggatgagctctatatcctggccagaatgcttcctgtctttctgtcaggcatagacttcaacaccgctgagacattcttcccgttgttcatagagcaaggacaggtcatggacaaccacatcatctagcagctctggataccttcagccactctgacgaccttcaactgcctctgcatcatcatcctggcaccagcgtatgacaaaattgtgatgcccgtggtgagtaggatcaccggcatgaagcgagggctgtccgagctgcaacgcatcggcgtcggcatggtcttctccatgtattcgatggtttctgcagcactagttgagacggtgcgccttgacaccgccaagaacaggctcctgatgagtatcctgtggcacgctccgcagaacatgtttgtcggagtatcc

SEQ ID NO: 17063 - DNA, 458 bp, Zea mays
  unsure (1)..(458): unsure at all n locations
agctntntgatcctacaaatggtatcatgcttcaattggtatcatttcacttatatgtgccaaagctcggattataggtaatttgcccctcttggtatcaaaatcaaagtgcatgtctcctacaagtattcaaaacttgtatgcacacattcagggggatgttactctataatgtaagagtgtgagactaatatctgttttcaagtctattatatgtagtagtctcattgaaggaaaatggagtccccggagaaagacaaaaagcttccactgcaggtctacaagtattcttatgtctcacaagtctacaattggtctacaattggtatctttgagactacatttggtatcttttacatgtgatctccaatatttgataagactgtatttcatatcttacgcttcccatgttgctataaatgcatatgttgtcaaaatataactattacctatgcata

SEQ ID NO: 17064 - DNA, 445 bp, Zea mays
  unsure (1)..(445): unsure at all n locations
agcttcggcttcaccgctgatccactcgataacgccctcatggtcgcctcgtatgaatatatcttcgtttgaataagcgcccacattggcgaagctagtctttatcttctccacgcagcccacagatttttcaaaacatctttccttggatgcgcgaagctcttcaactgtcttttctaaataatttttccaatattcgctagcatctcggttagcttcagcgacagcgcatttttctttggcctctgctaattgtttccgaaggtcttcgatttcattcttttggacctcagcttgagctttggaactagcttcgtcttcttttattttgtttaccaatgaaattaatatcttatctntttcaagaccttcgttccttagttcaatcacctccgaatgaagggtgttcagagccattgatacccttatcttcaatgttttctat

SEQ ID NO: 17065 - DNA, 431 bp, Zea mays
  unsure (1)..(431): unsure at all n locations
agcttctaaagggagaacacattttgcgactaacatattgttattttgagatagacagggtttgttgcgcatgtcaagcacgataacaagttggctcccatcatccacacgagaacatcttgacgaccgacaggccgctngagctactccacatggatttattcggcccgaatgcttacataagcatcggcgggagtaagtattgtctgccattatggatgattattctcacttcacttgggtattctttntgccggaaaaatctcacacccaagagactttaaagggattcttgagacaagctcaaaatgagttcgaattgagaatcaagaagataagaagcgacaacgggatggagttcaagaactcacatattgaaggcttccttgaggatgagggcatcaagcatgagttctcttctcctacacacc

SEQ ID NO: 17066 - DNA, 476 bp, Zea mays
  unsure (1)..(476): unsure at all n locations
agcttagattacttatgtgtatctcttatggaaaggcttcaccttcccaagtattgtagttaagttatgcactntgaagactattangactngtaataatctcaatcccttttatgttgtaaaacttgagttctggaatgtgaagtgtattttgtaaaagtcttccgctctatctccaatgtgtatgtatcaaatgtgattactgtaatatacctgttatgtgggagatccttgggatgatgaagtcaagttgatgaactcgatatccttgttaagttacctagtacacatgcatagcaatctgaggccattaaagcaaggattggtgcatgtgggcctgataacttgggagggttgtcacaggtatctacaaagttgtcatcgtcaacctctggctctagtggttgctaactctaatggtggtcggtgacgacaactggtggctgaggatggcanggagaagcaaaatcgcgagc

SEQ ID NO: 17067 - DNA, 418 bp, Zea mays
  unsure (1)..(418): unsure at all n locations
agctngacctatggaaacagagaccgcacgttctatttatgctcagaccggaacgctaatgtcgcgcgcgaagaggttgcgcacacctgaagggctaaatactcgacgttaactgaaagggaaatatgcctttagaccatttctataatgttttggtgattaagtgcccaacacgtntaattaagttcttatgtgccaaataaagtgagaagtgaaaatcaaagcaaaaggtatgtttctagacttggtgagattgtttatgtactaatatggttatccaagtgctagaaacagtgactaaagaagaagggagataaagggaaaagcttgtgcccaatcttctgctcggtctggcacaccggactatccggtggtgcaccggacaagtgtcggtgcgccagactggtccacggtgaac

SEQ ID NO: 17068 - DNA, 435 bp, Zea mays
  unsure (1)..(435): unsure at all n locations
agcttggggaggaatccattagctatcttcactagatggacacagatggcgcagatntaggcaaggattttttgagaatgattattagccttcttagaatatccgcctatattaataaagagtttgagattgaccacccacaagacaagagtttgaccacggggtaaggttaccattcccaaagaaaagaccagttacggactctacaacataaaaaaagaggactgaatcgacgatccttcgaatagtttactcgaccttcaattcaaagtcttgttcatcgccaagtaggcttcctgaaaggcggacagggcaagcaaagtaaagaagttagtacttcgctactggacaaggctattattacaagtccaaaaaatacgttactcactggagcgatgattgattcaaatntgcctaaagatcgtggatttacat

SEQ ID NO: 17069 - DNA, 466 bp, Zea mays
  unsure (1)..(466): unsure at all n locations
agctngtgaaggatcttcatccccacatgttctaagcggcgatgccacagccagcccatgctagtcttagctattaagcatgcatctagaccggcttcttcttttgcaaaatcaactaaataaagtttgccgtctaatacacccttaaaagctagtgaaccatcacttcttctaaagacagacacatctacatttgtaaatagacagttataccccatattgcataattgactaacagatagcagattatatccaagagactctactaaaaacacattagatatggagtgctcattagaaattgcaatnttacctaaaccttntaccttgccttgattcccatcaccaaatacaattgaatcttgggaatctttattcttgacgtaggaggtgaacatcttcttctcccccgtcatatggtttgtgcatccgctgtcgataatccagcttgaagccccggatgcat

SEQ ID NO: 17070 - DNA, 470 bp, Zea mays
agcttgaagccatggtaagtagcataggcatgttatatgtgaattgactcaagcctagctacgggtgcataggtttcaccgaaatccaaaccttcgacttgagaatatcccttggccacaagtcaggctttgttccttgtcaccacaccatgctcatcttgcttgttgcggaatacccacttggttcctacaacattttggttaggacgtggaacaagatgtcatacctcattcctcgtgaagttgttgagttcctcttgcatagccaacacccaatccgaatctcttaatgcatcttccaccctgtatggctcaatagaagacacaaaagagtaatgctcacaaaaatgtgcgacacgagattgagtggttacccccttatgaatatcgtcgaggatggagttcacggcgtgatctcgttatatcgcttggtggactcttgggtgtgacggtcttagatcttgatcatc

SEQ ID NO: 17071 - DNA, 471 bp, Zea mays
agcttcggatccatctatgttgaggtttgttctttaatactgccaactcccttcagcccttctgggagcttcttgacttccatggacaacaatgggcccttgttctgaaggtatattcatgcataagtatgatgggtgaagtatggcttctaaggcattaagcgtccctcgaccaataattgcattgtatgggtaatccatgtcaacaatatcaaaggtaacctgctcagaccttgtgttgtggagataaccgaaggtgactgacattgtgattttgccaagtgccacaatctgccttccttcgaagccacaaagagggtgtgtagcatcatgaatcttgtcctctggttcttgcatctgcctgaaagcctttgcaaatatgatgtccgctgcactgtctgtgtcaaccagaacattatatgttggggccttcgtcctccgaaggttctcataaacatgatttaacaatgt

SEQ ID NO: 17072 - DNA, 469 bp, Zea mays
  unsure (1)..(469): unsure at all n locations
agctngtgaaggtgcttcatccttacttgtgtcttttagtgatgccacagccagaccatgcaagtcttagcaattaagcatgcatctagaccggcctcttcttttgcaaaatcaactaaataaagtttgccatctagtacacccttaaaagctagtgaaccatcacaccttctaaagacagacacatctacatttgtaaataaacaattatatcccatattgcagagttgacttacagataacaaattatatccaagtgactggatattagaaatagagtgctcggacgaaatagcaattttacctaaccctttcaccttgccttggttcccatcaccgaatattattgaatcttggggatccttgttcttgacgtangaagagaacatcctcttctcttccgtcatgtggtttgtgcatncgctgtcgataatctagcttgagcccccggatgcataaacctgcaagg

SEQ ID NO: 17073 - DNA, 467 bp, Zea mays
  unsure (1)..(467): unsure at all n locations
agctgtaaagattcttcatcccaacatggtctattctgcgatgccagagccaaccaatattagtcttagcaattaagcaagtatcgagttcagctctattgaaatcaactaagaatagctgaccctcgagtacttccttaaatgctattgaatcatcacttcttctaaagacagtaacacctatatccgtaaaaagacaattgtagcccattttgcataattgagaaattgaaagcaagttgtaatctaaagaatctacaagaaaaatattggaaatagaatggtcaggagatatagcaattttaccaagtcctttgaccaaaccttgatttccatccccgaatgtgatagctatntggggatcttggtttttctcgtaggaggagaacatacttttctcccctgtcatggtggttgtgcacccgctatcaattatccaacttgagcccncagatgcataaacctac

SEQ ID NO: 17074 - DNA, 428 bp, Zea mays
  unsure (1)..(428): unsure at all n locations
agcttctccaccatgtcgcttatggtcaagtttgtgcagctacctccatcgatgatcactcgacacgaacgctctttgatgacacactttgtttggaacaatgtgtgccgctgatttgctccactttctccatttgtgcgctcagcacatgctgcacaattaggctctcatagcggttggctttagctgcattaatatgttcttccgagcagccctcacttcctgcatggtcagccgcaagtaatgcaagtatatcttcatctagttcactagtagatgagtactcaccatcagctttgaccaccaaaacacgcttgcttgggcagtcacgcatgacatgtccaaatcccttgtagncgtggcactgaacatctcttgttctacctgtggatgccaccgatgaagtaagtgcagcagggttttgcgtt

SEQ ID NO: 17075 - DNA, 468 bp, Zea mays
  unsure (1)..(468): unsure at all n locations
agcttatgaagattcttcatcccaacgtgggctagtcggcgatgccagagccaacccatgttagtcttagcaattaagcatgtgtcgagttcagctctatcaaaatctaccaagtatagctgaccctctaacacacccttaaatgctattgaatcatcacttcttctaaagacagtgacacctatatcagtaaagagacagttgtagcccatttgacataattgagatacagaaagcaaattgtaatctaaagaatctacaagaaaaacattggaaatagtatggtcaggtgatatagcaattntacccaatcctttgaccaaaccttgatttccatccccgaatgtgatagctcgttggggatcttggttnttctcatatgaggagaacatcttcttctcccctgtcatgtggtttgtgcacccgctgtcgagtatccaacttgagcctccggatgcataaacctac

SEQ ID NO: 17076 - DNA, 474 bp, Zea mays
  unsure (1)..(474): unsure at all n locations
agcttgtgatttatccaatttanaacaagctttatctcttaacatagaatttctatggataaactcaacacaagagatggcattagtagcacaagcactagtttcttatttagcaaccctttatatgtggaaggcaagcgagttgctaaaatagagaaacatcataatatggactaaatttcccttaagccctcatgcacaatagattttgaatgacatggataatatgcatgattgttcaatgaaatctaaagggctgacttaatccatattatggtgagtgtctaataaagaagaatcaaatccaaattaactagatagagaatatgtcacataattttggattgttcaccatatgataatattcattcaacatccaattagacctttatttcataatcaacaactgatgtatatcctcaagtgcttcttttcccgtagtggctacacaagtcacaaaagagataagatttg

SEQ ID NO: 17077 - DNA, 478 bp, Zea mays
agcttgcaaccattatttttatcataggattattgattccagttaaatgggtccgatgggtgcgctactaaaactccctagctaaggctgcgtgcaggtctggatcctagtccaagtaccctcctggggccaggtcaccaactctttcttaaaaatactggcatccagcctcgacaagtcgagaccacattccagaggggccaagtaccagggaagaagttgacaacaacgcacatagcaaggggaaagtagcatgcagataagtagtaatgttgcttgacaaatagtacttaaaagtatcttacaaaaccaaaatatgataagccgcttcccagcggaacctttgctatctctctgcagagctaactactcatcatcagcgagatctcgctggaatcgcttggccaccacgtctacgacgtcttgcacgctcccctgtgcggtgtcttctgtatctggcaccggaccggcgatcacc

SEQ ID NO: 17078 - DNA, 471 bp, Zea mays
agctttatctttcattgatacaaaaggatttgtcatgtcttatgatgaaattagatctagttagtacaatcgtgacgatttggtgtatcacgatcaacaccatggtggtagtagtggtgtctgatatggcaggaggaaaaacgatgtgtggtggggagttagaaaaattctttgtctttgataccacgttaaagtggcataaggcaagaccctcttgaggatgtactcatgtatatataaagatgtacattaggatgatttacattggagttaacaacactaccgatattaagggacacaactctaagcctttacatggcaggttacaacactaccaatattagaaagcacaacttcaagcctaatagagtcaaggggcataacctttccttactatatataacattctatctctaacatataaagcattctatctgtacatctagaactctagtgttctacacatgattt

SEQ ID NO: 17079 - DNA, 454 bp, Zea mays
  unsure (1)..(454): unsure at all n locations
agcttctaaagggagagcacattgtaggattaacaattgttcattntgagaaagacaggatttgtagcgcatgtcaggtggggaagcaagttggagtccatcatccacacaagaacatcatgacgaccgacaggccgcttgagctactccacatggatctattctgcccgattgcttacataagcatcggcgggagtaagtattggctttgaatagtggatgattattctcgcttcacttgggtattctttntacaggaaaaatctcaaacccaagagaccttaaagggattcttgagacaggctcaaaatgagttcgccttaaggatcaagaaaataagaagcgacaacggaacggagttcaagaactctcaaatagaatgcttccttgaggaggagggcatcaagcatgagtnctcttctccctacacgccacaacaaaatggtgtagtgga

SEQ ID NO: 17080 - DNA, 435 bp, Zea mays
  unsure (1)..(435): unsure at all n locations
agctntctcgactaaatcggtgacagggcctcatggacgggtgaaagtacgcgtaagcggcaaggccgaccgagccgagggattcccacgcctctgggatacggatacctcactcgtcccttccgcgaaaagcaactctcgctcacacaaacatncctattaccgacagagtccagatgctcgaaacaagaggaaaaaaggacgcagcttctcaagcgcggcgaggacgtgttcttctggcctcggcggccgcagaaagcgcgcgctacaagatgatctgatcctgcaggctcgggtcttcacgccgaagggagccgtagcaccctcggcatcgacgacgtctacagcaaagcccgacccagcctcgggcggcgccgaggtccaagggctcctccaggaatccggcccgagcaggcggctcaaccggttacccct

SEQ ID NO: 17081 - DNA, 472 bp, Zea mays
tagcttctatagggagagcacatattatgatttatcaatgttcattttgaggaagacagggtttgtatcgcatgccaagcacgaaagcaagctggtgcccaccattcacacaagaacatcatgacaaccgacaggccgcttgagctactccacatggatctattctgcccgaatgcttacataagcatctgcgggagtagtattgtcttgtaatagtggatgattattctcgcttcacttgggtgttctttctgcaggaaaaatctcaaacccaagaaaccttaaaaggattcttgagacgggctcaaaatgagttcggcttatggatcaagaaaattagaagcgacaacgggacggagttcaagaactctcaaattgaaggcttcctagaagaggaggggatcaagcatgagttctcttcttcctacaccccacaacaaaatggtgtagtggagaggaagaatataactct

SEQ ID NO: 17082 - DNA, 361 bp, Zea mays
ctgacaagggtatgaagtgcattctttagaaaatgtataccggcacagcaaattgcttcagaaaggatgaccaatgaataatctggtttaaagaccgcatagttgtgccacagaatgccgatgtctcgcaacaaattttggacgaagctcatcttaatcgatattccattcatccgaggagtactaagatatatcaagactttaaacaacactattggtggacaaaaatgaagattgaaattgcacgctatgtggtatgatgtgacacctgtagacatatcaaggcagtgcatatgaagaccgctggaccattacaatccttgcccatcccaactctgaaatgagaagatattagtatgga

SEQ ID NO: 17083 - DNA, 437 bp, Zea mays
  unsure (1)..(437): unsure at all n locations
agcttgagcaactacaatcaatgaactaatatgactcangtatcaaagaagtcatggcatcagtcactgcaaataaagatcaccagtatatctatgagatactgttggcatctggtcttttacacaaagaacatagtatcacggcattacctgctcaactccaaccatcaaattatccaatcaatccggagctcttcctcattcttgagcaaacaaaaccagacttagtttttgcattccaaactgtcagtggaactaagaaaagttgtaagccttacacggggaagcttcaccgaagacttgtgtttgacctggtaaacgaaacaatagctcacaagatgatcatctgcagatctggaagccagccagtaaagtttcttcaatcaaggaagatgagtgggtggcaactattcaaggatttgtgcactgaggttgac

SEQ ID NO: 17084 - DNA, 457 bp, Zea mays
  unsure (1)..(457): unsure at all n locations
agcttaggaatgaactaaacatcttatattcttgtaatcttgatngaaatcttgcacacattgcacattntatacctttgatcatgtctctttcatttggtacaaatgcatatatcttattcttcttgtgccaaggctaagattaatgtctttctaagaatatttccatgattagtctaagattggaagggaaatggagtaatcggcaaaggccaggcttccactatgactgccggtatcatttatcctctgctctactcatgtatttacattcatatcttgtacaaggcctctaattctctttgtttttggcgcttaatgccaaagggggagagagtaatacgcccaaagaanaaggaacgcaccaccaccctgctttctgtttntccaatttcaaatcatttgcanaaaccctcttgacagctaaggtgagaatttcttcagtgggagtttaatt

SEQ ID NO: 17085 - DNA, 460 bp, Zea mays
agcttcggtatctttgcttatcccttcttcttgagcccctggtgtccagtcagctatgaagtctgctagcgcctgagattgaattgaagatctgtgcacgtagtcgatggtgaattcattgagctctgcggcccactttccaacccttccagtagcttctctgttcctcataatatccttcagaggttgtgacgagggaacaattatatggtaagcttgaaaataatgctgaagcttcctgaatgccattaacacagcatacaacactttctccaaatctgtgtaatttttctttgataagcttaatacttcggagacaaaatatactgggacttgctttttagtttgtccttccagcttctcctgtacaagcgccgcacttactgcagagtgcgaagctgccacatacaatagcaaaggagcccctggcgtgggtggagttaacgttgttagatctatc

SEQ ID NO: 17086 - DNA, 469 bp, Zea mays
  unsure (1)..(469): unsure at all n locations
agcttctccttgtcgtcatcaaccttgacgtagaaccattccgatttccatcctgccggccacttgcttcgatagctgatcacaagaaattttgtagttttccgatatgcaaagttgtaacaaccaaaattttcatgtagcccatcctttctggccttagtttggtagtgtagctcgtgtactcggcagaaaccttcggcaaatggctccactgcttggcttcggagagcccaaatataaacactaagcctaacaatagcgttaggagttagctggtgaaaatagatcccaaatttcttcagcacatcggcaatcatcctattcagaggaaatcacagaccagctttgaggaaactcttaaaaatcactatttcatctttntgtggcttcggggtaatctcttctccaccaaagagaatcatcttcttctcatcttcgcttgaagtagcccgacttcaccattttggga

SEQ ID NO: 17087 - DNA, 452 bp, Zea mays
  unsure (1)..(452): unsure at all n locations
gcttcgaagatacaacttctntctcttttggagcaggaacggctctgtctatgtcagccctcacaataggcatatctcgaaagtaccttcctctcatatcatcaagatgactctgtttgatagttgatttcccgaagactgcatgacttggtcgtcagggtcgatcttaagagtcttcacctccactttccgcatcatagttgtcgctatcattagtatcttcagacaagccttctagtatctctttagtaatcttctctatatcatgttttgctattgactcaacaaatgcagcagtcttctcctcaaggagcttctnctcttcgctcagcttcgtctcagcaacaattatttttgtcttgagacatcttttcttcggaaatggcaaacatgcgtccttaaaaccgaagcttangaagtctgaanaactaagcaagcgttggtaagcaaga

SEQ ID NO: 17088 - DNA, 499 bp, Zea mays
  unsure (1)..(499): unsure at all n locations
tgttcaaaatcaagaacttcaagtgcttcttgaaaattgcaagaacatcaatgcctcatctttagttnttgaatctaagtctagctcaaatgatatttcttgcaaacattgcgccaaatatcatgcttcttgttgtctaactaaccatgcaaggaagaatagcccacaggtgaaggtcaaataaattttgaaaagatgctctagcaataatgggttaaagaaagttgaacccaagtacaagtcccttaagcccaacaatggaagaagggggcttgggttcaattcatccaaggaaaaccctagcacagtgcataaggggtggagattccccaagttcatagagggaaccactctatatgatgcctngnggaggatccactcctcanatgacaagtcacctcaggtaaaggttaacgtgagttccacaaagagtaagatgaaggaagtgggatcctcaagtggacaaatatctaatgcttccattnccactcatatcttt

SEQ ID NO: 17089 - DNA, 366 bp, Zea mays
  unsure (1)..(366): unsure at all n locations
gcttgactttgctacatggatgatgattatggtttccgntncancgcgnctactgatgcacccaccgtcaatccaccttctgtcacgccaactgccatatatgtacccgcggctgactgacccacaggcctccacgcctggtggttttaccgggccacgcgcggtgcgcctcgatgctgctgcattggtttaaaaacataccttttgtcttctgcagcggcccctatgaggtgcactacaggcgtgcgcgatgagtcgctctatccgcacccgaagtccggcacacaaaccgtatgacttgtggaccctggccccatgccgtagactgggtttgtcttctgcaagcggcctgaggaggcacactat

SEQ ID NO: 17090 - DNA, 451 bp, Zea mays
  unsure (1)..(451): unsure at all n locations
agctntattaaatggacgagagaagcgccttcctctactgtcctttcaataaagagggctatgttgagcaacctcccggcttttgaagacagagagtatccaaaccatgtctataggctctctatagcgctttacgggctcaagcatgccccatgagcatggtatgaatgccttacagatttccttatcactaatgcgtttaaagacggaatagccgatcctactctatttactaaaactctntacaatgatttatttgtatgccaaatttatgttgatgacattatcttcgggtctactaacgaatctacatgtgaggaatttagtatgatcatgacacacatattctagatgtctatgatgggggagttgaagtatttcttatgattataagtgaagcaactccaagagggcaccttcatcatccatacgaagtatactcaagacattc

SEQ ID NO: 17091 - DNA, 364 bp, Zea mays
  unsure (1)..(364): unsure at all n locations
cctgcggcatgcaagcttattcaccagcaattgtcccgcacacagttcttatattactaatcaggtagatacaaagcttatctgtccgcttgtggacaagacagcattgaagaccggnggaatgtcanggatcacaagagataatggagtcagtcagcggtatgcggtgtcagagggacgaagatgtcgtgcccaggcttcagcggcaagccggcaacgacgtaagaatgtgctaaatgggctatgtaatacattagctgggttcggcctgtatggaacgatatatgtgtgtctctgtaaactgaggaggacatggtaaaacacataacagaaacgttacttctctgcctcgtctccttcctcg

SEQ ID NO: 17092 - DNA, 366 bp, Zea mays
  unsure (1)..(366): unsure at all n locations
agcttgtgcacgcgcgcaccgtacctcaccggctgtctctgctcctcttccgccgccgcaggatctcgtatcgccggagaccatgtaccgcgccgccgggagccacctccgctccctcaagggtccgccctcctattctcccctgcctgtcccttccccgttgcatgcacgtctcgatccactcgggtatgatagcacttaggttagatccgaacgggtcgcctgagtgtcgttctcatgtggcgatgaatcagaagctgggttctctactcctatattcttggaggcactanggagtagggacacagatgaaacgaatcccataagaaagaaattcggcaggcagctctggttgttgccattctc

SEQ ID NO: 17093 - DNA, 437 bp, Zea mays
  unsure (1)..(437): unsure at all n locations
aaaattcccatagaataaccattatgtatctttggctaaaaattggcatatggtcataatattatacctaggtaccagcaaaaataacccttaagataaaacccactcctagaagagagttgtagttcaaagcaccccctctgccctaaattttaatattnttgtttagagaaaaccattctcattttaagcctcaatttttgagactgtgttatacaaaccagtgaggagccactggaatttctacataatttttgaagatttctaaatcagtgttgtagttcatagccactctaaaagcccaagtaagagaagggaagaagggttaacgaagactatatcaagcataataacttagccagaacctattaatcttaataatacatgagaattgtgagacaacttaaccaacttctaactgccacactactttaata

SEQ ID NO: 17094 - DNA, 389 bp, Zea mays
  unsure (1)..(389): unsure at all n locations
ctataatcaccctgagtggagtggatggacctgacatgccttgggtggattcttcctccaaagcccctggtcatctcagagaacctgtaggcttcctcccttctttggcgaaagacattgtcggcccggatatattcatccatctttagaagcaacttctccatagtctgtggaggcttcctatcanaatactgagcatgaggtcctggacgaagccccttaatcatggcctcaatgacaacttcattggcactataggcgcttgtgctcttatgcgcaagaaccttcaaacatatgcttggagatactcctcatgatcttgcgtgcattgaaagagagcctgagctgtgactggcttcgtctgaaagctctggagacttgtcaccatc

SEQ ID NO: 17095 - DNA, 287 bp, Zea mays
  unsure (1)..(287): unsure at all n locations
agcttgtaccttgcctcaatatggcctgagcggtgactggggtgctatcttagcacgcctgctgacacgccgcactaattcagcgcatttgtcgacgcacccgctgtcaatccgccttcagtcatgtcaactgccatatctgtccccgtggctgactgacccacgacccccacgtctggcggtttcgtcgggccacgtgcggngcacctcgttgctgccgccttggttaaaaaatatccttccgcagcagccccaaggcggcgcgcgatcgtgtgtggcggttcact

SEQ ID NO: 17096 - DNA, 300 bp, Zea mays
agttgggtacctattacccaagcctaaatttgccttgcaagattatgcatccgggggctcaagctggattattcacagcggatgcacaaaccatatgacggtggagaagaagatgttcacctcctacgtcaagaataacgattcccaagattcaatcatattcggtgatgggaaccaacgcaaggtgaaaggtttatgcaagattgcaatatccaatgagcactctatctctaatgtgctcttagatgagtctcttggatataatttactatctgtcagtcaattatgtcatatgcgata

SEQ ID NO: 17097 - DNA, 400 bp, Zea mays
attgcttactgtcccgacaatgatagtgatcaggaccaagggaataatagggagaagaagaagcattacaagaaggccaagggcgaggcacatatcggaaaggaatgggattcggattgctcctccttcgactccgacaatgaaggactcgccgccaccgccttcaacaagtcatctctcttccccaacgagcgtcacacatgcctgatggcaagagagaagaaggtgagtactcgagactccacttatgcttcctctagtgataatgagtctagtgatgatgatgacatagactattcatgcttattcaagggcttagatagatctaaaataaataagataaatgaactcattgatgcattgaatgagaaagataactctcagagaaacaagaggatta

SEQ ID NO: 17098 - DNA, 487 bp, Zea mays
  unsure (1)..(487): unsure at all n locations
tcttaagtcacctgcggcatgcaagcttcgtcatctgaaaggaatttaccctataggttatagacgatctcagntctccaatcttcgctataaacaggagatatattgaggactgctctttcaaggagttccattgaaggtgcctttattgtttcgaagaacacatccgaaggtaagggcagcccctgtgctgctgacttagctagcaaatcagcatgctcattntgtcctcgagggatagttttgacagaaaatccttcgaaggaagcttcaactcttcgaaccatatccagatanttttcaagcttcggatctttagccttgcaactcttgtcaatatgacccgaaacaacctgngaatcagttttaagtatggcccttctgaatcccattgcttttagcttccgaagacccaaaagcagggcttcgtactcggcaatgttatttgtgcaactaaaatcaagttctgcccgcatagcaagtttaa

SEQ ID NO: 17099 - DNA, 433 bp, Zea mays
agctttggtaggcagaccagtgcaattcaggtggatgtatcctatagaaaggggcgttgaaaagctcaaggcgtctgttcacaacaaggctagagtctaagggtgtattgcggaggcttttgcccttaaggagatatctcaattctcaaccaggtatatcgctcgagccaacaatgtgtttgcgccttcagtgcgacttcatgtcgaagatgaatcaccccaaagcacccttcaaatatttgcgaatcctggtaaagcagatggaatagggagtgtacgtcatattgaccgatcagatttgaacacgctaatgctatatatgtatagcaatattgacaacacacaggagacgttcgagtaagttttcctcatatctacgtccattttctcacctcataagttctatagtgcgtaatctccatgattctaatat

SEQ ID NO: 17100 - DNA, 438 bp, Zea mays
  unsure (1)..(438): unsure at all n locations
agcttgaattgtctgtgaatgtaggtgaactacattatctgtgggagccattgngttattgacagtggatgcacacaacatatgacaggcaacccacggatgttcacctcactagatgagaatgttgatggtcaagataaaatcacatttggagacaactcaaaaggaaaagtgcaaggactcggcaaggtggcaatctcaaatgacttatcaatatcaaatgttctcttagatgcaccctcgagcttcaatttattatcagtgggacaactctgtgatcttggacttcaatgcttattcactccatcagaggttattgtaacaaaaatggatgatgaatcaatggtattcaagggatttagatacaacaacctctacttagtggatttcacttcagaagatgcatacttaagaacttgcctcttcaccanagcttct

SEQ ID NO: 17101 - DNA, 416 bp, Zea mays
gcttgtgaagaatcttcatcccaacatgagcaattttgctatgccagagccagcccatattagtcttagcaattaagcaagtgtctagttcagcattgttatcattaaaatcaaccaaatatagctgaccatctgacacttccttaaaagctattgaatcatcacttcttctaaagacagtaacactaacatcagtaaaaagacagttgtagcccactttacataattgagagactgaaagaaagttgtaatctaaggagtctacaagaaaaacattggaaatggaatggtcaggagatataaaaatcttacccaatcctttgaccgaaccttgatttccatccccaaatgtgaatgcgtcttggggatcatcatatttctcatatgaggagaacattcttttctcccctgtcatg

SEQ ID NO: 17102 - DNA, 360 bp, Zea mays
  unsure (1)..(360): unsure at all n locations
agctcttaaccacacgactctgctatactagtgtttttctatccccgcaaagngcagcaggagcagcactgtcatatggaaacgaatatggtcaacagcacttattggtcactgtgtgctagtgagctcatgttcatgctcatcgactggacaggagaaagcagcggtctccttttgatgggtttaacacaagaaagctctatcaggagagagcagcggtttanatctgatttatctgttagctattccttgcaacatataacaatagatgatcccatgtatgtaaccttttaagcccaatgcctcccacaagacaattattgcaatatttggtcttcgaccttgtgcaatctttgtctt

SEQ ID NO: 17103 - DNA, 349 bp, Zea mays
  unsure (1)..(349): unsure at all n locations
ttccttggtctgacactatcttctttggcacaccatgaagaccaacaatctaggacatgtacagatatgccaatattgcactggtgtagctagtcttgacaggtaggaagtggactgacttggtcaagcggtctactacaacccanatggaatcgtagacggcttgagtgtgaggcaacccaactatgaactccattctgatctcatcccatttccactgaggaatttgcaacggctgcaacaaaccggctggcctctaatgctctgctttgattctctgacaactatcacatatagccacatgctctgcctgatcatcaanacaccaaatcacttatccaaatggact

SEQ ID NO: 17104 - DNA, 371 bp, Zea mays
  unsure (1)..(371): unsure at all n locations
cacgagaacatgagtacagagttgtattttagtacagcttatcatcctcagactgatggacagactgaaaggactaatcaagtattggaggatatgttgagagcatgtgcccttcagcatggaggaagttgggataagagtctgccttatgctgagttctcgtataataatagttaccaggccagtctaaagatgtcaccttttgaagctttatatgggaggaggtgcaggactcctttgtattgggatcagactggagaaagacagttctttgggcccgaatggattcaagaagcagaagaacaagtctgtataattcgagagaatttgagagtggctcanaccaggcanaagagctatgctgataatag

SEQ ID NO: 17105 - DNA, 407 bp, Zea mays
  unsure (1)..(407): unsure at all n locations
agctgtgaagattcttcattccaacatgtgctattcggcgatgccagagccagcccatgttagtcttagcaattaagcaagtatcgagttcagctctatcaaaatctactaagtatagctgaccctctaacgctctcttaaatgctactgaatcatcacttcttctaaagatagtaacacctacatccgtaaaaagacagttgtaacccactttgcataattgtgaaacggaaagcaaattgtaatctatagaatctacaagaaaaacattggaaatagagtggtcaggtgatatagcaantttacccaatcctttgaccaaaccttgatttccatccccaaatgtgatagctcgttggggatcttgttnttctcataggaggagaacatcttcttctcccctgcat

SEQ ID NO: 17106 - DNA, 455 bp, Zea mays
agcttgtgtaagttcttcatccacacatgtgctattcggcgatgccacagccagcccatgctagtcttagcaattaagcatgcatctagaccggcctcctcttttgcaaaatcaactaaataaagattggcgtctaatacacccttaaaagctaatgaaccatcacttcttctaaagacagacacatctacatttgcaaatagacaattatatcccatattacataattgactaacagatagcaaattatatccaagggactcaactaaaaatacattggagatagagtgctcatttgaaattgcaatcttgcctaaacctttcaccttgccttgattcccatcaccgaatataattgaatcttgtgaatccttgttcttgacgtaagaaggaaacatcgtcttctcccacgcatgtggtttgtgcatcgctgtcgataatcagcttgacccccg

SEQ ID NO: 17107 - DNA, 424 bp, Zea mays
  unsure (1)..(424): unsure at all n locations
aacttctgacaactgtgcccaccggactttattgttcactgtccagngcgccatctgacgtatgctctgactctgcgcgtgcagtcgtgcactgttcactgttcctgtagctgttgcagatgatcgctggcgcagttagccgttgctccgctggcacaccggacagtccggtgaatcatagcggagtagctcccacaattcctgaaggtggcaagttcagagtcgatctccctggtgcaccacacactgttcggtggtgcaccggacactatcctggggcacaccggacagtccggtgcgccagaccagggcttgctttcgctatcttttggctcttttatttgacccctctctgacttttataggttgtgttgacctttgcacctgtgaactatatctagacaactactagtcattatttggt

SEQ ID NO: 17108 - DNA, 296 bp, Zea mays
gcttgggttgctcacgtataagcggtgtgagggctctaatggaaggcgggctgacgacaccacgggaattcttcgccgaagtcggagatccgccgctcgacgtgaccaagaccctctacggcgcactgtgaggtatgaacatgaccgacgtatttcccttgctttgggcatcatagaggacatgtgggtttagggaataatggacggagtctaaggttggggtgtctcggacatggccccgtcgctgctggtggacgccgacgcggctcggcgggtaaaggaagaagaaggtgtct

SEQ ID NO: 17109 - DNA, 371 bp, Zea mays
tgcagcttggtcatttattgctaactgtcccgataatgaaagtgactaggaacaagggagcaagagggagaagaagaaggcatacaagaaggcaaagggcgaggcacatctatgcaaggagtgggattcggattgctcctcctccgacttcgacaatgaaggactcgccgccactgccttcaacaagtcatccctcttccccaacgagcatcacacatgccttatggcaagggagaagaaggtgagtactcaagactccacttatgcttcttctagtgataatgagtctagtgatgatgatgacatagattattcatgcttgttcaagggcttagatagatctaagatagataaaattaatgaattaattg

SEQ ID NO: 17110 - DNA, 438 bp, Zea mays
  unsure (1)..(438): unsure at all n locations
agcttctaaagggagaacacgtgataggtttaactaacgtacaattcgaaaaagatagaccttgtgcagcttgtcaggcaggtaaacaggtgggaggagcgcatcacagcaagaatgtgatgaccacatcaagacccctggagctgctacatatggacctcttcggacccgtcgcctatctaagcataggaggaagtaagtatgggttagttattgttgatgacttttcccgctttacttgngtgttctttntgcaggataagtctgaaacccaagggaccctcaagcgcttcctcagaagagctcanaatgagtttgagctcaaggtgaagaagataaggagcgacaacgggtccgagttcaagaaccttcaagtggaggagttccttgaggaggaagggatcaagcacgagttcttcgctccctacacaccacagc

SEQ ID NO: 17111 - DNA, 459 bp, Zea mays
  unsure (1)..(459): unsure at all n locations
agcttagcanaagaaatttctagaatcaagaatattgttctcatgcctaagtctggtcaaagagtgttcatcaagtggctcggtaaagatatcggctaattgatctttagtattaatgtaagaaatctcgatatccccctctttttggcgatccctaagaaaatgataccgaatggctatgtgcttagtgcggctatgctcgacgggattgtcggccatcttgattgcactctcattatcacatagcagagggactttggtaatttgtaaccgtagtcccgcacggttcgcctcatccaaagcaattgcgcgcaacaatgtcctgcaacaatgtactcggcttcagcggcggaaagagcgaccgaatcttgcttctttgaagcccaagacaccaaggatcttcccaagaactagcaagtccccgatgtgctcttactattgattntgcaccccgccaat

SEQ ID NO: 17112 - DNA, 438 bp, Zea mays
  unsure (1)..(438): unsure at all n locations
actagcagctgcaagcttgcaatacttattcgagcatcatgcattacttactctatcatctgttaaccatacatgcaacacgggcattccgcggctgaagactggacatgaatggacccttcaataaagcccattgaggatacactgatgtactggttgccattgaccaaattcactacagctgataagagntacaagctccatgtgcttcatctaagcttcacgctaacggcctgtgagaattctctacaagaacataataatgctacgtgttggaataccgaatagcaccataaccgacctgggatccactttctctagttcggacttctttgatttctgcgaactaaaaagcatgcagatcacattagcatcattagcacacccaagagccaactggcttgttcaatgagctcacagaatgattggagcactcat

SEQ ID NO: 17113 - DNA, 409 bp, Zea mays
catcctgacgctactcttttatctatgttcccacctggaagatcccgggccgaacccctctggcgtggtagcgcactatagactgctgataccgcgccgagtgtaataatgccatgttcctagcctctttcagctggtccagcgagtcttctcggctgtgctggatgctttggtcggcacacaccttcatctccagggaaccggagtctaagtctgcgggcaagatagcctcggtcccatagactataaagaacggtgagaaacccgtgactcggcttggcgtcgatctcagactacagaccaccgagggtagttccttatacaccgcttgccgactatgtgaggtcgtgtagacactcgtttagatcctagcaaacataccgtggcacgctcacctgccattcgtatg

SEQ ID NO: 17114 - DNA, 332 bp, Zea mays
  unsure (1)..(332): unsure at all n locations
agctctggttgaacctcgtaaaaataccgcgtctctagtttcttatgtgatcttgcataattctcttagttgatgcaatcaccattttagctaatggagattatcaaccagaatgttgttgtaatggttaatttgcaacatgatctaaatgtgcagatcaaaacatcaaaagcgtcanttttatcactatgtgcttgnttcctgtctgaaaaaaaaataactagtaaatgcctcatttnttttctaataaaaatgacaatttcttagcaaagtatgtttggtacttttcataaattgttcttgatcttattatcagnttgtaagctagcact

SEQ ID NO: 17115 - DNA, 346 bp, Zea mays
atcttgcttctcttgtacaagcgctgcactgactgcagagtgagaagctgctacatataagagcaatggagcccctggcgaaggtggagttaatgttgtcaagtagatcaagtattgctttaattcttcgaaggccctttgctgagccggaccccactggaaaactttggctgatttcaatatttcaaagaatggtaaattcctttctgctcatctggatataaatctatttaacgatgacggccttcctgccaaccgttgggcccctttctttgtatttggcggctccatccgaaagatagcttcgatctttgttggattagctttgattccctttgtttatact

SEQ ID NO: 17116 - DNA, 404 bp, Zea mays
  unsure (1)..(404): unsure at all n locations
cttcggcgacagttaannaatttggcagcanaacagtgttaatagcagtaaatgctgtggtaacttcacacctactcgtctgtttatatagtgctgcaggtaagaaggcgaagcgccagaagttttacaccaggcggacacccgctcgcactcgctgtacggtggaccgcagagaccgaacagtaactctgcaaggtggggccgctgcacgcacggagattgaatcgtttctcgacaacgagctcagggaaggtgtttttgagaccttcggcgctccgaagcctaagaaacttttttcacggatcaagctcgttacgaaaaacgatctagcaccgcgaaaggggctactgttgggtctatgcttcgtcgccgaaggtcttatagaaagaagtggccctcggatg

SEQ ID NO: 17117 - DNA, 387 bp, Zea mays
tgtttgatcactgtcccctggttctgaggcttaatgtgggctttaatggaaagaagcgtttccactttgagagtttttggccaaagatgcaaggttttcaggaggtggtgtctgattcctggaactctagtatttcggctctttctgtcccatggagagattatctattaaattcaaaagacttgcgaaggccctgcagtcctggagtcaaaaatatgtgggtaatgtttcttctcaacttgctttgaccaagatgaccttacaccttttggaaattgcatgtggggacaagtctacactatgaggcgcccgtccacggacgtacgccgagcataagaacacgcggtcagtggggacacacgcacagctggctcgagctgatcgagt

SEQ ID NO: 17118 - DNA, 288 bp, Zea mays
acttcaagcggtaacaatgttctgccaaaaaatttttgggcagtcttcgatgttattgtagaaacagccctcgcctcgatccatttggtgaagtactcgacagcgactatagcgaacttaaggtttccctgagcggtgggcaggggcccgacaatgtccaggccctagcgctggagaggccatgtgtgggcgatcagctttgtgtactgcgaggggctgcctgaccgaagggagaacttatggcaagcttcgtaggaccttgtgacccggtttgcggcgcatatcatt

SEQ ID NO: 17119 - DNA, 406 bp, Zea mays
  unsure (1)..(406): unsure at all n locations
gctaggaattgatttccttaatatttattgttgcaattaaaaagggttttgctggttgtgctacggtgacactaatttccactattaatttcccctttttcattttctatttatgaatcctagtgtgggtttgaactacaacagtggtttaactttttccaaaaattctgtataaattacagtgggttaccattgggcactatagtctgctctatgaatatgaggtccagaataaaaagagtatgtcttggacaaaaataacaaatgttgggcaaaggggtcactttgcactacaactcttaactaggggtggngtctgtcctaagagacattttttgtgggaactaacagtaatcacatgcttttgtgcaaaaatcacagaagggttattggtggttatttagtt

SEQ ID NO: 17120 - DNA, 342 bp, Zea mays
caccctctatgactatggctttcacacacctcatgtaatcaaaatgctgtgctttgggtgcaaaatatacctcggccgtgcttaatacttatgaacacatcatgtgaatacctgattggaaagagagggtgtatatcttgctacctgatccccacgatattacattggctatttgtggcggcgagtcttaattaatttcgcacagcttgtagatcagttgcatattatagccggcgtgcactggaacttgtatgtataggtgtacatttggagtgtgcctaatacgccgatccaaagcacaccattctagacacagtctagatctgacacaacacaacctat

SEQ ID NO: 17121 - DNA, 363 bp, Zea mays
  unsure (1)..(363): unsure at all n locations
tggacgtgttatgtgcctttctcaatggaccaatcaaggaggagatctatgttgagcaacctcccagctttgaagatagtgagtatcctaaccatgtgtataaactctctaaggcgctttataggctcaagcatgccccaagagcatggtatgaatgcctaagagatnttcttatcgctaatggcttcaaaggcggaaaagccgatctactctcttactaaaacaatgcaatgatatgtttgtatgccaaatttatgttgatgatatcatatttgggtctactaacaaatctacttgtgaagaagttagtaggattatgggtcanaaattcgagatgtctatgatgggggagttgaagtattt

SEQ ID NO: 17122 - DNA, 477 bp, Zea mays
  unsure (1)..(477): unsure at all n locations
cacctctgaactaactcggctgcatcgttctttgctgttggccaatagaatcctgaccagaagaccttcccgactagtgttctggaggctgcatgtattccacattgcccagcatggacctcctccagaagttgcttcccagtggacgggaggatgcacttcatgaagacgcctgacgcaccccttctatacaatgtctccccaatgagtgtgtagtgagccgactgtctggcaatgcgctcggccgagttcttgtcatctggttcttcttcattctttatatacttggngattagccttctccagtcatcagagtctgactcggattgatctataatgttgcactcttctgtttgattcattgagatactcggctgcagtatttcttgcacaaagactccgggtgggacctgagttcgactggatcctagctnggatagtacatcggctggctgtgtctgatctctctctatatga

SEQ ID NO: 17123 - DNA, 417 bp, Zea mays
  unsure (1)..(417): unsure at all n locations
agctgctactcgcttaccggatataagaatgattctcactttcagtattagannaggcgtgtccctggtatggagctgtcgtatcaacagtcttagcagtgaattacagatttagagtaacaaataggaattctagtcgtgattctagttntcaagagtattagcaagcattagtcgtatccgaagcagctacaattcttgcaagcagatggaaagtaggaatntcgatttgtagccgngatatttctttgttgtttatatcggattagctgctcccatataagtaagtaagccagctatcggaatacaagaagttatgccgtaagcttacttatcgtttacatcagtctatcaagatagaatagaataaaagaactcaagtccagttagaagaagtaaagctgtgattaagcttct

SEQ ID NO: 17124 - DNA, 175 bp, Zea mays
taaaatatttgtaacatggcttcagtagtgcataaactgtcatgagcatcacacttattctatgacacaatgcacttcacattctatatgatttagagatgttctcatcaacctaactatgtgcaattggcattttaagccaaaatatgtgttcttcctctcaatgcacatactt

SEQ ID NO: 17125 - DNA, 362 bp, Zea mays
agcttactcctccctggtgaaagggaaatgtgctcttgtgtcatttctaagtattttggtggtttagtgtccaacacaagtgcctaagtgtaaaaaggtggacaaagtacaaatcaaggataaaggtatgtttctcagacttagtacattgttttatggactaatgtattgtgtctaagtgctggaaacagaaaaaatcgagttggagaagagatggctcgagcagccaaagtctgctcagtctgggtgcaccggactgtccggtggtgcaccggacagtgtccggtgcgccaggctggctcgagggaaaaggctactcttcggacttcgacggcggtgtacggttataattcaccggactg

SEQ ID NO: 17126 - DNA, 327 bp, Zea mays
  unsure (1)..(327): unsure at all n locations
ttccgcaatatacaaaaataagtttcttatacacagaataagagcactntaatttgaactgatcttagagaaaaatgtgatagttnttgttagcaactttcatgtatattgatagtcacttgtgttccaaaagaagccgctccttcggttgattatccatgtggaagatgaggtccatagatgacatctttggaatgtgggagatgaggtccataaacaacgcttcgattcataagtgtcattttggtcacctgcggtgttgcttgataagcatttggagcattaacttgattgtgggcgttaacatgctgatgaatatttgcactg

SEQ ID NO: 17127 - DNA, 440 bp, Zea mays
  unsure (1)..(440): unsure at all n locations
agcttctccttgtcctcatcaaccttgacatatattcattctgatttccagcctgccggccatttgcttcggtagctgattacaggaaactntgcggttttccggtaggcaaaattgtagcaaccgaagttttcatgaagcccatcttttctggcctttgtttgataatgcaattcatgaactcgacagaaactgtcagcaaaaggctccactgcttggcttcggagggcccaaatataaacgctaagcctaacgatagcgttaggagttaactggtgaaggtagatgccaaacctcttcaatatctccgcaacaatctcgtgaacagggaatcttagcccagcctttaaaaagcttttgaagatgacaacctcgtccttctctggcttcggggtggtctcttcttccccgaagcgaagtagcttcttctgatcttcact

SEQ ID NO: 17128 - DNA, 292 bp, Zea mays
tatattcccgttgtttaagcgtcatgacgagttgaaatccacaatttggcacacatgaactagcacgcacattcttagcacactagttagatctcgaggttgtgttgggcattaatgatcagaatcaaactacagaatgatgtatacattttcctttcactcacacactcacataagctgatgcgccaaataagtgcatgattagaagctctagggggattgaggttgacatgaaatatttggatggagaactggggagaacgtgtctgtcggcataacaagcactacaaat

SEQ ID NO: 17129 - DNA, 326 bp, Zea mays
ctggtgctctagaagcactgaagacttcgagcagctgaaagtgttattgacacaccgctgcggcgttagctcaaccgaacatctgaaaacctattgatgtgtattgagacacaatatgcactgagttacgttgtgtcttgatgacataacgccgagttatatcatatgcctcaagacaggatgcttagacatgaggaaccggatcctactcatgagttacaaacagctgttcgggctcatgccctgaaaatatggcgacattatttgctggggaatatctgtcatttatatacagatcataagagactgaagtacatatttaccca

SEQ ID NO: 17130 - DNA, 327 bp, Zea mays
  unsure (1)..(327): unsure at all n locations
agcttgcctcgggcagaccaataccacataggacaacacgcaatgggagtggagagatggtgagagtagcgtgtaacctccgtagcaaaaggatggacggtggtgtatctatgctctcggntggtgtgaacccggtctggtcttgagaaccccagtggcgagttgacatatgcaagggttaagtgctacatacgtcatgtggttggagatccccagctgggtattaatcgattcagatcgctcgtacttcttggacatgaagacttggtcactgncatacacgtagcaatccagtgtaatgaagggctgataaaagacaactagtgt

SEQ ID NO: 17131 - DNA, 331 bp, Zea mays
accagggacttgattcaagaacacatagcttccaaagtatggccccttgttaacgaatgggaaatgtcgaacgagatcactaatagctcaagagaaggtggccttgcttatttgaaatatacataccgctacaggagtcagtttggggagccagatgactaactgatcgaggctattgaggcgaccgctgatgatctgttggtggcatatacgaaggctgaagacgaagccaagaatattgccttcagtgccctctgaaagaaaaggctaaatagagtgtttgacgttattggttctgtgtacactgattactgctttccagctcggaaac

SEQ ID NO: 17132 - DNA, 485 bp, Zea mays
  unsure (1)..(485): unsure at all n locations
agcttgtgaagattcttcattccaacatgggctattctcgatgccagagtcaacccatattagtcttagcaattaaacaagtgttgagttcagttgtgttctcattaaaatgaactaaatatagctgaccctctaacactcccttaaatgctactgaatcgtcacttcttctaaagacagtaacacctacatctgtaaaaagataattgtagcccattttgcataattgagaaacggaaagcaaattgtaatctaaagaatctacaagaaaaacattggacatagaatgatcaggtgatatagcaattttacccanacctttgaccaaaccttgatttacatccccgattggtaatagctcgtggggatcttcattnttctcataggaggagaacattctcttctcccctggtatgtgggttgtgcacccgctatncgatatccaactngaaccaccagatgcataaacctactaaaacaattta

SEQ ID NO: 17133 - DNA, 458 bp, Zea mays
  unsure (1)..(458): unsure at all n locations
agcttncttggctaggcagtagatagctcagaccttgctttgtagggtcaggaaaacaggacaaagggtcgagggaatcacgaagggggcttcagtagttcagtagctcagcacatagtactatacatagcaacaaggtatgcaacaagacagaaccagccactttggcaaggactgtgtcacataatcaatgtagcaaaaaaatatggtgcagtatggtagtagcaagggcctggccatcacctagctccaccattgaagccatttctttcctaattaattctatatccataacananaaactaagaacgaagtcttgcaagcagcagaacacaaaaccaattatgcaccatcctcctaagtgcaaaaccaaggcaagtaggcaacgccgcaacggtatggtaagatgagatctgctggtacatagcaagcaaatattttcatgtgaccagagaaat

SEQ ID NO: 17134 - DNA, 446 bp, Zea mays
  unsure (1)..(446): unsure at all n locations
agcttatgacttaactgatcatgaagatcaagttgttggtctccaggtgaaggatcattntaggaaaagaagtcatccaaagaaagaaccaattgatttatcggcgaggaggttctttgcgaagacgagaaagaaaccaaagaaagctattctatcatatatgatggttctattaggaaatcttatcaatgtgctaagagatatgtgccatagctctaaaaatagccacaaccaattcctaacatgccatccaaacatgacattaatatggaggcgtcttttgaagacttcacgcctcacgaaagaacaagtggtgattgtagcaagtataaatttctgtagtatggaagtacgagcatggcaagcatctattcaggccagagctggtcaagaactttaacataaatgacagagtccttgatgggcatggagaaatcactacttaa

SEQ ID NO: 17135 - DNA, 507 bp, Zea mays
  unsure (1)..(507): unsure at all n locations
agctttcttcggcgccataacgaaggtttatgatcttctaatgtgttcanaanactcagagtggaagtgagttcaccggaggtgggcgccaatgttggggacttgttctcaaatgctatgagttaagaacaaggcaacatataaaatgttaatcgctaaagtccttcgtccttcgaagcattatttcccttaggatataatgattttcggacgaaggttatgaagggcataccttcataaattcattatacagtgacgaaggataaaatgtaaggaatataaaagacaacataaacaattatatattaccatcagacataaacagaaatatcgttgagttacaagtgtacctccaactggaaggagatgatagtacaagggtgacgcacaaagcgaatgccaagtcagcgtgtccagtacgggggtactgttcacctatttataggcacgggacacaacccatacagaaatacaatcatgccccttacactngataataattctata

SEQ ID NO: 17136 - DNA, 331 bp, Zea mays
  unsure (1)..(331): unsure at all n locations
gcaagcttataacacgaggatagaggcaagagctcgattatatgttataataaaaggggagctgtacaagcatggagtttgtgctccattactcaagtgtttatccacaaccgaaggtatagaattgatgaatgaaatacacgcacgcttgtgtggatctcacattggatctangcctctgcttggaaaagtttttcgccaacgattttattgtgcaaaggcagctttcgatgcagcggagatagtccaaaagtgcgaaggctgtcagaaatgtgcaaataatcaaaaacaatcttcttttctaacccaggtaatacaacccacttggctg

SEQ ID NO: 17137 - DNA, 350 bp, Zea mays
gaactaagaccgcgctcagcaaacctgaagagaattttttttgcgaagcccacctagtcgggcatagtcacgaatcaaccttcattggagaccttggcacagcagcttgttctgtacaaccatgccacttgttgtgggaaacccattggtctacaaattggtagacgggaccagtgcaacctcatccggaaagtgtgagctcctgcttcccccccaccgatttgaggctcttacctggggtaaaagaacaaaatatgtccaaatacacacaactaggtaccctataaatccagagggaacgggactgagattgtgggattgggggcgcagtctccacccttctgtatgac

SEQ ID NO: 17138 - DNA, 377 bp, Zea mays
tgctttgcctcggcagactcataccactatttatatttcacgctatgggagtggagagatggcgagagtatcgtgtaccctccgtggcaagaggctagacagtggtgtaactgtgctctccgttggcgcgaacctgatctggtctaataaacccccgcggtgaattgacatatgctagggttaagtgctatctatgacgtgtgattggagatccccagctggggattaatcgattcggatcgtcgttacttcctggacatgaagacttggtcactgccctgcaatctaagtcatggatggaatcttaatgagcaaaaattatgttggattgattatgtgatgggaaattagactagatgcaacagcgctattaatat

SEQ ID NO: 17139 - DNA, 380 bp, Zea mays
gcatgcaagcttctaaagggagagcacatctatatattatctattgttcatattgagaaagacaggatgtgtagcgcatgacaagcaggatagcatgttggagctcaccatccacacaagaacatcatgacgaccgacaggccactagagcttctacacatggatctatatagcccgatagcttacataagcttcagcgggagtaagtactggctaggtattgaggatgaatattctcgcttcacttgggtgttctttgtgcaggaaaaatctcacacccaagagacattaaacgaattcttgagacgggctaaaaatgagttcggcttaaggatcaagaatattagaagcgacaaccggatggagttcaagaactctta

SEQ ID NO: 17140 - DNA, 418 bp, Zea mays
  unsure (1)..(418): unsure at all n locations
cacgatatgaagataaagatcgtccgattagatcgtggggggattactatgggcgctataccgagtgtggacaggacccaggacctttctcgaggtgtctaagatataatggtattgttgctcactattcaacacctatcgaagcacagcataatggggttgccgaaatgtgtgacagaacgctaatggatttggatacgagtatgctaagttactctaacctgccattggtcatatggatggaggctctataaaccgctatgcctatactcaacagagntcctagtaaatcagtggctagaacatcatatgagatgtggactgctaataaaccacactcactacttacatattgggttgtccactaatcttaatattaatctgacagggaagcttatgaagacactactgcattatt

SEQ ID NO: 17141 - DNA, 281 bp, Zea mays
  unsure (1)..(281): unsure at all n locations
agcttgacaatgaggagatggcgctcgttataatagcttccgccaaatcctcaaacaaaggaggtggaaagactacaagtcccgctccaagaaggtgtgctacaaatgtggtaagcccggtcattntattgctaaatgtcctatatctagtgacagtgaccgaggcgacgacaagaaggggagaagaagagagaagaagggcggtgatgcccatgtttgtctggagtgggattccgacgaaagctcaagcgactcctcctccgacgaagacgccgctaaca

SEQ ID NO: 17142 - DNA, 487 bp, Zea mays
  unsure (1)..(487): unsure at all n locations
tgcaagcttatgaagattcttcatctcaacgtgggcttttccgcgatgccagagccaacccatgttagtcttagcaattaagcacgtgtcgagttcagctctatcaaaatctaccaagtatagctgaccctctaacacacccttaaatgctattgaatcatcacttcttctaaagacagtgacacctacatcagtaaagagacagttgtagcccatttgacataagtgagatacagaaagcaaattgtaatctatagaatctacaagaaaaacattggaaatagtatggtcaggtgatatagcaattntacccaatcccttgaccaaaccttgatttccatgcgcgaatgtgatagctcgttggggatcttggattttctcatatgaggagaacatcttcttctccctagcatgtggttgtgcaccgctgccagtatcaacttgagccccgatgcataaccacagacaatgtagtcttgacttagac

SEQ ID NO: 17143 - DNA, 287 bp, Zea mays
  unsure (1)..(287): unsure at all n locations
ttattacttaccacactaaaagtgagtgcagagcagggatattatacaaaccataggaggcacaaactcctcccgataagctataagcaaaagatcctaagtggaggaccgagtcctcccgcacttcagtcattgttttcttcttttggaaccaccttggcacagaagcagcaaaagtctgctacttcctcacctaaaaacaacgaagggataaaccctgagtatggaattacttagcangacttacccgactaaagaaaagactctcnagggtatgctggttatat

SEQ ID NO: 17144 - DNA, 392 bp, Zea mays
  unsure (1)..(392): unsure at all n locations
agcttgtcaagacacagagggaaccnnattgcanactcttactcacgtagatgcgggtccacacgaccacgtgtgtgcacccgttgcccgacggcccggcgtctgtgccgccgcgccgcaccatctncgaccggtactgcacacggaacgacggacgcagtcggaactttatcggccagaacgtcgcaaaccgcannattgggctgcgtaagcaaattgcaaggacgaggcgcgggatgccacgcacgcacctgggacgcgtcataggtgttgaatccgaccagcatgaagcggacgccgtcgaacaggtgctcgtcgccgatgtcgtcgtccgtggcaggtgaggccatagcgggcagtgaaacagcgggatgcagaggggagacgggtgt

SEQ ID NO: 17145 - DNA, 419 bp, Zea mays
  unsure (1)..(419): unsure at all n locations
agcttcagctccatctatattatggattccttttgtgtctgtccaatatccttcggcccttctggcagcttcctgacttccatgaatagcaatgggcccttggtccaaaggtatcttcatgcaaagataagctggatgaagaattgcttctaaggcgttgagagtaccacgaccaatgattgcattgtaagggtattccatgtcaacaatatcaaacacgacttgttcagtccttgtgttgttgataaatccgaagttcactgacattgtgattntgccgagtgctacaatctgccttcctccgaagccacaaaggggatgtgtggcatcgtgaattntatctttgggctcttgcatctgtctgaaggccttagcaaatatgatatcagctgcgctgnctgtatcaaccaaaacattat

SEQ ID NO: 17146 - DNA, 450 bp, Zea mays
  unsure (1)..(450): unsure at all n locations
agcttcctagntgcactatactgttaactgngttgcttttatgttttcagatctaaatntagagggtatctacttntattttacatatgcgatcgtacaaacttgcttggagagtctgccaaggtactgttgtgcagatattgttacagagtctggtcatatgcctgagtgtaaaattgccatttgttagaacctttcaaattttctgaagtatacagattgatgaanaaatatcccagtgcattcttcatgtgccattatatatagtgtaacactctaatccactaacctctttattggtatgcttcatctgtagaattacaactgagatctgttccttttcctctactttcttcttatcattgtagcagntatgactctctttagggccatcangacaagtcatcattcacaggagaatctgtactgtacttgaatatgcatcaaact

SEQ ID NO: 17147 - DNA, 486 bp, Zea mays
  unsure (1)..(486): unsure at all n locations
ctgtcggagatagcttatgtccgacattcttaacctatcttcgacggctttaagccgccggagataacgcgtcgtaaatagcattacgttcgacgtccgccgtcggacataagctatctccgacggcgcgcaccacccgtcgaaagtaataaatgccaaccattttaccggtcggtcggtggggcccacagacttatgttcgacggctggcatcggccgtctgacataaggggttttatctccgacggtttagaaagccgtcggacataaccagcccttatgtatgacggctaccgtcaggccgtctgacataataaantacagaaattacacacaattctatttttaaaatatctgacatttacaagatanatacagatttcatacacatatacaccatcacaaatatacacattcncataagtattcacactcacanatattctcacattaatattaacattcacaaatttacataacgacata

SEQ ID NO: 17148 - DNA, 258 bp, Zea mays
  unsure (1)..(258): unsure at all n locations
catttctcaacatgcaaaagcgggtcttatcaagtggcttagtgaaaatatccgctaattgatcttccgacctcactccttctaaaatgatatctcctttagcaacatgatctctaaggaagtgatgacggatatcaatgtgcttggtgcgagagtgttgacaggattattagcaattttaacagcactctcattatcacacaacanaggtccctttctagaacacgcctagtctagaagagttgtttcatatataaa

SEQ ID NO: 17149 - DNA, 314 bp, Zea mays
  unsure (1)..(314): unsure at all n locations
tcatcattatctctgctatcatccgaggcccattcaactaagtaggctgtgccatctttcttcttggtatacgatttctttatcttcttgtcactttcatctttgcccttcttcttcttgcttgggcaattcatggcaatgtgaccgggttccccacactcaaaacattntctatcattgaaagcatttcttctagatgtttgacctcttctaggttggcctcttttcatcttcatgaatttattgaatttccttacaaataaagccatgtcaccatcactctcactgtcattttcttcatcattgctatcttc

SEQ ID NO: 17150 - DNA, 414 bp, Zea mays
  unsure (1)..(414): unsure at all n locations
agcttggcttgaccacacgacagcatcctcacccttatcacattcaatggnttaacaacagcggtaagttcaaggtaacaaaaacagcaagggtgcattnttctattggctcttaccatgactttgctgatttcgatgtggtgagtatggatgcttgctctcttttactgggacgtccttgggagtgtgatactgatgctattcaccatggtagatctaataaatatacctttatgcataaggganagaaaattgtgttgctttctatgactcccactgaaatggtccacttataacatgagaaaaagattaatgctaagcaaagatgtgttttgaactctgaaaatcagcaacctattaagttaaaaacttctactttgctagccactaaatctgatcttgatgagttacatg

SEQ ID NO: 17151 - DNA, 382 bp, Zea mays
  unsure (1)..(382): unsure at all n locations
agcttgagagcttgtatgaacttatgagtctgatagtctgagtgaatctgccttgtaacgttgtgtgccctcccttntatagctcaagggggcacatagaaggatgctgagccccgacatgtggcccaggagcaaaacggagggaatacattatagaaataactaatgcgagtacgcctgagcaatctcctggcgccatgatgtctgtagaccatgcggtattgatatgctgcggctgcttccttggtaacacatgagtaatgatgagcgtagtgcacgtggtagcatgggcgtaatgcctgccagtggaatggacaggcacgccgcctgcggaatggactggtcgccgcctgcccacngaatggacanggctcaataaatg

SEQ ID NO: 17152 - DNA, 373 bp, Zea mays
  unsure (1)..(373): unsure at all n locations
agctntaccggatcccaggtattgggtctctaccgagtgttatgactgggacactcggcaaagcacctctntgccgagtgtaacactcggtaaagtgaccagtatacaccttttttatttgttttcttattccatccaaacaaacaaaagataccacatatatatcacatatacatcacagatatcatcacagacataagtatacaacacaaacataagtatccaagttctcaacacaaacataagtatcaagaaaataagtctgacataagtatctcaagctctgacataagtatccaacacaaacataagtatccaatacagcattaccaacaagttctgaagtctcaacactaagaacataagtcccatc

SEQ ID NO: 17153 - DNA, 298 bp, Zea mays
  unsure (1)..(298): unsure at all n locations
agcttgtgaaggttcttcatccncacatgtgctaatcggcgatgccacagccagcccatgctagtcttagctattaagcatgcatctagaccggcctcttctttggcaaaatcaactaaataaagtttgccgtctaatacacccttaaaagctagtgaaccatcacttcttctatagacagacacatctacatttgtaaatagacagttataccccatgttgcataantgactaacagatagcaaattatatccaagagactctactaanaacacattagatatggagtgctcattag

SEQ ID NO: 17154 - DNA, 349 bp, Zea mays
  unsure (1)..(349): unsure at all n locations
cttgaatctcttgatgatgagagccatctcttcatcattaagtctgaccgcctcaatttgtgccaccttgctaggtaacggctccttgcttcttggtgtcttgagagcatgaggttgaggctcattgataggaccattcaatgcgtcggccacgtatcttgcttccttgatcatcattcgcccgcttacgaactttccaagtatcatcctcggcgtcatcttggtgtacctaggattctcacgaatattgcttacaagatgaggatcaaggacagtaaaagaccttagcattatgcggacgacgacgnggccttccatcgtgtgctccatagcttcttatcttgttgac

SEQ ID NO: 17155 - DNA, 344 bp, Zea mays
  unsure (1)..(344): unsure at all n locations
ggactaacatatgtgcattntgagaaagacaggatttgtagcgcatgccaagcaaggaagcaagttggtggtcatcatccacacaagaacatcatgacgactgacaggccactggagttactccacatggatttattcggcccgatagcttatataagcatcggcgggagtaagtactgtctagatattgtggatgactattctcgcttcacttgggtattctttttataggagaaatctcaaacccaagagaccttaaagggattctcgagacgggctcaaaatgagttcggcttgaggatcaagaaaattagaagcgataatgggacggagttcaagaactc

SEQ ID NO: 17156 - DNA, 331 bp, Zea mays
  unsure (1)..(331): unsure at all n locations
gtatccgagggtcttagtttatcaaagaaaaattatacagagttggaaaaggtattgtatgctgtcttgatggcctccacgaagcttcgacactattttcaagcttacaacataattgttccttcttcacaacctctgaaggatattatgaggaaccgagaagctactggaaggattggaaaatgggctgcagagctcaatgaattntgtattgaatatgttcatagatcttcgattcagtcccaggcgttagcagacttcattgctgactggacaccaggggctcaggaggaagaaacaaataaagacgccgaagcatggacagtgtttt

SEQ ID NO: 17157 - DNA, 309 bp, Zea mays
  unsure (1)..(309): unsure at all n locations
ccgaagcttaagaaaaatgcgcagctgcagaagctcaacgagaaatcagtgaacaatgggcaaatcatttagagagaaacgttgaagagcttcgtgcatccaaagaaaggtgttatgaaaagtctatagagtgtgttaagaaaataaaaactagctttgncaatgttggcgccgattcaagcgaggaaaattctttaagggcgaccccgaggcccaattgaatggaccaccacgaagccgaagctttgaaaaagttttgaatggcgcggagacatatgcgccttntcggtgctaaggggttgcactatt

SEQ ID NO: 17158 - DNA, 321 bp, Zea mays
  unsure (1)..(321): unsure at all n locations
agcttttgaacgaagntgcagagaaaggtcttaaatataaatatattctattgcaataatattctgaaatgctggatgcatggaacaatggaaggaagattaagcttctactgtaacaaaactatgtaacttttgatgtatgtgacattgaatcgaatatgtaaaatgttgtaacttatttctttgtgatgcatgaaacatacacacataccgctttttgagccttcggcgaaaaaacaccttcccttcttttcatgcttcggaaagaaagaaaccncttctatggcagatctgataaaactgtcattcgaagcttatctc

SEQ ID NO: 17159 - DNA, 422 bp, Zea mays
  unsure (1)..(422): unsure at all n locations
agcaacattagatggagcgtcatcattattactttgctcaaataacattgaatcataccgttagaccaaggcatcatgagagcaccttagctcctcatgttctttggtcatcttctccaggctggggattgatatgatgagagtctcctctagcctgagaagcgtctcgccttgttccttgttccttctcaacaacttaactaagagagctttgtccgctttgttgagatgattgtagaaacggcgaatctcctcttcttccacatcatcggactcattatccctgtcattaatgtcagtggaagcaatatacgataatgtacctcgtgatgatgaagaatcatnctcgctatcatcctcatattcctactcatcatggctntcgcgtcatcgtcattggtagcaatannaacattatcact

SEQ ID NO: 17160 - DNA, 401 bp, Zea mays
  unsure (1)..(401): unsure at all n locations
agcttgagctttgtgcaggaatgggaggtggatgtgctcatgaagggcatgtaaatgccagcaactagtgcttcagaagtccagtctcatccgacaacagtggccctttgagatccagaattacaggagaggagttagtaaggtacactgacagtgatttagttgttcgcttcggactaaagtcggttgtttagagactgttataactgtaatctatagaaactaagaagccgatacggtgcaggaccgcaggaaacgatggagttggcgtacgtacgtgtcggcgatgcctgaaccgtgtgcttctcaacccaagcagtaatactctagcatccagtggcgggcatgaccacgacgacccgtgcttncaatccaagcgtgcatccgtacatcggctacgt

SEQ ID NO: 17161 - DNA, 314 bp, Zea mays
  unsure (1)..(314): unsure at all n locations
agcttacgttcgaagtgtgcaggcttcattttgattgcgatgaccaggaaaaatctttgaagattctacagaaggagttcattgaaagtcgaaccactgttcagactatgcgcgaagagaaaagtaagcttgaggaaacaatggggagaaaaatatcagagcttgaagcttctaacgcttaataggacaaccaaattgcatcgcttgtggctgagctgaagctaggaaaagaagaacatgaagntgaaacaacaaagatgatgcaagcatctgtcgaagtagccgttaatcttagcagtgctcatgtgacaatt

SEQ ID NO: 17162 - DNA, 272 bp, Zea mays
  unsure (1)..(272): unsure at all n locations
gatatggacaatgtttggtacctaaaccccanaaccctaatcgtgtagtgatacatgccctctgaactacaatattgacttgaaaaaccctagattcctggagtcccgtgaaggaaaattgtattcaagacctaagataatgtaccttcattatatctgcatcttcataaacattacatgagcattcagagtatatatggctctatatagaaaacgaagaagaagtagaagttgaacaagaaagagctacaccatctccttaagacccacct

SEQ ID NO: 17163 - DNA, 303 bp, Zea mays
agcttcttcaccacgttttcgtagatatcttgaggaagatgagcaaggcgtcttctccttaattttctttgtttcttgttcccaagcaatttcctttttgaccctacaacttgttgctcattcaaacattcgcttccttttgagcgacaggggttagcacatgacgatatattatctagatgtgtacttgtgcaagaatgaggttcacatgaatttaaagttgtaattacaacctcatgagcaacattaagcatgatatggtcatcaattagtttattatgagaatatgagtaactatcatac

SEQ ID NO: 17164 - DNA, 317 bp, Zea mays
  unsure (1)..(317): unsure at all n locations
agcttgagtcaatacgcatttacttgcctatgctacttaccatggctntaagtatcaaatggacgtgaaaagcgcctttctcaatggaccaatcaaggaggttgtctatgttgagcaacctcccggctttgaagatagtgagtaccctaaccatgtgtatgagagcacctagagggggggggtgaataggagatcctgtgataacttaactaatagccacaaacacttgttaagtgttagcacaataattgccaggtggctagagaggagtcacaacaaaacacattaccacaagagatcatacacagagatgacac

SEQ ID NO: 17165 - DNA, 249 bp, Zea mays
  unsure (1)..(249): unsure at all n locations
agctttatcaaatggacgtataaagtgccttccttaatggaccaatcaaggaagaggtctatgttgagcaaccttccggctatgaagacagtaagtatcctaaccatgtctataagctctctaaggcgctttatgggctcaagcaagccccaagagcatggtatgaatgccttagagattntcttattgcaaatggattcaaagtcggaaaggccgatcctacgctctttactaaaacacttgagaatg

SEQ ID NO: 17166 - DNA, 448 bp, Zea mays
  unsure (1)..(448): unsure at all n locations
acctgcngcatgcagctttaaggctttcagatgaagccggtcatatcttatgctctgtttcaatgtacacaagaccatgaggagtatcttctagcatacgtccgaaggttcttgcgtctcataccatgaggagtatctacagtgtccaatgagattgtcattgaggccatgatcaaggggcttcttccaggacctactgcctagtacttcgccagaaaacctccacagacactggagaagttgcttcaaaagatggatgaatatattatggctgacaatgacttctgccaaagaaaggaggaagcttacacgttctccgagatgaccatgggctttggaggaagaatccacctattgcatgtcaggtcaattcacaactccactcataatgatgatagatgaggtcagctgtagaggctgcattatacttcacaatcttctgggcaac

SEQ ID NO: 17167 - DNA, 435 bp, Zea mays
agcttctaagggagaacacatgacgagttcgactaacgtgctattcgaaaaagatagaccttgtgcagcttgtcaagcaggtaaacaagtgggaggagcacatcgcagccagaatgtgatgaccacctcaagatctctggagctgctacatatggacctcttcggacccgtcgcctatctgagcatagggggaagtaagtatggtttagatattgttgatgacgtttaccgcttcacttgggtattctttttgcaggataagtctgaaacccaagggaccctcaagcgctttctaaggagagctcaaaatgagtttgagctcaaggtgaagaagataatgagcgacaacgggtccaagttcaagaaccttcaagtggaggatgttcttgaggaggaagggatcaagcacgaagttctctctctctacacaccaca

SEQ ID NO: 17168 - DNA, 406 bp, Zea mays
  unsure (1)..(406): unsure at all n locations
tccgcgatccttagagtcacctgcngctgcaagcttcacagttgaccttttaacatactctgtttacaccttgaagtcggggtctacacaggtcttcaagtgcccacaaccagctctgaaaagaatcggtggtgcttttggcacctatccatgcacaaaaatcatccagagtcgagaggatactcttagaatcccctacctcaccatgaatccacctcatgacaccaacaatatcgccatcaatggaaattctttcctggtacttgcaccagccaaggagaagggtctctaaaactcttcatggcatcttgtgacttcgtagaagcagtcgtccttcatgcttcggaagttcccaacaagtgtattctcatgatcttttttggctatagcatcttccttcttacat

SEQ ID NO: 17169 - DNA, 390 bp, Zea mays
  unsure (1)..(390): unsure at all n locations
gcttcttcagtgaagccaggcataaacataacagtagcatataggtcaggatgcacatcttgttgcttggtctccctaattgcttcagccacattgttaacagcagctgtcataccaccaaagacatggacatcatcatcagttagcactgacctcttcctttttttcccagacccactttcagaaccaccactaacaggcacctccttcttgctcccatcctctgcccccttaacattctcatcagacttaaatgagctctcagcaaagtctgaaggagaacccagtggctcactggagcccatggcaaacttgccagtggccaggccattgccaaagatgacctccattngcttgtagttctctatgggtttattaagtagttcagca

SEQ ID NO: 17170 - DNA, 377 bp, Zea mays
aaggagagccatgtattttactttatttcatatgagaaaactggatctgtagcgcatgccatacacggaagcatggtggtgttcatcatccgcataagaacatcatgacgactgacaggccactatagcttctacacctggatttattcggcccgatcgcttacataagcatcagcgggagtaagtactgtctagttattgaggatgatactcttgcttcacttgagtgtttttttagcaggaataaatctcaaccccagagacctttaagggattcttgagacgagctcataatgagctctgcttaaggatcacgacgatacgaagcgacaacggaacagagttcaataactctcaaattgatcgtttcttgagga

SEQ ID NO: 17171 - DNA, 402 bp, Zea mays
  unsure (1)..(402): unsure at all n locations
agtgtggcatgatatggactatgntttgtacttagaacccacaaccctaatcccctgccctatgaacttcactataaactccananaccctagtttcccggagatccgtgaaggaaagttatattcaagactttagataatatacttttattatctttgcattatcatgagcattacatgagcattcatgattatatatggctatatctagaaaacgtggaggaaatagaagttgaagaagcgaggactacaccaccaccacctgaagaacctcaggcaggaaactacttttactttgatatctgtggagcagagcctgactcacctatcactcaatgcaagccctggtgcattngccacctncttgntattntgaaatctttctcacttacttgatgcatt

SEQ ID NO: 17172 - DNA, 249 bp, Zea mays
actcctacttgaccagcgacagtacgctcttgacattctggagtgggccagatgattgactgcaagccctgctctaccccagtcgacacgcaggcgaatctctctgaggacacggttgacccactcgaggaccctaccgggtacaggagccttgccggtgcacttcagtacctcaccttcactaggccggacatctactacgccgtgcagcaagtctgtctccatatgcaccacccccgagagccccac

SEQ ID NO: 17173 - DNA, 346 bp, Zea mays
gcagctgggaagattcttcattccaacatgtgcttttctgcgatgccagagccagcccatgttagtcttaacaattaagcaagtgtcgagttctgctctatcaaaatctaccaagtatagctgaccctctaacactctcttaaatgctactgaatcatcacttcttctaaagacagtaacacctacatctgtaaagagacagttgtagcccattttacataagtgcgaaactgatagcaagttgtaatctaaagaatctacaagaaaaacattgtcaatggaatggtcaggagatatagcaatgttacccaatcctttgaccaaaccttggtttccatccccgaat

SEQ ID NO: 17174 - DNA, 226 bp, Zea mays
tcgatcatacatatagcgcctcaattgggatttcgctattcggtttccgcgctggcggagctttccccgtggcaaccatcacatgttggatatgcttcttgcttggtgtctaacccccatgagtctttgtgctcgtgacccaatgatgaagagaccgcctgatcaccagaacacctagtttcctgggttcccgcatcgggcaaaaaattcggccgatcggcaatga

SEQ ID NO: 17175 - DNA, 429 bp, Zea mays
  unsure (1)..(429): unsure at all n locations
gcttcttcaccacgcgctctgttatatcttgatagtagtgagctaagcgtcttcttctcagctgacagtgcttcttattcccacagaatatcttttgtgaccctaaaacttgttgctcaatcaatgattggctttctttagagcaacaggggttagcacatgatgatatacaatctaaatgcgcacatgtgcgagaatgacgttcacatgaatttaagtntgaaattacaacctcatgagcaacattaagcatgatatggtcatcaactaatctactatgagagtatgacaacatatcatacttttcactaagagcacgcttttctaaagtcaatggttctacttgacttctaagcatagaagtttcagttgtaagtngagcaacattagatagagcgtcataactattactttgctcaattaacattg

SEQ ID NO: 17176 - DNA, 268 bp, Zea mays
  unsure (1)..(268): unsure at all n locations
atcgatatcgncgtagactgttgaaaccagctgtaaatcttcaatgaaantttctcgaatttctgttgtgatcaccacatcatccacataagcttccacacgcttgccccagtgatcgactaagcatgtttgaatagctctctgataagtcgctccagcgttttgaggccgaacgacatggaggtatagcagaaggcaccgaatggagtgatgaaccgctgtttttcctcatcttctttcgccaagctaatctggtgatacccagagt

SEQ ID NO: 17177 - DNA, 348 bp, Zea mays
gagcttggcatacagctgacaatctcgtagctgtcgtattacttttctcaaatgctcctcaagctcttgctcattctaggaatatataagaatgtcatcaatgaacaccactacgaacttgtcgaggtagtccatgaacacactgttcatcaagtacatgaagtaagctggcgcattcgtcaaaccgaatgacatgaccgtgaactcatatagtccatacttggtgatgaatgttgtcttcagtatatccgaaggtcagattctgaactgatggtaacctgacctcatatctatcttctagaacacattggctcctctcagcggatcgaataatcttcaattctggta

SEQ ID NO: 17178 - DNA, 435 bp, Zea mays
agcttaagcaaatctatttggttaagtcacatattgatctgctcatgaggatgacttatgaagaagataccaatgcaaatgaatatcaaaaccttcaagtggcatcaatatctatagagaaatgtccaggccaatattattccttcaattggtattcactaagtggtttctagatcaatcatacaattgatatcctttgagtagtacaagacttcaagtgatccacaaccttaagtgatcatcaactcaagagatcaactctctcctaaaataagctcatgcaagtgatgtcaaggatttttatcatgcatatggtgtccatcaaaaacttattaagtaccttcaagcttggataatattcacaagacatttttccagagccttaaacaccccttttatggtataatgacaaggggaaaatggaacaaaaatgta

SEQ ID NO: 17179 - DNA, 421 bp, Zea mays
acctctaatcgactgcagctgcagcttctggaacagccttcgcatcactttttttacattgccagtagccagaagggagccagtatactccacaccaaagggacttcatagagcagtccgaagctcgtacagtcaatagcactgtgccagaatcaaagctcatctattgacaaatatcctaacttaatagcaatctgtttcattcagatttattttctgtaataaaagacattgtttaggttccgtgtaattaaattcgctaatcctgcaaaaaatatgttgttttctccacacgcttaaattgatcgaaattcaaagacttcgtgataataagaaggaccttcgaactatcaaaaattcttcgaagcaacaaatagtcgttctatcgaacgcagagtaagtttgacgaagtcacaaaaag

SEQ ID NO: 17180 - DNA, 343 bp, Zea mays
agcttctggaatggtcatgaatattatatgaacattgtctggggcaaagaacagtaccataaccactttggctgctacagcttcgtttctcggtccggggcaagctgtcccgtaccaacctttcggaagagatggcccggggattggatgaccaaatggttctatgtgaagaatgacttatcagcacgagaagacatcagaggtattattatgcgttctatttggccaagcttctgccttctgaggccgaagattgaaatgaacgaagccgccgaagagtgcccaagagccttcagcgttgtctgttcttttataggaacaagggacttattcaagaacatat

SEQ ID NO: 17181 - DNA, 377 bp, Zea mays
  unsure (1)..(377): unsure at all n locations
agcttctaaagtgagagcacatcntgggactatctctatgttcatttaagaaagaccgagttngtagcgcatgtcaagcatgaaagcaagttggtgttcatcatccacacaagaacatcatgacgaccgacaggccgcttgagctactccacatggatttattccgcccgattgcttatataagcatcggcgggagtaagtattgtcttgtaattgtggatgattactctcgcttcactcgggtggtctttttggaggaaaaatctcacacccaagaaacttaaagggattcttgagacgggctcaatatgagttcggattaattatcaanaagataagaaagcgacacangacggagttcaagaactctgaaaatg

SEQ ID NO: 17182 - DNA, 329 bp, Zea mays
  unsure (1)..(329): unsure at all n locations
agctnttgccacaagttgagccttgttccttgtcaccactccgtattcattntgttggtgcgaaacacccacttggttcccacaacattttgttttggacgcaacaccaagctctagacttcatttcacttgaagctattgagctcttcctgcatggctatcacacagtacggatccttcaaagcatcttcgaccctgagaggctcaataaaggaaataaaagagtaatgctcacaaaaatttacgatacaagattgaatagttactcccttgttaatgtcccctagtatcgggtccaccggatgatcacgttgtatggtggcacatac

SEQ ID NO: 17183 - DNA, 419 bp, Zea mays
aaccgcagcaatggactaactccgcgggaaagaagctcctaaggcaataagtgaagcaatcaacatgaacaaagaaaaaggttaaaatttaattagtcatgttgtttgcactgatcatctctctatgttatccaagaacaaaaagagaagaggaaaaaggaggtgctttaagtgcaatgagttaggccacctcattgtgtcatgtccatacaacgacaaggatgaagggatcaggagatgtttcagatgcaatgacaaggaccatatgatcacttcttgtccgctcatgaaaaatcaaacacgtgcactcttcaagatgaccctcactaagaaagaaaacaaacagcaagtgtcatgtcaggttaagcgacgctttggctacatgagtggtgagcatggtcatctacctaagttatgta

SEQ ID NO: 17184 - DNA, 203 bp, Zea mays
  unsure (1)..(203): unsure at all n locations
cttgaagatatgatcgttttcagcacatctagcacattatcccttctccttcctttctgagtcactgctggcactttttgatttcttactgtttcaatgtttgccacaagactcaaaactcctgatgntttggagtcctcgcttgcttcctttaccctcttcattttttctgtgaatggcgcttcgggcttctctctcgtttc

SEQ ID NO: 17185 - DNA, 373 bp, Zea mays
  unsure (1)..(373): unsure at all n locations
agctntttatgatgagcgccatttcctcgttgtctatctggaggcgtcaatggggagcctacttgatgtagactcttctttcttctcctctgtcgctttgaatgcgacaggttgcatctcgggtgtggaggtgccgccttgctcatatctatgattaccaattcaaagctcacaaactttcctatcacttcctcggaagacattagcttatatctaggattaccacgtattaattgaacttgtgtaggattacgaaaaatgagtgatcttagaataaccttgaccatttcatggtcataccatttggtgctcccgaggttgcgcacttgattgaccaaggtcttgagcccggtgacattgcttgtggctcttc

SEQ ID NO: 17186 - DNA, 359 bp, Zea mays
  unsure (1)..(359): unsure at all n locations
tgcttaacctctgatggaccatttctggatatgtcggcgcataatgggagtggagagaaggcgagagtatcgtgtatccacctatcaagaggctggatggaggcgtactgagcactcgtttgactgtgacctgttgtggtcttgatagaccggtgtgacacctgacatatgccagggttaagtgctatatatggcgagtgcgtggagagccccaactggagttaagcgactcagatcgccgatacttctcaaattgaagactatatcactgtcctgcatangacataatacgtgaacatccaaatgagtagaagcacgcaccattgtgccacgtgtttgatctagattaggccaatcta

SEQ ID NO: 17187 - DNA, 381 bp, Zea mays
  unsure (1)..(381): unsure at all n locations
agcttgtgagcaatacaagttcttattggatattattgcttcngctgatcagccgaagcccatgctcttatgtgaggacataacagaccagaacgtgctattgggatctcaactgtccgaagaacaagagaaaaccttgataaggttttctgctcaacaataaaaatgtttttgcttgtgcagctaataatctttgcggagttaacagggatgttatgagcactcgctcaatgttgatccatccttcacaccaagaaagcgaatgcttctgaagatgtctgatgacaaggccgaatgtgctcggaacgatatgaaaagactcctcagtgctggagttatcagagaggtaaaatacccagacaggatggcttacactggtat

SEQ ID NO: 17188 - DNA, 406 bp, Zea mays
  unsure (1)..(406): unsure at all n locations
agcttgtagagggagaaactgngatttgtatgctataccacatggaaggccacaagtctttccaatgcaaggtgatgaccggagataatcaaaggcaaaagctccagcaaaagccatcaagcaaaatctccagcacctacataaaaaaggtgaacaaaaaggatgctacaccatatttgatcaagaagaaaaagaatggaaaggtgatagcaatcaaggccaacaagcaaggcaacaaagaaaagggggccaaacgcatctgggtgccaaaggaaataatttcaaccatgaaaagcaccaagaaagtttggatcccaaaagggaagtgagtggaccgaaggtctacnggaaatattgagacctggcannagttggatgtatatcatgggatacatcatattgaatc

SEQ ID NO: 17189 - DNA, 448 bp, Zea mays
cctgcagctgcaacttcttcgaaggtttctgacaagaattttctctttgataaaatgagcacgctgatctgctagccaagtcagcggcacatgggctgcctttaccttcggaagtattctttgaaacaataaaagcaccttcggtcgaccttcttgaaagagcagtgctcaatatatctcctgtttatagcgaagattggagaactgagatcatgtcttttctccagagcaatttcctttcagatgacgaagcttataataagagaatagcggtcagagcccatccatatgtaataatagaaagggagctatacaagcatggagtctgttctccattactcaaatggttatctagagctgaatgttagagctgatgaaagaatacatgcatgcctgtgtggatcttatatcggatccaggcccttgctgggtaaagtcttcgcaagga

SEQ ID NO: 17190 - DNA, 446 bp, Zea mays
  unsure (1)..(446): unsure at all n locations
agcttaaagccatggtaagtagcataggctatttttatatcaaatgactcaagcctagctacaggagcataggtttcaccgaaatccaaaccttcaacttgtgaatatcccttggccacaagtcgggctttgttccttgtcaccacaccatgctcgtcttgcttgttgcagaagacccacttggttcctacaacattttgattaggacatggaaccaaatgccataccttattcctagtgaagttgttgagctcctcttgcatcgccaccacccaatccgaatcttgtagtgcttcctctaccctgtgtggctcaatagaggaaacaaaagagtaatgctcacaataatgtgcaacacgagatctagtgtgtaccctcttatgaatgtcgtcaaagatggcgtcgaccgagtgatctcgntggattgctcggcggactcttgggtg

SEQ ID NO: 17191 - DNA, 302 bp, Zea mays
tgcagcagcaacttatcacgagaaaatgtagacatgtgtttttgtcaccgaaaccaagtcaacgaagcacgcttcatcaagcaggctccgtcacgacgaagcaatgagacaatgcaaggagaaggtggtgctcaagattattaaataccaatggcgatggtacccttgtgacattttgtaaaccctatatgtaatcattgagggcataaatgtaatagcgcacgaacccttacggttgcctataaatagatgaacagataccccgtattggtcacgctagattataattgatcttgcgtcaa

SEQ ID NO: 17192 - DNA, 291 bp, Zea mays
  unsure (1)..(291): unsure at all n locations
gctgggcagcanaaagtcctgcaaagccgattaatgtatgattatcctagtggcagatgtgattcatcagacaccgccaccaatatcggtgtcaaaaattgtcattgccgagaccaccggagccgaagccaccgcagacgaagctaccggagccgaaaccactgaagctgaaaccgctggagccgaaactaccgaagccgaaggcaccggagccgaagtcgggaccaccgaagatcctaacctggaaaccacacttgatgatattgacaatatacttctgaaaatggctga

SEQ ID NO: 17193 - DNA, 447 bp, Zea mays
gactgaggcatgcaagcttaggagatatatgaaatctgctgttttatattattcaaagaaccacgtactagaaagtgcctttttggcatttaactttataaaatcacaacttaatgaccatcccttaactttctttgattttttgcatagaagcctattattactgttaaatgccaacacaaataacccttatggcagaacccaaccctaattgagaggtgttatgcacagtggcccattgtacacaacatattgtgattcttgtctaacgcgtagcctttctattttaaaccccacattcctagaataggctatgttgaaccttggcaacccactataatttctacagaatctttggaaaatattagaccactgttgtagttcaaaactacactagaaaccctaaataagaaataagaaatggaaaaatgaataagaggaacttgt

SEQ ID NO: 17194 - DNA, 375 bp, Zea mays
agcttgtgcgtctcaagtacctgacctttgtctcatggaagacctcgctgacgtagtagaccgacttctggatggttcggaccctcgcggttggacccgagtcctcagactcctggcctttcgtcaacatctgggtggtcggaccaccaccttttcctaggggaacttcctgactcccctggggacgttgtgccgccctttcggcgaccagcaccatgctcaccgcctctgtagccgctgcaatgtataagtacaacggctcccctggctctggagctaccagtattggtaggaacacaaggtgctgattcaactcttgaaaggctcgttctgcctcttggtccaagagaatggcccggacttccgcaatagctt

SEQ ID NO: 17195 - DNA, 408 bp, Zea mays
agcttatgataggtcttcataccaacatgtgcttcacggcgatgcccattccacccatactagtctgtaatattacacacgcatctaaaaccggcctccatcttcaataagtcgactaaggtgacgttgtcatctaatacacccttagaagcgtatgaaccctcactccttttaaagacagatacatcaacgcttgcaaaagaaaattggaacccatgtgaccaatagacttacagacaaaagatatacccaagcgactctactaggactacattctatatggagtgctggttacagatggctatcttgcccaagccttagaacttgatattggtcccatctctagatataatagtatcctgggaatacttgttctcgacgtaagatgtgaacatcttcttctccccg

SEQ ID NO: 17196 - DNA, 356 bp, Zea mays
agcttatctcaacctgagaggaaagcttattctttgggtggtgtgttagcttgagcattgttagtgtgttattgtgttattgataattatgcttcttgcagtattatatgtatgtgttgcatcatatggactaatgcttccgctgctatgaattaaatgacatctattgtgttcattctgtaataaatattcctattggtaatggtgcatgtaggccatgggttaatggtgctttaaaatgctttaaattggtatcttaattgtgaatagaggtaagttgatattcctcgtgaatattcactcaattgaatggtgtttaactctgaatctgtgcatttgtgtgttatttgcatcac

SEQ ID NO: 17197 - DNA, 414 bp, Zea mays
  unsure (1)..(414): unsure at all n locations
gcttgtgaaggttcttcatttctatatgtgctaagcggcgatgccacagccagcccatgctagtcttagctattaagcatgcatctagaccggcctcctcttttgcaaaatcaactaaataaagtgtgccgtctaatacacccttaaaagctaatgaatcatcacttcttctaaagacagacacatctacatttgtaaatagacaattatatcccatattgcataatggactaacagatgacaaattatatacaagagactcaactaaaaacacattagatatagagtgctcattngatattgcaattttgcctaaacctttcaccttgccttgattcccatcaccgaatataattgaatcttgggaatccttgntcttgacgtaggaggtanacatcttcttctccccggcat

SEQ ID NO: 17198 - DNA, 398 bp, Zea mays
  unsure (1)..(398): unsure at all n locations
agcttgctcccacagctgtatttatgtgttttgttatgttatgactcanatacaaaggcgtatagggtcttcaacaagtcatcgggtctggttgaagtctctagcgaccgttgatttgatgagactaatggctctcccagagagcaagttgttgatcttgatgatgtacatgaagaagacgttccaacgaccgcaatacgcaccatggcgattggagatgtgcgggcacaggaacaaaaggagcaagatcaaccttcttcctcaacaatggtgcatcccccaactcaagacaatgaacaggttcttcaagaggaggcatgtgatcaagggcgagcactagatgatcatgttatggaggaagaagcacaaccggcacctccaactcaagttctagcgac

SEQ ID NO: 17199 - DNA, 212 bp, Zea mays
  unsure (1)..(212): unsure at all n locations
tcggtatcatttacatgtcttctcaaatttttaaatagaatatgtcatttgacatcttatgcccccatgtttccatatatgcatatgttattaaatgtttcatttaatattactagagtatcttctatcatttacctatggcattgggggagttagtctatttcaacaatgactntgttcctcttgtttattcatgagcttttcttagggct

SEQ ID NO: 17200 - DNA, 448 bp, Zea mays
agcttgtctaaaagaactaaaataaaataaatatatattatatgtctttgcacatcatgctgaagttctatatgtgtatctaaattaagggtttgaaattcaaacttgtgttgatttgaaattccaatagaaaacaaaatagaataaaaaaataaaaaaggaaaagatcggttaactgggctcgttggtcacgatctggcccatctcccgtttttcctccccgcgtgcgtggcccagctaccggtctgcgccgacaagtgggggccacagcacatctctctacgcgcgcgggcgtttgggggcactgggggaccgagtccactcgccagtacctaattgaaagggaaatgtgcccttgggccatttctaagtattttggtgattgagtgccaacgcaagtgcttttgtgttgatctatgcaatgtattggacaaagtgcaaatcatgt

SEQ ID NO: 17201 - DNA, 407 bp, Zea mays
  unsure (1)..(407): unsure at all n locations
agcttatgaagattcttcatcccaacatgtgcttgtctgcgatgccagagccatcccatgttagtcttagcaattaagcaagtgttgagttcagctttatcaaaattcactaagtatagctgaccctctaacactcccttaaatgctattgaatcatcacttcttctaaagacagtgacacctacatcagtaaatagacagttgtagcccattttgcacaattgagaaacggaaagcaaattgtaatctaatgaatctacaagaaaaacattggaaatagaatggtcaggagatatagcaattntacccaatcctttgaccaagccttgatttccatccccgaatgtgatagctcgttggggatcttggttttctcgtggaggagaacatcttcttctccctgcatg

SEQ ID NO: 17202 - DNA, 429 bp, Zea mays
agcttcttcaccacgcgtccgtggatatcttgttgtattttagcaatgcgtcttctccttagatgctttgctttcttgatcctttcttttgaacctgcagcttgatgctcattcaaaaatatgctttcttttgagcaacaggggttagcacatagtgatatattatctaaatgtgcacatgtgcaagaatgaagttcacatgaatttaaagttgaaattacaacctcatgagcaacattaagcatgatatgggcatcaactaattcattatgagaataagataacatatcatatttgtcacttaaagcaagtttttctaaatttatcatttctacttgactcttaagcatagaattctcagttttaagttgagcaacatcagataatacatcatgaatatttctttgctcaataaaatagattctaccg

SEQ ID NO: 17203 - DNA, 400 bp, Zea mays
  unsure (1)..(400): unsure at all n locations
agctnntatcaaatggacgtgaaagtgccttcctcaatggaccaatcaaggaggaggtctatgttgagcaacctcccggctttgaagatagtgagtaccctaaccatgtctataaactctctaaggcgctttatgggctcaagcaagccccaagagcatggtatgaatgccttagagatttccttataatggcttcaaagtcggaaaggccgatcctactctattcactaaaactcttgaaaatgacttgtttgtatgccaaatttatgttgatgatattatatttgggtctactaacgagtctacatgtgaaggaatttagtaggatcatgacacaaaagttcgagatgtctatgatgggggagtaaagtacttcttgggattcaagtgaacaactcca

SEQ ID NO: 17204 - DNA, 366 bp, Zea mays
  unsure (1)..(366): unsure at all n locations
tagcttggaaacatgttttaaagnctgttattctactctattcgcctgagcactgataaagttgatagtcgcctagaggggggtgaatatggcgaaactgatatttacaaatataaacacaactacaagccggtgttatcagttttaataaagaaacgagtccgcgagagattttttntttaggtcccaagcgaataatcaagtgaaacaccgtgatttggtttaccgaggatctgttcttgcaaacctactccncgtngaggaggccacaaatgccgggtctctttcaacccttcccttctctcaacgatccacggatcgagtgagctcttttctttcaatcacttgggacacaaagttnccaca

SEQ ID NO: 17205 - DNA, 408 bp, Zea mays
agctctgagttgatattgaaataatcaatccttaagttctcatcttatgctatagaattcagcactcggtttcaaacatttgcgagtctattgggtgtagcccccgagctttgagtctattttgaaataataaattcaaagggcttcatcttatgcttttttccaaaatgatctttcggaatagcctggtgacgacatctgtcactatcttgtttggtctggagtcaatttaatctgcgacgagttggagtcctggcagtcacaatatagatgtcctggctggacgccactcggccatgaacttgaatgcctgtgtagattagactcgtgcttggagaccagatttggactatctcccatttcagccgaccgtctacttagtcgcggtatattcattgcgtatatgtt

SEQ ID NO: 17206 - DNA, 402 bp, Zea mays
  unsure (1)..(402): unsure at all n locations
tagcttctgctcctctggtcgcatcagttgatttttgtcactgagtctggntacagtacaacataatcgtgctaactatttntttatgtaaagtttggtaacttggtttgtgtgttcattcacagccgcagaggtggtttgattttggcgacctgtgctgctgatgatgttggcgttccatttggcaaccaatgcaaatgcaacccagtcccttggtcacgtcacgtcgccccctctgccccctttggttacggacaccaaagggcgggcaggcagtcaggtgcatgcatgcagcacgcgcactcacggagaaaaggaagaagcagacaagtccacaagtgcgataggctcatcggggcagatgaaaatgagtggcgcagagaatctggtggttaataaaca

SEQ ID NO: 17207 - DNA, 242 bp, Zea mays
agcttctaaagggagaacacgtgaaggtctatttttgttcatttcgaaaaatatagaccttgtgcagcttgtcaagcaggtaaacaagtgggaggagcacatcacaacaagaatgtgatgaccacgttaagacctctggagctgctgcatatggacctcttcggacccgtcgcctatctgagcataggaggaagtaagtatggcctagttattggtgatgactttttccgcttcacttgggt

SEQ ID NO: 17208 - DNA, 376 bp, Zea mays
  unsure (1)..(376): unsure at all n locations
agcttgtgaaggttcttcatccccacatgtgctttatcggcgatgccacagccagcccatgctagtcttaacaaataagcatgcatctagaccgacatcctcttttgcaaaatcaactaaataaagtgtgtcggctagtacacccttacaagctagtgaaccatcacatcttctatagacagacacatctacatttgtaaatagacaattatatcccatattacataattgactaactgatagtaaattatatccaagagactcaactaanaacacattagagatagagtgctcattatatattgcaatcttgcctaaacctatcaccttgccttgggttccatcaacgaatatgattgaatcttggaatcctatt

SEQ ID NO: 17209 - DNA, 307 bp, Zea mays
  unsure (1)..(307): unsure at all n locations
agcttatcaagtgcgagnncgttattatcgaagttctgctcttgggtcatattataaactgagatggactagctgtggatccaaagaacgtagcagcgattctagactagaaagcttcaaaagatgtctgacgaatccagagtttcatcgaaatggccggttactatcggtgtttcattgaaggcttctccaagaatgacagactaatgacagccttgctagcaaagaatgtcgagttcaaatggaccccagcatgccaacaatcatttgaaatgttgaagcagaagttgcaacagcaccggtattg

SEQ ID NO: 17210 - DNA, 413 bp, Zea mays
  unsure (1)..(413): unsure at all n locations
agcttttgcatgagacaggatcttgaagagcattagtttctcttgggggtatccctccattgctttatgagtgttgctcattttatctcttttgagaggagaaaaaaagacgttatatggcatgagcaccatttgcttcacgtcaacagaatagttttggagatttatagtagttggattcttgtgtaacaacaaccatgttttatagtgcttgagacgggtatatcaggtgtttcatacattgtcgacacatggatgtttgaccttagtggcattaacaaacgaggttgttgaattcattgattggtgtgcttagtgttctaacctaattggtagagtgttatttaaagactntgtggagttgcatcccagtttggtagtggaaaatcctagcgctgattgcacctaccaat

SEQ ID NO: 17211 - DNA, 446 bp, Zea mays
  unsure (1)..(446): unsure at all n locations
agcttgctcccagactccncgaaatagcccatttttttcatcataatcatgtcatcttctgttatagtggactttccaaattcaagatgactaggctttgccgagttcagaatgttgttatcctcttcgctttcattatcactctcaccctcaaccacagtttgtactgcttcggcgatggaagcaccttcgtcagtaacttcccctggcacaactagacctgatcgcttcattacttctgatatgcatcattagcgctttacttagcagcatgctctacgtaaacaagttaaagttagaacattttaatccatcacaaaggtaacaaaaatctagacaaacatttcaccttgaaattggaataaaataggctaccgacaatatgtngtcgtcggtaaccactgatgtcagactctaccttaacgaaaccaatactcttagacaga

SEQ ID NO: 17212 - DNA, 242 bp, Zea mays
gcttaccgcatttgaagcatgatcgctttctctcgttcttagtcttgcttggctgtcccttgcgaccctttagtgcccgcttgaatcttttgatgatgagggccctctcttcatcattaagaccgggcgcctcaatctgcgccaccttgctgggtagcgcctccttgctccttgtcgccttgagagcaatgggctgaggctcatggattgggccaattctcgcggctgtcacgtacctcgcc

SEQ ID NO: 17213 - DNA, 420 bp, Zea mays
agcttggcaggaatatttcatgagacatcttctcattttatatgtgcatcagagggatagtatgaccaattataagccttctcgaactagcatgttcatctccaacatctgaagtttgatctgagactagtattatgttgtcattgaaagaaatgcaagcccaagaagagctagcagccagaccaaccatctatacactacttcttgtcctggcagctcagtccaaatctcatcaaacatggtacagaggtgtgaaattttgggttcatccaaccacttggctctggctgagatagtacaataagaagcacacgtactggaatataaacatggcagcaaacatgtgttaacttgcccaattaccttgatccaggcacaatatctgtagttggaatacatatctgtggcataagtggcaag

SEQ ID NO: 17214 - DNA, 207 bp, Zea mays
  unsure (1)..(207): unsure at all n locations
agcttcggccttgtcgaggggcagctctcctcttatgagatattctaggtacggngtttgtcagttttggtttggcgcaaccccatttcgctctccctcgatgcgcaaggcctcaccctcggcgaccgagggtacctctggctgggccgaggtccccttgggtttgggtgtgtcgttgattttgacagatggctgatatatgtccct

SEQ ID NO: 17215 - DNA, 367 bp, Zea mays
  unsure (1)..(367): unsure at all n locations
atgtcaccttctgatacagcagaattttcaaattccagatgactaggctatgtcgggtttacaatgttgcagtcctcctcgctctagttatcactatcaccctaaatcacagtgtgtctagcttcaacattggaggcaccttcgtcagtaactgcacctagcacaattagacctgattgcttcattacttctgagatgggcgcagtctcagcagcttcagcctctgtctcctaacgagacaccctagcggcggatcgaactctggccatgtgtgtgtatgctttttctaagacgaagctcatcaccacngaccaactgtttgctcgaaagtgcatatagagagcttccgctatggtataatttttaa

SEQ ID NO: 17216 - DNA, 394 bp, Zea mays
  unsure (1)..(394): unsure at all n locations
agcttgtgaagattcttcatcccaacgttggtctatttggcggcgctagagccaacccatattagtcttagcaattaagcaagtatcgaggtcagctctattaaaatcaaataagtatagctgaccctcgagtactcccttaaatgctattgaatcatcacttcttctaaagatagtaacacctatatccgtaaaaagacaattgtagcccattttgcataatttagaaactgaaagcaagttataatcaaaggaatctacaagaaaaacattggaaatataatggtcagatgatatagcaattntaccaagtcccttgaccaaaccttgatttccatccccgaatgtgatagctctttgggggtcatggcttttctcataggatgagaacatc

SEQ ID NO: 17217 - DNA, 396 bp, Zea mays
agcttatcaattctgaacctccagttattcttttttctaagtgtcccaagagacaagtctaaaccttcagtgtgcagcagccttgccactgggcaatggcccattgcaaccaaaaaccatgcgttaaatctgacagcgccaaataaccaccgaaccatctgtcatgaaatggttaataatcggcagacgcatcacgctccgaccgtgatgactgatggccacaatatatatatagatacaagtagagagtgtctgtccggtggcacggcttatgtttgtgtaaatatactactgttgtgacatgtgttttaactatttgtcataatattaagagcagaaaaaacttatcatacttttatatattgcccagtttaattatacttcataatacagata

SEQ ID NO: 17218 - DNA, 354 bp, Zea mays
  unsure (1)..(354): unsure at all n locations
agctngaatgacaaattaagaagcaagtcccttatactttgattcccaagtattaagattatcaaagaacaatcacacagaatcggagaaggcggtggatgccatattaatggcctccaagaagcttcggcattattttcaaacttaccatataaatgttccctcatcacagcctttgaaggatattataaggaacacagaagccactggaaaggttggaaagtgggctgcggacctcaatgaattcaccattgactatgtacaccgaacttcaattcaatcccaagcgctagcaaacctcatcactgactggacgctatgggctcacgaaaaatggacaagcaaagataccga

SEQ ID NO: 17219 - DNA, 419 bp, Zea mays
  unsure (1)..(419): unsure at all n locations
agctntagcatttnttattgggtcttcattcttatcccctggcgtccaatcagcaatgaagtctgctaacgcctgagattgtattgaagatctatgtacataatcaatggtgaattcattgagttctgtggcccattttccgaccttgcctgtagcttctctgttccacattatgtccttcaagggttgtgatgaaggcactattatgtgatatgcttggaagtagtgtcaaagctttctggaggccatcaatacagcatacagaaccttctctaattctgtgtaatatttctttgatgagttgagtacttcggagatgaagtataccggtgctngctcntttatatgaccatcttgtttctcctgtacaagtgccgcactaaccgcagcatgggatgcaaccacatatataagtaatg

SEQ ID NO: 17220 - DNA, 402 bp, Zea mays
agcttcgctacacccactcctattcatgtactattaataacgcaaagagattggttttattggaatatgttcggcgttcttaattggtcctgtctctttatatttatagagggggtcttgatccgttctagacgagatccaacatattcccacagatttgttagggtaatcacgcgtgagataagtactctcatctaagctaatctgatcgtggaccgtctggaccatataagcggaccatcccaccatggccagatgttaagtatggtgcttaacaacacctacgaaaaaaggcctatgaatttctatattacaaagccggttcataccgtggcagctaaagctattcacgtaaccggaatttcttctatacgctcgatcaccaatcaatgtctcacgtgt

SEQ ID NO: 17221 - DNA, 426 bp, Zea mays
agcttatctggagaagcagcccacattcagtctctgaaggcaaatcagatgtttgaacaaaatcagtgcttagccaaatctagaaaccacaaccactcgaacgctgactcagatggtagagccatcacaccaatggtgctaccatcagtaaaataatagaatcaatttgtttttccttactgatacagtacccttcgaataattgtttataagcaattgaacttgctgcccaatgtattatagtcttggtcagtctaaacatttaccttagtctccttcactcccgcgccgctctgacctcagacccggcctcgctatcctctcctttatcctccgtcggtcctccaactccaccaggggtcgcgacattcatagtagttccacaccaggcatactcatggcttgctggggcacagcaggatttgc

SEQ ID NO: 17222 - DNA, 295 bp, Zea mays
  unsure (1)..(295): unsure at all n locations
gctgagcattaaccttgaatttgttaaagaatctttgggtacttgatttgtgctacatgggataacaaaactgtgatgagaacataactctgagcctctgaacccggggcatcatgattgtgatggaaaatgaaatagctacatatgacgggatgttacctacactgcataaagccatgaacatttcttcctagtcatcttgcactgttagnttagtacctatactcatactaccttctctgtttttagctcagaaacagctgncaccctattgttgtcaaactaggtctggcat

SEQ ID NO: 17223 - DNA, 455 bp, Zea mays
  unsure (1)..(455): unsure at all n locations
agcttnctagcctcaactcccactgccaccatcatttgtttctactcatacccgaagccagcagccagaagggcaccagcatgaccaacagcagcgcgactttagagaggagttcgaagctcgtacagtcaacagtactataccagagtcgaaacatatatactgtggaatatcctactgttgatgtaactttatcttttatgttattttattttctccgtgagaaacaagtaatgaagaacttaatttcaaatttcttgtaataactgtgcctacaccagagttaaatctatcttcctcataggatttcgaagctcaaaagtcgttcctaagggaatgcagagccaaaaattacgatctgaagcttcaaaagtcattcctaagggaagcgcatcgtaagtttctggctcaaagtcattcctaaggggatgcagagccaaataccaccgaaatat

SEQ ID NO: 17224 - DNA, 441 bp, Zea mays
  unsure (1)..(441): unsure at all n locations
agcttaagagactnttttcacggatcaagctcttttcttaatacgatctagcaccgcgaaaggggccactgtctgggctatgcttcatcggcgaacgacttatataaagaagtgattcttaggtgaaagctgttgcataaaatatgcgaagggtcctcttcgagaagcttccgtattacaaaccgacttaaagataaaatgaccttttattccataaaggtctgagtcaatggtgtgagcttttataaggggcatacttgtaatttctcacaggcttgcgtctgtgcctataaatagggaacaatatttccgtactgttcgcagattctggttataacaatcgcatctttccgaatccaaccttttggtcagacagaggttcattgtattcaatgactcatatattaagaaatgtatggatattgctatgattatttgccc

SEQ ID NO: 17225 - DNA, 342 bp, Zea mays
gcttgtggcgccctcgggcgtcttgccgcagtctttcaccaagtctcctacttggaggtctcggggccgaacccctcgggcgtggtagcgtcgcagagactgctgatatcgtgacgagtgtagcatggccacgtcccgagcttcttctagttggtccagcaagtcttctcggctggtctggttgctttggtcgtcgtacgcccttgtcctcggggaaccgtattctaagtctatgggcaagaaagcctcggccccatagactagaaagaacggtgagaaaacagtggcccgacttggcgtcgtcctcagactccagaccaccgagggtagttccttcatcca

SEQ ID NO: 17226 - DNA, 386 bp, Zea mays
agcttaaagccatggtaagtagcatagtcaatttatattctatttgattcaagcctagctatgggtgcataggtttcaccaaaatccaaatcttcgacttgtgaatatcccttggctacaagactggctttatttcttgtcaccacaccatgctcatcttgcttgttgcggaatacccacttggttcctacaacattttggttaggatatggaacaagatgccatacctcattcctcgtgaagatgttgagctcctcttgcattgccaatacccaatccgagtctcttaatgcatcttccaccctgtatggctcaatagaagacacaaaagaatatatgtcacaaaaatgtgcgacacgagatcgagttgttaccccttatgaata

SEQ ID NO: 17227 - DNA, 346 bp, Zea mays
tgcagcttgtagcatatgaggcaaaatttttcttttttgcagagttttgctacgcatatgggtggactgagtccgaatgagatggtgacatccgtcttctggcgagatgtgtgccttataggcgagtgacaggtcttgaaatctataactactgttcccaactcatgagatattagattccctacatacttacagtgatactataaccaaacatggtgatataaatgtaaagatcatcgttcaaggccaacgggtccatatttgatgccctggtgatccatactataccaccgattctaaccctaccctatggctgccccatgttgagctagatgatgctgttatg

SEQ ID NO: 17228 - DNA, 437 bp, Zea mays
ttaatcgactgcagcatgcagctgcctgttgacagcctgctttttttgttcatatggatctccatattggttgcaaatataacaactcgtccattagatatgactaacaaggctttctttctctctctctctctctctctctcttgtagctcgacctcatctgcgcgaccaaaggccccatggactgggttcagaaactcatgaaagcgtaatctctctgatctcacacgcacaatgtgcactctgtctagcagctagctctggtcacaattcacaacacaagtggcctaacactctagcttactgatccgatgcactctgctgctgctgcttttgccattcatcacgtgggacgggctcaacagtttcctgagctctcccagaacgcccattactgcacaagtaggggcggtccgccccaagcctcgcaagcctac

SEQ ID NO: 17229 - DNA, 443 bp, Zea mays
  unsure (1)..(443): unsure at all n locations
agcttctaaagggagagcacattctatgacttttcaatgttcattttgagaaagacaggatttgtagcgcatgccaagcagggaagcaagttggcactcatcatccacacaagaacataatgacgactgacaggccactggagctcctacacatggatctattcggcccgatcgcttacataagcatcggcgggagtaagtactgtctagttattgcggatgattattctcgcttcacttgggtattctttntacaggaaaaatctcaaacccaagaaaccttaaggggattcttgagacgagctcacaatgagttcggcttaaggatcaagacaataagaagcgaccatgggacggagttcaagaactctcantatgaaagcttccttgaggaggagggcatcaagcatgagttctcttctccctacacgccacaacaaaac

SEQ ID NO: 17230 - DNA, 364 bp, Zea mays
agcttaatcccgagaagtgtgtcttcattgtttcctcagcatgctcttgggttcatcgtctccgagcggagcatcgaggccaacccggagaagatcgcggccatcaccagcatggggcccatcaaggacttgaaaagcgtacagagagtcatgggatgtcttgtggctctgagccgcttcatctcacgcctcggcgaaaaaggcctgcctctgtaccacctcttaaggaaggccgagtgcttcacctggacccctgaggccaaggaagccctcgggaacctgaaggcgctccttacgaacgcgcccatcttggtgccccccgctgccggagaagccctcttgatctacgtcgtcgcgaccactc

SEQ ID NO: 17231 - DNA, 374 bp, Zea mays
agcttaaccttgtaacgaggattttctatctttgttccaaaggcggatggcccttaagtctctttgaaatctttaagggtaaatgcttgaaatgtttgcaacatgctttcattagtgcataaactgtcatgagcatcacacttattctatgacacaatgcacttcactttctgtatgatatagatatgtgctcattaacctaattatgtgcaattgacatcttaagccaaaatatgtgatcttcctctccatgcacatatttatggggagcaatctatgttgtatagaactatgatcatgcttaagttgatatatccttttgatcatatcccttttatgtatatgactatagagttttcaagtgtattctcatg

SEQ ID NO: 17232 - DNA, 341 bp, Zea mays
  unsure (1)..(341): unsure at all n locations
agctntaaactaatttggtcaaatagtgggacctcttcaccaaaaaagctctcaatatggcgtccaatgttgtctgaaggaatgttttactttggtgacatagctgttaacgggtatcatttatgtgatactgtntgtcatttaaaggccaaacttcgtttacgattgacaacttaatatttaatttccaattgtaggtatgaaccaccaaattcaactgttgttcttcgtgatactggtgaagacacttttctcagagctcctgaaggttttgaccttgttggtcgaattaagaagcaccggggcactgagggtgtatcattttggtttcctaaagctcc

SEQ ID NO: 17233 - DNA, 435 bp, Zea mays
  unsure (1)..(435): unsure at all n locations
agcttgtctntggctcatcctctttcttcatctttatttgttgatagcccaagtagcagtccaataagctcatgagttccgaagaagctgttgcatctacaagggaatctattcttggtaaagggaactcaatacacattctccatttcccattatccttcttcaccataacagtgttagctagccactctggatatgttacttctctaatgacaccagcactgagaagtctctttacttcattccgagcaccttcggctttatcctcagacattttctgaagtctttgctttcttggcctataagatggatccacattgagtgaatgctcaatgacatctctgttaacaccacaaagatcgctagttgtccaagcgaagacatctttgttgttgacaaaaatctagcagagcttttcttgtcacccgataactg

SEQ ID NO: 17234 - DNA, 420 bp, Zea mays
  unsure (1)..(420): unsure at all n locations
agcttgnggagtctattaaattcgctatagactatttttgattatctagcttgttcaaacgactgagcttctgaacttatgacatcagtgcaagtgtgtaaagctaaatattaaatgttctcctctggtttatgaataatattaactcgaacaaaggattctatcgctgncgaattccatttttacatgtatgcaaggagcagtcgctagaataatataaatggtaattggtatataaacatcagctcccttattgtaattatttgcattgtataccacatatcttttctaaacgtcatttctatgtattgtaagacattctcttgcagattcctagaccaagtcctacaatattgtcctttattgtatctcaaattcattgaagagaggatcactattgtagcattttcccaatggtga

SEQ ID NO: 17235 - DNA, 444 bp, Zea mays
  unsure (1)..(444): unsure at all n locations
agcttgaaggacaaaccanatagcaagctccagtatattttgtctccgaagttctcagtttataaaagaaaaagtatactgaattggagaaggtgctatatgctgtcttaatggcctccaggaagcttcgtcactactttcaagcataccatataattgttccttcatcacagcctttgaaggatattatgaggaacagagaagctactggaagaattggaaagtgggctgcagaactcaacgaattcagcattgattatgtgcacagatcctcgattcagtcccaggcgttagcagacttcatcactgactggacgccaggggctcangaagaagaagcaagtaaagatgccgaagcctggatagtgttctgcgacggttcctggggaaccttcgaggcaggtgtagctgctgttttagtngcaccttctaaagctagaacat

SEQ ID NO: 17236 - DNA, 315 bp, Zea mays
  unsure (1)..(315): unsure at all n locations
agcttaacaccgaatgccaaaagcttcgntaatatctctgtgcctgagcatagtacacgggtatttataggtactcgaggggccgcctgtccttgtcaaagacatttaaaccctcgagtacccagtttattccccgaatattcccacgaggggaggttacagacattcattatggtaaaccctattacagacacggcccttatcacacctgtccacgcggggcccatctctatgggccgaatcacacatgggcctcccctggtggtgggggagcgggaggtctgtatactttggcagggccttcgtcatgtcaca

SEQ ID NO: 17237 - DNA, 335 bp, Zea mays
agctttactgctcctcgaggaaactgtttattgtcttggtgacgctagagatctctggcaatggctatccgcggaggctggcgctcaagtggctcaggtgggtggcgcaaaactcgccggagctaaggacatggtctggtcaaccaaggtgagcttggactgacgagatgcgccttcaggggtgagtcttaagggcgtgggtgaacactgacgaggggtggctctgacatgcgctcggggtgtgcacagacaagcgccagagtgcgctctaccgcctggcacgactatgaacatgaggcagcgcagagagtggtcatgttcaagcgcggattggc

SEQ ID NO: 17238 - DNA, 347 bp, Zea mays
  unsure (1)..(347): unsure at all n locations
cagcttgagagcacaagaatgcaacaatctgcttttattttatcactcacacaaggagntatcactttcactatcttaaacacttggatgtggcacttgggaggctttggatcacttggagttgttgctattgaaagtatgagatgtttgcgcaactcttatgccttcaatgtgttgattgaggatgcatttatagcccctaacaacccatatagccattgacattgaatgggcaatactactaactctactggtgcactgggccttgcacaatacatgtccggtgcaccactagacttgtcagactgctattgcaagtagtcgttttaatggngaacagtcttgtc

SEQ ID NO: 17239 - DNA, 437 bp, Zea mays
  unsure (1)..(437): unsure at all n locations
agcttggcttgaccacacgagagcattttctttcttatcacattcaatggntcattaacagtggtcagttcaaggtaacaaaaacagcgagggtgcatttttctattggctcttaccatgactttgctgatattgatgtggagagtatggatgcttgctctcttttactgggacgtccttggaagtttgatactgatgctattcaccatggaagatctaataaatatactttcatgcataagggaaaaaaaaatgtgttgcttcctatgactcccactgaaatggtccacttagaacatgagaaatagattaatgctaagcaaacaggtattttgaactctgagaatcagcaacctattaagttaaaaactgctactttgctagccactaaatctgatcttgatgagatacatgcctctgttggactttgctatgcc

SEQ ID NO: 17240 - DNA, 436 bp, Zea mays
agcttcttcttcattctgatgagaacctatctttttttccacttcatcaaaacgaatgttccaactccaagatgcttgcttcaacccataaatggatgtttgaagtttgcatatctttccagcattgatcggatcgacaaaaccctcgggttgtatcatatacacgtcctcatctatgttcccattaaggaaagctgttctgacatccatctgcccaatctcataatcgaaatatgcagcaatagctagaatgatccgaatagatttaagcatcgctactggcgagaatgtctcgtcatattcaacttcttgaacttgtccacaaccctttgcaacaagtcgagccttatagatgtgaacactttcatccatgtctttcctcttcttatagatccatttgcattctatgggtctaacaccatcaggcgggtcaacc

SEQ ID NO: 17241 - DNA, 425 bp, Zea mays
ccggatccttaagtcactgcagctgcggcttgacatgtatcagagagtttccttattcttgcttgtgcagctctatagaacctggctgcaagctgcccttgtgcaagcatggcaatcattgcagcactgtggacccacaatgtgaagcgatggagcgatttcctaatattgtcagcttctcgcactgtgttccaccacaacaacgattcagtcgtccacctcctccgaagatgcttggccgctacccttggcatgtgttcgacatcaatatgcagctgtggaggtgtcgccagccttctgggccacgggtacttgcctagtggtttctcgccagctgcgccaggaatcctctacctccggatattcctgtgcatcaaggactgctccatactcgccgaagacatactcttccttctgatgctctc

SEQ ID NO: 17242 - DNA, 366 bp, Zea mays
  unsure (1)..(366): unsure at all n locations
agcttctatagggagaacacattttatgatnttctattgtccatttcgagaaagacaggatttgtagcgcatgtcacgcanggaagcaagttggagtccatcatccgcacaagaacatcatgacgaccgacaggccgcttgagctactccacatggatctattcggcccgattgcttacataagcatcggcgggagtaagtattgtcttgtaatagaggatgactattctcgcttcacttgggtattctttttacaggaaaaatctcaaacccaagagaccttaaagggattcttgagactggctcaaaatgagttcggcttaaggatcaagaaaattagaagcgacaactggaccgagttcaaga

SEQ ID NO: 17243 - DNA, 440 bp, Zea mays
agcttggaggcgtcgattggaagtctacttggtgtggactcttccttcttctcttccatcactttgaatgcaacgggttgcacctcacgtgtggaggtggtgccttgctccaagttgacaatatgtttggagtctttgatcatcagttcaaagctcaaaaacttgccaatgacctcctcggaagacatttgtttatatctaggatctccatgaattaattgaacttgagtgggattgcgaaaaacaagagatcttataataatcttgaccatctcatggtcatcccacttggtgctcccgaagttgcgcacttggttgaccattgttatgagccggttgtacattgcttgtggctcctcttctttcgtgaggacgaatcgaccgagctctccctcgaacatttcgcgcttggtgatcttggtcacctcgtccccttcatg

SEQ ID NO: 17244 - DNA, 444 bp, Zea mays
agcttctcatccgtccttcctcacccgttcgtctgtctcgtcttccccacccacccacagcatcagaacggagggaattaaggagcttcggccggatccgcaacatcggggaacggcgggaaccagggagctcccgccgcctataaccggagctcccaatcgatccactggccgttgagccgacacttcaatggaagcccacgcctcgcggggccgccgcaccgtacgtccccttctcgtttctcgttatttcgaccttttttttcaaatgagatggcgcgcagatccgtgatccgatagtaccagcttctgagatctgagacccgaggtgacaattatgtcatcttgtgcgcgtgtttgtggcagctggaggagattcgacagaagagagccgcggagaggatgcaacacgccgtcccgatcgcggcgtctaacgtggactct

SEQ ID NO: 17245 - DNA, 396 bp, Zea mays
agcttggtgccatacggccacctggtagacctattgttacgtacccgccaaatcttggtaaatgggtgtgaaggtgccattgttgttccatcaagtacagtaacatccttgaggagagagtttgtttttgccacgggagcctgctcagggtcaaacaacgtaaggtgaaatgctatcactcttactattgcaaagataccatacagtaatggatactcatagagccaactaattcacgaaatgtaacgtaaagggtaatggtaatggtttacactcgattacggacggtaacaagtttgaatagtccggtatcaatttttagtatggtatctgattacggttagactaaaacaaacatgatttaacgttatcacttactcattacgttacaaatat

SEQ ID NO: 17246 - DNA, 428 bp, Zea mays
  unsure (1)..(428): unsure at all n locations
cataaaagtcaactgaatatctcaaatcactaaatagaanatgatatgctattaatcaaatcaaactatgcaataatgcatattaacatgtaatttaagttgaacattattttagttaatgcgatcaaacaaacttgtgaatctaaacagtaatgcgtattaatatgaaattaaagtaaaataccacataccactaaaacaaagatcacgtgttattaacagaatcgaactatacaataatacattaactaaacatgtttttaatcgtgtntttaaatgcataaaccctccaaaaaatccaaatcaaacaattataataatcaaacaccctaatcaaacaaacatactaatcaaacatactagaaaaagaaaaatagactaatttcatcggcaaatgattaacggccgacgaanataatgaataaaat

SEQ ID NO: 17247 - DNA, 441 bp, Zea mays
  unsure (1)..(441): unsure at all n locations
agcttatgaaggttcttcatcccaacatgtgtcatacggtggtgccagagctagcccatattagtcttagtgattaagcatgcatctagatcagtattcacctttgaaaatcaactaaatagagcttgtcgtctaatacacccttaaaagctaatgaaccatcacttcttctaaagacagatacatccgtatttgtgaataaacaattatagcccatatgacataactgacttacagacaacaaattgtacccaagcgattctactagaaatacatttgaaattgaatgttcggtagtgatgggctatttaccaagacctttaaccttgccctgattcctgtctccaaagatgatagcgtcttgggaatccttgttcttgacgtaggaggtggacattntcttctctccgtcatgtgggttgtgcatccgctatcaatgat

SEQ ID NO: 17248 - DNA, 275 bp, Zea mays
gagcctttgagcaagtaagaatatatcttgctaggcagccagtcagaggcgacgtgcggcaaatgactcggaggcaccatatccatatgggggccacgcacgcactatccctcgcgtgcagcaggtgcaacgactgtggcagcaaaacagagtagctaggtggatgctcgccgatcgtctctttcttttgcccttgtcgtcaggtgctggccttcttcttcaaagccggtgccgcggctggccatccaagaagacttgcagggggcgtggcttgg

SEQ ID NO: 17249 - DNA, 447 bp, Zea mays
  unsure (1)..(447): unsure at all n locations
gcaagcttaagttatcttattacagaccatattttttgcgagtgcagagtaattatattatacaaaccaatgaaggcacaaactcctcccgataagtntaagcaaaagatactatgtggaggaccaagacctcccgcacttcaatattgtttttcttcatttggcaccaccttggagcaaaagcaacaaaaatttgtcgcttcctcacctaagaacaacaaagggataaaccctgagtatggaattactcatcaagtcttacccgactaaggaaaagactctcaatggtatgctggataaatacgagttctagagaggctttaccaaaaatcaacttatacttttgcagacatagcttactagagtgagtccttactttcaatcttttaacgccatattaagtattaatagactctattcgcatctagtctaatttcaacatcttat

SEQ ID NO: 17250 - DNA, 280 bp, Zea mays
ccagagccaacccatgtgagtcttagcaaataaagcaggtgcgagttcagatctatcaaaatctaccaagagtagctgaccctctaacactcccttaaaagatattgaatcatcaacttcttctaaagacagggacacctacatcaataaacagacaattgtagcccatttgacacagttgggaaacggaaagcaagttgtaatctaatgaaccaacaagaaaaacattggaaatggaatggtcaggagatatagctattttacccaaacctttgaccaa

SEQ ID NO: 17251 - DNA, 445 bp, Zea mays
  unsure (1)..(445): unsure at all n locations
agcttcttttcgtcgtcgatgagcgactccatctctagcgcctcctgccagtggtgtttcttcggggtttccaagtaagaaacatgtattcatctttggcgttggtttatgaaaatgactcacaagtcagagccatggaaaaatattacggagaataaatgtcacacatataaaaaagaatttaagttgaaaacattattcaaacaaaaaaaattgcatgcaagactcttttttaaatactactccctccatccaaaaatataattcaggaatatcgctgataattatctactactacacattgtgcanaggtagcaggtgggctttgggagagatgtagtatatatttttaaatactacacacatgcggtatagtggtagctacgagcacatttgcttgagaggtcgtacgttcaaatcccattggagccacatttgtgttttt

SEQ ID NO: 17252 - DNA, 356 bp, Zea mays
  unsure (1)..(356): unsure at all n locations
agcttcgcacctctgaactatctctgctgcattgtntttcgctggtggccaataaaatcctgacctgaagacctttccgactagtgtcttggacgccgcgtgtatttcacattgcccagcatggacctcatctagaagttgcttcccagtggatgagagaatgcacttcatgaagacgcccgatgcaccccttctgtataatggttctccaatgagtgtgtagtgggctgactgtctggcgatgcgttcgactatatttttgtcatctgggtctttcttcgtccttatgtatctgatgatcggncttctccaagtcgcagagtctgactcgggttgatccacaatattacattctt

SEQ ID NO: 17253 - DNA, 404 bp, Zea mays
  unsure (1)..(404): unsure at all n locations
agcttcgcctcggtcgaaccaattccttaatagctaccacgcaatgggagtggagagatggcgagagtatcgtgtaccctccagggcaagaggctggacagnggagtatctatgctctaggatggcgtgaacccattctggtcttgagaaaccttggggcgagttgacatatgcaagggttaagtgctacatatgtcgggtggctggagatccccaactgggtattaatcgattcagatcaccgttacttctcggacatgaagacttggtcactgccctacacgtagcaatcaagtaaactggacgattgatataagacggctagcttatgccaagtgcttgagctaggatagaagaaatctagatgcccgtacttcttatactgataaaatggattttaagat

SEQ ID NO: 17254 - DNA, 381 bp, Zea mays
  unsure (1)..(381): unsure at all n locations
agctnggacttgtcctcccagttggagatttgtcccggaggcaggtgctccaaccaggcgcgagcggtgtcggagaggaacaaggggaggttgcggatgatgaagttgtcatcgtctgttccacccagttggcaggccagacggtagtctgcgagccacagttccggtctcgtctcccccgagtactttgtgatagtagtcgggggtcggaaccgggtcgggaacggcgcccgtcgtatggcccggctgaaggcctgcggaccgggtggttcgggcgagggactccgatcctccccgctgtcgtagcgtcccccacgcctatggtggtagcctcggcgcaccctctcgtcgaggtgggcccgacggtcgcggtgatggtgc

SEQ ID NO: 17255 - DNA, 415 bp, Zea mays
  unsure (1)..(415): unsure at all n locations
agcttgaaaatagtgccgaagcttcctggatgtcatcaaaacagcatataacaccttctctaattctgtgtagnttttctttgatatactaagaacttcagatacaaaatacactgggacctgtttcctgacttggccatcaagcttctcctggacaagtgctgcacttaccgctgagtgcgaagctgccacatataataacaaaggagcccctgacgtaggtggagttaatgctgttagatctatcaaatactgtttcagctcttcaaaggccttctgctggattggtccccattgaaagacttcggctgacttcagcacttcgaagaatggtaagtttctctctgctgatctggatatgaatctattgagagatagccaatcttctgtcaatctttgagccccctttttgtag

SEQ ID NO: 17256 - DNA, 150 bp, Zea mays
agcttgagaataacatgactgagttggaaggttcatatttgtgccctccattctgttctaacgcgtgtgcgcgtttaatacttgactcatgcctgcagcttacaggctagcggcattggatttaaactggtcatagttctcccagccact

SEQ ID NO: 17257 - DNA, 134 bp, Zea mays
tggacgcaagaatgtgatataaaggaacccttgtagagatgcatacagatgttactcccttaaatgcttcttaaaatatgcactgaacaagtttagaatgaaagttaaaacacatttaatgtagtatttgtaag

SEQ ID NO: 17258 - DNA, 367 bp, Zea mays
  unsure (1)..(367): unsure at all n locations
agcttcttcaccatgtgatcacgggtatcttgagaatgttgggcaatgcatttccctttaagatgtgtcaagctcttctttagcctctcattttcttctttgagcttttgatatgaatcatcatttgttcctgcagattctagctcaaaagaagatttgcttgtcgacgaacaacaagcattagcacatggtaatatagtatcaatttgaatacatgtgcatgagtgaggctgttgggattttaaattttctatcacaacctcatgagcaatgtttaatatgatatgatcatctataagattttcatgagaacatagaagcatatcatatntattttggaaagctagatttccacttttagcttttc

SEQ ID NO: 17259 - DNA, 236 bp, Zea mays
  unsure (1)..(236): unsure at all n locations
agcttatcaagnctactttcatatggatccggaattatagncatatctgggctgaggccgccgtaatcattgttttcttaccgagacatttcctgccttttctgcccatggtgctgcgtcaccctattttggcccaatgggtcgtgtatcaagttaggtccattatggacgcatcctatggttgcagcacgaccccaatacccttgtggtcgtcctcccatgtttataaaccccct

SEQ ID NO: 17260 - DNA, 371 bp, Zea mays
ttactaaataatttctaaaattccagaggtataggtttaagcctgtttaaacactagataattccttgcttggactaaaaatcctaagactatgtttattaaatactatagaaatttaggagcctaataaaattggcctcatatttttagcatttttctagagtttcttacggatttctaaagcttctcggaaaaagaaaacgaaaaactactaatagtgttgggccaaaacttggccaaccagcccatgtctatgcggaatttggggggcgcccgcggcagcgcagtagctttttcacacaggtcctcgctagagccaatattataaatgaagtcttcaaccaaatttcgtgagtcactgacactttact

SEQ ID NO: 17261 - DNA, 349 bp, Zea mays
agcttgtgaacagtacaagttcggagggaattatcagcttcggctgatcagccgaagcccatgctgctgtgtgaggatatatcagagcagaaggtgctattgggctcgcaattatctgaagatcaagagaaaaccttgataaggtttttattcaacaataaagatgtttttgcatggtcagccaatgatctttgtggagtgaatcgggatgttattgaacattcgctcaatgttgacccatccttcaaaccccgcaagcagaggcttctgaaaatgtctgatgacaaggccgcaagggctcgcaacgaagtaaaaagactcctaagtgcatgagttatcagagaagtga

SEQ ID NO: 17262 - DNA, 356 bp, Zea mays
agcttgaaccgagggcccgcgtcacctgataattcaaatcgcgctcaccggagttcaagaactcgccggcgcacgtggaccgggtaaaacccttcaccatttcccgattcgttgcgcgcatggcctctgtgtcaccccgtgaagctcctcgtgcccattaattgaactctcccgccgtggtttggccggagcacgcgccgccgtcgatccccgccgcctgtgttcgtggccaggggagctccgaccacctctgacgccgacccgcacatcgacgtgaccgtcgcgacctcctgaacatcgtcgaccacctcgccggacctccctcgccgtcggtaagccgcgccacccttttcttt

SEQ ID NO: 17263 - DNA, 481 bp, Zea mays
  unsure (1)..(481): unsure at all n locations
ctcgacccggatccttaatcacctcggctgcagcttaaggtaaagatcgagggatgacaatggtttatgtgataacggacaaacacgcaacaaaggatgtgttttatacaaaaacatgcaacgcatctaagaagggggagcaatcaatggtaaagtaggtgaggcattatcctcgaacagggacgaaaaagaggaggctctaaagggtaggttcaaagtaagcatgaagttaagggtatagatattacaagggttaaaggcgataacagacaagaatgtaagagaggaggtaaatgggcataagaacaaaggatataagtaccacaaaggatggagttaagacagaacctgcacgtggaaaagaagaggatacgtccaagagccaaataggtaaatcgccactctcaaattgaggtggaagagaaggatattttatagagcacgcatanagataagtatcaaggtaagatcgatggatgac

SEQ ID NO: 17264 - DNA, 180 bp, Zea mays
agcttccctgatctcgtagggtcctatgtatctaggagctaacttgcccttgatcccaaatctcttgacaccccctgggggtgatacctcttagataacctgaactcccaccttaaactgtgaaaggcttccgcctctgtgattagaacccttttggccggcccgaacaacttctaaggt

SEQ ID NO: 17265 - DNA, 432 bp, Zea mays
  unsure (1)..(432): unsure at all n locations
agctntggtaggcagaccagttctattatgtggatgtatcctatagaaagggcgttgaaaaagctcaaggcgtctgttcacaacaaggctagagtcgaagggtgtattgcggaggcttttgcccttaaggagatatctcaattctcaaccaggtatttcgctcgagccaacaatgtgtttgcgccttcagtgcgacttcatgtcgaaaatgaatcaccccaaagcacccttcaaatttttgcgaatccgggtaaagcagttggaaaagggagtgtacgtcatattgaacgatcagacttgaacacgctaatgctatatatgtatagcaatattgacaacacacaggagacgttcgagtaaagtttcctcatatttacgtccattntctcacctcataatttctatagtgtgtaatcttcatgtctctaatat

SEQ ID NO: 17266 - DNA, 209 bp, Zea mays
  unsure (1)..(209): unsure at all n locations
tagtcttacacataaacatgtgtcgagctcagctctatcanaatctactaagtatagctgaccctctacacacccttnatgctattgaatatcacttcttctaaagacaatnacacctatgatcagaagaagacagntgtagttcatttgacataattgggaaacagaaagcaagtttgtatctaatgaatcaacaagaataacattgg

SEQ ID NO: 17267 - DNA, 126 bp, Zea mays
tcgacgtgacaatccggagtgacaaaggagccttttgaaaaaggttcacgccagtgacgctcgagatgaatctgacatgtattcaatttgtgcctagccgtgctgatcaacatattgcgccttctc

SEQ ID NO: 17268 - DNA, 233 bp, Zea mays
  unsure (1)..(233): unsure at all n locations
ttctgggaatatacaagaatatcatcaatgaacaccactacannacttatcaggtagtccatgaacacactggtcatcagatacatgaagtacgctggcgcattcgtcaatccgaatgacataaccatgaactcatatagcccatacttggtgatgaatgctgtcttcngtatatctgcaggtcggattctgagctgatggaacctgacctaaatctatctttgaaacacact

SEQ ID NO: 17269 - DNA, 403 bp, Zea mays
  unsure (1)..(403): unsure at all n locations
ctagctacctgtacangtagctacctgtcaangggtggtctaagctctttanatctaaaggataatgcttaaatgttgcaacatgctttcataagtgcataaactgtcttgagcatcactcatatactatgacacaatgcacttcactttctctatgatatagaacttgtctcattaacctaattatgtgcacttggcatntaaggccaaaatatgtattcctctcaaggcacatatttatgtggagaaacctatatagaactatgatcatgcttanatgacatatctcttgatcatatctcttntcatttggtacaaatgcatatatcctactattcccgtaccatgactacgaactaatatgttccagtatatactatgctagtcgtaaatgaagggaaat

SEQ ID NO: 17270 - DNA, 137 bp, Zea mays
  unsure (1)..(137): unsure at all n locations
acacaagaacatcatgacaaccgacaggccgctngagctactccacatggatctattccgcccgattgttacatgagcatcggcgggagtaagtattgtcttgtaatactggatgaatattctcgcttcacttgggt

SEQ ID NO: 17271 - DNA, 217 bp, Zea mays
  unsure (1)..(217): unsure at all n locations
ttaagcaagtgtcgagttcagctctatcaaaatctaccaagtatagctgaccctcttgagagcacctagagggggggtgaataggtgatcctgtgaaacttganacttaatccacanaagcttgattatgcgttagcacaataatgccaagtggcttatagaggagtctcaacanaacacagtaaccacaggagatcaatcacagagatggcacagt

SEQ ID NO: 17272 - DNA, 187 bp, Zea mays
  unsure (1)..(187): unsure at all n locations
cacatgatggngaatcatnccactcggntcgtacaagctaatctgggtaacttgatctacaacttattctaatgatgaatgttcanttggttatatgtaatttcaacactggaggcctaatatgtngttcattttttggtcangaacaattcatttactcattntgctattatgtctcgcatattat

SEQ ID NO: 17273 - DNA, 275 bp, Zea mays
catgtgtcatgagtcagagctgtaaaagcaatgaactggcgactcatacaatcacatataatgaactgactggacagacagacaaaagaaagtgttggtgacgtgaccttcttttggaaactacaacaaagtatgtgggctactttgaaatagaaaacctgtatgtttttcacacaaaatttttgattgtcgcatgatcctggtgaacaagcgtattacatcctcatgcaccattttagcagaagaagctcgaaatgtgtataactgagtgtaaa

SEQ ID NO: 17274 - DNA, 441 bp, Zea mays
  unsure (1)..(441): unsure at all n locations
cttgatctagctttacctatatacggttctggaaggtgactgacacttcctcattgaacaagtcttntagccttcattcttctgactattgttctttgctagaacatacttgtctgaagattactcatggaaatggcttctgaagcacattgtacacatgatattagtttgttgagacatgtgctaatgggtggatgatcaatagtaaccacctatgaccatttacatgatgtaatctaattatataagccacacttatgtttctgaagtaattcatttacctttatggtctgactacattattttatgacatttagatgtacacttattgtatgaagttatcttgacaaattaacattactttgcttgcatttagctcgtttatgagagttgtatacattttgcttgttttgatgcactatcagttgtactacaatgtaa

SEQ ID NO: 17275 - DNA, 216 bp, Zea mays
  unsure (1)..(216): unsure at all n locations
tatatcctactgggtatcccgagcacaaaatangagacatcatgctatganacctcatgatgtntcacatcatgctcttatgtataanaatgaggtttctagctctatgctatcaacccatgttaaatttgcctaaaagaaatctcctattgcatcaaatgaacccaatgtttcatttaaggctcttgatgcttcttatgtgctaactaacanatc

SEQ ID NO: 17276 - DNA, 309 bp, Zea mays
  unsure (1)..(309): unsure at all n locations
gtggtgctacttatcttggagtgtgtctggcataactgctgaatcgcaggtgtctcaagagagaagcagacnatgaaaaaagacatgaacaacatgatcacttccaggtcgattaatactttatttcttatgtaggaggcatgagcaaggagatagagacaaaggatggaatagagactccattttgtactacagacatcgatactgtcacttaagacgaacaaaaagcttacaagatcttcaaatcaataaagtgccaactaagtaggtttgagatgcaagtaacttatgcataatgactcttttgta

SEQ ID NO: 17277 - DNA, 254 bp, Zea mays
  unsure (1)..(254): unsure at all n locations
agatagtgagtaccctaaccatgtctattaactctctaaggcgctctatgggctcaagcaagcctcaagagcatggtatgaatgccttatagattttcttatcactaatggattcaaagtcggagaggccgatcctacactcttcactataactcttgaaagtgacttnngttgtatgccaacttatgttgatgatattatatttgggtctactaacgagtctacatgtgaagaattagtacgatcatgacaca

SEQ ID NO: 17278 - DNA, 290 bp, Zea mays
ctgtcaagattttctagaccgagagatgttaagatacgctcacatatggtgtgggctctgcacagcaacactgtatttggtggacaacaagaacgctgattgcaggctatcgttctcaacccaaaggggacacatgactgcttgtctgattgtaagcttgaaatatgcactgctcctggacaacatggacaaatctgtaccaattactaatgtgagatacttactgaactatgagaggatgatggacctggttcaagtctgaccactctgcttttgctctttgttgtgtg

SEQ ID NO: 17279 - DNA, 226 bp, Zea mays
  unsure (1)..(226): unsure at all n locations
actgtagtggtgctttagaaaaacattgttttatatcttcttgtanagcgatacggaaattacccaccgtgccacatgttacgcaacgtacaacttctgttctctctcacgcgcgacgacagcccaataatcatcaagggtaatcaagggactcacacanatcaattgtactgtataagctagagtccatatgcaagtcanacacttgtggaacccatcttaacag

SEQ ID NO: 17280 - DNA, 210 bp, Zea mays
  unsure (1)..(210): unsure at all n locations
acatgagtggacccttcaagaaagctcanggaggctatactcacgtgctggtcgccatcgataaattcaccaaatggatagagtacanaccccattgcttctctaaccttagccaaggcagtggaattcatacaagacataatattctggttngggataccgaataacatcataactgacctgngatctaacttcactagctctgaattc

SEQ ID NO: 17281 - DNA, 377 bp, Zea mays
  unsure (1)..(377): unsure at all n locations
atataacggttatatcatagtatataaaattatantaagggttacatcatagtatataanggggttatntcatatataannattatgcacaataagcacccgcagctttgtattctgctntggtggtagacatggcaacaccattntcgtntttaaatccatgatactagttgtctaccaagcatatggcaccctcagaaaagtgctttactattnagtttgcatccaacataatccanattggaatggcaacatgttgaaactagtctctatgatcaaaggtcacgcttatctgtggagcggaagaccatgatgagtgactgtggataatagccctaaggtaactatcgtcacctactacatatggaccatattaa

SEQ ID NO: 17282 - DNA, 152 bp, Zea mays
  unsure (1)..(152): unsure at all n locations
tacatacgcattactgtgataanttataatagatactctgtatctttctaaatagaataataattggcaaaatacgagagagtaataactgataataaattagatgtcaattatttatgaataattattagtcatttttacccgcacagcgc

SEQ ID NO: 17283 - DNA, 226 bp, Zea mays
  unsure (1)..(226): unsure at all n locations
cagtgatgaacgtggaaatatatatcctgcaagttattaattttctggctcttgatgctaattcaataanaaccttatttgtntgtagatgagacaacctgtctcattaagatcgttacttcatttatattgcagcttacacaacaattatataatggtattgttcgtggtccttccaatggagttaggtaatgacttaccanaantgtgatcattctcaagagtc

SEQ ID NO: 17284 - DNA, 182 bp, Zea mays
  unsure (1)..(182): unsure at all n locations
catgatntcaatctggcatatcatgaanacatgtacctgacggtaanaaatactatntatgtacaacatattattgcgagaacatgatatgangtgccatatctgatagcagaactcaaaggcaaaatgatacatataccaaacanaatcaatgatcctttatttgtctagcactctagcat

SEQ ID NO: 17285 - DNA, 385 bp, Zea mays
  unsure (1)..(385): unsure at all n locations
agacattctagctcgagtgtgatgcgagcggcattgcgattggaggagtgctcatccaacgaggtaaacctattgctttctttagtngaaaatngcatggtccaactctgaattattctatatatgacaaagaactatatgctntagtacgagttntacaaactttgcaacattatctatggtctaaagaaattgtcatacattcggatcatanaccttngaagtatcttaagggacaatctaatctaaacananatcatgctaaatggatngaattcatagaatcatttccttacattattaagcataanaaaggaaaggataatatgattgctgatgctntgtgtagaatgtatactatgctgtcccaactaaatcataaatc

SEQ ID NO: 17286 - DNA, 246 bp, Zea mays
  unsure (1)..(246): unsure at all n locations
gattctgatcttgtatgttgatacatattatnngatgggaatgacattcctatgctggagtccgtcaaggcttcactganaaagagttnttctatgaacgacttangggaagcagcatatattntgngcataaggatctatagagatagtcacagggcttatggataagcaagaacgtcattgacaggttgaacggtcacatggacagccaaaaagggtcttcctatgtcacatggaaacacctta

SEQ ID NO: 17287 - DNA, 244 bp, Zea mays
  unsure (1)..(244): unsure at all n locations
tcatgagatgtagatgtggtgtaacatatctgcgatcaagagttcaagaatagatcagaatgtcatttagaaagactcccatggttactttttctgtgtgacaaagatcttntagagtttcagggccaacaagaaagaanaanatgcagcatggaatggattgaanaagggtagtatcagtacaccttacttgtgaactacagtatgtttaagaanggtccatgtccaccatgtcaggtccaca

SEQ ID NO: 17288 - DNA, 227 bp, Zea mays
  unsure (1)..(227): unsure at all n locations
gaagatagtgagtacgctgaccatgtctantaactctcanaggcgctctatgggcttaagcanactccaagagcatggtatgaatgcctgcgagatntcttatactaatggcttcaagcagaaagccgacctacttcttacttaactangcaaagattgttgatgccaattatgtgatgaatatattgggtctactaacaactacttggaagagttagtncgatcat

SEQ ID NO: 17289 - DNA, 372 bp, Zea mays
gatctttatagcgtcccgtctgagcgacactgagatcaaagtcaacgggaaagcgtttctatttttgcactgactgggatcataaacagctagaagacactaacatcacatcaataccactattatttaaggccaaggtcttaacaggttgtgaactgtagcacccatcccatcattatttttgatcaaacagattgtactctagacagcttttatgcctgtacatagcactctcgctgatgcttttgcagggaacacatttgcatcgctgtgagaactactagctacatttcgatcattatggtctgcacttgtttgagatgcacccttgatgtgcagttactaatgactggtatacacagtactttgtta

SEQ ID NO: 17290 - DNA, 252 bp, Zea mays
gcagctctgactgggccgctgatgtcgtgacaccgacatgcctgttcttgtcggcgcagatggcgccctgctttgccgcctggccgcattattgcgccagtaccgtggcccaataccgtgcttcgagtgaccgacaggcgggccaccgacatgtcgggaatatacgcaggccttggaatcccgaagggcgagtcagtggagtcttatgcacgacatgtcgggggcccgacactgtcgggccccggacttctg

SEQ ID NO: 17291 - DNA, 260 bp, Zea mays
  unsure (1)..(260): unsure at all n locations
ctcttcgcatctggcgtcgacgaaaagcngacttatgcaaactgagccgagctcaacaaaatcagattgagaaactatgacgacctcagaaaatgcttggatntagcaacatatgcattcaacgattaagagagaatttccactcaggtggagccagcagtgananagtcaccctctcagctgaagatctaccgaagaccttcgaacatattgatggtgagattgacgagctcgatgaagtcatagctgggcacggtgac

SEQ ID NO: 17292 - DNA, 170 bp, Zea mays
  unsure (1)..(170): unsure at all n locations
cgagtcgagctttgntccttgtcaccacaccatgctcgtcttnngttgtgcggaagacccacttggntcctacaacattnntggtangacgtggaactaaatgccatacctcgttcctcgtgaagatgtgagctcctcttgcatcgcatcacccaatccgaatcttggag

SEQ ID NO: 17293 - DNA, 316 bp, Zea mays
  unsure (1)..(316): unsure at all n locations
actgtctgtaccttgaaactanggtactccttactactatatgaagacccagtacccacatggctatcttcagtcatgtggtaaaggagctgtacgcgggaccacaccatggcttgccccagcctcatgcgactactctaggccagcaacagcgcctgaccncaccacctgngtggcccatgggcgccacatggccagagaaagtgatatacttcaatgcgtcaacagtgagtccagaccctcatgggaaagtgttgaacccctggatatacagtccggacnnctcagatggtccaggacccccacgtgtacagtc

SEQ ID NO: 17294 - DNA, 214 bp, Zea mays
  unsure (1)..(214): unsure at all n locations
ttcgtatcatttacatgtctgctccagaaattgattatactattacanagcttatgcttcccatgttgctataaatgcatatgttgtcaaaatatatctnttacctatgcatagggngagttagtctaatcaatcatgtcttgcccctcttattctcatgtgcctttcctaagtagagaatctccgacagggggagtatatcttcgtctatgac

SEQ ID NO: 17295 - DNA, 303 bp, Zea mays
ctctgattgttgtttaataacaaggcaacttctgtcacttagctcattaatatctaaacttgctgtaagacctgtgatataagcatcaggcttgtacttatattcagccttttttgaaactatatctaacattgtctattcactctactcactttaaagatagatatagatataaaagatgctatgtataccactctatacttgacttatgaaagttaaccagagtgaagccggtgctgtagaaagactttacagtggtgcaaacatgaactcaagctagcactatgaactcatggacgtctt

SEQ ID NO: 17296 - DNA, 178 bp, Zea mays
  unsure (1)..(178): unsure at all n locations
tgggatctttaacattataaccctacacaatagaagaanaccaatagaagaatggctcanagaagagatcacttcagccacttatgaacacctatagaagaaatggtgcaacagaatctaagggctactcaatcagtgcagntactacaanatgtatcanacatcatgaaatgcttca

SEQ ID NO: 17297 - DNA, 279 bp, Zea mays
ttacttgaactgatccgtgacaatgcggtacttggttgtgctccatgttccttctttagtcctgtttgattattacatggtgtccagttatccttatgaacattgagaaacttttttgttgatttctatgcttatggacactgttatgaaattagtcctatccttgcattcaagaccattcttatattaatactgttctcatgagacacagtgaaggacagaaaaaatgctgactctttcatccatacctgtagattaacactcgtcttgacagtgtcc

SEQ ID NO: 17298 - DNA, 189 bp, Zea mays
gctcgctatgcctctcaagatcaaatgattagcattgaaaatatacgatgttgctctcatagacgtgatgtttggcaacatttcgaggcgcaggatgtttcatgttttttggatgagtttggtattgtacaagcgacagaaggtgttaccgtactcacggttaagatgtttttatgcaatggtgttctt

SEQ ID NO: 17299 - DNA, 319 bp, Zea mays
gtcatgcgcaactggattgaggtctcctaactgacggtttaaactgggacttgaaactcatgtgctgctcttctgtaaggatgagccatgtggcaagcagaccccttctcagctctatttgtgacatgagaaccacgccacccctgtcttaatgagaaagcttgcagcccgaccccctccactgagcctggatcgcctgatagccccgaatggttgccatgaggtttgatgcgtgcctcttgattcggtgcagctggctctctctaagtgctagcttacccgtagctgagtatacaaccttagaacttgtctctcctgc

SEQ ID NO: 17300 - DNA, 239 bp, Zea mays
  unsure (1)..(239): unsure at all n locations
attgggtgtgggtgctaacataagcaattcaatatccccccttttgtggtgatctctcanaaagtgatactggatgtctatgtgcttagtgcgactgtgttcaacgggattatacagcatgcagatngcactctcattatcacataggagagggactntgctcaacttgtagccatagtccctacccggttgcctcatccagagtaattgagcacaacaatgtcctgcagcaatatact

SEQ ID NO: 17301 - DNA, 446 bp, Zea mays
  unsure (1)..(446): unsure at all n locations
agcttcggatgtggatggatcatcaagctcgttgatcttncttgagccttcgatcatgcactcaaaacttagcaaattccnncgatacttctcgggggtcattntagtatatctaggatttaccacgaataattgaacttgagtggggtaaggagnatgagagatcttagaataacctttaccatttcgtggtcgtnccacttgacgctnccganggtgcgcactttggtcaccaaagtcttgagccgggtgtacatgntgtgtggcttctccctttgcgagccggaccgaccgagctcccttgatcgttccgtggtgacttgtgagctattcttctgcgcgtttgaccatccaacctcttggctctcancctgacttgtatctcttctataagagcagagatgtgccttgagtgatgtgattgcactatctattatctgcctcgt

SEQ ID NO: 17302 - DNA, 118 bp, Zea mays
  unsure (1)..(118): unsure at all n locations
cttcttttcactctaatcttctcaagtgttntaataagctagcaagagacacctatttgtgtggtgatcctcacgggatcttagtgacccgtgtgattaagaagccctcgatcgattg

SEQ ID NO: 17303 - DNA, 218 bp, Zea mays
  unsure (1)..(218): unsure at all n locations
tcataccaggtgttgcanaaagtacacagggaccagtgtttgtaatgaaggaacgttcatagtggcanactgaaatgttgaaaatgttgtctcttgtattccaatatttgcaaataaaagacagaacacctcatacctcaactgtggttacccatanaaagtgaaatagcaacaattattatcaannaatatgataaataaacaaatatttcaataat

SEQ ID NO: 17304 - DNA, 243 bp, Zea mays
  unsure (1)..(243): unsure at all n locations
gagctgaatctattggagtgagaattattattccctctcttnctttctatattctttatgcgtttaacgggggtctgaactacaagatagcttaataatntccaaacattctgcanaaattacagtggcttcttattagcgtataagtctctgtctcaaaattgggcttaaagtgatggttcttgataaatataatttaggccagggtgttgactacacttttaacagggtatttcagactat

SEQ ID NO: 17305 - DNA, 336 bp, Zea mays
  unsure (1)..(336): unsure at all n locations
atctttccttcgacactgaagtctccacttcaatcggcccctcngtattntcccaggtgcaacgntataagtctatcgatntctgatatggttgtaccgangngaaccaccactgtttcagctttgtgaggaccttcgtcagctatagcgggagtaatctcctttcgaatcattgaaggaggggtgtcaaggatagccctcatcacattcatcatacgacacttcttctgagtggtccctccaccgggtgccgaagggtcccttattacctctacttcagcagttctctcaacatttttcttctgtgngctataataagctcgtagatctaatcct

SEQ ID NO: 17306 - DNA, 172 bp, Zea mays
  unsure (1)..(172): unsure at all n locations
gtcatcagtcagatnaacaaggaatgggattgttcaaatgattcaatggngagatactgcgccgccgtccgaaagctataagaataattcgaaggtctggagtttcatcatatagaaagagatcggaacacggcggctgatatactgtcaaagctcggatctggtcgaactc

SEQ ID NO: 17307 - DNA, 256 bp, Zea mays
  unsure (1)..(256): unsure at all n locations
aacataagatgtagaanattgatgagtgcatactatgtcatgagcatcacgtnntatttatgacatattgcaccttatgaatagtatgatataagttggctccatactttgacccannatatgtgctttgacatatgagtacaaaagtggtatnttctgagatgcacatatntagtggggaggaaactatatcatacgattcacaatcttatntatcacatattatgtaagctttaaatgtgttgtcatcaatcac

SEQ ID NO: 17308 - DNA, 360 bp, Zea mays
  unsure (1)..(360): unsure at all n locations
atctgagtgcccatcatacatggcangttgaggtgtcttgtatgacgagggccatggngtagcctgcagttctgctgccaagggagaagcatcatcaaangtaaaggtatcatgattaanatcatcataccatccattcttcgtgaacaagccttctttgacgaagctcctatgnntgggccttcgatcttgntcatcttgaacaagatgacgcacttcttcagtagcttcgtcaatcttcctttgagatcagccagacgcgccatcttctcttctttgacttgtgatgatacttcatgtcttgactctagtccaactctctctgagtgtggactgtgtttctctctgcttcaccttcga

SEQ ID NO: 17309 - DNA, 279 bp, Zea mays
  unsure (1)..(279): unsure at all n locations
agtggagagatggcgagagtagcgtgtaccctncgtggcaagaggctggacaatggagtatatgtgctctcgggtggcgtgaacncattctggtcttngagatacccggtgtgagttgacatnatgcagggttaagtgctacatatgtcgcgtggttggagatccccagctgngtattaatcgattcggatcattcgtacttctcagacatgaagactnggtcactgacctacacgtagtgacaagtgaactcaagggatgatanaacacagctagtat

SEQ ID NO: 17310 - DNA, 204 bp, Zea mays
  unsure (1)..(204): unsure at all n locations
gacttatattatagagtaacccacccgaagtgtgcatacaccgttttgatactcgaatgagacatacacttttgatttgatatcaagagggtcaaaatatgtataatccgagctttggcatatataagtcanagtgacaccactcgtagaatactactagtaggatatanactctgaagcattattntcatttacttagtaatg

SEQ ID NO: 17311 - DNA, 247 bp, Zea mays
  unsure (1)..(247): unsure at all n locations
gatactgcaganatggacaggatcaacagtggctactatgagctactatataccaactaattggataatctatatgaaatctgccaatttctatacagatgtactctacatgaatgaactagagagaaatctattacctgaacataacaataacaagtaatatgatcacagtcataatagaaagctccaccaaagaaagcccaaacctgatacctcattgtgaatctaccaacattacgtactaata

SEQ ID NO: 17312 - DNA, 175 bp, Zea mays
  unsure (1)..(175): unsure at all n locations
tactgtatccccttcttggtccacatgcaatatgctgtatgatgcttatgntatgcanaatgatgtgatgaatgtatgttatgcaaaatgatatttgtgccgaagatacacacatccctgcaatagagcacaccaatcttntatatcagcgctgactttttcgctgtaagcctcc

SEQ ID NO: 17313 - DNA, 418 bp, Zea mays
  unsure (1)..(418): unsure at all n locations
ctcacttatatgacccanacgacagtgccacatgtaggtaggacttaaatcattangccgaggccttttagcactaatattacagataggtgcatcatcaagaattaaaatgaataacccattcataatggatgcaaagccacaacatgccttttaagatacacacattgttactccaatgaatactcttataactaagaactatgttcatctctngactgatacatattactcaaaaatctgtgagggagtgatctccacagcaccacactttgatattgctaccgaataactctctctttacctcagtctatcatctgctcaatgcaaatgcaccgatcgttaatccagaatattagatacagaaatttgatggatcaggactgtggtgcctacgcgactatagcagctgtgatct

SEQ ID NO: 17314 - DNA, 194 bp, Zea mays
  unsure (1)..(194): unsure at all n locations
tctatccactgtctagcgcgagccatctgtctttctgttactttaacatgcatctgaccggctcttcttgcanatcactaataagatgcgctatacacctaaactaggaccatatttttaagacaaccttacattgaaagaagtattccaatgatatgactcaatgcaatattcaaactcctaaaccataatga

SEQ ID NO: 17315 - DNA, 255 bp, Zea mays
ctaaatcataaacttaatcactcagccatttcttgctcatgtcatttactggtaagaatatttaactttatatctgatataatgacagatttccacaatatgacccttctgaggctgacactgactagtcaacatagtgatatgtctatgcgcgtatgatgagctaacttactggctttgcatagaccatcagcatgctgtcgtacatcacataaggttttatatcgtgactatccgagaatgcatacacttact

SEQ ID NO: 17316 - DNA, 149 bp, Zea mays
  unsure (1)..(149): unsure at all n locations
gattctggaagggttgtctgaggatactggtgacagtgacagctatgatgtggacagtggtggtgaagactncgaagatcgttcatggcgaccaagccattcagtttatagtaaatcaactatcanagagaatcatcttatcaacatga

SEQ ID NO: 17317 - DNA, 297 bp, Zea mays
  unsure (1)..(297): unsure at all n locations
gctgcattctcacgccgtaacttaagttcgacacactnggtgctatctgaaatcanaacaacagagcataagcaattacttaaagaaatcaacatgtctactacgtgctactntccaaactataactctgnttttgagtcgaatatcacagcaatcagagccaccctggttctgctntgatgttctaactaanagcagatgagagctaagaataaccaattttctacaatntatactanatggcgtcacaacanagctgcgtcaagcatcagatcctattactagctggaccggtgt

SEQ ID NO: 17318 - DNA, 224 bp, Zea mays
  unsure (1)..(224): unsure at all n locations
tgttagtcttagcaattatgcaactgtcgagttcagctctatcanaatctactaagtatagctgaccctctaacactncattaaatgctactaaatcatcacttcttctaaagacagtaacacctatatccgtgaaaagaacagtgtagcccattntacataatggagaaacagaaagcaaattgtatctaaagaatctacaagaaaaacattgganatagaat

SEQ ID NO: 17319 - DNA, 325 bp, Zea mays
  unsure (1)..(325): unsure at all n locations
taattgatccttagccttgtgagtgcactgatggtcaaggacaccctagtgctcgacagctatttggtgtatgacctatataacaaaaatgcagcttttttacgccattaggatcagagccatctttctggagaggcctcagtcactaagatctttagtaggcacaactgtctacaatagacattgaccctgtacatatacgtacatttgtntctgactcacttctctctgacttgtagcttacatggctagctctcatgtatcatacatatgcctatgaccactatcacacttcttcgtcttctctctttattctctcgtgtat

SEQ ID NO: 17320 - DNA, 352 bp, Zea mays
  unsure (1)..(352): unsure at all n locations
tctcanagtatccacgcaaaaaatacaagatctcatgaatgcaatntaaattatgaccaatagttgcactgtgcanaccacctaanataggtattctaaataggccagtcctagagccaccaatgntactcccaccacttcaaggagtgccaacatcatctgtntagtggcatccatgtccctgctgcacgtagattcaccaaatgtgtcagggtgcccaaatggtaagagcttatgaaagaaaacatttcttcaattttaanaataagaagcatgaagatttatgagtgagcaggtgagcattgtcgagttcattgccncncatacacttcatatagctgcttgaattact

SEQ ID NO: 17321 - DNA, 341 bp, Zea mays
  unsure (1)..(341): unsure at all n locations
ctagaaagtacaaagggtgtcgtcgcttgtctgcataactctnnntgtgagctcgatctntctntanantatgaattattcattggactntctcttctgtctnctttaccatatcangcctgaagaaaattctttcacctggttcagaccagtttaacggagtacgacatcgtcgtccatataaagcttcgaagggcgccatcttaatgctntcttgatagctattattatatgagaactccgctaatggaaacaatcatcccatttcggtgggaatccagaacacatgctcgcaacatatcttcaaagtatctgattaccctctcagtctcgccactggt

SEQ ID NO: 17322 - DNA, 328 bp, Zea mays
  unsure (1)..(328): unsure at all n locations
cggatcttaagcacctgggctgcagctataaagatcttatccaacatgggctagtcggcggggccagagccaacctatggtagtcttagcaattaagcaagtgtcgagttcagctctatcanaatctaccaagtatagctgaccctcaacactnccttaatgctactgaatcataacttcttctaaagatagtgacacctatatcnagtaatagacagttgtagcccatttgacataattgagatacgganagcatattgaatgtaatgaatcaacaataaaaacattgganatggaatggcaggggatatagctatnntacccaaac

SEQ ID NO: 17323 - DNA, 322 bp, Zea mays
cagtttgttataactatttagttttgagaaccgtcattgcgtcataacgcttctcacgcaactaaaaaatataccagtaataaactcttcttattgctgccaccactgacattacctgcttttttgtataaagctaattttcaaaccagtctttcttcgtagtgtttaagcacagggagtgcgcaaagacacctatattacagatgacgtaaccttaatagaggttcgtgctaatatgcaaacaaagacagtgtcacaatgacgcgacgccgctagcgacgcatgcgacgctctgtgcgcgccctccaaaatagtcagtttt

SEQ ID NO: 17324 - DNA, 171 bp, Zea mays
aatgaagcatcataagtatgtgtaaacccccaaattgttaaaaaaaatattggtagagtcaaatatgagaacgagaataaaatagtaatactttaaataatatgggttatattcacatttggatttcaacttgagactatgagacatatgaataataacttttgaacatac

SEQ ID NO: 17325 - DNA, 235 bp, Zea mays
  unsure (1)..(235): unsure at all n locations
tggtgtgtgtgtgtctatgctgctacttgtattaagttagtgctcttagttactatgagcttctattagtatgtgtgatactatgtagtagcctatcacttgctataatgaagctcttgangtctggggttgatacacccaataagactatngtggttaaggtggcagggctagtgaagctgtaagtaacacaatgtcaaaggatgtcaaggctaatgatatggtgggcatacag

SEQ ID NO: 17326 - DNA, 144 bp, Zea mays
  unsure (1)..(144): unsure at all n locations
caagtggngctcatcatccacataagaacatcatgacgactgacaggccactggaactcctacacattgacctattccgaccgatatcttacataatcatcggcgggagtaagtattgtctagttatcatggatgaatatgcac

SEQ ID NO: 17327 - DNA, 248 bp, Zea mays
  unsure (1)..(248): unsure at all n locations
cttcttcgntcgtcccattgaacactagtgcccccttcggatatcttcaattctttgcatagtgattagcttcanaaactacttccgataactntttccccgaagcatgtcgcacgatataatcgtatattntggaagatgctncggtggcagcggtatcaatntcttcgaccaaagttggctctgacagtattcatttttcggtcgccttcgcaatatctggttcttctgcttccaaaggtattacc

SEQ ID NO: 17328 - DNA, 277 bp, Zea mays
actagcttgtggcagaacatggcaccatatgtgggcagcgcatgtgcttttaagggagagatgtgcgtcagtcacgcacttggcgaggaaaacagctacttgattcatcaagagaggcgcgtatacatacccaccttaccatggaatgttatagcagaacacaaaagggaagtcgacgtagccgctatgtgcaaagacgtgagaccgcttgtgaaagaggggcggtaacggaattgcctgcggaactgcagctaaaaaggacacacaggcttttgac

SEQ ID NO: 17329 - DNA, 266 bp, Zea mays
  unsure (1)..(266): unsure at all n locations
cttgatcactcatcaaacgaatgtctaactccgagatgcttgcttcaacccatanatggatgtctgaagnttgcatatctntccagcattgatcggatncgacaaaaccctcggctgtatcatatacacgtnctcatctangtttccattaanggaaagctgtttgacatccatctgccanatctcataatcgatatatgcggcaatagctagaatgatccgaatagaattaagcatcgctactggcgagaatgtctcgtcatagt

SEQ ID NO: 17330 - DNA, 257 bp, Zea mays
  unsure (1)..(257): unsure at all n locations
ggacgtcaatangacaatccacataaccaaactaccttgattaacctcacatacaacanaacctactattactgcacttgtaacaattgtacctcgtgatatcacacgatgcattcaaagtagtagacatacatgatctatcagaccatcattcatataagaaaaatctcaatgcgatgcaacaaccccatcattaangagatagatgactaacanacataagcaactcccagttaagcattgacttcgtttaagat

SEQ ID NO: 17331 - DNA, 308 bp, Zea mays
ctatgcgactgagactggtctccatgctactatggtggtacagtgcggcactgacggggcagcgggtagtggacatgtatgcaggcgggatgcctgacgcaacgggaattactggacagtgtatgtgacggcggatacctgactgccgggttagttacctgctggtaaactcattaatcgctgctctacagtaatgaactcttgaccctgactgatcgatagaatgaatgaggtcataataattgttattgactaatgctcgcccatgatgctatgaggacaaattagttagtaatatatagacttga

SEQ ID NO: 17332 - DNA, 276 bp, Zea mays
  unsure (1)..(276): unsure at all n locations
gaagacagtgagtatcctaactatgtctanntagctctctaaggcgcttatgggctcaagcangcaccaagagcatggtatgaatgccttagagaattncttattgcanatggattcanagtcggaaaagccgatcctacactctntactanaactctntgaaatgaacttgttgtatgccannnattatgtgatgatattatatttgggtctactaacgagtctacatgtgaagagttagtangatcatgacacagaagttcgagatgtcaatga

SEQ ID NO: 17333 - DNA, 186 bp, Zea mays
agtactttgatatatatgacacgccgggttataagacaagtgtgtgtggtccacgatagccctatggcttgaactgtctatatgttctgcgttgatctataaatcgttgaatcttcatctccctctctccattgaatcgatctgtgatggttgctaatctttgctactacaacaagcgccatgcat

SEQ ID NO: 17334 - DNA, 312 bp, Zea mays
ggacttagcacgagctgcactgcgcaagtctgcgttgagaacgctgagcactgcacccgtccgcaggaggtactgtcaaggtccaactaccacatgctgacatggggacatacctctaagagcgcatactggtgtgagaacttctgtctggtcgacatcaattgataactaagctttagggacacgtgtacttgaaaaatggcactgttgggcattcgaggagatactgtcattgaattgtacctgcccaagtatactgttctggtatctcttccccatcggcctcctatgcgcaatgtcagccagccgtca

SEQ ID NO: 17335 - DNA, 422 bp, Zea mays
  unsure (1)..(422): unsure at all n locations
gctacacaactattggctaatgcattattataacgaaaacaaaccgagagaacagaggatgatcacaaggtgaagaactctctgtggagaagccacagatgtaataaatcttctaagaatggcatcaaaaacaaaaacaaaccgagaaaacgaaggatgatcaacaaggaagaactcctgtcggacacgatcgtgtatggtgctgcatgttcaatgactaatcactagtgcatgactgtaagcacagtgcacactgtaaaactttggtgtagtgaaatgctaaagacttcttctgctattattatattacgatgtaacngcttatgacttatgtatgaagataaccatgtgacatgatcacagacgaatcacactgatctgtgttaatggcatacaacaacatctgtctaatgtttagatca

SEQ ID NO: 17336 - DNA, 307 bp, Zea mays
  unsure (1)..(307): unsure at all n locations
gctatgggaagagcacganaggagcaacttccggacctcannggcagatatcaatgaaccctctggttcanggatcgcctgtgcgtaccagtgggagaaacacgaganaccctgctcaatgaagcccacaactcagcttactctatccacccagggaccaccaagatgtacctagaccttaaggccagatattggtggaaagggatgaagagggaaatagcacagtatgtggcccgatgtgacacctgccagcgaacaaaggccgaacatcagaagcctgcaggcctacttcaaccccctccaatac

SEQ ID NO: 17337 - DNA, 434 bp, Zea mays
  unsure (1)..(434): unsure at all n locations
atgtcaaaatcntacacctagtacaaantacaacatgttctacacaagaaaatagattatntgctacttctaannttagcattgaatcattgntgacactntntanagtagaaatggtttcatgacaagtagatagttcaaaagaaagcatttcatttctcttaatctctaatgcaagtgaattttgtgcttctacaaatatgtcatgttcttcatacaacanatcctcttgctnnttctaaagcctattcttatcattcaaggcatcaatcaattcaattaatttatctatcttagatctatctaaccccttgaacaagcatgagtaatctatgtcatcatcatcactagactcattatcactagaagaagcataagtggagtcttgagtactcaccttcttctcctttgcataaggcatgtgtgatgctcgt

SEQ ID NO: 17338 - DNA, 239 bp, Zea mays
  unsure (1)..(239): unsure at all n locations
aacaagtgggaggagcacatcacagcaagaatgtgatgaccacatcaagacctttggagctgctacacatggacctcttcggacccgtcgcctatctaagtataggaggaagtaagtatggtcttggtatagntgatgactnttcccgcttcacttgngtattctntntgcaggataaatctgaaacccaagggaccctcaagcgccttctaagaagagctcataacaagtttgagctc

SEQ ID NO: 17339 - DNA, 224 bp, Zea mays
  unsure (1)..(224): unsure at all n locations
cgattcaatatattgagtaaatatagtataattcatctatgatttattacccctttataccttttatctatgtgcttacaatctgtgaatttatacgaagtcagctctaatatacttataacttctcaagccatatctcangaatatgttatgacaagacgtacataacattatgtgctgtctaatatacattgaacaatccacatggcatctaaatgccacat

SEQ ID NO: 17340 - DNA, 383 bp, Zea mays
  unsure (1)..(383): unsure at all n locations
gacttcactgtngtcgactgaaaaatgtgtaatgtgtatttagcctatttatgtccagtgcatcacaccagatacgtcatgtatatatatggtaataaaactacaccgaanatacattttcanacatgttagctctttgcatatttgccactactatgagacgcatcactagctangataaagggagccaccgataagaaaagtgcggtgggtaaaaagataccggagtcaggctctaactcangctatgnttaatttcggatataatcctgctatattatataatctatcgctaataatccagctagcaataacaactagaatatatgttcagatcgtataatctagaaattagaatatgagtatctcataatcttctcgtg

SEQ ID NO: 17341 - DNA, 243 bp, Zea mays
  unsure (1)..(243): unsure at all n locations
cacataataaaggctattatgttcatatgttcagtgacatctacagnttgtcattgtgtaactgggagttntcatatgtgaagcttgccatatatcacgcacgaagtataggttcagttagtgagacatgccttttctagcagttntctaggctccttgtctgcgaggagcgagcatgcaacgcttcattgttggcctgaattatagattcgtgtaacacggtgcactcaaccacgtaaactc

SEQ ID NO: 17342 - DNA, 130 bp, Zea mays
  unsure (1)..(130): unsure at all n locations
gcatgaaaagaactacccgatgcatgattnggagttcgctgctgtagtgcacgcttatgaagattggaggcactacataattagaaataagtgcataatcttcactgatcacaaacgtgtaaagtacata

SEQ ID NO: 17343 - DNA, 379 bp, Zea mays
  unsure (1)..(379): unsure at all n locations
ctgaaaagntctagagaaaatgttgtaatatcgttggtaaaatatttgtaattcaagaatcaaatactaactctatanatctgacataccttgaatatattttaccttttcgccatgtataactgcttgatgtggacacactagtatttttgagccgaaagctanaaacacctttccttctttatgacacaacgaagcatgaaactgcttctttttctttntgccaaagccttatctttatagccgaagcatctgcctgtgtctatantgtatgatgatgatgactcctatgatgtctaaataaatggttatgaatgcaaattgatgatgtaatgtgctgtgatatgaatgcccaacacacacatccgaagcttatcca

SEQ ID NO: 17344 - DNA, 242 bp, Zea mays
  unsure (1)..(242): unsure at all n locations
tgtggtctatggtgatggtctatgttcctagagggctaccagaaataagtaccaccgttctatgagtggatgaggtggtacactcgacatgagagggagtgttggaatataatataagtgaatcgtccatcttctcctattaacttaatcttttggggttgaatgggttggtgcatgagacttaatanattccaacatgatctacatatcatcttttctctataagtatggtccttctcata

SEQ ID NO: 17345 - DNA, 211 bp, Zea mays
  unsure (1)..(211): unsure at all n locations
ctagtacacccttanaagctaatgaaccgtcacttcttctaaagacagacacatctacatttgtgaataaacagttatatcccatattacannagtgactcacagacaacaagttatatccaagcgactcaactaagaacacattaganatagagtgctcggatgangatagcaatttttctaaccctttcaccttgccttggtcccatca

SEQ ID NO: 17346 - DNA, 250 bp, Zea mays
cggacttagcactgagctgcagctaagcttggctgcaccggtctagtgtgatggtgccaggtcaattgcgcatggggcgattactccgactagaaggggtggcgtaagcatgcggcaatgagcccccggagttatagccggcgcacaccaggcaggcccgggacttacaacccggcagccctcgggttggcactctgctgccacaggtcaacacttgccgtcgtttgccagtttgccgtgggcgtcatca

SEQ ID NO: 17347 - DNA, 372 bp, Zea mays
  unsure (1)..(372): unsure at all n locations
gatcttcgganacagctagccagagctaaagaagaacgcatacttgaagaaacanaacgagaacttagtgatcaatgggcanatcatttggaaataaatgttgaggagcttcgtgcatccaagaaaaggtgctatgacatatccatagaatgtgcgaagaanataaaatccagcttcgcccagcgtggtgcattctctagcgaagaaaattttacantgngtaatccagaangggcccgatgaatggatcagtcatgaagctgaggcctcgaggaaatctgatagccgcgagacatatgcgccttttggtgcaggggattctatgttngagagaaggtgcacatgtaatcttacacatcaagctgctatctc

SEQ ID NO: 17348 - DNA, 143 bp, Zea mays
cacgagctcagctttgagcggtgaaaacaacaaggttttgttttaggaagtacgcgaacgagagcccgaacgcgatgcttccctctctgctaacaggttctggcagccaacgagtcgccactcaatacaatatctggaaaccc

SEQ ID NO: 17349 - DNA, 275 bp, Zea mays
tattcggctgccgcctatttcgcctccatggcactctatttcgcaacgcagcaaagcatgcgctgctgcctctgcgttcctcgtcgcagcctaccagaaactatactcggtttccacctgactacttattcggcatccaactggttcgcctggctggcaacctgtttgccaccagcgaacatcgccgcgctctgcttaccagatctgagtcgtgctgcactgactgttttgggtacacacggatcgcactcctgcgtcgcgaacggccttcgggt

SEQ ID NO: 17350 - DNA, 144 bp, Zea mays
  unsure (1)..(144): unsure at all n locations
tgaatgaattatacaaaataatgattgaccacgaccagcagagccctttgtcttcgagatggcagattggtagaaacctcaacagcattggaacacactattgaanaatctggatctctgaatgccgtatcacctgaaaagtat

SEQ ID NO: 17351 - DNA, 338 bp, Zea mays
gtcgcacctctcctgactcttgcgagcttgtcgaccggcctactgctctcagtcgcgcgcctgccgccgggatctcctgtcgggctgactggactccctgactgtcgcggcgcaggctctgtcctctgccgcttctgacccacgccagctggctcctgcgctgaaaccagcgccagccaacgctctgtcctaaactgtatggtgcggcttgttcaggacgcgctccctggctgcattcctgcgtgctgctgatctctctggcattcatgcctgtgctaactcacctatcgcgacgctgtagctacgcatgtgtacgcacggtgcactctgtcaattca

SEQ ID NO: 17352 - DNA, 110 bp, Zea mays
agggtcaggtgaagccgccttatgcaagtctttcaggcggcaggacacaaaggaagaaaaaaagcccaaaaggcgcatccagttgcggagggatcagaagtcccatctct

SEQ ID NO: 17353 - DNA, 357 bp, Zea mays
  unsure (1)..(357): unsure at all n locations
tcacgantatgtgtccaagatattttatgcagaagtcaatattgccctcacatcgttatgtgaatcatatgcataagtcttatgggcatatntgtaatngcatacgaagttgtacgaatccctataaatagatgaacagtgccctgcataaagtatctnttatcgggctggatcattgcattgtgtaatctctcttccaaagcatcttcgttctaattcactttgtatgactgacggtacgaatgtaaattatcatactgaagggaaggaatgacatattganatatccaagatgagtcatcatggtcaacttctttacattccttatacatntcgntatatatggatatacgattc

SEQ ID NO: 17354 - DNA, 185 bp, Zea mays
  unsure (1)..(185): unsure at all n locations
gtaggtctatcaaatattgcttctgctcttcgaaggctctctactggactagtccncattgagaaacttctgctgacttcagtacttctgaaaatggtaaatntctctctgctgatctagatataaatctcgtgagagatgccagtcttcctgtcaatctttgagcccacttctttgtacttggt

SEQ ID NO: 17355 - DNA, 211 bp, Zea mays
  unsure (1)..(211): unsure at all n locations
gtgtcgagntcagctctatcaagatctactaagtatagctgaccctctacactctcttaatgctatcgatcatcacttcttctaagacagtgaccctacatcagtgaatagacagttgtacccatttgacataattgagacacggaaagcaaattgtatctaaagaataacaagaaaacatcggaatggatggcaggagaatagcaattta

SEQ ID NO: 17356 - DNA, 371 bp, Zea mays
  unsure (1)..(371): unsure at all n locations
acctgatgtgccttgagtctgacactttgacgttagaatatcggatgacgttttaagaagcgttggtgggaacatctgtcattctggccagctattgctaaactggtaagattataaactgtgataactgacggctaactgtcatctgcagccttcctttgcaaacggaattgctatacaaagcngcttgcttatatatgaatatgtacatggtgacatcttatagctaacacctttgaatccttgcccttgacgcccttaaggctccataccatttattatacgtacgaagcaactgtactaaggcttccagtgcacacaaatgtacccgcgcatctgaaagaatgctagctattctcatgcgctgcgta

SEQ ID NO: 17357 - DNA, 257 bp, Zea mays
  unsure (1)..(257): unsure at all n locations
agccacccatattagtcttagcatataagcaagtatcgagttcagctctattaanatcaactaagtatagctgaccctctaatactcncttanatgctaccgaatcatcacttcttctaaagacagtaacacataaatctgtataaagacagttgtagcccattttacataattgagaaacagaaagcatgctgtaatctaaagaatctacaagaaaaacatcgganatggaatggtcgggtgaatatagcaattta

SEQ ID NO: 17358 - DNA, 326 bp, Zea mays
gcacttgattgatatatctaaacttggtttaatcagctatgattaagcaccggtacatgcggactatagggcctcagtctattactgaccctaccaactcaagctatggacaataatcaggctcgccatcaagaacacactccctcgccacccagctcgcaagcagcacccgagatacttcgccaggccctaacaagacaacttcgtcgccagccatcttgcaaacacctgccatccacccacacgttgagacatatgcagggtaactttctccccctatacaaccaggacacatccctcatgcgctaaaagcggccttcctcatg

SEQ ID NO: 17359 - DNA, 264 bp, Zea mays
  unsure (1)..(264): unsure at all n locations
tcagcgactaagcaagtatcgagtttaggtctattaanatcaactaagtatagctaaccctctaatactcncttacatgctactatatcatcacttcttctaaagacagttacacctatatccgtagaaagacagttgtgacccatttngcataattgagaaacaganagcacatcgtatctaaagaattacaagaaaacattggaatggatggcaagtgattancatttaccaagcctttgccaaacctgatttcatctcgat

SEQ ID NO: 17360 - DNA, 274 bp, Zea mays
  unsure (1)..(274): unsure at all n locations
tctactgtgagcatctgacagctctctgctcctcccgcagaggtacctttcattcctagccttgatgaatttcttatgtcaatcactaggccgctcccagatccagtcctatgtagctgttcagtccatacatatcagcatgtccccccagtgactggtgcttgctccattattacaacagcagctgaggagatcttctcctatcnctnntcataccttcctaccgaagatcanacttgcaataatagtgcgcagaaattacctctcaccctgc

SEQ ID NO: 17361 - DNA, 244 bp, Zea mays
  unsure (1)..(244): unsure at all n locations
ttggtagaggtgtatgggaagtcacgatcccttggcagatgggtaacatgacatgtgggtaaagatgcgcaacctctgcagagtgtaaaactggtatactagccgtgctcacggtcatgagcagctcggaccctcacatgaaataattatggaacttaaanttcaattgtcatatgcattgcatcgcaggtgatggtgtactnnttgtctactacttaatgnngtggtattacttatacttagt

SEQ ID NO: 17362 - DNA, 175 bp, Zea mays
  unsure (1)..(175): unsure at all n locations
atggttctatctaatgatctaatgttcctttttanggttttcctcatgtagccactggcttctctgatactgatggtactattcgtgaactgacattgaagtcgatgctcgtattagcaccaacagtaagtgcttctatccttctgtngngatgggttatcagtgagatgattat

SEQ ID NO: 17363 - DNA, 200 bp, Zea mays
  unsure (1)..(200): unsure at all n locations
tatcttatcatagactagctaaatgatttgcccagccaaatngtagctacttaactagcagaatagctcttcaacacgtagcatctgactccgtcagctattcgactctcaaaaatggatccctcactagctaaacttggctagccactctaactagccatactagatacatagtctggtgatgtgagatgctacatata

SEQ ID NO: 17364 - DNA, 243 bp, Zea mays
attcggagaatcgagctcgacgtcacacatggccaatcagctattttaagaaatccatttgtgatcttttttatgctttaatttgatagaacaagttgaagatgaattcatttatgtatattggctggtcacagtaaatgctaacagattagagtacaaactgtctaaggacgcgataattcgactactagcgtctaaggaccaagaattcgactactagcgtctatggccaagagtcaactc

SEQ ID NO: 17365 - DNA, 144 bp, Zea mays
  unsure (1)..(144): unsure at all n locations
acacaagaacatcatgacgactgacaggccgcttgagctactccacatggatctattcnngcccgatgcttacataagcatcggcgggagtaagtatggtcttgtaatagtggatgagtattctcgcttcacttgcgtattctt

SEQ ID NO: 17366 - DNA, 181 bp, Zea mays
tctcacattggtagaatggacaagcttcatatctaggaatgtgctctttgatgcacaccatcgatttgaggcttcttactggggctataagacaaaagatgtccaaatacacagaactatatacccttgatagccagaggtacggtactttgatgtgtgactttgggggctgactgcatta

SEQ ID NO: 17367 - DNA, 201 bp, Zea mays
  unsure (1)..(201): unsure at all n locations
attacctatntctctctaccactgcctatgcctggattatggaatgtgaatcgaatngcatggtangcatgagagagcccgcattaactattatttcgattaaagatatgggataagtataaaggcgtataagtgaaatgttttccaactagagtgcgatgaatggtactcaccctcatcacctagtgaagtatgatgatc

SEQ ID NO: 17368 - DNA, 359 bp, Zea mays
  unsure (1)..(359): unsure at all n locations
ataccttaagatagacatgatctcccacctcanactgtagagggcttcgcctcttatcatgatagctccttttgcctggctgagcagcttccaagttcttggtaataaccctgacctttgcctctgcctcgagtaccaagtctggccccaaaatttccctttactctgcttgagaccagtttagtggggtcctacaccttctcccatacaatgcctcataaggtgccatcttcagactggactgatagcatgtaattgtaagaaaatactgccaaagacagacacttgtccaaatctttcctagtgagtgacatgctcgagcatgtcttcanatctgatcacccttctgctgccatctg

SEQ ID NO: 17369 - DNA, 399 bp, Zea mays
  unsure (1)..(399): unsure at all n locations
gacactttcccttcataatagntaagctccttcttagccttccaacttcttccctgagctctntattttcttgtgtgatagagatatcactaattcctganatntctagctcaatggaagaatggctntcttgagagcaacatttngtagcacatgataatatagtttctacttgagtacatgtgcatatgtgaggttggtatgatntannaatagttaacacaacctcatgagccatntctaacatgatatgtgaatccatannattattatgagagcacacaagcatatcatggttttcttgcanagctagattntcaatatttagcccttctatncgtgtcttgacatagcattttattntctattgagcatatatgataatgataacaacttaat

SEQ ID NO: 17370 - DNA, 517 bp, Zea mays
  unsure (1)..(517): unsure at all n locations
cttttctttgacatttatcaatgctggacctctggatagctggtctctcatctncatctnaccacctaagtacaataagtagtggccccgaaagctctatgcaatcttctactgaattccaaaactgtgtggagaagacaatgttatacacatccaatccagcactagtctttgacaatctgttatcagtccaagctgtgcttgcanataaagccttcaaagcatccttgtgcttgtacaagctcttcaatgtgagaaaggaagtatcaaaacgagtggctgcangcctcacaagatcagccctcaccagtttctctctcatggcagcaagaattcttccgtgtcggtatatgaaagttgtacacgcctcgcacgtgccaattgtttcttgaatccttcanngttctatgtcctcaacattangtcaacaatgtcacacatgactcaaataagtagatccttcataaagctgctgacttgtatggacatatatacactgtcactgcttccattatac

SEQ ID NO: 17371 - DNA, 318 bp, Zea mays
  unsure (1)..(318): unsure at all n locations
atgctagtctagctattaagcatgcatctagaccggcctcttcttttgcanaatcaactaaataaagnttgccgtctaatacacccttaaaagctagtgaaccatcacttcttctaaagacagacacatctacatttgtaaatagacagntataccccatattgcataattgactaacagatagcagattatatccaagagactctanctaaaacacattagatatggagtgctcattagaaattgcaattntacttaaaccttttaccttgccttgattcccatcaccgaatacaatngaatcttgggaatctttat

SEQ ID NO: 17372 - DNA, 374 bp, Zea mays
  unsure (1)..(374): unsure at all n locations
tgctaacttttgtgatgttctanacattaactatactggaccatngcanaatacatggatggacgcanagcatgcatgctatctccagctgagatacttacaccangatgcttgctgcaggtatgagagtaatgatcgagagctaaatatatctttcggagaaggctcaactatgtggtgatcttatcgcccaataccataacctggccacctagannnactttcagagttcctacanntgatcgattatataatcatatatcatgtgctgtcttgtagtcaaaacananattcaattctagaactaccttggcttcagcctttnggagctcagaacgcctcgcttcaatcatttgttataccanagccctatc

SEQ ID NO: 17373 - DNA, 244 bp, Zea mays
  unsure (1)..(244): unsure at all n locations
gcacttcgctctgcgactgcgacctgctgccaagatgtgggtgctggccgggcaacttggggatggtgcggttaactcgcggacttcgggaatggtggcggtgaggtgagtgcnggcgaatgggcgccctggacgcttatagcacgccgggcacgcggcgtgacggcagtgcccgcntgcctggaagccgggccaacggctaccggggtaccgggcaaccgtgtctctgcttgcctgtaaccca

SEQ ID NO: 17374 - DNA, 176 bp, Zea mays
  unsure (1)..(176): unsure at all n locations
cttactgttgctgcttaggctcatggtcatgctgctctcactgcgaaacagccctgtgctctggaactgcgcccctcttgctggctaattgtaggctgagcaaaccgctcgcatgaacttgagtggtatcactnggacgtgaggactgtaccggacatgcttatttgcggcatgct

SEQ ID NO: 17375 - DNA, 508 bp, Zea mays
  unsure (1)..(508): unsure at all n locations
gggatctctgagtcacctgcggcatgcagcttctaagggagagcacattntangattaacatatgttcactttgagaaagacatgatttgtagcgcatgccaagcagggaagcaagttggtgctcaccatccacataagaacatcatgacgactgacaggccactggagctcctacacatggatctattcggtccgatagcttacataagcatcggcgggagtaagtactgtctagttattgtggatgagtattctcgcttcacttgggtgttctttntgcaggagaaatctcatacccaagagaccttanagagattcttgagacgggctcaaaatgagttcggcttgagaatcaagaaaattaaaagcgacaacgggacagagttcaagaactcacaaattgaaggattccttgaggaggagggcatcaagcatgagttctcttctccctacaccccacaacataatggtgtagtggagaggaagaatcgaactctattggacatg

SEQ ID NO: 17376 - DNA, 442 bp, Zea mays
  unsure (1)..(442): unsure at all n locations
acacatagctctttngaatacctctgatcatatctcttttatatgctatgactaatgtngtttcaagttcatttcaaaccaagtcataggtatattgaaagggaattggagtcttcggcgaagacaaaggcttccactccgtaactcatacttcgccaccactccaagcaactctctcttctttgggggagaaatgagcatcaaggaaaaggacttcatccttgggggagagagtaaaagctcaaacgcaaaaggacttcgtctttggtataatcttaactcacttatttatgaccaaaggggaagattgcacttcaagggctctaatggttccgtttttggcgattcatgccanaaagggggagaaatgagcccaaagcaaaaggaccgcaccaccaccaaattcaaaaacttagtgctttccaaaagtatttatcaatgg

SEQ ID NO: 17377 - DNA, 400 bp, Zea mays
  unsure (1)..(400): unsure at all n locations
agcttgtaaatttcaggtttcgccgattcaccctctatgcgactntcagttagccaaagcactacaggatttagcggtcaggttgaagcgatggcggtggatatggaggcgttgttgtagtcgaccagctagatgacccttctatatatcctcattgcagctcgtcccaatatcgggtagtagaaggtgctgcaaacggtggtggtgttcccaacagctcctaatgcatcgagggtgctagtggagcacctagagccatgatagttagtggaagcatgcccatggagtacaataatggtagggaactatgccgttgtcgcgtacatagatgcaaccgaagtaactcagcacgagtgatatcggtggcataggttcagtgggaggaccacaggtgattacc

SEQ ID NO: 17378 - DNA, 473 bp, Zea mays
  unsure (1)..(473): unsure at all n locations
agcttccactgcatctncgtcgttatcaaagacctccttgcccaactcttgtacttaattntatatcttttttcttgttaaaaggccttcaactttcttcgtttttggcgattaatgccaaagggggagaaattaatggccaaagcaaaaggaccgcaccaccaccctgttttcaaaattntaagtcttccaaaaattggttcttttctaaagaaaaccctcttgacagctaagaggagcaaaaatgtatttatgccaaaaaggggagaacttattcagggggagattttatttggccaaaagaaaagaatttgaaaaagggggagaatctttcaaaactctcttaaaaatatctttgaaaactttatttctatagaaagaaattaataggccatatgcaaatgaatttgaaaagaatttcanaagattngcaaaacaagccaagtggccaaatgtggtccaaatttaactat

SEQ ID NO: 17379 - DNA, 468 bp, Zea mays
  unsure (1)..(468): unsure at all n locations
agcttgtgaagggtcttcatccncacatgtgctaagcggcgatgccacagccagcccatgctagtcttagctattaagcatgcatctagaccggcctcctcttttgcaaaatcaactaaataaagtttgccgtctaatacacccttaaaagctagtgaaccatcacttcttctaaagacagacacatctacatttgtaaatagacagttataccccatgttgcataattgactaacagatatcaaattatatcccaaggactcaactaaaaacacattagaaattgagtgctcatttgagattgcaattttacctaatccttttaccttgccttgattcccatcaccgaatataattgaatcttgggaatcattattcttgacgtaggaggtgaacatcttcttctcccccgtcatatggtttgtgcatccgctatcaataatccagcttgaacccccggatgcataa

SEQ ID NO: 17380 - DNA, 400 bp, Zea mays
  unsure (1)..(400): unsure at all n locations
cgcaacatgagagcaaagagcgacccgtggtttgcagaatatttgntgcgtgtcggtggtggaactgaggaagtgaacaacgatggtgatgttcgtcttccagatgaggtatgtgtgccatataccggtgatgaccgcgaccttgacagattgatagatgacatttaccccagtctaaacgaaaacatgtctaatacaagctacatcacttcaagagcaatattgactactcggaacgactgggttgatatgataaatatgaggatgatcgatcgtttccaacgggagcagatgatgtaccatagctttgacaccgcggtggacgatcctaataactattatccatcggaattcctaaacacgctgactcctaatggactacccccgcacgttctgaagc

SEQ ID NO: 17381 - DNA, 474 bp, Zea mays
  unsure (1)..(474): unsure at all n locations
agcttcggcacagtgaccgatctcaagacgaatgggtgaaccgacttaaaaataaaatgacttaaagacccataatgttttgtgtcattattgtagtcgattgtaaagggcataaatgtaattntacacaggctgtgccctgtgcctataaataggtgaacagtacccttgtactgttcacacaatcttgtaatcgccgacatattacgctggaattattgttttctgccaaggcgaatgtataaatgtacctaaatattatgtttaatatttaggtttgtataataaaatatgtgaataatattatctgtttttggtatatctttctctaatgctttatattttatattttattgttttataagtttaatcacgaaggtgtgaccttcgtgaatatttgctcatggcattcgtccgaagttcattaaatccttgnngagataatgcttcagcggacgaaagacattaatattt

SEQ ID NO: 17382 - DNA, 67 bp, Zea mays
gcttatcctctttcgtcttaaccactggtgccatatattgtgccaccagaccatcgctcctacatat

SEQ ID NO: 17383 - DNA, 447 bp, Zea mays
  unsure (1)..(447): unsure at all n locations
agcttctaaagggagaacacattntaggactaaccaatgttcatnttgagaaagacaggatctgtagcgcatgccacgcaggaaagcaagttggaactcatcatccacacaaaaacatcatgacgaccgacaggccgcttgagctactccacatggatctattcggcccgattgcttacataagcatcggcgggagtaagtattgtcttggaatagtggatgattattctcgcttcacttgggtattctttttgcaggaaaaatctcatacccaagagaccttaaagggattcttgagacgggctcaaaatgagttcggcttaaggatcaagaagattagaagcgacaacgggacggagttcaagaactctcanatcgaaggcttccttgaggaggagggcataagcatgagttctcttctcctacacgccacgacaaatggtgagt

SEQ ID NO: 17384 - DNA, 472 bp, Zea mays
agctttcttcggcgccatagcgaatgtttatgatatccgaaggtgttcaaaaaactcaaagagtggaagtgagttcaccggaggtgggcgccaatgttggggacttgttctcaaatgctatgagttaagaacaaggcaacacagaaaatgttaatcgataaagtccttcgtccttcgaagcattatttcccttaggatataatgattttcagacgaaggttatgaaggacgtaccttcataaacacagcatacgaagatgaggaatgaatcataaggaatatgaaggataacatagataattatgtattattatcaacttattattattgcaaagaaacagaaatgacatcgaattacaaatgtaccttcagcttggaaggagatgaaagtacaggtgtgatacaaaagcaactgccaaatcagcgtgaacagtacgggggtactgttcacctatttatagacacgggacac

SEQ ID NO: 17385 - DNA, 444 bp, Zea mays
  unsure (1)..(444): unsure at all n locations
tgcaagcttggtgccaatggagaagcagaagtctttgaagtcctggctgtcaaattgtgtgtcgatgtcaactgtgagctcggacgggactccgaatcggcagacaatgttttgccagaagaatttcttggcagtcttcgatgttattgtggatactggccttgcatcgatccacttggtaaaatactcaacggcgacgaaggtgaacttgaggttcccttgggccgtgggtagtggcccaacaatgtccaggccccagcgctgaaggggccacgtgtgggcgatcagctntgtgaattgcgaagggttgcccgaacgaggggaaaacttctggcaagcttcacatgacctcgtgactcaatttgtggcgcagatcatagcgggccagtagaagccttgtcggatcaccttatcagcgagggccctatgccccgcgtgagagct

SEQ ID NO: 17386 - DNA, 459 bp, Zea mays
  unsure (1)..(459): unsure at all n locations
agctntaatacacaaattcttcccctttgacatcaaacaccaaaaaccatactcaagcgagaacatatgatgatgtctagggacagcagggcgtttagggggaaaacgactatcaaaactcccccttacttattgagcatatgcactatcaacgttaaggagagatacatatatgcgaaaagattaatacttccttttgtacctttaccatgttgtagtgtacttctcatcttgaaagtatttaatctcttgagagcttctccatacttgagcctgattcattntcctaactttttctcgatgctaagacaccaaacttagaacaagttatagtattgggcacaagaagaaacttctattctcatgattatcaaaagatatcagatgaagcacactatcacagctaccaatggaaagataccaagtgcaagttcattattatcatggcttcatgatatt

SEQ ID NO: 17387 - DNA, 468 bp, Zea mays
  unsure (1)..(468): unsure at all n locations
agcttctaagggagaacacattttangattaacaaatgttcattttgagaaagaacaggattgtagcgcatgccaagcagggaagcaagttggcacccatcatcagtggcggtcctaggatttttacataaggtgtgccgtaacaaaattttcatgtataattatatctaatgtacatataatttcatactanaattggtaaacaatttgatatatagatataaaagttgacactcaacaaataaacatgaaaattgcatacattaaacataaaaattccaataatactacttatctggcctgcgcttcctcagtgccataaaagtttcaattataccttcttcattcacttcgaagaanatatccctctcgatgtatgtaacaagacaatcatccaaaagactatcacacatctntgttctcaatttagtcttcaccaaactcattgcagaaaatgcccttcaacac

SEQ ID NO: 17388 - DNA, 410 bp, Zea mays
agcttatgaagattcttcattccaacatgggctagtcggcggtgccagagccaacccaagttagtcttagcaattaagcaagtggtgagttcagctctatcaaaatctaccaagtatagctgaccctctaacactcccttaaatgctattgaatcatcacttcttctaaagacagtgacacctacatcagtaaagagacagttgtagcccatttgacataattgtgaaacagaaagcaaattgtagtttaaagaatctacgagaaaaacatttgaaatagtatggtcaggtgatatagcaattttacccaatcctttgaccaaacctttgatttcatccccgaatgtgataagctcgtggggatctttggttttctcatatgaggagaacatcttctttctccctgtcat

SEQ ID NO: 17389 - DNA, 453 bp, Zea mays
  unsure (1)..(453): unsure at all n locations
agctntaagctctttgacaatagaaccacttcatctagttttagcanagatgcaataatgcatgactgaaaatttaagaggttaaactaggtatgaagcagggataaatgcatgaacatactttctcttccttttatacaagatatgcaaggaatgtaggaagatttaggtacatgtatgaataagattgaatagttttacccttttgtacctttacatagtgatgctctcttcattgtgcattgtccttggtcttattgaatttgcctaagacctgtactcaagacaatacatggaaatattttgcacaagagagagttctacaactagtgatccttttccaagttaatgttagatcaaattaaatggatcacannatgtatagaggcaacatgaattctcctttcaacttagtgcatatcaagagatagatgtcgattgaaattactcatg

SEQ ID NO: 17390 - DNA, 410 bp, Zea mays
agctttaccctgtggactggactataagttggttacggtaggtgtaccttatgcagttgaccatttccaacatttgcgtaatgaggactctagggagaagcctcgtagtgagaccctggccattcacctcggaagtgaatacgggtctagctaacccgggctataagggaatcgcgactcatgggtaaagatgcgccacctctgcagagtgtaaaactgatatatcagccgtgctcacggttatgagcagtctggactcctcacatgataattgaacttgaagatggaaataaatcgagatccgatgatctgccaatggtttgcttaagtggtttaatttaagtgtttttgatatactcttgtacctttggttaatgggaatacttgggattcacacttattagtaagat

SEQ ID NO: 17391 - DNA, 464 bp, Zea mays
  unsure (1)..(464): unsure at all n locations
agcttgggctttcttcatattatgaattattttctgaactttttcctcgggttctntcaccatatcaggcctaaagaaatacctttctccaggttcagaccaatttagcggagtacgacatcgtcttccatataaagcttcgaagggtgccatcttgatactttcttgatagctattattatatgaaaactctgctaagggcaaacattcatcccatttttgtgagaagtccagaacacatgctcgcagaatatcttcaagtatttgattaaccctcttagtctgtccacttgtttgaggatgataggccgaactgtggagcaatttagtacccagggatntatgaagttcttcccaaaatttggatacgaattgtggtccacgatccgacactcatagtctttaacaccgtgcagactgagaatacgagcaatgtataattctgcataggtgatgacaggata

SEQ ID NO: 17392 - DNA, 469 bp, Zea mays
  unsure (1)..(469): unsure at all n locations
gcttngaggaagtaagatgggcttgttatagttgatgatttttccctcttcatttgggtattctttctgcaggataagtcagaaacccaagggaccctcaagcgcttcctaaggagagctcaaaatgagtttgagctcaaggtgaagaagataaggagcgacaacgggtccgagttcaagaaccttcaagtggaggagtaccttgaggaggaaggaatcaagcacgagttctctgctccctacacaccacagcaaaacagtgtggtagagaggaagaacaggacactcattgacatggcaaggacgatgcttggagagttcaagacacccgagcggttntggtcggaagccgtgaacactgcttgccacaccatanaccgggtgtaccttcatcgccttctcaagaagacttcgtatgagcttctaaccggtaacaaacccaatgtatcttactttcgtgtatttggga

SEQ ID NO: 17393 - DNA, 447 bp, Zea mays
  unsure (1)..(447): unsure at all n locations
agcttggtgccaatggagaagcagaaattcttgtattcttggctgtncaaatgcttgccgntgtcaactgtgagttcggacaggactccgaagcggcaaacaatgttttgccagaagaatttctgtggagtctttgatgttattgtggatacagccctcgcctcgatccatttggtaaaatactcgacagcgacgaaggtgaacttgaggttcccctgagccgtgggcaggggcccgacaatgtccaggccccagcgctggagaggctatgtgtgggcgattagtttcgtgaattgcgaagggcttcctaatcgaggagaaaacttctggcaggcttcgtaggaccttatgacccgatttgcggcgcagatcattgcgggtcagtagaaaccttgacggatcacctttgcggctagggccctttgccctgcgtgagagccgcaagta

SEQ ID NO: 17394 - DNA, 454 bp, Zea mays
  unsure (1)..(454): unsure at all n locations
agcttggaggcatcaattgggagccttttggntggtgtaggctcttccttcttttcttctgttgccttgaatgcaatgggttgcaccttgggtgtagaggtgtcaccttgctctaagttgacaatgtgtgtggagtctttgaccataagttcaaagctcacaaactggccaatcacctcctcgggagacatttgctcatagctaggattctcacggattaatttcacttgagtggngttacgaaaaacaagatatcttagaataaccttgaccatttcatggtcatcccacttggtgctcctgaggttgcggacttggttcaccatggtctggagccagttgtacatgtcttgtggctcttctcctttgtttcccgcttggtgatcttggtgactntgtcctcttcgtgcgccatcttgaggatgtcccaaatttctttggcacttttcaaccc

SEQ ID NO: 17395 - DNA, 440 bp, Zea mays
  unsure (1)..(440): unsure at all n locations
gcttcacgaagaggaaccttcggtcatctcatgcggacagcttcagccgaagctggttcttcctcccagaccttcggcgacgaagcatagtcccaacagtagccccttcgcggtgctagatcgtttttcgtaacgagcttgatccgtgaaaaaagtatcttaggcttcgggaagccgaaggtccaaaaaacaccttccctgagctcgttgtcgagaaacgattcagtttccgagcgcgtaacggtcccaccttgcagggttactatttggtctctgcggtccaccgcgcagcgggtgcaagcagctgttcgtctggtgtaaaaaatcctggcgattcaccttcttacctgcatcactatataaacagacgggtaggtgtgaagttaccacagcattcattgctatntgcactgttttgctgccaaaanttttaaccatag

SEQ ID NO: 17396 - DNA, 403 bp, Zea mays
  unsure (1)..(403): unsure at all n locations
gatgtacagtgcttgggggtttccactccaaaatatccttgactttgctggaatccaccgcaatccccttggcagataatacatgtcccaaaaattggatcttcgtccagccagaatgcgcacttactgaacttagcataataatggtgttcccttaagcgcgttaatacgatccgtanatgacgagcatgctcctcttcattcatggagtatattaagatatcgtcaatgaataccaccacaaatttgtccaactcgagcataaatactgagttcatcagatatgtgaagtgggcaggagcatttgtcagtccgaaagacatgaccagatattcaaataatccataccgcgtgatgaatgcggtctttggtatatcttcngatcggatacggatctgatgat

SEQ ID NO: 17397 - DNA, 382 bp, Zea mays
  unsure (1)..(382): unsure at all n locations
catgcagcttctaaaggagaacacgtgatagggttgactaacgtgcaattcgaaaaggatagaccttgtgcagcttgtcaagcaggtaaacaagtgggaggagcacatcacagcaagaatgtgatgactacttcaagacccctggagctgctgcatatggacctcttcggacccgtcgcctatctgagcataagagggagtaagcatggtctagttattggtgatgacttttcccgcttcacttgggtgttctttttgcaggataagtctgaagacccaagggactcttaagcgcttcctcaggagagctcanaatgagtttgagctcaaggtgaagaagataatgagcgacaacgggtccgagttcaagaaccttcaagtg

SEQ ID NO: 17398 - DNA, 433 bp, Zea mays
  unsure (1)..(433): unsure at all n locations
agcttcggatccttagccttgcaactcttgtcaatatgacctcaaacaacctgngaatcagttttaagtatggcccttctgattcccattgcttttaacttccgaagacctagaagcaatgcttcgtactcggcaatgttatttgtgcaactaanatcaagttttgccgcataacaagttttgactttggaaggtgaaaccaacacagcagccgctcccgctccgaaggttcccaagatccacacaaaacactatccatgcttcgntgtctttattcgtttcttcctcctgagcccctggcgtccagtcagcaatgaagtctgccaacgcctgngactgaatcgaagttctatgaacatattcaatacaaaattcattgagctctgcaacccattttccaatccttccagtagcttctcgggtcctcataata

SEQ ID NO: 17399 - DNA, 422 bp, Zea mays
  unsure (1)..(422): unsure at all n locations
agcttcgtcatctgatatgaagatgccctgaaggtaagaaattatttcagttctccaatcttcactgtacacaggggaaatagtaagaactgctctttcaagtaactccaccgaaggtgcctttattgtttcaaagaatacatccgaaggtagcggcaacccctgtgctgcagacctggctaacaaatcagcatgttcattttgccctcgagggatattcttaacagagaatccttctaaggaagcttcgatccttcggactgtgtctaggtatttttcaagcttcgggtctttaaccttgcaacttttgtcaatatgacccgaaacaatctgagaatcagttntaaggatcgccctcctgatccccatcgcctttagattccgaagacccaggagcaaggcttcgtactcagcaatattat

SEQ ID NO: 17400 - DNA, 461 bp, Zea mays
  unsure (1)..(461): unsure at all n locations
agctggacagtgntntgtgatggctcctgtggaaccttcngagcaggagcagctgctgttttggtttcaccgtccaaggttaaaacttgctatgcagcaagactggacttcagctgcacaaataatattgctgagtacgaagccttgctcctgggtcttcggaaactaaaggcgatggggatcaggagggcgatccttaaaactgattctcagattgtttcgggtcatattgacaaaagttgcaaggctaaagacccgaagcttgaaaaatacctagacacagtccgaaggatcgaagcttccttcgaaggattttctgttaagaatatccctcgagggcaaaatgaacatgctgatttgtagccaggtctgcagcacaggggctgccgctaccttcggatgtattcttcgaaacaataaaggcaccttcagtagagttacttgaaagagcagntcttact

SEQ ID NO: 17401 - DNA, 447 bp, Zea mays
  unsure (1)..(447): unsure at all n locations
agctntgaatgtgtcttggaatggattgctagctcttgtattgaatgtgtatgagtggagtgcttggatcaagtgagtggaggtggctggggttgtatttatagcctccaacgacttcctagtcgttgctccttttctgtcgaccgcggacggtccgcccctgcatatcaatggctgaaatcgcaacgggtcagcagtaacgactataacaatgactatagtgcatttaatgtgtcctcagatgtcatataaaatagtcgcggacggtccggccgtgcactccggacggtccgcgaggacactaaaaatgcattttactgaacctgtcaccttcgagtttttccattntttcaacgatcggacggtccgcgcctgaggccggacggtccgtgtttggtctcgaatggtgctcgcttcttcttcngacagtctgtggtgtaacgtatg

SEQ ID NO: 17402 - DNA, 449 bp, Zea mays
gcttgcttacttggtaagatgaccaatgcacccttcactggtttaccggagaggacgttagttttattggaactcatacatactgatgtgtgcggaccaatgagtacgacagctaggggaggattccaatacttcataaccttcactgatgattttagtagatatgggtatgtctacttaatgaaacacaagtctgaatccttataaaagttcaaagagtttcagaacgaagtagataatcagcgtggcaagaaaattaaagcactgcgatcagatcgtggtggtgaataattgagtcatgggtatagcaatcatctaaagagttgtggaattgttccacagcttacgccgcctggaacgcctcaaaggaatggcgtgtctgagcgacgtaatcggactttattggatatggttcgatcaatgatgagccagtcggacctacctttgtc

SEQ ID NO: 17403 - DNA, 226 bp, Zea mays
  unsure (1)..(226): unsure at all n locations
aatttataacttcagtccgaatgacaattaaggaggcccgctttatatgccacaacacacctcacagtcttcgggataacagcaaaacttcttcatgccaccaacttctaagggcataggcgccaagggcttcngaggaagatatatggatcaccctaggagaaattattgcttattctgtggaaaagacaaaggccacactacaagaatgcgccaaatcactatt

SEQ ID NO: 17404 - DNA, 319 bp, Zea mays
acttcttcaaagatttctgtcaatatattcctctaggacaaaatgagcatgctgatttgctagctaaaacagcagcacaggggctgcctttaccttccgatgtggtcttcgaaacaataaaagcaccttctgtggaacttcttgaaagagaagtcctcaatatatctcctgtttatagtgaagactggagaactgagatcatctcttaccttcagggtaaatttctttcagatgaccaaacttataacaggaggatagaggccagagctcgtccatatgtcatgatagaaggggaagtgtacaaacatggagtctgtgc

SEQ ID NO: 17405 - DNA, 450 bp, Zea mays
agctgtcaggatgctttctgccaaacttgaaggggaggaacaatcgtggattgatgggtatctggattcaaaactgaatcgtccagtcaactatgtgcaagcaagaacactgatcaaattggcggtctcctgcttggaggaagacagaagcaaaagaccgactatggaacatgcagtccagaccctcctgtcagctgatgactgaatgggcaaataaaacatatgctacaacaacttcattgagttgacaattcacatcttgatggaaaaaaagaagaagaagcaaaaggccaacactccaggccatcctgtcagttggttgtgggtgtttacccctgatataaattacctgtaaacagtgctcgttccaatttgtcactatatgatgtaagttgtagcatgtaatgtattgaacttgaacagttagatgtaaccatattcaagttaccg

SEQ ID NO: 17406 - DNA, 316 bp, Zea mays
gactatgcctttgtgccgcatgacgtcagggtcaccgtgccaagaagctatggtagaattcacggtggtaggcgagcagatcaacaccagagatctagtccaagaatatctggcctataaggtggtcccgacgcttagtgaatggaaaatgccgaagcttaaggggacaaaggaaaagaatgaacttgtgcgacttgcttatcggctcaaatttgagaaactattcaaagggccatgccaagaatggttataaatgatagaaactatgtgcaacgaaattttgggtaattacactaaaaaagaagatcagctgatg

SEQ ID NO: 17407 - DNA, 167 bp, Zea mays
  unsure (1)..(167): unsure at all n locations
gaatagaaaagagaatgaagtttatcaaagctacatcgaccaagatcgganaggtgctcacaaccaaccgatgcaagacttattcaatgacccatgcatctacccttctctttattttcgtngaagagatcacagacgcacgaactgcctccttcgaaacacgcagg

SEQ ID NO: 17408 - DNA, 483 bp, Zea mays
  unsure (1)..(483): unsure at all n locations
cactngnggaggtacttcatccncacatgtgctaatcggcgatgccacagccagcccatgcaagtcttagccattaagcatgcatctagaccgggctcttcttttgcaaaatcaactaaataaagattgccgtctaatacacccgttaaagctagtgaaccatcacttcttctaaagacagacacatctacatttgtaaataaacaattatatcccattcgacataattgactgacagatagcaaattatatccaagactctccactaagaatacatttgatatagaatgctcattagaaaatgcaattttacctagccctattaccttgccttgattcccatcaccgaatatgattgaatcttgggaatccttattcttgacgtaggaggtgaacatcttcttctcccccgtcatatgcgttgtgcatccggtatcaataatccagcttgaacccccggatgcataaacctgcaaggcaaat

SEQ ID NO: 17409 - DNA, 430 bp, Zea mays
  unsure (1)..(430): unsure at all n locations
gatgaagtgtcatcatcatcatcatccgttctatcattcgagtcccattcaactaaggaggctttgccatctttcttcttgatataggaattctttttcttcttggcactttcatcttagcccttcttcttcttgcttggacaattcatggcaatgtgaccgggttccncacactcaaaacattntctatcattgaaagcatntcttctagatgtttgacctcttctaggttgacctcttttcatcttcatgaatctattgaatttccttacaaataaagccatgtcacaatcactctcactntcattttcttcatcattgctatcttacttttcaatgcctttgaggcctcggctttgagagcaatagaatcatatttcaccttctttgccaacttaaagcatcggcttgtgacttcttatatatatct

SEQ ID NO: 17410 - DNA, 305 bp, Zea mays
  unsure (1)..(305): unsure at all n locations
cctcgatagattgtccttatgtcaatagtaaacatgaagggcatgaatgtaattntacacaagctgtgccctgtgcctattaatagatgaacaagacccccgtactgttcacgctgatttgtacttactcgtgcatcatgcttgtactttctccttctgtcaagctgaagatacaaatggtaattatattatttatgtttatccatgataatataataaagctgaattaataatgggatatgattattcatgttggctcttacatttcacatgcttcttttttcattaacgtatattgcgatgat

SEQ ID NO: 17411 - DNA, 474 bp, Zea mays
  unsure (1)..(474): unsure at all n locations
gcttgcacttacgaccaaaccgcaccttcatcncattcatattcaatggctcaacaatagtggtaaggtcaaggtaaccaagttggtacgaatttaatttgctattggatcatatcatgatgttgttgactgtgatgttgtgcctatggatgcttgtaatattctgctaggtagaccatggcaatttgattcagattgtatgcatcatggtagatcaaatcaatattctctcatacaccatgataagaaaattattttgcttcccatgtcccctgaggctattgtgcgtgatgatgttgctaaagctaccaaagctaanactgagaacaacaagaatattaaagctgttggtaataacaaagatgggataaaattgaaaggacattgcttgcttgcaacaaaaactgatgttaatgaattattngcttccactactgttgcctacgcctttgtatgcaaggatgctttgatttc

SEQ ID NO: 17412 - DNA, 476 bp, Zea mays
  unsure (1)..(476): unsure at all n locations
agcttcggttttaaggacacattttcgccattttctaataaaagatgtctcaaggcaagaaagttgctgctgagacgaagctgaccgaagaggagaagctccttgaggaaaagactgctggatttgttgagtcaatagcaaaaacaaatacagagaagattactaaagagatactagaaggcttgtttgaagatactgatgatagcgacaactatgatgtggagagtggaggcgaagactctgaagatcggccctggcgaccaattcatgcagtctttgggaaatcaactatcaaatagagtcatcttgataatatgagaggaaggtattttcgagatatgtctattgtgagggctgacgtagacagagccgttcctgctcccgaagaaaactaagttgtgatcttccgaagcttcttcanagctggacttcngttcctgttgagcagaaattgtggttgaagtttaaagacatac

SEQ ID NO: 17413 - DNA, 488 bp, Zea mays
  unsure (1)..(488): unsure at all n locations
ctgacccggatcttagagtcaccgcagcatgcaagctattgtctttctncgaagactccattttccttcaatgagactactacatataatagacttgaaataggttaagtctcaaagacttatattatagagtaacatcccccagaanatatgtatacaagttctgaatacttgtaggagagatgcactttgtgtttgatatcaagaggggcaaattatctataatccgagctttggcacatataggttataatgaataccaaattaagtattacaccacttgtagtatatgtcataatgaaaatacgcaatgatgtatcattttcttaggaatgttgaataagctatgcgtcgtgcttaactataacttttaaaccatgtaggatngctcaagagtatgaattgaanacgagcattcctaccatatgattgtcctagtatgcatgtagttaatatcaaatgtaaatataacatgtaaaactaggcat

SEQ ID NO: 17414 - DNA, 232 bp, Zea mays
gctttatgggctcaaacaagccccaagaacttggtatgaatgccttataaatttccttattgctaatggcttccaagttggcaagggcgatcctacttatttactaatactcgtgacaatgatttgtgtgtatgcccaaattatgttgatgatatcatatttgggtctactaaagaatctacctggaatgatttagtatgatcatgacacaaaaataccagatgtcgatgat

SEQ ID NO: 17415 - DNA, 456 bp, Zea mays
  unsure (1)..(456): unsure at all n locations
ggatcttaagtcacctgcngcatgaagcttctaagggagaacacantttgggactaacaaatgttcattntgagaaagacaggatttgtagcgcatgccaagcanggaagcaagttggtgttcatcatccacacaagaacatcatgacgaccgacaggccactagagctactccacatggacctatttggcccgatagcttatataagcatcggcgggagtaagtactatctagttattatggatgattattctcgcttcacttgggtattctttntgcaggataaatctcanactcaagagaccttanagggattcttgagacgggctcaaaatgagtttggcttaaggatcaaaaagattagaagcgacaatggaacggagttcaagaactctcanattgaaggctttcttgaagacgagggcatcaagcatgagttctcttctcctacacacc

SEQ ID NO: 17416 - DNA, 183 bp, Zea mays
cccaaacacagggcctccactacagacctttaggttattttggaagagcctagtacaaccgctcaaataccttatggacatactcccccaaccgtagacaatttctggggagaacccaactcacaagatgcaaaagtgcagctcacaaacgacacaaacatggttaccagctaaataagggag

SEQ ID NO: 17417 - DNA, 468 bp, Zea mays
  unsure (1)..(468): unsure at all n locations
agcttgccacaagtatgggtcgatcttcacacgactcgcagggttatacatcagcctcaaggagaagtgtgtagtccctccacctctcctcacagtaattgcttatatctgctgagagccttaaaggattaagggtgcttatgatgtgctttaatgctatgggaaggatcttggaggtactgaggaactggacagagaagagtattcaggttattgtggtcactgatggtgagcgcattttaggcctgngagatcttggttgccacgttagtttattgtccagccatttntgctctgtcaagaatcatttgtgcatctgaatttttggctaagtgtagagtttggtgcttataatgttctctgtgtgaaatgtgcatatggcatgggaattcctgtggggaagcttgcactgtatactgctcttggaggtgacngccatncgctgtgagctttaacatgtgaatatac

SEQ ID NO: 17418 - DNA, 466 bp, Zea mays
cactctttgatagagtgtttactatttttgccccagcatgatcagggatgcaccctagaatttcttcgtccacgccaccaaaaagcacggacccaggatgatatccacccacaatagcaaactctttcaattcagaaatatcttcttcggagagttgctggccacccaagtgccataggtccaaatctttgccctacgaagaagctccttttatttctttcacttttaaggttgtagcccagccagcagtaacttcatccatttccctctcgggaaccacattagctataatcctatcaatttccgacaatgtggttccgagagggcctctactgttttcggcttcagtgtctatttcaccagcttcagcatcggtgggagcagcaatcttttctgttgcaaccggagggggggtcttgtgcatgaccctcataacaaccatcatatgttggttcttctaaccacc

SEQ ID NO: 17419 - DNA, 462 bp, Zea mays
  unsure (1)..(462): unsure at all n locations
agcttancaaaagaaatntctagaatcaagaatatttatcttattcttaagtctggtaaaagattgttcatcaagtggcttggtaaagatatcggctaattgatctttagtattaatgtaagaaatctcgatatcccccttctgttggtgatccctaagaaaatgataccgaatggctatgtgcttagtgcggctatgctcgacgggattgtcggccattttaattgcactctcattatcacatagcaaagggactttggttaatttgtaaccgtagtcccgcagggtttgcctcatccaaagcaattgcgcgcaacaatgtcctgcggcaatgtactcggcttcggcggtggaaagagcgaccgaatnttgcttctttgaagcccaagacaccaaggatcttcccaagaactggcaagtccccgatgtgctcttcctatngattntgcaccccgcccaatc

SEQ ID NO: 17420 - DNA, 438 bp, Zea mays
  unsure (1)..(438): unsure at all n locations
ttggatacaactgacaatctcgtaacctcttttagtactttttctcaaatgctcctcatgctcttgctcattctaggaatatataagaatatcatcaatgaacaccactacgaacttgtcgaggtagtccatgaacacactgttcatcaggtacatgaaataagctagcgcatttgtcaaaccaaatgacatgaacatgaactcataccgcccatacttggtgataaaggttgtcttcggtatatccgaaggtcggcttctgagctgatggtaacctgacctcaaatctatcttcgagaacacactggctcctctcaactgatcgaatangtcttcaattctgggcagggggtacttattcttgatagtaacttcattcaaggatctgtagtcaatgcacatcctctntgtgccatccttcttttcacaaataagcat

SEQ ID NO: 17421 - DNA, 486 bp, Zea mays
  unsure (1)..(486): unsure at all n locations
gcttatgaagattcttcatcccaacatgggctagtctgctgttccagagccaacccatgttagtcttagcaattaagcatgtgtcaagttcagctctatcaaaatctactaagtatagctgaccctctaacacacccttgaatgctattgaatcatcacttcttctaaagacagtgacacctgcatcagtaaaaagacagttgtagcccatttggcataattgggaaacagaaagcaagttgtaatctaaagaatcaacaagaaaaacattggaaatagaatggtcaggagatatagcaattttaccaagtcctttgaccaaaccttgatttccatccccgaatgtgatagctcgttggggatcttggtttttctcatatgaggagaacatcctttttctcccggtcatgtggtttgtgcacccgctgtcgagtatccaactngagcccncggatgcataaacctacaaaacaggtttagttcttg

SEQ ID NO: 17422 - DNA, 356 bp, Zea mays
  unsure (1)..(356): unsure at all n locations
agctntccttcgcctagtatatcacccgcagtctcttggatttgtggaacgcccaatggaaaattttacagctgtcaaaagagctcttcacaaaaaaggctgtggccgattgttacccgaggcggtctatgcgctaaacacgactgagtgcacggcgaccgggttcacccctttcggccttctatatggatcgggagccatgaccccgcaagaaataaaacatgggtccctgcgaacagttccgtcagccgtccccgacgtggacgagcccacttcgaagaatctcattgatggagaccgagtcttcgccctacaggctctaaataaataccaagcccacacaaaagcatggggtg

SEQ ID NO: 17423 - DNA, 479 bp, Zea mays
  unsure (1)..(479): unsure at all n locations
agcttaccctgtcccatttccagagtattctgcttctaatatagnccttgcgctagcaggcctacatacgcatccaatccttaatcaacctgngtagaacatcacctgttcctaacccaagtctcgatttaagtacttccatccttaggattttttctgttccttaggatgaaaagagcatcacagggagctttgcagtaagatcccaccatgctctcaatgaaagtattcttgcaggtagaagccatctttcctcaggataacctctgagctaggcagtattgcaaaagacaacctctatccacaagatctaagcagggctaagcatttttgtaaatcaaattgtgatacttcaccagaagtatctataaagttatggatatcaaggaaggcaatgcatcagagggtttcaagcaactcctataaacctaatgcacatttcactagacttaagtgtgcgaaaagtatttanaacacag

SEQ ID NO: 17424 - DNA, 437 bp, Zea mays
  unsure (1)..(437): unsure at all n locations
gtgatcaggatcaagggaacaagagggagaagaagaagaactacaagaaggcaaagggcgaggcgcatctaggcaaggagtgggattcaaattgctcctcttccgactccgacaatgaaggactcgccgccaccgccttcaacaagtcatccctcttccccaacgagcgtcacacatgccttatggcaagggagaagaaggtatgtactcaaaactctacttatgcttcttcaagtgaggacgaatctagtgatgaggatgaaatagattattcatgtttatttaagggcctagatagagccaaggtagataaaattaatgaattgattgatgccttgaatgataagaataggcttttagaacagcaagaggatttgttgtatgaagaacatgacanaattgtagaacgcacaaaatctcatgctctagaagtaaaa

SEQ ID NO: 17425 - DNA, 444 bp, Zea mays
  unsure (1)..(444): unsure at all n locations
gcttcggacaaaatcctatgccaatgcttatgattatcagatatcttcttntttatcaagttaatcaatattatattactagactcagcttgtccattggcctaagcataatatggagatgaattgagcaacttaattctatataattcagcaaactcacgtacctgagagcacctagaggggggtgaataggtgatcctgtagagttcaacactaaattctaacaaccttgaatataaaaatattagtgcggattaatcaagtcaatgagacgagctcttgcgaacacaaataatcaaagaaggaacaatcacaagagacacgcgattntatcccgtggttcgaccaagtaatacttgcctacttccacgttgtggcgtcccaatagacgagggttgcactcaacccctttcaagtgttccaatgatcaacttgaataccacg

SEQ ID NO: 17426 - DNA, 358 bp, Zea mays
tccttgatatccttaaaggttaatgtatgagatatttataacatgctttcataagtgcataaaatgacattagcatcacacttatactatgacacaatgcacttcacactctttatgatatagacaaggtctcatcaacctaagtatgtgcacttggcatttttagaccaaaaatatgtcctcttctctatgcacatatttatggggagcaatctatattggatataattgtgtaagcttaatagatatatccttttaatcatgtctcgttcctttggtacatttgcatatatcttatcttcattgtgtgccaaggctaacactaatatgttttcatgagcatctcatgtattaagtc

SEQ ID NO: 17427 - DNA, 499 bp, Zea mays
taagcaccgcggctgcagcttacagatgttttaaaattaagtacgccatttgctgtttattggcatacttattcaaaataagtatgtcggccccggcatacttaataatacccacattctttcacttgtttcccataatgcttttaaatatttttctcaatatagcaaactttatattgctatatacattgacttcactcagaccgtcaaacaagcttcatttaagatgagatttgtactatcactagactagagataacatataaagatatatcgaaattgcagatctcctcaacaacagtttctctcgtgttctctctgcagtatccaaattgagcaatacatggagagacaaggtaaaatgataaaagaaactggtccatacgggctacaggtatccacttgccaggacacgggtttgtcttcttatcaaacagcgcctttccaaatcctctagcactgacacctagaactaggaatacatagatcagatgtgtgg

SEQ ID NO: 17428 - DNA, 453 bp, Zea mays
  unsure (1)..(453): unsure at all n locations
agctntatcaaatggacgtgaaaagtgccttcctctatggactaatcaatgaagaggtctatgttgagcaacctcccgactttgaagatagtgagtaccctaaccatgtctataagctctctaaggcgctttatgggctcaagcaagccccaagagcatggtatgaatgccttagagatttccttattgccaatggtttcaaagtcggaaaagtcgatcctacgctctttaccaaaacacttgagaatgatttgtttgtatgccaaatttatgttgatgatattatatttgggtctactaacgaatctacatgtgaagagtttagtaggatcatgacacaaaagttcgagatgtctatgatgggggagttgaagtatttcttatggtttcaagtaaagcaactccaagagggcacctttctaagccaaacgaagtacactcaagatattctaa

SEQ ID NO: 17429 - DNA, 444 bp, Zea mays
  unsure (1)..(444): unsure at all n locations
agcttctcaccacgtcgtccctagccgcaccagcttatttattggcgncgtagctcctcaaccggtgatcaccggaggaagcgccacggtaaaagccacccatcccttgctcctgtgtccatgttccctccggccgccaccgcgcttaaccaaaattccctaccaccgcttggagatcctacaaattgaccgcgcccgtagttccgtatggtagttaagtatctcgacgtccagtattgcgccccgtggttcaccgacgagctctaattccacactttccccaattccgtccgccgcaccgtgaaacccagccctcccgtggccagccgattcgggtgagtcgccgttcaattcgcatgctgttttcgtgcctctgcatgccggtgatgctctcggtggcgtctgttcgctcagtccggccatggttgcacgggaacgtgagct

SEQ ID NO: 17430 - DNA, 427 bp, Zea mays
  unsure (1)..(427): unsure at all n locations
agcttcngagactcttcccatctccgaagccatgtttctatcgggtctagngacttcggaaaagattcctattgatgatgcagaacaagcaatcgctgaagcagaaggagaagatgctgaggaaactgaccccgaagatgattatcaccttgccacgccaagcaaacccagccatttggacttcgggaaatctactgtttcgaagagtgatctatccaagatggtaaaatcgggctttttcactgaaaatcagaagaagcttttgcgcttcgggggagaagagactaccccaaaaccggagaaagatgaaattgttatttttaaaagcttcctaaaggctggattaagattcccccttcatgggattattgcagagatattgaagaattttggaatctattttcaccagctcacccctaacgctatc

SEQ ID NO: 17431 - DNA, 399 bp, Zea mays
  unsure (1)..(399): unsure at all n locations
agcttgaagccatggtaagtagcatatgtttatattatgcgaattgactcaagcccagctacgggtgcataggtttcaccaaaatccaaaccttcgacctgtgaataccccttggccacgagtcgagctttgttccttgtcaccacaccatgctcgtctttcttgttgcggaagacccacttggttcctacaacattntgattaggacgtggaactaaatgccatacctcgttccttggtgaaatgttgagctcctcttgcatcgccatcacccaatccgaatcttgaagtgcttcttctaccctgtgtggctcaatagaggaaacaaaagagtaatgctcacaaaaatgtgcaacacgagatcgagtagttacccccttatgaatgtcgccgaggatg

SEQ ID NO: 17432 - DNA, 400 bp, Zea mays
  unsure (1)..(400): unsure at all n locations
agcttgacattgtctcccttttggaagcttatgttattcttaatgcctaggcgtctcccactatagagcatacttctagcaaatttaaaactttcattttctaagtcatgctcattgattttagcactaagttgagctatgtgatcattttgttgtttaattaaagctaggtgatcatgaatatcatcaacattaatatctctacatctagtacaaatagtaacatgctcaatggtagatgtagagggtttgcaaacatttaatttatcaatcttagcatgtaacatgacattttcatctttaagaatggaaataacatcattgcaaacatttaaatctttagcgctagcaattaatttttcattctcaatnttaaggctagagagtgatgcattcaact

SEQ ID NO: 17433 - DNA, 260 bp, Zea mays
agtcacctgcggcatgaagctttcaggcacaacccaaagctgaaatgaagcttgtctaagtcaaagctgcaacaattcatgcttaaaccgaagctgggccttcagtgcccaccgaaacagagtctgccgtagttgaagaaaaggcgacatatcaaattgcgtctgaaaagggtgaaacttctgcttccgaagcttcaaaagaaagcactgattacatcattcgtcatgcttcgggagagggactttctaagaagaaaagc

SEQ ID NO: 17434 - DNA, 447 bp, Zea mays
agctttgcctcgggcagactaatatcagtataagtattcacacaatgggagtggagagatggcgagagtagcgtgtaccctccgtggcaagaggctgaacggttgtgtatctgtgctctcggttggcgtgaacctaatctggacttaagaaccccggtggcgagttgacatatgcaagggttaagtgctacatatgtcgtgtgattggagatccccaactgggtattaatcgattcagatcgccgttacttctcggacatgaagacttggtcactgccctgcaatctaagtcatggatggaatcttaatgagcaaaaatcatgttggattgaataatgtgatggtgaaattagactagatgcaaacaaggtatattaatacttaatctagcattaaaatgttggaagtaaggactcactttagtaagctatttctgcaaagtatcta

SEQ ID NO: 17435 - DNA, 412 bp, Zea mays
  unsure (1)..(412): unsure at all n locations
gctttgagcataattatctctggattnttcttattaattgagctcacactcttaagcaaaggtgttcttcttagtttggtctacaactttgatgtggtgacctatggaaaaaaccctagaatttaaaagttgcaaggctccaaagttgagccaaaactctgaaattcagacttaacatgaaatctcaattagggtcctttntgcaaatgagtccaaaacttagggtttggcttgtaaattcacatatgagtgacccaattgacttaagatacttatttaacttggtttttgcactttagtccaaaagtggactaatttttgcacataggtccctanggtttggttttaagggtttcgagggttccaattanggtttcttgtattccaagggtataaatgtgattcaagttca

SEQ ID NO: 17436 - DNA, 486 bp, Zea mays
  unsure (1)..(486): unsure at all n locations
cagcttgacctgccaccataaagatctacgnatttatattatggttccttcacaagcttgacctgccaccatatatattcaaaacaagactcaaagggcaatatggatatgaaaaggggaaaaaaagagtcgcgtggaagactgaagtacctcagcaggtacatacttgacatccttgacttcaaattcagaatctttcctctgctcttccgatattagaatagcgcacacttcattttccagattctcatcagaaattgcagcgcacaataaagtcaagtcgatatctccatcaggaagatatgtcttcaatggaacagatccaaatgaaatgacctatgtcacaggcaaaaggttaactntgtacctgtttcagtctgatgtggcattaacatagcagcacaaaacagagatactaatgggtaacggcggtgtgatgcataagcatagccaaacatgcaagctgtccattccatgtcaaataac

SEQ ID NO: 17437 - DNA, 387 bp, Zea mays
atgcagctttttgaagctggattgcgattccccttgattagcttcgtcgtggaggggttgaaaatcttcgaagtctatcttcatcaacttactcccgaggcaattataaggctaaatatcttcgtgtgggccgcaagaagccaaggtctgaagcctgatgcaagaagcttctgttatatacacgaattattatatgaaacaaagccttggggcaaagaacagtaccataataactttggctgctacagtttcgtctctcggtccggggcaagctgtcccgtaccaacctttcggaagagatggcccggggattggatgacagaatggttttatgtgaagaatgacctatcagcacgagaagatataaaggtatattatgcgtctatt

SEQ ID NO: 17438 - DNA, 374 bp, Zea mays
  unsure (1)..(374): unsure at all n locations
gatcacaccgtanacatcctgccttgcaggttcagccttttgtttttcactcttttcgtgttctcactgtgcttcttgtgaaatcatatttgattaccttttccgcaggttgtctgcaaagattttccaagacctccactagaaagcacaataaattatttggaagctggacaactctcttcattttttagaaacagagaatgctccaataagcccgtgcacgtcgtggttgctggtgcangtctgacataattctcgctcttcatcttatcactagaatcacaaatagattacgaaactttttttttaacaatataacacatatttgtacataaantaccgtgatattatatggtcccgttgcaacgcacggg

SEQ ID NO: 17439 - DNA, 251 bp, Zea mays
tgctgggatcccaactatctgaagatcaagagaaaaccttgattagggtcttattcaacaacaaagatgtttttgcatggtcagccaacgatctctgtggggcaacagggaccgtattggacattcactcaatgtccatccatccttccgacccaagaaacagaatcttctgaaaatgtctgacgataaaaccgaaggtgctcagaacgaagtaaaaagacttctcagtgctggtgtcatcagagaagtga

SEQ ID NO: 17440 - DNA, 369 bp, Zea mays
  unsure (1)..(369): unsure at all n locations
caatggcagatcaatttcattctatgatgaacagnggagtcagggcatcccgaggcatattttcccagagctcttctcctttgccaagaactcaaaaatgactatcaaagaggtcaaggatcaagagcagtttcatgatctttttcatttacctgtctctgatcaagcgtttgatcaatttctggtactcaaggagtcttgggagcaaattattcttaataatgttcatgaccgctggaagtacatttggggatcggacaaattctcgtcccaaaaagcttacagatctttcatgggccagatgcagactcatcctatctacaaactagttnggaaaagtaagtgtcagcctaagcatagagtcttcta

SEQ ID NO: 17441 - DNA, 435 bp, Zea mays
gagatgaatcaccgcttgggtctcatatatacaggcgtggactgccacccaatgccaggcacgcgtaacaacccaagcagcacgacggcttcgcccggtggtttcggcatcagttgcgaccagaggtggatggtggcccgacccgtgggacccatgtggcggtgagcaaacgagatagagcccgcccaggtgacactggcacatgggcccggttggtaagcgcaggtgggtagtgtgggctggtggtttgagcactaagtgggccgagaacgagaattcaacccatgagcgtggggtttctcttcattcccgtgttctttttccaaattgaaaacttctattcagatgtaaattcctatcttgaacttccaaaattccgatcttaaatgtactctcattttccataatattattattcattactattattattgg

SEQ ID NO: 17442 - DNA, 346 bp, Zea mays
  unsure (1)..(346): unsure at all n locations
atgatctcgtnttggtgcttgatgccaaagggggagaaattaaggccaaagcaagcaaatggatcagctaccacttgagagatttttagaattataacttttgatttgtcaaaatactctaagtgtctcttnttgtcaaaatttggtctcttgtggggagaatgtttgattatgggaaaaagggggaagttttgaatctttgatcaatttctcttggaatacctctctttatgtctcaacaagtgtgtttaacttagagataggaaattgagtttgatttgcaaaaacaaaccaagtggtgacaaaggatgatccaaatatgccaaatttgaataaaaaacaattc

SEQ ID NO: 17443 - DNA, 382 bp, Zea mays
  unsure (1)..(382): unsure at all n locations
agctntaatgattagagagagagattngttgtgttcattcgatctctngcgctaggaatgcttcttttctttctcattcttcctgtgatcaaactcaattgtaaccatggcaagagacaccaattgtgtggaggtccttgcggtgactttgagtcccgtgtgatagagaatacaagctcactcggcctaagcgacccgttgacagagggaaacggtataaagatacccactatttgtgaccacctcaactgggagtacgtttgcaagaaccgaaccacgggaaaacagatacgcgtgtctcacaccttatttgcttgcgatttgtttatcacactctctctcggactcgctgatatttataacgctcacccgacttgtaact

SEQ ID NO: 17444 - DNA, 439 bp, Zea mays
  unsure (1)..(439): unsure at all n locations
agcttcaggacaagatagtgcttggcactgatgatgagttatcaatcagatgtntttttctgattctattcaatcgacttctttttccatctgcttcatggggcattacaaacaatgaggtactaatgacttcaaacatggcccgaatggctgatattgactggtgtcaactagtttacatggatttgtgtgatgctgccacacgttggcacaaaaggaacaaaacaaacattacaacaacaatatatggatgttcactcatagttctagtaagtaattattttgttcactgtgcatatatatgatatgcaaatatttgttttggactaagtttatattttttcattcatttttcagatttactatcttgatcacttacatcaccctgcatcttctgataacaaatatggtactccccacattaaagtttttgataatg

SEQ ID NO: 17445 - DNA, 471 bp, Zea mays
  unsure (1)..(471): unsure at all n locations
agcttgagtgagacggaaggcgattatgacgaaggatnagatgatcacgaagctatgcgcagaanagcttcggcatgacagcagaaaaggggaaccgacttaaagatgaaaaggcaaattagaccgcgaagaattactatagagttattgataaatgtaaagggcattaatgtaattctacatgggctgcgtcccttgcctataaatagatgaacagtactcccgtactgttcacgctgacttggcattcgcttttcgcatcacgcctgtacctttactttccgtcaattcgaaggtacatttataatttgttattttgaacatgataatgcaaataaaaaataaattgacaataatattaaaattattattcgtatttcgtatgtgaattcttatttattatctatcgagcttacgaagggtttttcttcataaccttcgttcggaactcattatatccgaagggacata

SEQ ID NO: 17446 - DNA, 424 bp, Zea mays
acgatctggctgacagcctatcttacaacagtttaaaggtgcgacaaatggaattctcgtgttttttgttgagttcaaaaaatttttcggttgtttaaaactattgacacagacatattcctgtttgcagggcctgatactcagcaatgccctcagggcacagaaagatgctgaggacgaatgatgtactatagccctgagcaaccttcgttccgaagtaattgaactgagaagcgaaggtctctgaaaagacaaaatattatactcattgatagataaaataaaggaggacgaagctgcttttaaaagtcaagctgaagctcagaaacgcgaaattgaagaccttcggaaacaactggccagagccaaagaagaacgtatacttcaagaaacaaagcgtgaactcagcgatcaatgggcagat

SEQ ID NO: 17447 - DNA, 390 bp, Zea mays
agctttatcatatggacgtgaaaagtacctttctcaatggaccaattctggaagagggctatgctgagcgacctcccggctttgaagacagtgagtatgctaaccatgtctataagctctctaaggcgctttatgggctcaagcaagccccaagagcatggtatgaatgccttatagattttcttattgcgaatggattcaaagtcgtgaaggccgatcctacgctctttaccagaacacttgagaacgatttgcttgtatgccaaatttatgttgatgatattatatttgggtctactaacgaatctacatgtgaagagtttagtatgatcatgacacaaaaggtcgagatgtctatgatggaggagttgaactacttcttgggatttc

SEQ ID NO: 17448 - DNA, 395 bp, Zea mays
tactacaagcaccccgatgcaagataatattatcctcatccttcctcttgtgtttcatcttgcatcaatacattcgggcagggacacgcaacataaaattcactatttggttgagggtccccgcaggttcaaaacaccgacaacatgtgggcccacggaccaatgggaggaagcaactaatggctgtaacgacagggtgaacttcgaacgccctgatgtccgagcgtatacagtgttaatatctcgcgactgcttcctctgttacgcacgagccatgatgagcatagtgtataccgcaaatcgggcgtacttgcttgtaacagaatggacatgcacgccctctgcaagatgggtctgtcgcccgccctcaacggaatggacattgcacatttaat

SEQ ID NO: 17449 - DNA, 313 bp, Zea mays
agcctgttattgtactccttgatgaaaagagcactttacttggcaagcatctgaacacaacaccaaactggagcttaatgcatggctccatgcacagaacaagttttagagagaaaaagcaggcgagcagccctgagccctacaatcttgagtggaaatataagatatcaatgcgcaggataactacaacatggattacctccacaccaaacattggggcttattatcatgctgtctgtgcatcttttactagcatatatgctcatccatcaggtaccaaaacaaatctattattctacaggggaaactatgc

SEQ ID NO: 17450 - DNA, 467 bp, Zea mays
  unsure (1)..(467): unsure at all n locations
agcttgtgtctttctcccgtgacttcattttcctcacaatgaganatgagagcacctagaggggggggggggtgaataggtgatcctataaaactttaaacttaagccacaaaaactctggtaggcgttagcacaataataaccaagtggctagagaggagtctcaacaaaacacaataaccacaagagatcaatcacagagatggcacagtggtttatcccgtggttcggctaagaccaacgcttgcctactccacgttgtggcgtcccaatggacgagggttgcaatcaacccctctcaagcggtccaaagacccacttgaataccacggtgttttgctgtgcttttcttaatcccgttcgcgaggaatctccacaatcttggagtctctcgcccttgccaatatgttcacaaggatgcacagagtaagggagggattacaactcacacacgacacatatacaca

SEQ ID NO: 17451 - DNA, 469 bp, Zea mays
  unsure (1)..(469): unsure at all n locations
agctntcatgagtaacttgatgaatggagatagatgcgaccgagaaatagaaattgtcactgagcatccgagattaggataaatctcccgacataacacgaaataaacacctgtggtgtcacagccttccccccttaaaagaatctcgtcccgagattcaaatgaggatctttaagggtggagaagcatgtaactcccagactgaagatagatgcaaatgagagggtatctgaaaagatactaaagatagatctggatagaatatcgcgacatattgagacaaaatgcagcgatcacttgagaaaatgtccacaaaagatatcacattagtatagtctcgtaatggatcacgactattaaccgcgataccagcgcgtgccgagcagctcaaccatgtgtgcacccatgggaggctctcggtttcatcgcggcaccatcagtcatttagtcacaacaccattaccaaatg

SEQ ID NO: 17452 - DNA, 438 bp, Zea mays
  unsure (1)..(438): unsure at all n locations
agctngatcgntgcaatcacttgagagggttgatctcatagatagtgataatgccttatgtgagtgtgatgcattcttgtgctcttgagctangagttttaactcccatttagttgtaaagctagcgagatactcctgtttgtgtggagatgctcgcggagactctagtgtctcatccgggtaaagagatgactcaagcttgatctattgaatcgcttgagagtgagggtggatatcgagctagctcggttcattntggctcgactcgttatactaacgagctaaatatctagctcgactcggctcgttagagagctcgagctagctcaatagtctcatgagacacaccaataaacacaaatatccacgtaaacaaatgtatatgacagaaaacacaaccatagtttaagtgttaacactccaataaaaccattatac

SEQ ID NO: 17453 - DNA, 471 bp, Zea mays
  unsure (1)..(471): unsure at all n locations
agctngacattgctcccctcttggaaaccaatgctattcttaatgtcagggcgtctcccattatagagcatgcttctagcaaatttaaaattttcattttcaagttcatgctcattaatttttgcagttaatttagctatgtgatcattttgttgtttaatcattgcaatgtgatcatcaatagcatctacattaatatctctacacctagtacaaatagaaacatgatcaacagtagatatagagggtttgcaaacatttaattcttctatcttagatattagtctaacattctcatctctaagacaggaaatggaatcattgcaaacatttaaatctttaaccttagaaattaagctagcattntcatttctaaggctagtaattgaatcatgacaaatactaagttccttagatanattntcacatttctctacttnctgagcataagcatttttcaattaaacatgt

SEQ ID NO: 17454 - DNA, 432 bp, Zea mays
agcttgtacttatcccttttcttccgaggttaaccttctgcaatattaagaaacaagacgataagcaagatgcttagatgtgaagatttcaaccaagaactgaacatcccaagctttcttgatgaaaattggaggagccgaagcagaggaacataccgccatcaactgggaatgggcccgcccaagttcccagttggcaaggcgcagcttctgaatctcagcccggctcagctctatgatctcgctgcacaaacacccaaaccaaatccactggagtcagaccaaaaggggacacccccaagaaccatgacgaatcacaggggcggagcagagcgcgctgagactcactctctcgccgcgaggagcctcacgagttccgctttcttctgatccgtgagatgagaaaaaagaagagcgacgttagccacacac

SEQ ID NO: 17455 - DNA, 455 bp, Zea mays
  unsure (1)..(455): unsure at all n locations
acttaatggtcatgtgttgttcgaacgacacacttcaggtcatcatagtaatgcaccaaggaaccatataaagcctttaatgtccataccatttctgtaatggaccacactcgttcttttgaaacaattcaaagaacttaaccaaatcagatcagattttaagataagagggacttaaaatctcattcccaatgatactcatcaagtatctatcttatggngaaaacatgaccaagagaattgtccataacttttcatttcatcccaacaatgggatgaccaattcaatcttacccagcatggtaagtatcatcacttgaaaagttataacatatgcaacactttgtatgggaggatgtatgtagaatacatcccataagaaatgtttgtgagaaacatatgcaatatccataactctcaccttgtatctccacatgataagaagtttatggata

SEQ ID NO: 17456 - DNA, 288 bp, Zea mays
  unsure (1)..(288): unsure at all n locations
cgagacttctgtgacngcgccgtcngcgtcgcaggtgatgcccttccacgtgcaccagtctgtgccgttcctccaagaagtggcgaggccggagtcctgcgagagcccctggagaaacttgaggagggagaccccgtcctgctccgtgctgctcgcacacccggtgggagagagcatggagagcagtggcagcagagcaagagcaagcgatcgtgccgaccatggtccacctgctgctcttgctgtgttccgtgaggagtggcagtggagtggccgcatggtgtctat

SEQ ID NO: 17457 - DNA, 309 bp, Zea mays
  unsure (1)..(309): unsure at all n locations
gcggagttaatgcgacnggaccagtggttcgcggggcaacccgtgcgcgtgcgtgagccgttcgaggaacggaacacgggcgcgtcgtcttcacaccgtgggagagggttctctcacttgtccaggaggggacatgaggctggctgacgacttgaccgctgcttctgcccgcctgccactgccattactgtcggcccatttctggccgtatcgaccgtcgcgcgttctcccgcggctgactggcccatgaccgatgtgcctggttggcactgttgggtcatgcgcagggttgcctcgagtcacggtact

SEQ ID NO: 17458 - DNA, 474 bp, Zea mays
  unsure (1)..(474): unsure at all n locations
agcttcggatctttagccttgcaactcttgtctatatgacccgaaacaacttgggaatcagttttaagaatggcccttctgattcccattgcttttagcttccgaagacctagaagcaaggcttcgtactcggcaatgtttgttgtgcaactaaaatcaagttttgccgcatagcaagttttaactttggaaggtgagaccaacacagctgccgctcccgctctgaaggttccccaagacccatcgcaaaacactgtccatgcttcggcgtctttatttgtttcttcctcctgagcccctggcgtccagtcagcaatgaagtctgctaacgcctgngactgaatcgaagatctatgaacatactcaatacaaaattcattgagctctgcagcccattttccaatccttccagtagcttctcggttcctcataatatccttcagaggttgtgaagaaggaacaattatgttgtaa

SEQ ID NO: 17459 - DNA, 445 bp, Zea mays
  unsure (1)..(445): unsure at all n locations
agctntctcaacctttcttggtgcttaatgaatatacttcaatgtttataattggctcaagccatgattttaaatttttcataccccttttccccattttcttgaattttgctcatagggctcacttagggtttttattagggttgcaacattattacctttttgaaagacccatttgttttgatcatgatacttttaagggtaggcttggtggattcttcattcttaagtcaatttgatgctcatgtttaatttggttcacataaaatgatggttcttggtttggcactttgagagaaaaaccctangtgacactggggtgtcacagggtcgacaacgagcggatatttcccctggctcggcacgcggtcagtgtggtcgccctggtcgaaggtgatgggcttgtcggactagtctangtaggctggtgccgccacctttatcg

SEQ ID NO: 17460 - DNA, 460 bp, Zea mays
  unsure (1)..(460): unsure at all n locations
agctgtagaanatcgtgagattcaagctacgaactcttagataaatcattgtatttctcatatagattacaaataacttttaaacctatttaaatttgtattataaactacaatttcacgcgcgatcgaagctggtatcactatccgaatcagcttctttgccgagtgtctgaagcactcggcaaagcctggaaaacactcggcgaaggttttgccaagtgtgacaatccgcaaataaagctcagtgaactgtacatcggcaacaacttatttgtcaagtactttttatcgggcactcggcaaagtctttgtcgagtgtcactaagtactcgacaaagaagttgccatcacggcgtcaggtaacggcgacggagcctgtgccgagtgtcactttatgacaatcggcaaatgctcactctntgccgagtgtccactgtgacactcgacaaaaaaagctctc

SEQ ID NO: 17461 - DNA, 108 bp, Zea mays
atataaaatttaaattatataataatatattattaataaaaaattataatttaattaatttaatttatatttaaatataatttttaagaaatttaaattaattaataa

SEQ ID NO: 17462 - DNA, 438 bp, Zea mays
  unsure (1)..(438): unsure at all n locations
agcttgtactcgcgtacacaaagagtgagtctattctgtacccttcaagtcacatcaatagtacaagccttcgcacaataattnntgtttgcgctctacattattgcttgatttatgtctgtgtggcatcaacatatatatatatatatatatataaaaccaattgctcataacaactttcacaagctttatagttctttgtagatctggaaaattaatgaaatacttattaaacacatataagataattctctgctctttcctcatgcataaagtcttacccgaagtaatatggagaaattcaatacaatgcatgaaagccttttgcataaaaggcatcacaaattgngattcatttagtaagcaaaaagaccttacatggtgtatttgataataataacagtaaaattgcataaaaggctccaaacgacaaatagt

SEQ ID NO: 17463 - DNA, 466 bp, Zea mays
agcttctatgtatatatatttgcgattattgttattatccaactctaacgatctatggttctagagttatcttggtcttgcagtcgggattgccataagactggtgtccacgctgaggtgagcggtactgatgctgagtcccgacgggagcgggggaaccaccatccaagtgacgacgttcggtgcgctcagcccgcagcatggcgatctcagcacgagccctactcagctcatctaatgcatggtccagctccgtgtttagcacggcggctaggttgactgtgctgctcaacctaggattgccctcaccgacaggtgagacaatcacgcctcctgtgctgccagatggacggcggtggtaatacttcacgtcaagaccgtcagctgccccaccgaataccgagcagtagtgcgaaagcgcacgccgtgcagcatcttgcatggctgcctcagctgagtcccgttc

SEQ ID NO: 17464 - DNA, 407 bp, Zea mays
agcttgtgcgtctcaaggtacctggcctttgtctcatggaggacttcgctgacgtagtagactggcttctggatggttcggaccattgcggttggtcccgagtcctcaaactcctagcctttcgtcaacatcgtggtggtcggaccaccaccttctcctagaggaacttttttacccctggggatgttgtgccgtcctttcggctaccagcaccatgctcaccacctctgtagccgctgcaatgtataagtacaatggctcccctggctctggagctaccagtattggtagggacacaaggtgctgcttcaactcttgaaaggctcgttctgcctcctcagtccaagagaatgggctagacttccgtaatagcttgaagaaaggtagcaccctctcagccagtcttg

SEQ ID NO: 17465 - DNA, 400 bp, Zea mays
  unsure (1)..(400): unsure at all n locations
agcttgaaggtcaaatcaaaaagcaagccccaatatactttgtatccgaagttcttagtttatcaaagaaaaattacacagagttggagaaggtgctgtatgctgttttaatggcctccagaaagcttcgacactattttcaggcatacaatatagttgttccttcttcacaaccgttgaaggatattatgagaaatagagaagcttctggaagggttggaaaatgggccgcggagctcaatgaattctgtattgattatgtgcatagatcttcgattcaatctcaagcattggcagacttcattgctgactggacgccaggggctcaggaagaagaaacgaataaagatgctaaagtttggacagtattttgcgatggatcttgnggaaccttcggagc

SEQ ID NO: 17466 - DNA, 447 bp, Zea mays
  unsure (1)..(447): unsure at all n locations
agcttgtcngcggaggcgagcgttgctgctacagctcgcatgaccaggcaaagaagggagagacgatttcatttttagtcgtgggatgaacgaggaaaaggggtctgggcgctgcgcatatggaagtggcactggttgagggagatttagagacgacgaaatgcgtgatggctgaaattttacgtggaggcggctcgaacttgacaggcgggtccgagcgacgtgggagacggttgtcgattttgccgcggtcccgatctggccgagcgaaagaaacggttgcacgagaaattacgcgagactgtgtaagacagagactgagttagacgagctgaatagtcacaaggttagataaaaattagacgaagacagtcagatctagcccgtgggtttaagtcgacgagatagacatcggangggtagacagggatagacgaagatagctga

SEQ ID NO: 17467 - DNA, 387 bp, Zea mays
agcttgatgatttagataagagagctgaagtatttctgttgagtacttcggagttggatctgcgcaactacttacagaacaggcttgctcagctactccgggaggaggaaataaagtggtatcaaagagcgaaggtcaaggagctcctggagggggatagtaatactaaatattttcagatgatagccaatggaaaattcaggaagaatcgcatcttccagatgacggatggagctcgtatgttatacgacgagggagaattaaaaagtcatataactggttattataaaaatctctttggccccccagaaagcacgtcttttagtctggatgaggatcttagagatgatataatacaagttactcaagttgagaacgagaagctca

SEQ ID NO: 17468 - DNA, 491 bp, Zea mays
  unsure (1)..(491): unsure at all n locations
atctctaagcacctgagctgcagcttttataacaaacctccaaggatatgatttcatctctaaacattnttggttgaatggtgcatatcaactatagttggtagagatggcaatggataaatacccaccgggtattactatctcatatcatagccacgacaaanatagccccatcgggtcacccatatccactggtgggtatggatttaccctctacccatactcatgtgggtatgaatcacccatcgggtcacgtgtgcccacgaagattaaacattacatatacaaatgtcaattatatccatctaaataccattacaaaatttctaacatcattaaatcatctattcaagaacaccatagataattggataaagtagaaacactagaatattaccacataacacattacatggttatcaaatagttgggtatgcctttatgacattatcgcctaaaagggtattaaatagtcaaaagagatggatgac

SEQ ID NO: 17469 - DNA, 210 bp, Zea mays
  unsure (1)..(210): unsure at all n locations
agaaatagcttactaaagtgagtccttactttcaatattttaacgccagattaaatagtaatagactctagttgcatctagtctaatttcaccatctcatcaatgcaacatcatntttattcataatgtttacatcctgacttatgttgtaagtcggagatcaagtctccactatccagtgatataacggcgatccgaatcgatttactc

SEQ ID NO: 17470 - DNA, 329 bp, Zea mays
  unsure (1)..(329): unsure at all n locations
tcgttaaaccgattgaaccgggtntgacaccggctgagccggctttacctagtttggttctagtttttgttgaaaatcctattcaccccctctatgcaactttcactaagttatggcattaggtactaaccaacaaaatttgaaccgaaagctcaatttgtataaaaggaaataaaaagaccaaatttgttaagaggaagattgaaccaactcaaacatgtggagagatcaattgaataaaaaaatacttctaggggtatatgaatatcattcataggtgaatggagtaatttatantttttcctttttaccatataatgatacaaata

SEQ ID NO: 17471 - DNA, 476 bp, Zea mays
  unsure (1)..(476): unsure at all n locations
agcttcacaccaagcacccattgaacatcctacaacaccaaaacttcgcaagcacgcaattgtttcattgtgatagagatttgagcacttctttgagttgtgactccaatgtgttgtttcgtgtgctctttcttgtcttatgtgtgtgttgttgctgcaactctagttcttgtgtgtgtttctatttccccttactcttgtgttcatttgagatcatttgtgtaaggtgtgagagactccaaattgtggagattcctcacaacgagatattgttgagataaaaagagaactgtggcattcaagttgatctttggatcacttgaaaggggtagactgtaaccctcatccatagggatgccacaacgtggagtaggcaagtattctacttgaccgaaccatgggataaaaatcatcgtgccacttgtattcttactacaattntcttactgcaacgtggagtaggcaagtattctacg

SEQ ID NO: 17472 - DNA, 444 bp, Zea mays
  unsure (1)..(444): unsure at all n locations
agcttctaaagggagaacacgtgataggtttgactatcgtgcaattcgaacaagatagaccttgtgcagcttgtcaagcaggtaaacaagtgggaggagcacatcacagcaagaatgtgatgaccacttcaagacctctggagctgctgcatatggacctcttcggacccgtcgcctatctgagcatacgaggaagtaagtatggtctagttattggtgatgactnttcccgcttcacttgggtgttctttttgcaggataagtctgaaacacaagggaccctcaagcgcttcctcaggagagctcaaaatgagtttgagctcaaggtgaagaagataaggagcgacaacgggtccgaattcaagaatcttcgagtggaggagttccttgaggaggaggggatcaagcacgagttctccgcttcctacacacctcagcanaatg

SEQ ID NO: 17473 - DNA, 493 bp, Zea mays
  unsure (1)..(493): unsure at all n locations
agtcacctgcggcatgcacacaacctnatatgtataatatcattattttattatcataacgacataanngcattagttaatgtgtttataataaatataaaacgtggggtgaactcgtccacctggccatgatacgtcagtaagtccggcaacaggaacagtccttgcgttgaggccaaacaacgtgtacacctcacgtgtattttggctaacgatacatgtggcagacctgacaccgctgaactcttcaggtatgtcctgttctatatgaattgaacgagattgaatgtttaaatctcttcttcttaatttttttaatcttatcaaatccattnttatagttttagaggaagactgataacaatgtccagttcatcatcctcgtcaccgttaggtaactnttgtgtcggtctaccattaattctcttcgcanatacttgtctttttgttaagcaagcgtgtgtagtggtgtgtgcctgatgactggcgatgt

SEQ ID NO: 17474 - DNA, 358 bp, Zea mays
atccaaaccttctacttgtgaatacctcttgtgcacgagttgagctttgttccttgtcaccacaccatgctcatcctgtttggtgcggaagacccacttgagttctacaacatttctgttaagacagtgaactaaatgccatacctcggtcctcgtgaagttgttgagctcctcttgcattcgcatcacccaatccgcatcttggagtgcttcctctaccctgtgtggctcaatagaggaaacaaaagagtaatgctcacaaaaatgtgcaacccgagatcgagtagttacccccttatgaatgtcgccgaagatggtgtcgacagagtgatctcgttggatagcttggtggactctt

SEQ ID NO: 17475 - DNA, 470 bp, Zea mays
  unsure (1)..(470): unsure at all n locations
agcttgagcagtgactggcttcgtcttatatctcttggaagctggttatcaacatatccttcagctnttgccatgaggtgattgttcctggcctaagggaggagtaccaggtttgtgcaacgctcctgacagccatgacgaaggactttgccatgaccgctgtgttgccaccatatgaagatatagttgtctcataactcatcaagaattgcttcgggtctgaatgaccgtcatacatagggagctgaggtggcttataagactgtggccaaggtgtagcctgcagttctgttgacaggggagaagtgtcatcaaaagcaaaatttccatgatggaaatcttcataccagtcatcctcgttgtagaaaccctcttgatgaagctctctgcgtgggggcctttgattctggtcatcttgagcgagatgtcgaagctcttcagaggcttcatctatctgcttttgaagatca

SEQ ID NO: 17476 - DNA, 328 bp, Zea mays
gggctagtccaagagaacggataattgtccctggggagttccggatccgtgcgagctcttagcttggtccagtaccctaagcctgcacgctccaccactctgtggcaggtatcctagtatccggaactatagttctgtgggtccagaaacccgacgtccggctctaaagaagggacactcgtctcatggtgaggtccggagctgtgtggatgcttatcctggtcccgtaccgtaagcctacgcactccaccacgatatgacgactaccctagtaattggaagtcgtgacccagggaggtgcggcacatgggtcttgtctccagtctag

SEQ ID NO: 17477 - DNA, 420 bp, Zea mays
  unsure (1)..(420): unsure at all n locations
agctntccanaaagtccaagatcatcaaaatctgtgttcggagctaaaagttatggccacaatacgaagtcggaattgctgaaaaaacaagagcagcatatgggatgtccggtgcacaccggactgtccggtgtgccaaatttgctcaaactggtatggcttcaactctgggatgtagagaatttcataagctttccaaaaagtacaagatcatcgaaatcggagttcggagctaaaagttacggccaaaatacgacaagcggacatgggatgtccggtgcacaccggaccgtccggtgcgccatgtccggtgcgccatcttcggaagctcaaacggctacttttaacggctagtacacgtgggatgtccggtgcaccaccggacagtccggtgcacctgtccggtgcgccgcagaaagc

SEQ ID NO: 17478 - DNA, 430 bp, Zea mays
  unsure (1)..(430): unsure at all n locations
agcttcggcttagcgcanagacggtgatggttaatgaaactgacctaaaggggaaaagactgcttantcctcgatagattactccttagtcaatagtaaatgtcaaggacttggatgtaatttcacccaggctgcgtcctgtgcctataaatagatgaacagtaacactgtactgttcacgttgacttgtaatcactcgcacatcactcttggattcttgccttctgtcaagtcgaaggtacaaatctaattcaatattattaatgtttgttcatgatcatataatgagaagatagataatctaatgatttaatattatcattcatatgttccccatgttcctgctttntattattacatgttgagatgattaaggtttgtccttcatatccttcgtctgaagatcattatatcctaagggagataatgc

SEQ ID NO: 17479 - DNA, 295 bp, Zea mays
tgggttttgttaatggggttgggaatagggtttttttggggtgcggattggggtattgtttgttttatggattgtatatttaatggggttgggttgtgggatgtgtatagaatatgggatgggaagagtatgttgtattggatttaataggattggattgtggaatgatttggtttgatttgtagtagggtttagattaagttggtgatttgtaatggtagggaatggtaatggttttggttattagtttgtattggtgtgggatgtaattgggatatttttggattgggaattg

SEQ ID NO: 17480 - DNA, 426 bp, Zea mays
tcttcttgcatcaaccatctgtatctatgcgcgcagcattaattcactagttggtaggacccttaggtcaaaacaccactagttggtgcgccatgtaggggctcactgcgtgtagacaccacattcccaccaaggctctagatggccaacccctagaaccctttgcggctcggcatggtgttctggttcaagagtattgagttcatctctcttggcttcggctacgacatggtgctcatctcgcctatgcagccaaccattgctgactatcgtttctcccagtgggggggagcaaggccactcctactcccatggccagtgtaggaacgtccaggcttccatcgtcgtcctcctcgccggaggagacgaagacagaacaactacaaccacgccatgggtagcactccatgcccaaccaatgctcct

SEQ ID NO: 17481 - DNA, 295 bp, Zea mays
  unsure (1)..(295): unsure at all n locations
cttatgagatttgtgacttatatataggatttaagggtatctttataatttcatatgaagctggcactatagataagagcacagggacatgtatagagacgctttcgaaagtatgtggacaggtccggttgcttagactccgaagcaacttaatcctgtctttgtgccttgtttcgttaagcagaaggtataaatgtaatagattcttctaacctgaaataataaagagtagaaagaattggattgactcaagctggtcaagttntattatttctctacacattatcccatttat

SEQ ID NO: 17482 - DNA, 396 bp, Zea mays
  unsure (1)..(396): unsure at all n locations
agcttgntagctagtaaagatctgacattggttcagtggaacagagtggcaaattatattaggtccactctagaataatccagacatagaggtcatgagaaagattctatctattaattggtttgatctaccacattatctgttcaagagattatcttcaccgtgctaacatgacaacttaacttttatcctatacttgtatgtggtaaggggaaaaccaggtcattaaacaatgacatgtagaaattattataaatacactntagaagataatttggcctctccaataaccttacaattaagagtatcattattcctaattcatttcaggaatcatcaggagggcgaggagtccacctgaacatctncactatctttagtggnggaagtgtgatg

SEQ ID NO: 17483 - DNA, 409 bp, Zea mays
  unsure (1)..(409): unsure at all n locations
agcttcntatgtatatatatttggattaattacaagatccaactctaacgatctatggttctagatttatcttggtcttgcagtcggggttgccataaggctggtgtccacgccgaggtgagcggtacgggtgctgagtcccgacgggagcgggggaaccatcgtccaggtgacgacgttccgcgcgctcagcccgcagcagggcgatctcagcacgagccctactcagctcgtctaatgcatggtccagctccgtgtttagcacggcggctaggttgactgtgctgctcaacctatgattgtcctcgccgacaggtgagacaatcacgcctnctgtgctgccagatgaatggcggnggtaatacttcaggtcaagaccgtcagctaccccaccgagaaccgagcagta

SEQ ID NO: 17484 - DNA, 380 bp, Zea mays
  unsure (1)..(380): unsure at all n locations
cttactctgcgtcccttagaacgactatttgtattttctgcangcttactctgcgtcccttagaacgactttntccttgctccgaaaaatacatatcgtggtggaggcaagcttattcgcccttctcttgcaaattcttacaatttgaacctgtgaaaaagatttactttcctcgtggcaaacgacaaaaccattacatgaagtttaaaaagtgttctttattacatgaaaaatgaaacttgaatagagaagacttctatcagagtaggatacttgtcaatagatgtgctttgactctggcacagtgctattaactgtgcgagcttcagactgttctctgaaatcccgttgattntgagtatattggcccccttctggct

SEQ ID NO: 17485 - DNA, 479 bp, Zea mays
  unsure (1)..(479): unsure at all n locations
agcttgcaactgctgagacaagtgtgaaataattaagtactgttctgcttctgcatcgactgtatcaaaactgattgcgtgataaaggaaccatcatggcggtgaatcatcaaattgggcaacttgcatgattattgtctgcacattgggtgcagaaaaggatggcgcataagtatatgccaatcaagtcacaggatcccttgatggaacagaaagcaaatagaatgtccagacaaaagataaccaaccaacgcatgaaactccctggctagccgtggatgaggaatcctactacacttgttgacaagcatatggatgaggaacattgaccacataanattcctttcgttaaatcaacaaagccgtcgcttatgataaacccgctgataagaataacgatgcgcggttaatcgagaattntcagctaaataaattaaagcagcatatgctatagtgcagatcatctcatattctcatgc

SEQ ID NO: 17486 - DNA, 447 bp, Zea mays
  unsure (1)..(447): unsure at all n locations
agctntgtgagatatgaatatgatagaattttcatacactaagcctgcgtataattntattaactgtcagtcaaattttgtaaaacagccttttcccataaaaaaaagagtatatcaaaacatattctgatgatgctctagatatatatacacaaaacactgatgccaaaccacatatatcaaaaattgacaaacatcatggctagtctctgtagaattgtataaaacactacattaattggtactgcatattaattggttattacaggcagttgatgggagaggatctttctgggctgaatgttaaagaactgcagtccctagagaatcagttggagacaagcctgcgtggtgtccgcacaaagaaggttcggttcttaatcaaatttctataatcagttgtttaacaaattactaaagatcgttagtactggtggtgctcttaac

SEQ ID NO: 17487 - DNA, 452 bp, Zea mays
agcttgtgggcttgtcgccggtcatgatctccctcttggcttgatctcccgacatcacttcgagttgttggactctaatgaagcaacaagctctgataccaaatgaaagtcgcctagagggagggtgaataggcgtaatctgaaatttacaacttaaaacacaaactacaagccggggttagcgttagaacttaaatcgagtccaggagagaggggggaaacaaatcaaccaagaaataaagcggatgaacacggtgatttgttttaccgaggttcggttctaaagaacctagtccccgttgaggtggtcacaaagaccgtgtctctttcaaccatttccctctctcaaacggtcacttagaccaagtgagctttctccttaatcaaatgggtcacttagaccctgcaaggaccaccacaacttaagtgtctcttgctttgattacagtcac

SEQ ID NO: 17488 - DNA, 436 bp, Zea mays
agcttaatgatgaactggctagtctttatgctcatcttaagactagcaagaatgattttgataagctaaaatttgcaagggatgcctacacaatcggtagacacccctcaattaaggatggacttggcttcaagagagaagctaagaacttaacaagccataaggctcccattcccgccaaggagaaagggaaggcccctatggctagtaatgtgcaaaagaaccatgcttttatgtactatgataggagatattctagaaatgcttttagaggtcatgatgtgtttgattcacatgcttatgactcttatgctatgactgcttctagttctcatgttatgcatggtagaaatatgtctaggagaaatgctattcatcatgtgcctagaaagaatgttattcatgctcctaggaaagtagtgaatgaaccttctac

SEQ ID NO: 17489 - DNA, 273 bp, Zea mays
tctaagaactgcatcaatgaacaccactatgaacttgcgatgtaggcatgacacactgtcatcaagacatgaagaagctggccatttgcaaccaatgactgacggaactatcagacatactgtataatgtgcttagatattgaagcgatctgactgatggacctgactaattatcttaaaccactgctctctactgacaataatttaatctggcggggcttgtctgaagacttattaagactgatcatgcatctttgaccgctctctcaaata

SEQ ID NO: 17490 - DNA, 478 bp, Zea mays
  unsure (1)..(478): unsure at all n locations
agcttgatatggtcaacatatgatctctatggtgataaaggctnggttaaggcttggctcctcaagtttggtgccttttgctcaaactaaaccacatgtgataacaggtcacagatgtaggtactgaggagaaaccctgagtaacacctgnggtgttacagcccccccttaaaagaatctcgccccgagattcaagtcgaggtcctccaggggtgaggaggtggttacagcttgcttgcatagtaatggttatctttttaaggttcacgagaaaatctgctcttcgaatgtcatcctctntgcaacttcagaaggaagccctttttcacttaatttcatatcttaattcggtttaaattaagagcatcttttctatatttggaatcggagggcaggggggctggngtatggttacgtaccgacttccttaggtanngaaatanggtagtatntgcgcagataatcctcagtctcccac

SEQ ID NO: 17491 - DNA, 381 bp, Zea mays
  unsure (1)..(381): unsure at all n locations
aaatttgttgnaatactgcgtgacaatatctcctgcttggttgagtcgcataaattccgactgtntcatgtgtagcactccttctagaatatagagctcacgatacgcaaatgaaattcatcccacgtgacctgatgtgcgacctagttgaatagctacaaaatttgcccaccaagtactggtaggacctcttaattggtgagcagcgaacaacggcttctgggttntggtgtagcggattagtccaaatttttgctccataacccgtacccattcatcggcttccagagggtcttcggctntaacgaagatgcggggatcgatttcagagaagtccaggtatgaagnctcacnagtcgtacggaagagncnnttcgcatg

SEQ ID NO: 17492 - DNA, 470 bp, Zea mays
  unsure (1)..(470): unsure at all n locations
agcttgcacacttctcgacaccttgataaataatactgatacatccacttagtttgtgtatctattgcatttaatcatccacatttatattgttaccttagttacatgttttacctttctagtttagtcataggctagttgataggaccgaaatctatggtgcataactcgttttgcaatagggatagtaacactaagtcaaaaccttaatagcacatatgaacatttggttatcgacataggttttaattaagagaaaatagaggccatagattacagtgcaattatattacctaattcaacccccttcttagatgtcattattcctttcatgttcgaaccaatttggttgcattcctaaaaggttaaccatagaagctattttcttaaaaagataggtgatggtgcagtatagggagtagaagatggacctacacatnggtattaattacttggagatggcttataac

SEQ ID NO: 17493 - DNA, 469 bp, Zea mays
  unsure (1)..(469): unsure at all n locations
agcttgagacggaaacaaccgnggcatgcactacatcccttgaagaaaatgtcaaggatttgaggattgccaagaggaagaaacaaaagatgaaattcaacacctcatccaaaagcctcaaccacgcctccacaaaaggtaacatccaaggtaatgatcaagccacacttcacattaagaggtgtagtgaatgctttgaagaggggcacttgattagatcatgtccctacattaaaagtggcttgattattaacaaggatgatagactttgttttaaatgctccaagaagggacacttgcttagatcttgtccccatttaaaacaaaaaggcatagagttagaaaagaaagtttttactaaccatgtagcaagcaacaaacaaggaaagaagaaacttcnaacttgaaaacgcctatgctacacatgccgaaagaagggacataatgcaaggattgtccatggtaacaa

SEQ ID NO: 17494 - DNA, 385 bp, Zea mays
  unsure (1)..(385): unsure at all n locations
agctgaagccatggtaagtagcatatgcttataatatgcgaatngactcaagcctagctacgggtgcataggtttcaccgaaatccaatccttcaacttgggagtatcccttggccacaagtcgagctttgttcctagtcaccacaccatgctcgtcttgcttgttgcggaagacccacttggttcctacaacattttgattaggacgtggaactaaatgtcatacctcgttcctcgtgaagttgttgagctcctcttgcatcgccatcacccaatccgcatcttggagtggctcctctaccctatgtggctcaatagaggaaacaaaagagtaatgctcacaaaaatgtgcaatacgagatcgagtggttaccccttatgaatg

SEQ ID NO: 17495 - DNA, 456 bp, Zea mays
  unsure (1)..(456): unsure at all n locations
ttagacaaccacttactgtctatctctacaacaatgtatatgcacagcaatcggctcactacaacatcaacctcatcactacaacgttgttgggggtctttctcttccgaaggtcctcaaaaaacatgactaactatgtacttttagtataatgatgattatcacagggagctntgattcatgaggggagtattctccttcatcgaaggacttcgagacaaaggcatagcccgaaagtgacgacaatgaatgatcgaagctatagccaaggggaaacaacttcggcttaaaagcaatgccgaagatcaaacatggagtcgagccgaagaggaaaagactagctagtccataacgatttatgttacagtaatgaataaatgttaaggttataaatgtatttttacctanngtgtgtccccgtgcctataataagtgaacagtaccaccgtactgttc

SEQ ID NO: 17496 - DNA, 311 bp, Zea mays
  unsure (1)..(311): unsure at all n locations
cacagacatgtagaaaatcctaacatttgtggtattaccaataaggaatatgcactatgtaactacttgatcaaacataagatgttgcttcttcatattgaattttattaattattacttataagcaagtcaatatgagaaccattatagcaaaggtatgaaatagattctaatggataagtgcatntatgagaatgtgattgaatgcacatcaagacaaatntagtcctccaaggaatctattcttcaagaatgataatttagagagaataaccattgaatggaactatattaaagagatgagttcccat

SEQ ID NO: 17497 - DNA, 166 bp, Zea mays
  unsure (1)..(166): unsure at all n locations
gatcctacattatttactaaaactcttgcaaatgattntgttgtatgccaaatttatgttgatgatattatatttgggtctactaacgaatctacatgtgaggaatttagtaggatcatgacacaaaaattcaagatgtcaatgatggaggagttgaagtatttta

SEQ ID NO: 17498 - DNA, 154 bp, Zea mays
tatcacatgagattcatcagatgtcacgtggaccgctactataacaagactagtggtaatgtcgagaatacgatatacatgcgcatatgatgcatagccaatcaagaaacccttgaccactttaagaaccaacatggagctcctgactttcttg

SEQ ID NO: 17499 - DNA, 295 bp, Zea mays
ttttactacaatatcatcaatgtagacttgcacagagtttcccaataactcgtgaaagatcaaattcatatgcctcttataagtagcgccagcattgttagaccaaatgtcatgacaacccactcaaataaaccaataaagcctagacatataaaggctgttttagacgcatcttcttcggccatgaaaatctgattatacccgacattaccatcaagaaatctaataaatctatttcctgacacattattaatcaatgtgttggctataggcataggatattcatctttaggag

SEQ ID NO: 17500 - DNA, 478 bp, Zea mays
  unsure (1)..(478): unsure at all n locations
agcttgacaacgaggagatggcgcttgtcatctaaatctttcggcaaatcctcaagcaaaggagggggaaggattacaagccccgctccaagaaggtttgctacaagtgtggtaagcccggtcactttatagctaaatgtccaatttctagtgacagtgacaggggtgatgacaagaaggggagaagaaaggagaagaagaggtactacaagaagaagggcggcgatgcccatgtttgtcgggagtgggactctgacgaaagctctagcgactcctccgacgacgaggacgccgccaacatcgccgtcaccaagggccttctcttccccaacatcggccacaagtgcctcatggcaaaggacggcaaaaggaagaaggttaaatctaaatcctccactaaatatgagtcttctagtgatgataatgctatgatgaggaggataatctgcatactctntntgcaaccttaacatggaac

SEQ ID NO: 17501 - DNA, 461 bp, Zea mays
  unsure (1)..(461): unsure at all n locations
agctngcaatatattgctaacaaatgaagtgtggaattgaactttagcaacgatatgaaatgtaagttaggcgcaaatcaagtatgaacttagggaggaaaggtggaaatcaaattgcaaatgaaaaaggcacaaagacagaacaatttgttacatagttcggtttccaataaaacctacatctccattgaggtgttccaatggatcgagtctatctcgactctttccccactcaagtgatccaaagatcaagcttgagttccctttatctttgctcanatggtaggaccgagtcttcgcaagactctccacaacttggaggcacttgcccgctttacaattatcaatgagatctttgctccaagactcaagatcacaacacattctgcttgcatctcanatacaagtgctctatcacttatcactcanatggatgctctatctaagaacactacacaatt

SEQ ID NO: 17502 - DNA, 417 bp, Zea mays
  unsure (1)..(417): unsure at all n locations
agcttgtgaaggaccagatcatcaaagcatattattttctgtatgagaagtgatcacccaagttntgttgatgaagcaccagaagaccaatcatggaaggaatccatgtgggagttcgcaagagaaaggtttgcgtgttggcatcgatgcttcttcaataagctagctgccaagcaaaagctagaagcctgaagatgatctttgagtagctagaatcagcgtttgcaatcagcagccggatgctccgcaagggccagattttgttgaagttccatctnctcgaagagttgcaaagtgaagatatgtagctgaagtaaagctatacccataacccttctaagccgaatctcgaggacgagaatccttntaagtggngtagaattgtagcatcccnaaattcaaattctgaaatttatc

SEQ ID NO: 17503 - DNA, 437 bp, Zea mays
  unsure (1)..(437): unsure at all n locations
agcttgagcggtgaccggcttcgttttattttcttgaaactggagatcagcatatccttcggcttctgccatgatgtgattgttcctggccgaagggaggagtaccacgtttgtgcaacattcttgacggccatgacgaaagacttcgccatgactgcagtattgccaccataggaagatatcgttgcttcatagctcatcagacactgcttcggatctgagtgtccgtcgtacatggggagttgaggtggcttgtangacggaggctaacgtgtaacctgcagttctgctgacagaggagaagcatcatcaaaagcaaaatttccatgatggaaatcctcataccagtcatcctcgttgaagaagccctcctgatgaagctctctgtgctgaggcctgtcggtctactcatcttgagtaagatggcgaacttcttc

SEQ ID NO: 17504 - DNA, 349 bp, Zea mays
ggaggagcgcatcacaggaagaaattgatgaccacgtcaagacctctggagctgctacatatggacctcttcggacccgtcgcctatctaagcataggaggaagtaagtatggtctagttattggtgatgacttttcccgcttcacttgggtattctttttgcaagacaaatctgaaacccaagggaccctcaagcgcttcctcaagagagctcaaaatgagtttgagctcaaagtgaagaagataaagagcgacaacgggtccgagttcaagaaccttcaagtggaggagttccttgaggaggaagagatcaagcacgagttctccgctccctacacaccacaacaaa

SEQ ID NO: 17505 - DNA, 470 bp, Zea mays
  unsure (1)..(470): unsure at all n locations
agcttgtcanaaccaaagaattccttaacacgagcatgagaagtctggatgaacacagtgggtttcaccgcaagctgaagcatttcgcagagcagtgccaaattgatgtttctttgttgcaagaggaagaaaagaaaattcggtccttggtcagggggaaaattcggtccttggtcaagggcactgttgattatttccgtgggagtacagggaaggaggagggcctgccgttaggattagttgaagttccagtttgatcataggcacctaggtcgatgcctttagtaagatgtaagcaatctgtcttctggccaggttgagcaaggcttagctgcagtatatcagtatggtacagctgatgtatttatactgtacaatctaatgagactgtacggattagagctatcagaacctacacatatatttcacaataagctcttaggttatatattngtcgacacttgtgaata

SEQ ID NO: 17506 - DNA, 455 bp, Zea mays
  unsure (1)..(455): unsure at all n locations
agctntaattgggtcaaatttccatgttgtatcatacccaggtttaacttttccatttcttgacatagtgtggtgtcaggggtccttactgtaagacaatgacaggaagctttgcgactcagtgcatctgccaccacattggcttttcctaggtgatagtggatttccaagtcataatctttaattagctcaagccatcttctctgcctcatgttcagttctgactgggtaaagatatatttcagacttttatgatccgtatataaatgacaagtatttcccagcagataatgaagccatattttgagggcatgaacaactgcagctagttccaaatcatgagttggatagtgctcctcatgccggcgtagttgtcttgaagcataagctatgactcggccctcctgcactaggacacatccgagtccactggctgatgcgtcacaatacacatc

SEQ ID NO: 17507 - DNA, 474 bp, Zea mays
  unsure (1)..(474): unsure at all n locations
agcttctgaatgccagtgtagcactcgtggtgagcttttgccataaggtcgcgggatattgttgaatacttcacagccttctgtgcgtacgactgggcttcactagtgctttcatcaaacgccttcaagatgttcagcgcatctgacttcctactccttccaactaaatcagtaatactctgaccaaaagaagatctaaagctagggtactggtaaaagactgggggttggatattgaaggaagcatgaccaacgggatcatgggatgtgccaagcacatcagcagatgtcctagtaggtgctgctgttgctactgggacagatgctgctgctactgngttaggtgctgctgttggattaaggactgctactgnngcangtgctggtactggagcatgtaatattgctagagcaccaatggngacgccgtagcacgtgtcagtgatacttctcaactgaaagtaaaaaacaatg

SEQ ID NO: 17508 - DNA, 469 bp, Zea mays
  unsure (1)..(469): unsure at all n locations
agcttgtgaaggttcttcatccncacatgtgcttatcggcgatgccacagccagcccatgctagtcttagctattaagcatgcatctagaccggcctcttcttttgcaaaatcaactaaataaagtttgccgtctaatacacccttaaaagctagtgaaccatcacttcttctaaagacagacacatctacatttgtaaatagacagttatatcccatattgcatagttgactaacggatagcaaattgtaaccaagagactcaactaaaaacacattagagatggagtgctcattagaaattgcaattttacctaatccttttaccttgccttgattcccatcaccgaatataattgaatcttgggaatccttattcttgacgtaggaggtgaacatcttcttctcccccgtcatatggttggtgcatccgctgtcaataatccagcttgaacccncggatgcataaa

SEQ ID NO: 17509 - DNA, 381 bp, Zea mays
  unsure (1)..(381): unsure at all n locations
agcttccaacgaaggtgcacttgctgccgaatctgagcaggttgatgctgaagaagatgattctgaagatgattacggtgccatgccatctaaacccagccacctagaggttgggaagtctactattaccgaaggtgatatgcctaagatgttgaagctaggctatttcagtgaagccaaaaagaagctgattcgcttcggcgaagaggaaatcaccccaaagccagagaaagatgaggtggtggtttttaaaagcctttntaaagcaggattgagatttcctttacatgattngatcgcagatgttttagaagaaattggaatttatcttcatcagctaactcctaacgccatcgntaggcttagcatctatatctgggc

SEQ ID NO: 17510 - DNA, 390 bp, Zea mays
  unsure (1)..(390): unsure at all n locations
gatcagccgaagcccatgcttttatgcgatgacgtagcagagcagaaggtgctattgggatctcaactgtccgaagaacaggagaaaaccttaataagggttctgttcaacaacaaagatgtttttgcatggtcagctaatgatctttgcggagtcaacagggatgttattgaacactcgctcaatgttgatccatccttcagacctagaaagcagaggcttcagaagatgtctgatgacaaggccgaaggtgctcggaatgaagtaaaaagactcctcagcgccgaagtcatcagagaagtaaaatacccagaatggctggctaacacttgtatggtaaaaaaggccaacgacaaatggaggatgtgtattgattntactgatctcaac

SEQ ID NO: 17511 - DNA, 407 bp, Zea mays
  unsure (1)..(407): unsure at all n locations
aataccaaaatacgatattagggtgatacaccatatcaacaatgttaaagacaacttgctctgtccttgtgttatgaacatagccgaaggtaatcggcattgttatcctaccaagtgccactatatgccttccttcgaagccacaaaggggatgtgttgcgtcatgtatcttatcatcctgctcttgcatctgcctgaaagcttttgcaaagataataactgctgcactacctgtgtctataaggacgttgtgtaccagaaacccttgatgacataagatatgaccatngcatcattatgaggatagtccttgagctgaacgtcctcctangagaaggtgattggtatatgtgaccacttggacttgatgaaggatccttgaactccaacatgttgtacccttcttt

SEQ ID NO: 17512 - DNA, 314 bp, Zea mays
  unsure (1)..(314): unsure at all n locations
accggaagcagtgctggcgcttaacacatctgagtgcagggcgatccggttcactcctttccgccttctatacggatcggatgcaatgaccncgcatgatataaagcatgggtccccgcgtacaattccgtcaggcgtccccgacgtggacgatccaacttcataagatctcattgacggagaccgggtcttcgccctacaagccctaaacatataccaagcccagaccatagcatggcgcgaccacgcattcatctcgagggagttcagcgaggtggacctcgtactcgtncgaacagctcggacagagtcca

SEQ ID NO: 17513 - DNA, 464 bp, Zea mays
agcttcagcacggtcgaactccgatgaagctctaattggccgacgacaaagcataatcgggggaaatgagcatagggacaaatgtctcacttcggggcgaagctcggggtcgcttggcgcggtgtctggtgagctagatgaccggcatggtgggcgcgggtctctggcgaggccgagcagcgagggtgtcacggaacctccgaaggtattaggcccacctacagatttccttgtcctaaggacctcggacaatcatgtagatgcatataatcactcgacaagttcggtcatctgtatcatcatcaaatcgcccaagagcgcttcacccatcacgcagatattacatcacatcgtaggatagaataagcggaagcagattacaataacttaatttacattcataaaatatagaaagagagtattgttacagtaccgggtgttaggagtgcataaagtattattac

SEQ ID NO: 17514 - DNA, 467 bp, Zea mays
  unsure (1)..(467): unsure at all n locations
agcttgaatcacttttgtacccctgggatactagattccctaattggaaccctggaaaaccctaaatcaaaccctaggggcttatgtgcaaaattagcccacttttgggctaaagtgcaaaaaccaagccaaataggtttcttaagtcctttggttcacaaaaatgtggacttgaaagcaaaacccaaagatttggacttaaatgcaaaatggacctcatttgagttttgctctaagtctgaaaatcagtgaatgggctcaactttggggctttgtaacttacaaagcatagggtttttgccctaggtcaccacatcaaagttgaagaccaattataggagaacaacttttctaaagagtgtgagcttagttgttatgagaaaattggagaanaacccaatccaaaactggctgtcaggctgtntgatctgaaattcagtgtagcacatgactgacatcaacttcta

SEQ ID NO: 17515 - DNA, 225 bp, Zea mays
agctattaagcatgcatctagaccgggctcttcttttgcaaaatcaactaaataaagtttgtcgtctcaatccaccttaaaagctagcgagccatcacttcttcctacttcagacacatctacatttgtaaacacacgcttgcccccgcttgtgcatcggtgactaatggatagcaaattgtaaccaatagatgcactaaaaatccattgcatcatggagcgctg

SEQ ID NO: 17516 - DNA, 172 bp, Zea mays
tgtgtttttgaattttaattatgtgattttgattttgtatttgtgatataggttatgtgtgattggttatatataggggaatttggatattttatatgaatattgggtttttttgcgacgtggtatttaaattttatatttaatgtggaatgtgtaattggatttatgtgat

SEQ ID NO: 17517 - DNA, 440 bp, Zea mays
  unsure (1)..(440): unsure at all n locations
agcttcgactcatggacaacgttgtttattgttttgcctcagattgctcccttgcatcgcgctgtggcatattttctgttaaaaattgttgctggatctgtgatggacctagaagttgttgctcatattacaaaggtgttggtacaaagggctagggtatgatctagtgagttgaagatcggcttgctgaaggaatagaccctgaaggttgtgggcttggcagttgacgaaggacatgctctaggatgtatggggagtagtatgaggaagtgtggagaatntgctttggttggttttgttgtgcttgagtgatttccttttgctttggaattgttacatggcatgtccttgtggtgtgtcccttgtcttctccacagaagaggcacaacgatttcctcggatgggagttgaatctttcttcgaagcttcatactcttctt

SEQ ID NO: 17518 - DNA, 457 bp, Zea mays
  unsure (1)..(457): unsure at all n locations
agcttatctaggtggggtttcccagtcagcttgatggcgccaaagaataattattagttcgctttattgttatcatttatttttgtaagatacttccactatgtaataatatttatgacatttatctctatacacttggtcattatatgtgttgttcttctttggcacacatatgagacgcacccgactttatcctttaaatctgggtgtgacaaaacgttggctccccagcgacggtgtgtacgggcggccatggtagcgagctcgatttctgtgcttgtggcgacgatgactaggagattttggcgaggctggagctaatgcattcgccggaggaggtggcggccttgattcttatacacagagcgaggattgtngtagccagcacgtggtggccgttcggttccaacagcccgcgagctccgtncgggtcgttgcggttcggcgcgcgtgtgct

SEQ ID NO: 17519 - DNA, 433 bp, Zea mays
  unsure (1)..(433): unsure at all n locations
agcttcataatcaaaaagatcagcaaatcttattgcacaagagctaaaaatttagtgggccgaagcagatggcaagtgtgcgtaccaaatgagtttgtggtatgatcttatttatacgcccagggcgttgaaaattgaaagaccccacttgtcagtgaaagttgctattctagcaaagggaaggtgttttttcggaccttcngctcaaggccttcgtccatttcgcaatctgaatttatcattaacaaattaatattgcgaggggctactgttgggggccttcgtcctccgaaggtcctcanaaacatgatttgacaatgttttccaagtggattatgtgaacaggtaccttcggactcagaattacgaacatgaagtgcggtcaggacgaagcctgaaccagacgaaggacgggctgattaccaagctccac

SEQ ID NO: 17520 - DNA, 467 bp, Zea mays
  unsure (1)..(467): unsure at all n locations
agctntgccaaatagggcgcataattatacctttattatcttcccatgtgttaaggtcattcttcacataaaaccattctgtcatccagtcgccgggccatctcttccgaaaggtcggcactatgcagcttgacccagagcgagagtcgaagctatagcagccaaagttgttgtgatactgctccttaccctagggttttgtctcgtataacaattcgtgtatattgcagaaacgttttgcatcaggttccagaccttggcttctcgcggcccacacgaagatattcatccttatgattgcttcgggggtaagttggtgaagatagatttcaaatattttcagctttcaaaaatattcatccttatgacaaagctgctcangggaaatcgtagcccagctttcaaaaagcttcagaacactacgacttcattntcctcaggggacggacaagtcttctcttcttcat

SEQ ID NO: 17521 - DNA, 426 bp, Zea mays
  unsure (1)..(426): unsure at all n locations
gcttcggttcagntctgtagttttgcttctgtttccgccaataaaccttcggttgcctggagctcaaagttctttttctcgatagcatctgattgctcctttattttgctttctaaattntcaattataacttcgtgtttcttgtcttcaaaatcttgctgcattttcaaggctttgctcaacagcatactctgcaccaaaacaacctttgttagacatgtttttattattaaaaacaataaaagttaagggaaaagtagttcaccttgaaattggaataaaataaactaccaacgatatgttgtcgtcggtagcggctaatgtccgtttctagcttcggaaaaccgatactctntgacagagtaccgataactttggctcccagttggtttcngatacaatctaatttctcatcatcaatacctc

SEQ ID NO: 17522 - DNA, 423 bp, Zea mays
cagctcaattagtgattggagtttatatatggctggcattctggtaggtaattcaccaagccaacatatatcccaagatgtcatgggtacgtattttgaaaatattttgatcttgacttgagtgtacccatctccagatatatgtttcccttgagggagttgagcaagagaaggtggagactactttcaagccaacatcagtggatataaagtttcatgatgtcaaaggcaagaattaccggtgtgctataccaaagctgaacaaggaaattgttcctgagaaatgtaaggttgtggtgaaaccaaccagggttgttgttactcttttcaagggttctaaaggcaactggttagactttgcacttcaggaagaacaggtactcaccttactgagctaatataattgtctagttcaaattggtc

SEQ ID NO: 17523 - DNA, 445 bp, Zea mays
  unsure (1)..(445): unsure at all n locations
agcttacctgactccttcttctccaccggcactttattggagacccactctgcgtatctgcaaggtctaataaaattagcttctaacagccggtggatttcgtcctttattcgtgggagaagatctggacgaaatgttctaactttctgcttgaaaggtctgaaaccaggcttaataggcagccgatgttcgacaatttctcggcttagtccaggcatttcagtgtaattccaagcaaaacaatctgaatattccttcaatagaccgatcatctcatttctagaatcggtctccagggtcttgtttacaaaagtcggccttggagttntaccatctcctatgtcaatctcctccanaggatcggccgatgtanacccctgtcctagtttatcaagatctctgaattcctctatcatgtcccccacagaggaatcagatgatcttt

SEQ ID NO: 17524 - DNA, 472 bp, Zea mays
agcttcttgccttcgaaggaggaggaggaagaagatgatgatcagctaagaagaattcggcaacatctccatgaactctccaaaaatggagctttctccatggcttgtgttctccttgggttttcttgcgcaggctctcgtcatcttggctgacacgaatgcacaagatggtatgtttcagtttttccctcccttgtgtccttgttatttctgtgctcacttgctcattctgttgctcttctgtgcagcttctgggctgaatgggattcaagattcctggaacaagaagccatcaaactggagggtgggcactgacccatgtggagataaatggaacgggataagctgcaccacaagccgggtcacggctatgttagtatcagcagctacaagatattatcacatacggtcgtttccttctagtcatccattttatagatgagcaattcatcacttcattctgtttgtggtg

SEQ ID NO: 17525 - DNA, 450 bp, Zea mays
  unsure (1)..(450): unsure at all n locations
tatactcatttgttctttctctatcattctcattagccacacaacatatgtgggaatcgaaatgggaagacaaaccttttggagaggtggattcatcatttggtctccatcgntcattttcttcttcttccttacaaggttagtatcacaaataccaaaggaagtagaggcacaaaatgaactatcatgtttggactcatcaactntatttttaattctagtccaaatatcatgcgcatcataaatggattcatcattatttgatatgaaggcatgataatcctcattgctaagagaattgcttaagatgtcataagctaggtagtttaagcgaaaacatctttgatcctcctcggagagtaattttccattataactaggagggaagatactcttgtcccataattgttctaattgtggatctacggttctaaagggcattatcaccct

SEQ ID NO: 17526 - DNA, 430 bp, Zea mays
agcttcacaggtttaccagagatgatgcacatactattatttggactgggcacgaatagaaacgtggggcgacggagagggtgtcacgacggcgttctatagagcaattgtgtgttccggtgaaaggcttcggccgaacttaaattggttggtactgagagcaataggaggctacaaacgagttaaaacagggagaaattgggaaattactaacccgcaaagcgctgaccacggtggagttcttcacggtggagctaagaacagggaggagagaatctgtggactacgcgagttctctggtgaaattgagccgattgctcaagcactgaggtgcgggatgtggtgaagaagcggagtccgggctcaatttataggccaatggccggaatccgatgaaggatcgtggattcagatcgcgctggcgagctta

SEQ ID NO: 17527 - DNA, 418 bp, Zea mays
  unsure (1)..(418): unsure at all n locations
agcttgtgaaggttcttcatccncacatgtgctaagcggcgatgccacagccagcccatgctagtcttagcaattaagcatgcatctagaccggcctcttcttttgcaaaatcaactaaataaagtttgccgtctaatacacccttaaaagctagtgaaccatcacttcttctaaagacagacacatctacatttgtaaatagacagttatatcccatattgcataattgactaaccgatagcaaattatatccaagagactctactaaaaacacattagagatagaatgctcattagaaattgcaattttacctaacccttttaccttgccttgattcccatcaccgaatatgattgaatcttgggaatccttattcttgacgtaggaggtgaacatcttcttctcccncgtcatat

SEQ ID NO: 17528 - DNA, 451 bp, Zea mays
  unsure (1)..(451): unsure at all n locations
agcttctaaaaggagaacacattntaggattaacatatgttcattctgagaaagacagggattgtagcgcatgccaagccgggaagcaaattggcactcatcatccacacaagaacatcatgactagtgacaggccactggagctcctacacatggacctattcagcccgatcgcttacataagcatcggcgggagtaagtactgtctagttattgtggatgattattctcgtttcacttgggtgttctttttgcaggaaaaatctcatacccaagagaccttaaagggattcttgagacgggctcaaaatgagttcggcttaaggatcaagaaaattagaagcgacaacgggacggagttcaagaactcacaaatagaatgcttccttgaggaggagggcatcaagcatgaagttctcttctcctacactccacaacaaaatggtgtagt

SEQ ID NO: 17529 - DNA, 405 bp, Zea mays
  unsure (1)..(405): unsure at all n locations
ctgcagctatttcagaggggccgcgttcattttttctgcccgtgcgccatgggcgaacccctcattntcggcccagacgcaaggccgaacagccatgccgcccgtcgccttgcgcctccgtgccgttttccctccgttccgccatgcccttcacccaagacatacatattaccttcggtgtctttccacacgcttggacttagcttatttccggggccatgcccgaacctcggttttccgcccctgcgccatgggcgaacccctcgttttcggcccaaacgcaaggccgaacagccatgccgccccgtcgccatcctgcccttcacccaaggcatacgtcgcagcttcggtgtccttgcacacgcttggacttggctttttttttggtcgtgcacgaacccacgg

SEQ ID NO: 17530 - DNA, 440 bp, Zea mays
  unsure (1)..(440): unsure at all n locations
agcttctaaagggagagcacattntgggactaaccaatgttcattttgagaaagacagggtttgtagcgctcgtcaagcagggaagcaagttggtgttcatcatccacacaagaacatcatgacgaccgacaggccgcttgagctactccacatggacctattcggcccgatcgcttacataagcatcgacgggagtaagtattgtcttgtaattgtggatgattattctcgcttcacatgggtgttctttntgcaggtaaaaccacaaacccaagagacattaaagggattcttgagatgggctcaaaatgagttcggcttaagtataaaaaagattagaagcgacaacaggactgtcggcgtttcgaccccgnggggtccctggaccgacgagtaaatggtcgccgcgtgtcccagcccagatgggtcggcgcgagac

SEQ ID NO: 17531 - DNA, 464 bp, Zea mays
agctttgtgcacttactaccttgggcaagattagggaaaaccctagacctctcttgaaccctgtcttcccaaaaccatggttaagaggggggagaataagcaattgtgcaaccatgagttaatttttaaccaaactttaagtaaccttataaccagcaattgtgggaaggaaatattgcaaaaagacccctggagaaaccccaaacccattccctaagtggagagagagctagagctctctatttctctctaagtcaaaaactacacctacactaaagatcagccgtgttcaccttgaagatggcaccaaaaccacctatgttctataccaaaaatgtggcacagcacttagggcacccactggaaaaagctgagcccgagaccttgacgtttgacatgccttggcatggtttttgtcgcagggtgggcagagtgacatacctgatttggcgaccgaagatctc

SEQ ID NO: 17532 - DNA, 453 bp, Zea mays
  unsure (1)..(453): unsure at all n locations
agcttacaatgggccaccaaggtactttatatcatactagacttcgaacaatgacttcccttcgacactcgtcgttcatcagttgagtatgaaggcaacctctgtaacacttctggtgttaccaggactaaaacttggcatgtcatcatatgcaatggcatatttaggttgtaatacacctagaatgcattcacaagaataaaaaacaatctaaatgtaatgaggtgatcagtggagagcagaaaacctagtttgagaaactttagttntaaccccaaaagtggattatatgatccggcaaaatttggccaaaaatgaaaataccaaagttatagagattcctaaaccaaacaagtctcatgtgtggagattntcaagttntatagcanaacgtggagaanaactcacaatttagttatggcctanggtttggatcctgaanatatatcgact

SEQ ID NO: 17533 - DNA, 442 bp, Zea mays
  unsure (1)..(442): unsure at all n locations
agctaggaggcgtctattgggtgctacttgttgttactcctccttctactcctgcgttgccttgaatgcgacgggttgggcttcggatgggtcgccaagctcgttgattttcctcgagccttctatcatgcactcaaaacttacaaaatgcccgataacttcctcggtggtcattttagtatatctaggattaccacgaatcaattgaacttgagtgggattaagaaaaatgagagatcttaaaataacatgtaccacttcgtggtcatcccacttcttgctcccgaggttgcgcacttggttcaccaaagtcttgagccggntgtacatatgttgtggctcctcccctttgtgaagccggaaccgaccgagctctccctcgatcgtttcccgcttgtgatcttggtgagctcatctcactcgtgcgcggttntgagtacat

SEQ ID NO: 17534 - DNA, 420 bp, Zea mays
  unsure (1)..(420): unsure at all n locations
agctnggacagntttctgggacgactcttggtgaacctttggcgtagtagcagtcgctgtcctagtagcgccttctaaaattagaacatgttatgcagcaaggctggattttagttgtacaaataacattgctgaatacgaagcccttctgttggggcttcggaagctaaaggcaatgggagtaagaagggcgatccttaaaactgacacccaagtcatctctggccatgtagataaaagcagcaaggcaagggacccgaagcttgaaaaatatttggacacattccgaaggctggaggcttctttcgaagggttttctgtaaaaaatattccaagaggggaaaatgaacatgcagacctactggccaagtcagcagcacaggggctccctctaccttcgaaagtattctttgagacaat

SEQ ID NO: 17535 - DNA, 406 bp, Zea mays
  unsure (1)..(406): unsure at all n locations
agcttcatcaattgcttcatttgctattctgattacatcgagagtaccttttagagctggatcagcctcatggttgtatggctctggagaaggaaacagttcagttacaccaaaatataagcttttgtcaggcacgaagttaacatacttatgaagctaaaatatgacaaacgtacatatacgtctttcacgcttaacgacctcttcagcttttcttggttcttctgaggtaagatgagcctcttcttcatttcgcttgatggcttcgtctggcatctctcgaccgtcattcgtccacacttcggaataaaatntcccactgagggcgatagcttcggctgggcagctctttatgtcagtcgctgaaactgagaagtctgtctaaattatagccttgggcatgtca

SEQ ID NO: 17536 - DNA, 477 bp, Zea mays
  unsure (1)..(477): unsure at all n locations
agctnttatcgtctccagcacatctagtacactagctattctttntctcttgggggtcgctcctagacctttttgtgtcttcggcacctccactcttgccgaacgacttagaacttctaatgctcctgccgaagggcttaaaacttctaatgttttcatcccttcgattctcggttcttcaattntgtcagtcttcggcattgcagtcggctcttcaatcctctgcgtaagagctggtcttttggcttcaatagctgaagaagtctcaccgccaaattcaggcactatggccggttcaatgtagcgcggtcggtgagtaaggaccttcaactttntcctcttcggtgcgggctcgcttgaagcagccgaagcagcagccttcccagaagttgcaccctttcttttctgcccccgcggcgggtagcgatagtcanggtacacaaatccaatagcatcaaaaaccctatttagtctttt

SEQ ID NO: 17537 - DNA, 457 bp, Zea mays
  unsure (1)..(457): unsure at all n locations
agctntcttcggcggcatgacgaaggtcacagcttgtcttaggtggtcaaatgagttcaccgaaggtgggcgccaatgttggggacttgttctcaaatgctatgagttaagaacaaggcaacgcaatgttaatagttagagacctttgtcctccgaagcattatttcccttaggatataatgatcttcagacgaaggtcatgaagggaataccttcatcatcttaatatgtaacagaaagcagaagcatgaattacatataaggagtacggataatcatcttaaatcatcaaattatttgtattcttattaaataaccatgaataaatgttaataatattgaattacatttgtaccttcggcttgacagaaggcaaggatctaggtgtgacgtgcgagtgaatacaagtcagcgtgaacagtacggtgttactgttcatatatttatacgcaccgga

SEQ ID NO: 17538 - DNA, 475 bp, Zea mays
  unsure (1)..(475): unsure at all n locations
agcttagcagatgatccgaagcttagcagatgatgatgaagccaaaaaccttgctgtgaaaaaaactctagaaaaactcttgtattatcccttgtaaagaatattgtaatttgagaatcagattctgctcttgtaatttgtccataccttgtaatatatttttacctttccatccatgtatgaactgctttgatgtggacggaacttgtattttttgagccgaaggcgaaaaacaccttcccttcttttcgttcacaacgaagcataaatctgcttccgaagccgtatccttagagccgaagcaactgtctgtatctgtttgatatgatgatgatgatgatgatcctatgtatgtctaaatgaatgtttatgaatgcaatgtatgatgtaatgtatcgtgaanatgaattcccaaacacacacatacgaagccacattcataaccttcattcccttangaatgactgaagtatct

SEQ ID NO: 17539 - DNA, 447 bp, Zea mays
  unsure (1)..(447): unsure at all n locations
agctngcttctacatagagtatgctatgaagcatagctttaaggatgcaacaggaccttgaagacaaaaaacatgagattataattgaaggtttagaaagcaagataaaagatcaagcagctgctcttgaaaagaaagatttcgaacttcagacaatggaaggcttactggcagaagctgaagccaaaattgcaaagttggataaggagcttctctcaaaatcagaaagcttcgaacaagaaaagcggaaatttgatacgaagtttgaggctgaggtcgaaaaaagttcaaatttgcaaaaatcattaaaagagcttcaagataaatgtctggagttcagcaacagatgcgtgtagcgattaaggcagatctttaactctgttggagccagcactaagaaatttattccttcggttgaagacctgctanggaccttcgaacacattg

SEQ ID NO: 17540 - DNA, 467 bp, Zea mays
  unsure (1)..(467): unsure at all n locations
agcttacacatatgtagctcacacactcctagatgccttttttggttggttttctcgntatattttctaattaagagatttaatcaccaaaccaggttcatatatatgtttctgacatttgtgcgaataaaactagaccactcatactatatatatatatatattaaacaaaaaaatatgtgcttaagattaacaaataattagtgtctattggtatgaaattggtgcctattacgtaatttttacatataattagtgtctattaatatattntctaattttaataagtattcatgcaagcaaccgaacaacatctctaataaaccatgttggacacatgcaacaatcaaagaggaggtatgttgttacccagacttgtcagagtcaggctcactagatnggagcccagctctaccatgcagtcaaccaaatacgcccatactaaatccaccactacgaccacacat

SEQ ID NO: 17541 - DNA, 473 bp, Zea mays
  unsure (1)..(473): unsure at all n locations
agcttgtccgaccattatcttaaagtttgattcttttggattccncatctctattgaaggcctaccaacttaatcttatgattgttttccctctgtatctaatcagatgttgatccttgaccttgtgatctctatgatgggcatagaaatatgcttggggctgaagtaacagtctcccatcatactccttttatcaagtttaggttatggccatgtcttgttcatttccttgggccataatctatttggctctctacttgtaaccattcttacaggtggagtatctccttgtatattgtcacccttgcccaattcatttgtgttgcgcgagatttcttattggttacgtctggtaatggtgttatgactaanaccaatggtgccgcgacgagaccganggcctcctgtgaatgtacacacatggttgtgctgctcggcacacgctggtatcatgggtagtagttgtaatccat

SEQ ID NO: 17542 - DNA, 456 bp, Zea mays
  unsure (1)..(456): unsure at all n locations
atgctttccaaggcgtctcgagcccgcatcctctctcgggcccgggccttctccgcgtccttctttttcttcttctcctccgcggcaacccgccgcgctgctcggtccaccgcatcctgcgggacccatggcagggaaggcttgtgccaccccacctcctgaagacggagggaaatcccaaccataagaaccaggagcaacccgatgcaagaggaaggaaggagcggacactcactagagtcacgcacccttggtcagggcgaaaggctgggagaaggcgctggggtccggtttccccaacgcgacggccacccgcccatggaggacgtcaaagggaagaggatccgaggacatccgcgagccctccaagtcagcctncggtgtcatctnccanagcggcaaccgacgctccgccagggaagcaccctcagcggtggatggcggcatcactcccgc

SEQ ID NO: 17543 - DNA, 461 bp, Zea mays
  unsure (1)..(461): unsure at all n locations
taagctgagctatggtaccctcggggattcttatttgatttacttggntattcggatgccgattgggcggggtgcaaaatcaataggaagagcacatcggggacttgccagttcttgggaagatccttggtgtcttgggcttcaaagaagcaaaattcggtcgctctttccaccgccgaagccgagtacattgctgcaggacattgttgcgcgcaattgctttggatgaggcaaaccctgcgggactacggctacaaattaaccaaagtccctttgctatgtgataatgagagtgcaattaaaatggccgacaatcccgtcgagcatagccgcactaagcacatagccattcggtatcattttcttagggatcaccaacaaaagggggatatcgagatttcttacattaatactaaagatcaattagccgatatctttaccaagccacttgatgaacaatc

SEQ ID NO: 17544 - DNA, 475 bp, Zea mays
  unsure (1)..(475): unsure at all n locations
agcttcactgagttgtgcacgctcgtctcctatggttggatggggctggggaaagctggactgatcggtctacggcggcagtggcttcggtggccgcggacacaccgcgcacgggcaaacgacggcgaattaaactccggtgaggcttgagcgtgcgcggaagagtgtaaccgacgcctgggagggctttataggcgcgggcgcgggacagggcgccggctggccgttggcgcgacgcggggcgcgcgcgggcgtgctctggcaagctcagggcgcgtcgaacacgtggagctttcaatctgcccgtgttccacagctcacccaagtcgcaaacgtgcgaatcttggcaaaaatccggcgcgagtcttttcctggcacctagggatgtctctcatccgtgagctgccatggcagatatggcctaggtagggagatctctgggtcgcannatcggtgtgtcacacttgccacctcg

SEQ ID NO: 17545 - DNA, 452 bp, Zea mays
  unsure (1)..(452): unsure at all n locations
agcttcgcacctctgaactaactcggctgcgtcattctttgttgttggccaataaaatcctgacctgaagaccttcccgactagtgtcttggatgctgcgtgtataccacattgcccggcatggacctcctccagaagtcgcttcccagtagatgagagaatgcacttcatgaggacgcctgatgcaccccttctgtataatgtctccccgatgagtgtgtagtgagccgactgtctggccatgcgctcggctgcattnttgtcatctggttcctcttcattctttatatacctgatgattggccttctccagtcatcagagtctgactcgggtcgatttataatattacactcttctgcttgatccattgagatgctcggctgtagtatttcttgcacaaagactccaggtgggacctgagttcgactggatcctagcttggacaatacat

SEQ ID NO: 17546 - DNA, 462 bp, Zea mays
  unsure (1)..(462): unsure at all n locations
agctntatcaaatggacgtgaaaagtgtctttctcaatggaccaatcaaggaagaggtctatgttgagcaacctcccggctttgaagatagtgagtaccctaaccatgtttataaactctctaaggtgctttatgggctcaagcaagccccaagagcatggtatgaatgcctaagagatttccttatcactaatggcttcaaagtcggaaaggccgatcctactctattcactaaaactcttgacaatgatttgtttgtatgccaaatttatgttgatggtattatatttgggtctactaacgaatctacatgtgaacaatttagtaggatcatgacacaaaaattcgagatgtgtatgatgggggagttgaagtacttcttgggattcaagtgaagcaactccaagagggcaccttcattagccaaacanagtacattcaagacattgagagcacctagag

SEQ ID NO: 17547 - DNA, 365 bp, Zea mays
  unsure (1)..(365): unsure at all n locations
agcttcagctccatctatattatagattgtctttgaatctgtctagnttccttcggcctttctggcagcttcttgacttccatgaatagcaataggcccttgatccgaaggtatcttcatgcaaagatatgctgggtgaagaattgcttcaaaagcattgagtgtcccacaaccaatgattgcgttgtaaggatattccatgtcaacaatatcaaacacaacttgttcagtccttgtattggtgataaatccgaaggtcactggcatcgtgatcttgccgagtgctacaatttgccgtccttcaaagccacaaagggggtgcgtagcatcatggatcttatcttcnggctcttgcatctgtctga

SEQ ID NO: 17548 - DNA, 106 bp, Zea mays
attgtttagatgtgaattttttaacgcgaattttttgttttccccgccccgtccacgctattatattatattgataattaattgattatatgatgagttaatagat

SEQ ID NO: 17549 - DNA, 480 bp, Zea mays
  unsure (1)..(480): unsure at all n locations
agcttaacgaattcgctattgactatgtgcatatatcttctattcaggcacaggcgttagcagacttcatcgctgattggacgccacgagctcatgtggaagaaataaacaaagatgccgaagcttgaacagtgttctgcgatggttcctagggaaccttcggtgtaggagcgactgctgtcctagtggcgccttcgaaagtcaaaacatgttatgcagcaaggcttgactgtagttgcacaaataatattgctgaatacgaagcacttctgttggggcttcggaagttaagggcaatgggaataagaagggccatcctgaanactgattctcaagtcatttctggccatatagacaaaagtagcaaggcaagagacccgaagcttgaaaaatatctggatacagttcgaaggttggaggcctctttcgaaggttcttctgtcaagaatattctaagaggagaacatgagcatgcagatc

SEQ ID NO: 17550 - DNA, 444 bp, Zea mays
  unsure (1)..(444): unsure at all n locations
agcttctaaagggagaacacgtgataggtttgactaacgtgcaattcgaanaagatagaccttgtgcagcttgtcaagcaggtaaacaagtgggaggagcacatcacagcaagaatgtgatgaccacttcaagacccctggagctgctgcatatggacctcttcggacccgtcgcctatttgagtataggaggaagtaagtatggtctagttattgttgatgacttttcccgcttcacttgggtgttctttttgcaggataagtctgaaacccaagggaccctcaagcgcttcctcaggagagctcaaaatgagtttgagcttaaggtgaagaagataaggagcgacaacgggtccgagttcaagaaccttcaagtggaggagttccttgaggaggaanggatcaaacatgagttctccgctccctatacaccanagcaaaatg

SEQ ID NO: 17551 - DNA, 475 bp, Zea mays
  unsure (1)..(475): unsure at all n locations
agcttcggcatgatggcaganaagaggaaacttgcttaataaggaaaagactatttagaccccgatagattactatagaattattatcaaaagcaaagggcctgaatgtaattntgcatgggctgcgacccgtgcctataaatagatgaacagtactcccgtactgttcacgctgacttggcattcgcttttgcatcacgcttgtacccttgctttccttcaagccaaaggtacattcataatttgttattgttgatatagtaacacaaataaaaataagttgataataatgtttaaagtgtttatgttatttttcatatcttgcacatgaatccttcttcatcatttattgtgcttatgaaggtttttccttcataaccttcgtccggaattcattatattcgaagggagataatgcttcaaaggacaaaggactntaacanttaacactttctatngtgccttgtcttaactc

SEQ ID NO: 17552 - DNA, 119 bp, Zea mays
attgaataaagtgtattggttaagtaagaattgataatattggtatatatgtagttattgttttaatattttaaataggtaattgaattgtttttttatgggggggcgagtggggattt

SEQ ID NO: 17553 - DNA, 471 bp, Zea mays
  unsure (1)..(471): unsure at all n locations
agcttgtgccttanaacaagaggatacaagatgttgttgtgcttttgtgaaggcttttgcgaatcacttgaagcgttagtacttttgtgaatgattntgtaaagtgtttgcaaatatgtgcaaaacataataacatgtgtaggttttgtgaatgattttgttgtggtgcttgttgatggtttatgtgatgtggatctatcattgtgcaatactaattaaattcgtatatctatgtgattatgtgtataaaaattggtgatttgtgatgcttttgtatatataacagttgttgaatgctaattaatggtatattatcattattaacgactataactaggggcaactntctgttggttgctaaatttatagtataacgactcacgaatggttgtaaatctatagtacaacaacccacagttggtcgctaaatatataatattagcaacggacggtcggtcgctaaaaagatgt

SEQ ID NO: 17554 - DNA, 133 bp, Zea mays
taattttttataataatatattattattaatttatataaatatttttattaattattttatatttgttatttaatgaagaaaattggaattaattagttgttattaattattatattttaatattaaatttat

SEQ ID NO: 17555 - DNA, 474 bp, Zea mays
  unsure (1)..(474): unsure at all n locations
agcttcccattgatggggctatggttcctactattgtcgtcgncatccatgccanctcacgtctcggctccatacctcaacggcccgtgcggcactagcatgacaacacgacgcagtaagcaatcgccaattgaccggcgatctccaaccaaaaccaagcagaaaggattatggttaagccaaaaaagagatattagtagctaaaacatacatgccaaagctggagcccggagctagagaagcggtgatgatgacgtgcgacaagcgacgatagcaacaccctgatacacagcgagccatgagattagggttagggattgaggagggagaatggcgagcgtcagcgcgccgcacgccagtggagactgaagatgttgtcagctgatgacggagatccagcagcgaagactgaagatgtcgccggctcatgacatatatccggcagtggagacgagatatccgatgatggagacg

SEQ ID NO: 17556 - DNA, 417 bp, Zea mays
  unsure (1)..(417): unsure at all n locations
agcttcggctatgaaaacagttgtttattgttttttaagatgtctgaagataagacagctgctgctgagatgaagctgagtcttgacgaagagaagaacttggggtttcttatagcgatgtcgaagaccaatacagaaaaaatcaccaaggagattctggaacgtttgtctgaagatactggtgacagcgatagttatgatgtggacagtggtggtgaagactccgaagatcgcccttggcgaccaagccatgcggttttcggcaaatcaactatcaaagaanatcatcttgtcaacatgagaggaaggtatttccgggatttgtccattgtgagggccgacgaacgggaaaagacttgtccacactctgaagagaatgaagtcgtagtgtaccgaagctttttgaaagatggacta

SEQ ID NO: 17557 - DNA, 383 bp, Zea mays
agcttgccaagccctctgacccgaccggacttcatcggatgcccgagatcaccctcaccggacttcggtcttccgccgccgcgcgtggaccgagctatccagtgagtctccgcccaattcctttcgctcatagcttctctggcatcccgtggacctccctgacctttttaattgaactacctcgccgtgaccaggccggtctcctcgccgccgacgagcatccccgcctgcgcgcgtggaccgaccaactccggccatctccgtcgacgttccgcacaccgttgtgatccccgcgacctccccttcatcctcgaccacttcaccggaacagtctcgccgccggtaagcccctccgcccttatctccgccgcggctactgtttg

SEQ ID NO: 17558 - DNA, 406 bp, Zea mays
agcttcgtccactcaagggatgcgatctcgtctcttctgagcccagcctcgggcaggaacagtactcctagacgaatccacgcctcgcccgaagaccccttcaagcaacgggcgcaccctcgactcgcccgaggcccagctcgggcaggcttcgcagtgaagcaaccttggccagatcgcctcgccaaccgactgtatcgcagaagcattcaatgcgaggatcgcctgacaccttatcctgacgcgcggtcctcagtcgacagggccgaagtgaccgcagtcacttcgtccttccactgaccgacctgacaggaaagcagcatcgcctgccccgctccgactgttgtgccacccgccagggtgaggctgacagcagctgagtctagcctcaggcgccacaggaagc

SEQ ID NO: 17559 - DNA, 295 bp, Zea mays
ttttttttgggggacgttagaattttataatttaatttaatatattatattatattattttaattattatttattttatatatatatttattaaatatatattttatttaaatattataattttttatattattaaatttaatataaattttttatatttaatattatttatttgtaattattttaattatttataatttattttaatattatatattttattttaaatgattattttatttatattaattttagtattgattttccgaagatattattattatatttaaaaatt

SEQ ID NO: 17560 - DNA, 468 bp, Zea mays
  unsure (1)..(468): unsure at all n locations
agcttcgggaaccccatacttctagccatcttccggcagacagataattctttgttgtctgggaggcagtataagaagtcatcttcgtctgtgccattgaatactaaggccccctttggatacttcagttctcgagcatagtgattagcttcaaaaatctcttctttagataatctttttcccgaagcatgtcgtacaatataatcaagggctttggaggatgcttcgggggcggcagcaccagtttcttcaaccaaaattggctctgatatttctgtttcttcggcttccaaggatttcaccttggcgggctctgaaggcccagcttcagtttctgcctggttctttgaagcttcggcagcaaaggcttcagtgtgcacttcggaagtttcaacaattntcttcggagtcatgcttgaagacttaattgtctnncaaacatccagcacattaaccatcctttttctt

SEQ ID NO: 17561 - DNA, 466 bp, Zea mays
  unsure (1)..(466): unsure at all n locations
agctggatcgaacctaacatataatgaatctatatattacagaatatgatacggtgaagttaactaaacactgccttaatcctacgggctaccattgtcaaattacagagaaccaaattaccgaaacaaccagctgtctgtaggatcgtaactacattctacttttttctttcctttccctctgctgcattgttctggtactaagacacaatacagatcgatcttcccatacgcttactatcattaggcaccagacagctcgatctttccatacacttgctatcattaggcatcagtagcanatntctgaatgaatatgctaagtgtatcctactgaaacaagctattccagacacaacctaagttcggtgtaccacctgaaaggactagactntnttctccagatctagaaccgaatgaatntaatntagtttgttaagtattagtagccacaatagaggagcat

SEQ ID NO: 17562 - DNA, 475 bp, Zea mays
  unsure (1)..(475): unsure at all n locations
agcttgtgagacataagaattcttgtatattttgagtggaagctggttgtctttctccggggactntattttccttacaatgagactactacatgaaatagacttgaaaagaggtattagtctcaaagtcttagattatagagtaatctccccctgaaagtgtgcatacaagttttgaatacttgtaggagacatgcactttgatttgatatcaagaggggcagatgttgggggccttcgtcctccgaaggtcctcaaaaacgtaatttaacaatgtcttccaagcatgacttatggataggtaccttcggactcaggttaaaagcatacacgatgagaagagcatgatcgtgacgaaggttgccattactccgaagctacgcgcaagggagcttcagctcaatcgcggaaaaaaggaaccgacttataggggaaaaggctatctagtcctcatagattcttctataagtcaata

SEQ ID NO: 17563 - DNA, 451 bp, Zea mays
  unsure (1)..(451): unsure at all n locations
agctntntgccagatccatgtgttgcacttttatacgaaggcaactagggtcctccataacaacttcggctactataatgttgcttaccgaanaggcgttatgtttctgattctcgtgtactgaagcaaatggccaaacaaatgggcgaaggagtggttctatatgaagaatgatttgaacgagagaggtgatattaagggaattattcaaactccccacatgcttcgggtataagggaccgacttggtatatcaatttcgaagctcaggccgctatggttacttttaatgctgtatgcgcacatattagaacaagagatcttgttcaggagtatttagcatttaaaacatggccactaatggctgagtggaagatgccaaagatgacagagaaagatgctttggatgcggagcctccagtgataagactctattataaatacaagttcta

SEQ ID NO: 17564 - DNA, 128 bp, Zea mays
aatataatatataatattaatttgttttacggcccccaatgacttataaaatattattaatataataaatataataataattattatgattattatatataaattatattaaattatataaaatattt

SEQ ID NO: 17565 - DNA, 434 bp, Zea mays
gtcatctaacaattcggctaattagagcatcaacatagctgctaaataacatacacgtcggcttacctattatcatcgcaatccgagacacaacatatactacaacatttttataaacacacagattcacaagtgtattcacacatcgaccaatttatacgaaccgtaaactactagtctccaactcgcaatcaccatgcatttacttcccaatcatgaatacatacatgtttatcctacgaaccgagtattttaatactttttctaagacaactaactccattatacacttgtgacacaaatctacttgacttacttgaagcgtgtactcgaaatcgtgagcacaatcatacaccatatgcgaagcataatttaactagcgcataatgcgcatcgttatgactcgacttataaatatagagaagcgacgacta

SEQ ID NO: 17566 - DNA, 383 bp, Zea mays
  unsure (1)..(383): unsure at all n locations
taagcttcgattccaactttagaagacggactgtcggtgctgtcaaataactatctggctgacagcctancttacaacagtttataggtgcgacaaatggaattcttgtattttatgttgagttcaaaatttttcgtttgtttaaaactattgacacagacatattcctgtttgcagggcctgatactcagcaatgccctcagggcacagaaaagatgctgaggacgaaagatgtactatagccctgagcaaccttcgttccgaagtaattgaactgaggaacgaacgtcttgaaaaagataaatattatactcattgataaataacataaaggaagacgaagctacttttaaagtcaagctgaagctcagaagcgtgaaatt

SEQ ID NO: 17567 - DNA, 416 bp, Zea mays
  unsure (1)..(416): unsure at all n locations
agcttgcaaggaatatggctgctcaattatgttatatgcatggaccgatacaagacagcggcgtttgatcaactttcttgctaatagtcctgcagggacatcctttntagcttctgttgatgcatcgattgagatagctagtgctgaattggtggcagatctactagagaagcaaattgacagtgttggtagacaacatgtcgtccacatagtaactgataatggatctaattttatagcagcaggaacggctcttgtgaaaagaattccacacctattttggacgccttgtgctgctcactgtttggatttattgttagaggacatccggaaaatcaaggaattcaatgactgtattactatggcaaagagggtgtcgaggatcctctacaagcatggactacttcataggctaa

SEQ ID NO: 17568 - DNA, 386 bp, Zea mays
gcttcggcgtggtatgcagaaatgaaaccgacttagagatgaaaaggccattcttacctcgatagactactatagaattattatcaaatgtaaagggcatgaatgtaattttgtatgggctgtgtcccgtgcctataaataggtgaacagtacccccgtgctggacacgctgacttggcattcgctatttgcgtcacgcttgtactatcatctccttcaagttgaaggtacatttgtaattcaacgatatatctgtttatacatgataataatatttaattgtttatgctggcttttatattccttgcaattcatccttcgtcactgtataagtgaattatgaaggtacgcccttcataaccttcgtccgaaagccattatatcct

SEQ ID NO: 17569 - DNA, 269 bp, Zea mays
gttcttgccgtaatggcggagagaagaaaggaaaggaaattctctagcatggtaaggggaaccagagaggaagagaatgaaatctacggtggccgcgtgctctccaccaccacaggaggaccgcaaccagggaatgcgagcactcgacccgaagtttgtcgctgcatgcggcggcggtgcacagtgctgctagtgcctacatcgagtatcaacggtatgtttgaaaattagactatttttgagattatattttgcatattaatcatgac

SEQ ID NO: 17570 - DNA, 452 bp, Zea mays
  unsure (1)..(452): unsure at all n locations
agcttgacattgtctccctattggaagccaatgccatccttaatgccaggacgtctnccactatagagcacacttctagcaaatttaaatgttttcattttctaagtcatgctcattaattttagcattaagttgagctatgtgatcattntgttgtttaattaaagctaggtgatcatgtatagcatcaacattaatgtctctacatctagtacaaatggaaacatggctaacaatagatgtagagggtttgtaagcatttaattcatcaatcttagcatgtaacatgacattctcatttctaagatttgaaatagaatcattgcaaacatttaaatccttagccttagcaattaaattatcattctcaatcttaaagctagaaagtgattcattcaacttgtcaattntaaaaatcaaagtagcattatcaatgttgaggttgactagag

SEQ ID NO: 17571 - DNA, 341 bp, Zea mays
  unsure (1)..(341): unsure at all n locations
cttcattcncacatgtgctaaacggcgatgccacagccagcccatgctagtcttagcaattaagcatgcatctagaccggccttctcttttgcaaaatcaactaaataaagtttgtcgtctagtacacccttaaaagctaatgaaccatcacttcttctaaagacagacacatctacatttgtgaataaacagttataccccatattacaaagttgactcacagacaacaagttatatccaagcgactcaactaagaacacattataaatagagtgctcgggatgaaatagcaattttcctaaccctttcaccttgccttggttcccatcaccgaatatga

SEQ ID NO: 17572 - DNA, 443 bp, Zea mays
  unsure (1)..(443): unsure at all n locations
agcttanaaggtgatatcttcagactggcctgataactattattatatgaaaactcagcacaaggcagactcctatcccaacttcctccatgctgaagggcacaagctctcaacatatcttctaatacttgattggtcctttcagtctgtccatcagtctgagggtgataggctgtgctaaaattcaactttgtactcatattctcatgaaagcttctccaaaatcttgaggtaaactgtgaacctcgatcagacacgatcttctttggtactccatgtaaacacacaatccgagccatatataactctgctagttgagaacctttataagtagtcttgacaggaataaagtgagctactttagtcaatctatccacaatcacccatatagcatcatatcctttctgggtgcgaggcaatccagtaatgaaatccatacctgt

SEQ ID NO: 17573 - DNA, 399 bp, Zea mays
  unsure (1)..(399): unsure at all n locations
tgcacgtcttgcatcagatataaactcctacacgaagaacctcctttcagtcatgggttccatggccagtgctgctggaggcaattgaaggcctgatcccacggaaattgagctttatcttgaggagattcttgcgttgacacagcttgtggaggactacactgaattcatggtgaataagatccgtgtattgagagatgtgaaacctgaacttgggccgcgggcgatgaaggccttccgtaatggtaactttaataaaatggagcacgatctgactgggttctatgttatcttcgaggaatatttcatggtggagaatgtgaggaaagccatacngatcgatgagcccatatcagatggtctcacaacgtcaatggtggatgatgtattctttgtact

SEQ ID NO: 17574 - DNA, 417 bp, Zea mays
  unsure (1)..(417): unsure at all n locations
gcttaacagatgctccgaacgacttttctgcttatatattctanagaaatttttgttatataattgtaaagaaacttatgtgaatttgtgcctaccttgtaatatatctattcccctttatccgtgtacgatctgctttgctggggacgaaattttatttttgagccaaaggcgaaaaacaccttcccttcttttcgacacaacgaagcatgaaaaattcctctttctctgaagttttttcctcatagccgaagcatctgccttttctgtatgatatgatgataatgatcctatatatgtctaaatgaatgtttatgaatgcaaatgtcatgatgtaatgtatcgngcacatgaatatccgaatatatattcgaaaccataatcatagcctttcttcccttgggaatgactcacatc

SEQ ID NO: 17575 - DNA, 431 bp, Zea mays
  unsure (1)..(431): unsure at all n locations
cagcggatagctcctctcggtggatgccgtttatagctagggcttggttttcttgaggcacaaactggatgagagggtgcagaacacgattggcttggttttatagatgggagttgaggagagatcgcgtttggttaagggaatccacgtgaagatttgattgggagcgggggttgtagccaaccgagtgtaacaccctgaatttgggggtataatatttcttctctaatatccaccanattcaggtgttacactatctctccttttcgctcagttccatctctttcaaggtagtagaaagaattatcttgatgttatgtattaatcaaatcctacaagaagtcttgattgttcatcataccaagggtggttattttatatccatgttgggtagtgatctagtggagcatacatttaataacgggttggaa

SEQ ID NO: 17576 - DNA, 436 bp, Zea mays
  unsure (1)..(436): unsure at all n locations
agcttggaaaaaggtaaagattcaattaatcatgttgtttgcactgaccctctctccatgtgattcaagtacacaaagggaaaaggaagaaggaggtgtttcaagtgcaagaagttgggccacctcatcacgtcttgtccgtacaaagacaaaaataaagggacaaggagttgttttggatgcaacaataaggaccacacgatcacttcatgtccggtcatgaagaatcaaggatgtgcatcctccaaggtgacactcaccaaggaaaatgacacaaagcaagcgtcgtgtcaagttgaacgacgcttctgctacaagtgtggtgagcanggtcatctattcaaggtatgttataaaggtaagattcctaagcaagtgaaattgtgtcaatcttattcgcgtaggagacccaaatcatacacttgtgctagatcta

SEQ ID NO: 17577 - DNA, 486 bp, Zea mays
  unsure (1)..(486): unsure at all n locations
catcatccgagctatcatccgagtcccattcaactaagtaggctttgccatctttcttcttggtatagnaattctttttcttcttgtcactttcatctttgcccttcttcttcttgcttggacaattcatggctatgtgaccgggttccccacactcaaaacattttctatcattgaaagcatttcttctagatgtttgacctcttctaggttgacctcttttcatcttcatgaanttatttgaattccttacaaataaagccatgtcaccatcactctcactntcattntcttcatcattgctatcttccttttcaattgcctttgaggccttggctntgagagcaatagaatcatttttcaccttctttgcaaactaaagcatncgtngtgacttcttaatatatcttgagtgagaaattctccaatacttcngtggagaggttgagatagatcactccttactagcatgcacaatagtctata

SEQ ID NO: 17578 - DNA, 442 bp, Zea mays
  unsure (1)..(442): unsure at all n locations
agctttgccttcggtagactaatactataaatttatcacacaatgggagtggagagatggcgagagtagcgtgtacccttcgtggcaagaggctggacagtggtgtatctgtgctctcggttggagtgaacctggtctggtcttaagaaacccaatggtgagttgacatatgcaagggttaagtgctatatatgtcgtgtggttggagatccctagctgggtattaatcgatttggatcaccgttacttctcggatatgaagacttggtcactgccctacacgtagcaatccagtaaagaaaaagggtgataaaagatgactagtgcaggtcaagtgtttgaactagggtagaaagaactctagctgcangtaacgacttaacttgataataaaactggatttttaaggatccactgttagtaagcatttctgcaaacagag

SEQ ID NO: 17579 - DNA, 266 bp, Zea mays
ttatgggctcacagaatatctcaacatagtgctatttatgtatcttcttttgagcttgtctatgggcacgaagcagtgatgcctgtggaaataagtatgaatgatgtcaggttcaccagacaaaatgatctaaccgtcatggattattataattcaatgatggataatattgaagaggtgatcgacatgagggcgatagctctgggagcaatagaaaaggacaagatcatagtagccacggcctacaacatgaatgtcaaagcaaa

SEQ ID NO: 17580 - DNA, 383 bp, Zea mays
  unsure (1)..(383): unsure at all n locations
gagctntatcaaatggatgtgagaagttcctttcttaatggaccaatcaaagaggaggtctatgttgagcaaccttccggctttgaagatagtgagtaccctaaccatgtgtataaactctctaaggcgctttatgggctcaagcaagccccaagagcatggtatgaatgcctaagagattttcttatcactaatggcttcaaagtcgataaagccgatcctactctctntactaaaactattgcaaatgatttgtttgtatgccaaatttatgttgatgatatcataattgggtctactaacaaatctacttgtaaagagtttagtatgattatgattcagaaatttgacatgtctatgatcggggagtgtgactatttcct

SEQ ID NO: 17581 - DNA, 427 bp, Zea mays
  unsure (1)..(427): unsure at all n locations
agcttctaaagggagagcacattntatgactattatatgttcattntgagaaagacagggtttgtagcgcatgtcaagcaggaaagcaagttggcgctcatcatccacacaagaacataatgacgactgacaggccgctcgagttactccacatggatttattcggcccgatcgcttacataagcatcggcaggagtaggtactgtcttgttattgtggatgattattctcgcttcacttgggtattctttttacaggaaaaatcacaaacccaagaaactttgaagggattcttgagacgggctcaaaatgagttcggattaaggatcaagaagataagaagcgataacgggctcaaatagaaggctttcttgaggacgagtgcatcaagcatgagttctcttctccctacacacctcaacaaaat

SEQ ID NO: 17582 - DNA, 316 bp, Zea mays
gaacacatgaagagggggagcttgttcgactattttatcattataagttcaagagatattttaaggcgccttaccaagaatggctcgatacaatcgaaataatgagtactgaaattcttggaaattactctaaaaaagaggaccaactgatgacagcagccttctgcacccggccgaagcgaaggctgaacagggtgcttgatgctatatgatttgaatatgctgattatggtcgactgggcggagatgccggaggcccgaagcgaaaaagaattgccagcgccgttgacgaagaagtcaccaaggtggccaaaaa

SEQ ID NO: 17583 - DNA, 287 bp, Zea mays
  unsure (1)..(287): unsure at all n locations
cctctctaatgaagctacacttcttctcgatttatcttgtgccttagcacgattttctctttatcaaatcattcttcgaagatcaatggtgtatccccttcttgttccacatgccaaagtgtgtatgatgcttatggtatgccaaatgatgtgatgatgttatgttatgcaaaatgataattgtgccgaatgtacacacattcctgcaataaagcacacaatctttntatatcagcgctgactttntgctggaagcctcccttaggagcttcttcaccttttacttc

SEQ ID NO: 17584 - DNA, 373 bp, Zea mays
  unsure (1)..(373): unsure at all n locations
ttgttccagtgcacgcaagatcacgaagaataccttcatgcgtatgtccaaagattcttgcgtttgagggcacaagcgccaatagtacccaatgaaattgtcattgaggccatgatcaaggggcttctgccaggacctatggcctaatactttgccaggaagccccctcagaccctggagaaatttcttcagaagatgaatgaatacatccgcgctgataatgactttcgtcaaagaagggaggaagcctacagattctccgagatgaccagnggcttcggaggaaggattcatccaaggcatgtcagatcaattcactccacctagaatgacgacagagcangccagcaacagaggccacagtattcctcac

SEQ ID NO: 17585 - DNA, 399 bp, Zea mays
atatggaacataagaatcaaaggttgatacctggaataagccttcaggttgggccatattctcctttgaatcttttggcagcagcactcctttgatcctttcaccagcagcactcctaagtatgccttgaatatatccaccattacagaaggggtgcagaattttcagaaactacaagccaattctcatgtcacattatcaggggcagcagtgcttaaatgtctttggttgcccaagagatgaatttcaaccctgttagaagttcagttctcctactcctctaagggtttggtgttggatacactaatgccgcaccagctgaattcacaagagaacaaaaaaacaatgagataattaggcatcatatcatgggtattacaatagtaagtattaatcatc

SEQ ID NO: 17586 - DNA, 325 bp, Zea mays
tctaaagggagagacacatttgtgactaactgatacacccagtctatgtggggttggccgaggcccaacaaattatggttgcccggagcccaacagttcattaagcacacccaactgagggaaaggcccaatcgccccaaaagactagtccaatgggggaagggtggctctcccttttaaagtggcttcctccttccaagttaagcgaggtgggataattctgagggtcacacggtcgtcgtccgactacaattgggccaactgggccaattgcgtctttgccaacgggtaatagtggaggatgtcctcatcattcccaccttct

SEQ ID NO: 17587 - DNA, 437 bp, Zea mays
agcttgcatgacgcgtgggacccagcccccgtgtcgtagctggaggaccttggagtgtgttggtgaagactcagtccgcgacggctgaggacgcaagtggggagagtcgcatttaaaaagggggcgacccccttggatggcagccatgccttcgcactcccctcatgcattgcgcccttccaccttccaagcccccagatggggagcgcccgcgttgctttcatcttgctgctgttggaggagcacaacttcgcggaagttggtacctttcagccatcgctcggcttcaaggattttcatcaggcagcctggctgcatcccctcgccgatggtcacccaagatggtgaccaccagtttgatggtggggagaagcaagccgggttgcgacctctgccccgccctcagcttcaaggatcttcatcatccgtgctggggc

SEQ ID NO: 17588 - DNA, 439 bp, Zea mays
  unsure (1)..(439): unsure at all n locations
agcttagcanaagaaatttctagaatcaagaatattgagcttatgcctaagtctggtaaaagattgttcatcaagtggcttggtaaagatatcggctaattgatctttagtattaatgtaagaaatctcgatatcccccttttgttggtgatccctaagaaaatgataccgaatggctatgtgcttaatgcggctatgctcgacgggattgtcggccattttaattgcactctcattatcacatagcaaagggactttggttaatttgtaaccgtagtcccgcagggtttgcctcatccaaagcaattgcgcgcaacaatgtcctgcggcaatgtactcggcttctgcggtggaaagagcgaaccgaatttgcttctttgaagcccaagacaccaaggatcttcccaagaactggcaagtccccgatgtgctcttccta

SEQ ID NO: 17589 - DNA, 309 bp, Zea mays
  unsure (1)..(309): unsure at all n locations
ctgacattgtctctctgttggaagccaacgccatccttaatgctatggcgtctcctattataaagcatgctatgagcaaatttaattntnttattttctagttcatgctcagcaattntagcatctagtttagctatatgatcattntgttgtttaatcatagcaatgtgatcattaatagcatcaatattaatgtctctacatctagtacaaatagtaacatgatcaacactatatgtagagtgtttgcaagcaattaattcatcaatcttagcatgtaacatgccattctcgtctctaacggtggaa

SEQ ID NO: 17590 - DNA, 440 bp, Zea mays
  unsure (1)..(440): unsure at all n locations
cagctntatcaaatggacgtgaagagtgccttcctaaatggactcttcaacgaagaggtctatgttgaacaaccctccgactttaaagatagtgagtatcctaaccatgtttactaactctctaaggcgctntacgggctcaaacaagccccatgagcatggtatgaatgcctaagagattttattatcactaatggcttctaagttggagaggccgatcctacactctttaccaaaacactggaaaatgatttgtttgtatgccaaatttatggtgatgatattatattagggtctactaacgaatctacatgtgaagagtttagtatgatcatgacacaaaaattcgagatgtcaatgatgggggagtggaagtatttcttaagatttcaagtanagcaacttcaagattgcaccttcattagccaaacgaagtatac

SEQ ID NO: 17591 - DNA, 422 bp, Zea mays
  unsure (1)..(422): unsure at all n locations
gcttctatcataacgctccctctcaacctttctcttatacatacattcctttatgcccatattggtatccatatgatgctcctccttatggatcatacggtgctcctctttcatttgttgctccatattataccctcctacatccactccctgtttggtgctcctcccccatatgcttcttgtcctccattttatcctcttgtagtcacggtagagcccccaagcagccatagtgatacagtttcgaaccaattttcttactctagtgctaatcaattccaacgacgaagggctagacaaagatagatgacaaaagcctagttagtacacatattttttatgaattcgatgaaattgttagatcaacaataggtttctaagtcatagaatnatangttcacatgtggctactatactttatg

SEQ ID NO: 17592 - DNA, 441 bp, Zea mays
agcttagttaatatcagattttggactacgcttatgggttcttttccttgaatgatgtaaccctgtgaacctttgaaatctgtgggatatttgtcaccatgttatcttcatttcgaacctaatattatgattatggcatttttccttccatatgagatgatatcttgtcgttcgaaactgtgagttgggataacaatggcggcaatctcttttttcagatggcagctaagcagcgtcgcgggcataacgagcaggttcccccgccaccttctccagctcccacagtgcaagagctgatggcccagcagaatgagattctgcgacagctcttgcagcgccagccccaccctcagcagcatggtggaggccagcatcagcgaccttcgacaatggcaacctaccaggagtttctgagcacgcagccacccttgttcaccaagg

SEQ ID NO: 17593 - DNA, 288 bp, Zea mays
gctgccagcctcgacccactggacttaccagaggcccgagatcgatctcaccggacttcggtcttccgccgccgcgtgtggaccgagctatccagtgagtctacgcccaattccttgtgctcatgtcttctctggcattccgtggaccttcctgacccatctgattgaactatctcgccgtgaccaagccggtctactcgccgtcgacgagcattcccgcctgcgcgcgtggaccgaccgactccggtcattttcgacggcgttccgcacaaccgtgtgatccccgag

SEQ ID NO: 17594 - DNA, 454 bp, Zea mays
  unsure (1)..(454): unsure at all n locations
acctgaggcatgcaagcttcaatnttagcgtcgatcccattaatcgtttggaacacgatttcctaggtcgnnccgccgccgtgaccaagaacaagcttcacttagggtcaaatcaatcaaattaaatgagggcttttactcggaccaacttatatttaatgtttatgagcctattactccttgtacaggtcgccaccgcccagaaaccatggctccggccaggtgtttggcttgattccgtcgagggccgcgatctgtaaagaaatagaacttgaagggggtttttgtgaatgtcagtgacacaaggaatagtccgttggacgcctttcaagttatttaaaacatcgagggccttattgcaagaccagcaacgcgggcgctgccgcgagggcgtgggcgtgcattcccccttctgcaggccgggtgggctgaaatcagcccaacactatacatt

SEQ ID NO: 17595 - DNA, 296 bp, Zea mays
  unsure (1)..(296): unsure at all n locations
ctcagcttctngaagagcaatccttaacatatccnctggttatagtgaatattgttaacttatatcatctctttccttcagggtaattttctttcagacaacgaagcttataacaggagaatagaagcaagagctcgaccatatgtcataatagaaggggagttatacaagcgtggggtctgttccccattgctcaagtgtttatccagatccgaaggtatagaattaatgaaggacatacatgcaagtctgtgtggatctcacattggatctaagcccttgcttgggaaagtttt

SEQ ID NO: 17596 - DNA, 266 bp, Zea mays
ccgtgaacaagaacaagcttcacttatggtcaaatcaatcaaattaaatgagggcttttactctgaccaacttatatttaatgtttatgagcctattactccttgtacaggtccccaccgcccacaaaccatggatcccgccaggtgtttggattgattccgtccagggccgcgatctgtaaagaaatagaacttgaatggggtttttgtgaatgtcagtgacacatagaatagttcgttggacgcctatcaaggtatttaaaaca

SEQ ID NO: 17597 - DNA, 239 bp, Zea mays
  unsure (1)..(239): unsure at all n locations
tcttgatagagcaatccttaacatatcccctgttatagtgattatnggagaactgagatcatctctttccttcagggtaatattcgttcagacaacgaagcttattacaggagaatagaagcaagagctctaccatatgtcataataaaaagggagttatacatacgtgtggtctgttccccattgctcaagtgtctatccagatccgaatgtatagaattaatgaaggacatacatgc

SEQ ID NO: 17598 - DNA, 446 bp, Zea mays
  unsure (1)..(446): unsure at all n locations
agctttccaaacatagataagatntaccaggttattatcaagaggagggggataattatctcctattgtagaagtaattttagagcacttgcattaagctatagcagtttagctataaatcttggagctcgaaagttaaggaaaaagagagatccaaattacctactttcagcacacgcacgagtgggagggggattaatcgatggatttctaagcaagccggggtgcgagtgtaatggatctgatgcattgcaactgaggatgccttctcactgtccctcactcgctcttcattctctccttatggcctcctgttgtagtagtaacatcaccatattacatgctttcagcacacgcactctagtgntaaacacttagcgatctatggttggagcagattttaaccagtaattaaatccttatcatttatcagtgagcactattac

SEQ ID NO: 17599 - DNA, 374 bp, Zea mays
  unsure (1)..(374): unsure at all n locations
cctacctacatctatctgagcttttgatggtgtcagattcctcagcctctgtgctctttacttcttngataagctagaccgcaccaaatcatcatgaacacctcagattttctctgatcttcaccgtcattgtggacagagagatttctgcccggattcgtgcaattagtcgagggattagggtcgcctggggtagaatttggtgttagccgagttagggcaccagccattgcgtgttctggccagtacaagttcgtcggaggcatgctcgtcgtcgttcaccgtcgtggacttggcgctgcgaagaaacagaaatgtangggcataactgtgaatatcagagacacagatgaagagtgcgcacggttcttaac

SEQ ID NO: 17600 - DNA, 422 bp, Zea mays
  unsure (1)..(422): unsure at all n locations
agcttaagttatggccatgccttgttcattttcttgggccataatctctttgactctctacttgtaacccttcttacatgtggagtaactctntgtaaattgtcatccttgaccagtctatttgtgttgtgtgagatttcttattgattacgtctggtattggcgttatgactaaaattgatgatactgcaatgaaaccggnggccttctgtgtgtgcacacacacggttgtgctgctcggcacacgctagtatcacagttggtagtcataatccattatgagattatatcaatatgttatctctacacgaattgtttttaccacgtgggattcattattggtgccagttttgtaatggtgtcatggttagggacttatggtaccgcggcgaaactgagggcctnctgtgaatgcgcacaca

SEQ ID NO: 17601 - DNA, 370 bp, Zea mays
tgtgaagattcttcattccaacatgtgctagtcggcgatgccttagccagcccatgttagtcttagcaattaagcaagtgtcgagttcagctctatcaaaatctaccaagtaaagctgaccctctaacactcccttaaatgctattgaatcatcacttcttctaaagacagtgacacctacatccgtaaaaagacagttgtaacccattttacataattgagaaactgaaagcaagttataatctatagagtctacaagaaaaacattggatatggaatggtcaggtgatatagcaattttacccaatcccttgaccagaccttggtttccatcctcgaatgtgattggctcttggggatcttggttttc

SEQ ID NO: 17602 - DNA, 402 bp, Zea mays
  unsure (1)..(402): unsure at all n locations
tattaacgcaagctctccatcttcaatgatctgaagatccaagaatgacccaaaggccgcttaaattactatgtctgatactcatatcacctcccggaagatattgatattgtaggaaacaaagaattatcctgcgcagagaaatcaaagcctacgacatggtagaaagccaaaggatgggaacattcatgccttcaacggcgactgacctaaaatatcagttcttatgtgtcttagcggaggcgcatacaaagcgctacagataatatgggaataagacaccattctttagagaaaatcctctcatatggtagagngcatattcatcatctctatactatggcgatctacatgcttgacattattgcacaaacctcatagcgtgctatacactaattatca

SEQ ID NO: 17603 - DNA, 280 bp, Zea mays
cttaaaactcagctcggaagaatcttatcccacatgggctactcggcggtgcctgagacaacccatgttaggcttagcgattaagcaagtgtcgaggtcagctctattaaaatctaccaagtatagctgaccctataacactcccttaaatgctattgaatcatcgcttcttctaaagacacgtgacacctatattagtgaatagacagttggagcccatatgacataattgagatacggaaagcaggttgtcatccaaagaatcgacaataaaaacatt

SEQ ID NO: 17604 - DNA, 441 bp, Zea mays
  unsure (1)..(441): unsure at all n locations
agcttgagttcttcgctccctacacactacagttatactgtgtgggagagagaaagaacaggacacttatcgacatggcgaggacgatgcttggagagttcaagacgctcgagcggttttggtcggaagctgtgaacacagcttgccacgccataaaccggctctatctgcatcgtctcctcaagaagacctcctacgaactccttatcggtaacaaacccaatgtctcttactttcgtgtatttgggagcaaatgctacattgtggtgaagaaaggtagacattccaaatttgctcccaaagctgtagaagggtttttactagggtatgactcanatacaaaggcgtatagagtcttcaataaatcatcggggtggttgaagtctctagtgatgttgtattgatgagactaaggctctcaagagacaagtgatctgatga

SEQ ID NO: 17605 - DNA, 350 bp, Zea mays
  unsure (1)..(350): unsure at all n locations
aagccgaagttcaaaaaagttcggagctgaaagaattcttgtctttatttcataataaatgcctggagttcagcaatcgatgcattcaacagttgaagcacgtgttccattttgttggagccagtagcgaaaagttcactccttcggctgaagacctgcctggtgccttcgagcatattgaaggtgaaattaatgatcttgacgaagttatagctgggcatggcgactnttgtgccctggcagcttctcggggcacagctgttgcctttatgaagtctggctgtgaacacganaagaatgttaatagacccaacttcagcctatcaccagcagacctagataacattccc

SEQ ID NO: 17606 - DNA, 378 bp, Zea mays
catctctacgctcgcctaagccattaagataggcggtcatgctcaaacttctagaaagagcgagagagcaaagcgaagctcgtcaaaggctagaagatattctctccataaagatgcaacactttgacgagttgactaaagaacatgaggagctaaagtgctctcatgttgatttgggccaaaggtatgaaactatttcaattgagcaagataacgcttcacattgtatcgctcaattagtaaataggaataccttgcttaaggaccaagtggaaaagctagaagttgaaaatctagcttttcaagataaatatgatatgcttctatgttctcatgaaaatcttatggataatcatatcatattaaacattgctcatg

SEQ ID NO: 17607 - DNA, 182 bp, Zea mays
tggtggatctgatgacgatgataatgactacgacgcctttctcatcattgccatttcacctccagtgtagacactcgtcatagcgctactgctagctggtgttctagcttccggatctgtcgagacgtcctcatgcgctctactaccactacgatacgctccactactggctggatgctgat

SEQ ID NO: 17608 - DNA, 413 bp, Zea mays
cagcttgaaaaggggtttccttcatcattttttgatatgcaagtacacctaatcatacatctcgtggatcagataaaaatattatggccactatatttacatcatatgtttcaattggagcgatacctgcgagtattaaaaggttatgtgcgaaatcgcgctcacccagagggttcaatcatggagggatacactacagaagaagtgattgagagctgtatatattacatcagtgacggaacaatgataggtgtgcctatacctaaacatgagggtaaactatgtgggagagggagaatgggcaagaaaacttttcgcattgaggattacaagctagtacattgtgctcatggtagtgtactacaacatctcacgatagccgagccttacatagaggaacacctggatgagct

SEQ ID NO: 17609 - DNA, 271 bp, Zea mays
  unsure (1)..(271): unsure at all n locations
taanacatctgaatatactgggctctatttacattngcatacacatactgaaccggtcaatcattatgaaaaactgaatatgtttcaataaaaacagcccttgctgtggccaaataatgtgttaactgtaatgctctgaaatacataaatgtatgcactaaacagatatgaagatttatatatgtcggcgtttcgagaccggggggtccctaatccgacgagtgagtgtgccgcgtgccccaacccatatgggtccagcgcgtgggccaac

SEQ ID NO: 17610 - DNA, 298 bp, Zea mays
  unsure (1)..(298): unsure at all n locations
agcttgggtcgggcgaggcggagaccaccttctctaggccgatgcggaggccgagccccggggccgggagaggcggagcttcctatggcgcctgaggctggactcggctactgtcagcctcaccctggcgggtggcacagcagtcggagcagggcaggcggcgctgttttcctatcaggtcagtcagtggaggggcgaagctntgatacaaccttttacctgagcctagaacaccctacattccaaatatataactaaataagaaatgtttggtaaggacaaatagaaaactagaagt

SEQ ID NO: 17611 - DNA, 345 bp, Zea mays
  unsure (1)..(345): unsure at all n locations
tctacgtatatatntcgtattaattacaagatccaactctaacgatctatggctctagagttatcttggtcttgcaggcgggattgccataagactggtgtccacgctgaggtgagcggtacgggtgctgagtcccgacgggagcggtggaaccaccatccagatgacgacgttccgcgcgctcagcccgcagcagggcgatctcagcacgggccctactcagcttatctaatgcatggtccagctccgtgtttagcacggcggctaggttgactgtgctgctcaacctangatggccctcaccgacaggtgagacaatcacgcctcctgtgctgccagatggac

SEQ ID NO: 17612 - DNA, 449 bp, Zea mays
  unsure (1)..(449): unsure at all n locations
agcttaatgcccccaagagattatctaattttgttaagggttaggctcccatggtttaggatagatagggttacatttatatcctgagatttatccaaaacataaaattaataaagtctatgctagaaaacctcattctatttctcatcatgtttttatgtatagaaatgaggcatctagctctaggcattaaactcatatcaaaatgcctaaaaagaaaattgttagtgcatcaaatgagcataacatttcatttaaaacttttgatgcttcttatgtgctcactaacaaaacaggcaaaatagttgcctaatatgttgggggcaaacacaagagtccaaagatttgtgtttgggtacccaaggtgcttgtttctaatgttaaaggacccaagaccatttgggtacctaagaacaaggcctaaacttgntttgtaggtttatgcattc

SEQ ID NO: 17613 - DNA, 496 bp, Zea mays
  unsure (1)..(496): unsure at all n locations
ttgccaaagggcgcatgaattataccttgatatcttctcgtattgtcttatcattcttcacatagaaccattctgtcatccagtctccgggccatctcttccgaaaggttggcacggtgcagcttgacccggaccgagaaacgaaactgtagcagccaaaattgttgtgatactgttccttaccccaaggttttgtttcatatgataattcatgtatattgcagaagctntntgcgtcaggcttcagaccttggcttctcacggcccacacgaagatattcagctntataattgcctccggagtaagttgatggagatagatttcgaacaattttagcacctccacaacgaagctgctcaaaggaaatcgcagtccagctttcanaaagcttcngtacactacgacttcattctcttcagggtgtgggcaagttttttccccttcgtcggccctcacaatggacaaattccgganatacccttctctcatattgac

SEQ ID NO: 17614 - DNA, 396 bp, Zea mays
tgccaacacagcacttctggcgttatcgtggtcttttatatggaacttagagatctacctacatatagcactattgccttcatgggtatggcacgcttcgcgagagaatatgggagaatgtcctgcaagaataccatctcaacgaagcacgactgaaggtcggaccttatcatcgctctaagtacacattttaagtgtcgggagataatattcttctgagcccatatgatgcactggttaagaaagccttgaacatttaagtgatgaactgcttggggcttattcgaaggccgaagatactgcactgtcagtagccttcggaggccgaaaaaagaagaggctgaatctggtgtatgatgcaatccggttcgtctaccctgactatcggtaccccat

SEQ ID NO: 17615 - DNA, 359 bp, Zea mays
ccggagtagaggttgccagcgacatagatgatggttcatcttctgaatcgtgctgcgttttacgcggcagctatgtgagggtttccacgacgttcgagcgaggcggcgtctacacgatgcttgagcgaggccggtgtcttcctcgtgtttgatccggtgcccctgtactcatgatctgttaccgtgctccgttgagatacccatggagagtgatccaaccatgggatctgttgccgtgcttcatacgttactagtgagtctgtcattatgttccatcacacatcgttgattcttgcagcatattattttactagaatatccttgtaatcaatcaagaataaaatgagtgtgtgtacagc

SEQ ID NO: 17616 - DNA, 453 bp, Zea mays
  unsure (1)..(453): unsure at all n locations
agcttctttatggcctacaaggtggttcttcatttcctgttatgtcattagaaacatgcccttgcgagccattatactcatcaaatgtcacgtctattgctatttcaacaagaccggtggcattgttgaaaacacgatatccatgcgcctttgatgcataaccaagcaagaatccctcgtccactctaggagcaaactttgagctcttgattttcttgttaagaataaagcatttacaaccaagtgctctaaagtaatcaactttaggtttgttaccagtgagaagctcataagcagtcttcttatagaccttatgaagatataaccggttgattgcatgacaggcggtgttgaccgcttcagcctagaagttgtcaggtgtcttgtattcatctaccatggttcttgcggcttcaattaatgttctatntttcctttccactacaccatttt

SEQ ID NO: 17617 - DNA, 359 bp, Zea mays
tcagctccatctatgttatggattggctttgagtcagtccagtttccttctgtccttctggcagcttcctgacttccatgaatagcgatgggtccttgatccgaacgtatcttcatgcaaaggtaagcaggatgaagaatttgcttcaaagcattaagggtgccacgaccaataattgcattgtaagggtactccatgtcaacaatgtcaaacacaacttgctcagttctagtgttgttgatgaatccgaaggtcactggcatggtgatcttgcccagtgctacaatctgtcttcctccgaagccacagagaggatgtgtagcatcatgaatcttatcttctgactcttgcatttgtct

SEQ ID NO: 17618 - DNA, 443 bp, Zea mays
agcttgaacactggtaggtcttttgggttctaaaaccttgatgttgttcaacatacactagttcactaatcttaccatttaagaaggcactctttacatccatttggtagagcttgatattatgtgcacaagcataagcaagtagaatccggattgcttctaatcttgctacgggagcgaatgtctccccaaaatccaatccttcaatttgagtatatccttgtgcaactaatcttgccttgtttcttactaccacaccatcttcattgtgcttgttgcgaaacacccattttgtaccaataacattggggttctttggtctctcaacaagctcccaaacttcatttcgagcgaagttatttaattcttcatgcattgcattcacccaatcaacatcaagtagagcttcatctacacgggtaggttccatacaagatacaaaa

SEQ ID NO: 17619 - DNA, 342 bp, Zea mays
  unsure (1)..(342): unsure at all n locations
tacgctcctgttgattgaaccactctaaacactcgcgtgttcttgtgttcatccttccatcttgcataacaggcaaaacgcttaggcccctcctcatcttatgatttagggcgggtgcactccgccacccagccagagattttctcttcgaaaagtggtgagcgacatatgctaataatattcgaattgactctagcctatccacaggagcaaaagtctccttgaaatccaaacctgcgacttgggcacaaccttntgccacaagtcgagccttggttcttggtaccaatcgtgcttgtcttgcttggtgcggaacacctacttggttaccacaacattttg

SEQ ID NO: 17620 - DNA, 443 bp, Zea mays
  unsure (1)..(443): unsure at all n locations
agcttaaagacatgctcctcacattatttatggttntcaaatgaagcctattaccacacaagctcttttccaatctactctagagcaagatgagtatctttaggcttatgttcaaatgttccttcggctccgggctcaagcaacaactttacttaatgaaattaacgttgaaataatgatcaaggggcttcgtccagtcctagtggcccaatacttcgctagaaaacctccttaatccctggagaagtgtaacaccctgaatttggggtatacaatttcttctctaatatctaccaaattcacgtgttacctcttttctcctctctatagatttcttttctcttccttgtagtagaggttcgattatttatttggagatgtattaatactttagtagattaaaccctacggtacacatgaaatgttgcatcatgctgagctta

SEQ ID NO: 17621 - DNA, 391 bp, Zea mays
  unsure (1)..(391): unsure at all n locations
agctacttgagccatgtnagcccaaaatgtgtaagatgaatattgattaagtaataaataaatctatgcatatgttggcattttggaattaggaacctttagagattatttagtttttttttccttgtacatattcaattcatagaattatgctggtcaaataacaaataaataattacagaaatatgcatcccatgccgaagttcttgtaatgttgcatttgtactttaaattatgagacaagtttaaatttataattagaatttgaaaatggaaatagganaggaaagaatagataaggaaaagagtatatactataaagaagaaaaatatatagacatatctatttaaactagtacctttatttgtgcatatgacctgtgtgaaatct

SEQ ID NO: 17622 - DNA, 442 bp, Zea mays
  unsure (1)..(442): unsure at all n locations
agctcgaatgctattaggattgctaggcaaattgatctatctatcagngactaccatgatctaatgatggacaatatagatgaagtggccgacaagagattggtgtctgttatggagattgagaaagacaagatcataattgtcaaagcctacaacaataaggtgaaagctaagtcattccaggttggagatctagtctggaaaactatcttgccattaatgagtatggacaggaagtttggcaagtggtccctaatctgagaaggaacttagactgtgtccagcagttcacccatatggttaaccacaacactgttttcgtactatttaccctatagattgcattgntcgtagagtgaagtttgaatatgggtatgaggatgggtaagctggtagagataaccttacagagctacacaggtgatctctggaatgcatatat

SEQ ID NO: 17623 - DNA, 421 bp, Zea mays
  unsure (1)..(421): unsure at all n locations
agcacatttgggactaaccaatggtcattatgttaaagacagggtttatagcgcatgtcaagcacggaagcaagttggtgttcaccatccacacaagaacatcatgatgactgacaggccgcttgagctactccacatggatctattcggcccgatagcttacataagcatcggcgggagtaagtactgtcttattattgtggatgattattctcgcttaacttgggtgttctttttgcaggataaatctcaaacccaagagaccttaaagggattcctaagacggactcaaaatgagttcggcttaaggatcaaaaagaataaagcgacaacgggacggagttcaagaactcacaaatagaaggcttncatgangatgagggcatcaagcatgagttctcttcttcctacacaccacaac

SEQ ID NO: 17624 - DNA, 446 bp, Zea mays
  unsure (1)..(446): unsure at all n locations
agctttgtattgcttaaccatcgaataaccttcttgccacctttgngntaggaagccgaaggtatngttgtaaacttatttgatataaaggaggatgatataaaaatgtcaagacatacgagatgagtttcacactctgttttatattgtcgatacaatctatactgttcaactcacatcccctctccgaagaccttcatcctctgtattaacactttggagaagtgttaaaataaagacggaggtttacgtatttgatttgtgttgccttgattttcgataacctaaggggattgaaaccaagtatatatatactagttaattataaatcaatttaacactagaaaaaagaaataatactcacaattacatataccacggtaattaaacaccaaattaacaaagttcattacttattagttcattcaacacaggtataggctttg

SEQ ID NO: 17625 - DNA, 283 bp, Zea mays
tcttgagattcccatgtagcctcatcttcagaatgttggttccactgtatcttataaaacttgagagtttttcttcgggtgaccctgtcctttcgatccaagactcgaatagggtgctcatagtatgtcaagtccggttcaaggacaacatctgttacttcaatggttcgatcgggaacccgaagacacttcttcaattgtgacacgtggaacacattatgcacagcagacaatggttcgggtagttgaagtcggtacgccactggtccacattgctcaatca

SEQ ID NO: 17626 - DNA, 442 bp, Zea mays
agctcgcataggctacttcatcattactagagttattatcactcgaagaagcctatggcatagggctttgagtatctaccttcgtctcctttgccatgaggcaagcgtgaccctccttggggaagaaagactatttgttgaatgctgtggcggcgagttctttgtcgttggagtctgacgaagaacaatctgagtcccactctttttcaaggtgtgcctcgcccttagccctcttgggaaccttcttattctctctcttcccattctttccttggtcctagtcactatcattatcgggacagttagaaataaagtgaccaatcttaccgcacttaaagtaggagcgctttcccttcagcttgctcttggtgggatgctccttgcgacctttgagcaccgtcttgaagcgcttgatgatgagggctcattcattctcatttag

SEQ ID NO: 17627 - DNA, 346 bp, Zea mays
gcgcccgtggatatcttgagagagttgagcaatgcgtcttctccttagatggcttttcttcttgttctcacacaatttcttttgtgaccctgcatcttgatgcttattcaaacatgggctttcttttgaacaacaggggttagcacatggtgatatacaattcaaatgcgcacacgtgcgagaatgaggttcacatgaatttaagttcgtaattataacctcatgagcaacattaagcatgatatgatcatcaattattttattatgagaatatgacaacacatcgtactcttcacctagaagcaagcttttctaaattagaatttctacttctctctcaagcatt

SEQ ID NO: 17628 - DNA, 344 bp, Zea mays
ttattggtaacagggcaggtgaatggatcctctaagtactggtatgcccccggttacctgctacacccaaaatattcccccttacggggtcattacagtgacgagaagtacaatctgattagacatactattaaacctaccatgaggatggcttacaaatcggcccaaaaagagatagagcgcagcctatgccccaccattgaacggtgtggcctttccccgtacgcggcgcccttcactctgcgaagtccagccttcgacctcgctaggactgtcgtcatgcagaaccgtacgagccaatgggggtgccttccaaggctgcaatgagcccacttttaaatagt

SEQ ID NO: 17629 - DNA, 344 bp, Zea mays
cgcaatttgctcatattgatcgccgccgcccatgaactctataaattgaagccaccacacgctccgtatggtagtcaagtacctcgacgtccagtattgctcccagtggttcaccgacgagctctaattccaagttttccccaattccatccgccgcaccgtgaaaactagccctcccgtggccagctcgttctggtgagtcgccatccaattcgtatactggtttcgtgcctctgcatgcttgtgatgctctcggtggcgtacgtttgctcagtccggccattggtgtacgggaacgtgagctcgacaccccggtttccgccctgagcgtgggcagagcaatt

SEQ ID NO: 17630 - DNA, 441 bp, Zea mays
  unsure (1)..(441): unsure at all n locations
agcttaaacacatactacttcattntttgcggttgtgtagcaatattgtcaagatggtaaaagttataattttgtaagtcaccgctcaccaagagtccaagatagtagaactggatgaagttaaatgcattgaagtattgtttataaatagagtatgacaggtcacttgtggtatactaaatgttaatctactgaaagagatgtaaaaacatgtgtatgctattcagcttgagcctgtggtttttttttgcatgtctgaaccatgttttatttatacataatcataaggtatttatagtgtttgttgtttgcagacttatatcttaatgaaatgataaagagaataaagggtctattgaggctattattatatcttgctgattaaagagtgtaaagggtctgttgaggctaacagcatccaaacaaacttgaagtggacgc

SEQ ID NO: 17631 - DNA, 401 bp, Zea mays
  unsure (1)..(401): unsure at all n locations
ttggcccaacctgcaggctcgcatcctaccctgaggtgagcccggtggccattgtcggtaccctaaaactagggtaccccttactactgtatgaagatgcagtacccacgcggctacctttagtcgcatggtaaaaaggttgtacgtgggaccaatccatgactcacccaagcgtcgggcgactactctgggccagcaacagcactgacctcaccacctgtgcaggtccggtaccgctgcgtgtcaagagagctgcacactctgtggtatcaccagtgggcccagacccttgtgcggaggtgccggacccctgtatatacagaccgggcctacgggtaaggtccaggacctccacgggcgcaaaccggacccctangatgggatccggacccctctatgtg

SEQ ID NO: 17632 - DNA, 429 bp, Zea mays
tcctaatgcttctagttcatttaacctctattgggacaacaatggggctattgcgcaagctaaggagccaaggaaccaccataaaaacaaacacgtactgcggaagtttcacctcatacgggaattcattaggcggcgtgagataaagatatgcaaaatacatacggatttgaatgttgctgatcctttgacaaaacctcttccacaacctaagcatgaggcacacatgagatctatgggtattagatatcttctagattaactctagtgcaagtgggagactgttagaaatatgccctagagataatcatagagatgagcatatttctttgtatccatgatatatatattgcttaattgaatatccatggaagccaccttgtattgattagcaattatgtgaattgtttgtgagaatctttacttata

SEQ ID NO: 17633 - DNA, 397 bp, Zea mays
tcatgcaactactgccagaaatgagaggtgaactacgttcctcggtctgacactatcttctttggcacaccatgaagacaaacgatctgggacatgtacagatttactaatactgcatttgtgtagctagtattgacaggtatgaagtgggctgacttggtcaagtggtccaatacacctaaatggaatcgtagccgctcgagtgcgaggcaacccaactataaagtccatcccaatctcatcccatttccactgaggaatctacaacggttgcaacaaatcggctggcctttggtgtactgctttgattctctgacaactcacatataaccacatgctctgcgatcttccttttcatatcgtaccaccagaattatttctttagatcctgatacat

SEQ ID NO: 17634 - DNA, 448 bp, Zea mays
agcttcggattcccgacgctagaagacaggctctcagtgttatctctttatgaatcggccgacagcttagcatacgtcagcttataggtgagagaataagatttttgtacttaaaaacaatattggtagttgcttatacttaataccacactccttttgcagggccttattcttaacatacgccctcagggcgcataaaatcattgaagacgagggatgtaccatggccttgaataaccttcgttccgaagtaattgagctaatgaacgaacgtcttgtaaaagacaaaatattaaactcattgataaacaagatataagaagacgaggctacttcaaaagcccaagccgaagcccagaaatgcgaaattgataatcttcatagacagctggcagaagcaaaattaaaatgtgcgattgccgaagctgaccgagacgccagtgattac

SEQ ID NO: 17635 - DNA, 449 bp, Zea mays
  unsure (1)..(449): unsure at all n locations
agcttgtgaacagtgtggcgcctaagatcagatggtccactccgaggcttgtactgtatgtgacttaggcacagacggttcacagcctaaatacacaaaaatgcacagtccttgtccatgttcaatagatgtaccgcggacggtccgcaccctatgatcgaacggtccaccacacaaaaactatgcacaacatacaaactccaagtttatgcccatattagaagttctaactgcggatggtctgccacactggctcanatggtctaccacctgtcctttgatccatttttgaatattgtatcattctatcttcttcccagagctccaacatcttgtaatggtcatcaagaatatatccaaacactagaatgacacaaattccaaatccttactgatttcttacttttggcttcttttatcaaaggctgcacaacaggtgagcccttcac

SEQ ID NO: 17636 - DNA, 446 bp, Zea mays
gcttatggttttctgagatgataggagcttctgactttatttcaccctaagcatgttagatcaatgcacaactccagctagagcgatgacagaggaccccagcttcaaaggccacaactaagctcacaatcctcagggcaacagcaaagctctttgaggccaccagccccaaggggcatacgaggcaagggcttcggaggaatgtatggggatcagcctataaagctctattgcttattctatggtgaagacaaaggccacactacaagaacctgctatgtcaccattcacaaacagaaggagattgccgaatcacaggcgcggcaaaatcaactgaagcatgtcttacatactacttcgtgctactctgcctatataccagaatacatgggtaatcaacctgcagcctctatagcttcggaagtcattcaccagcttcctggcct

SEQ ID NO: 17637 - DNA, 454 bp, Zea mays
agcttatgaagattcttcattccaacatgggctattcggtggtgccagagccaacccatgttagtcttagcaattaagcaagtgtcgagttcagctctatcaaaatctaccaagtatagctgaccctctaacactcccttaaatgctattgaatcatcacttcttctaaagacagtgacacctacattagtaaaaagacagttgtagcccatttgacataattgagatacggaaagcaaattgtaatctaatgaatcaacaagaaaaacattggaaatggaatggtcaggagatatagctattttacccaaaccttggtttccatccccgaatgtgatagctcgttggggatcttgatttttctcgtaggaggagaacattttcttctcccctgtcatgtggtttgtgcacccgctatcgatgatccaacttaagcctccggatgcataaacct

SEQ ID NO: 17638 - DNA, 303 bp, Zea mays
  unsure (1)..(303): unsure at all n locations
agctgtcgtatcatatacccagtctgtgggttcaccttgtacgatatgctctctaataanatagaggcacctgacaccttcttgccactgggcgtgtagtaaccatggctaacatggccgcccgacggtggctccagccccatgatgcggtccttgggttgaaggagcccagtgtatacagccaagttggcagacgtgcacgagtatggctgcacgttgacgccccagcaagcatggtcgagaccgaaggcggtgagagcgcgctcatggcagagccgttcgatggcgtcgatgtgctgattc

SEQ ID NO: 17639 - DNA, 363 bp, Zea mays
agcttgccaagccctcggacccgaccggacttcatcggaggcccgagatcaacctcaccggacttcggtcttccgccgccgcgcgtggaccgagctatccagtgagtctccgcccaattcctttcgctcatgtcttctctggcatcccgtggacctccctgacccatttgattgaactacctcgccgtgatcaggccggtctcctcgccgccgacgagcatccccgcctgcgcgcgtggaccgaccgactccggccatctccgacggcgttccgcacaccgttgtgatccccgcgacctccccttcatcctcgaccacttcaccggagcagtctcgccgtcggtaagcccctccgcccttttc

SEQ ID NO: 17640 - DNA, 446 bp, Zea mays
  unsure (1)..(446): unsure at all n locations
gcttgtctttctgttggacgacgtgcggctntaggctaaggactgggtagttgaacgtcaccaaggtgccagtgtcagaatgcctggtcccgaggttgagctgcgccaaaaccgtgtcaaatggatttggtttgagttcaaaatttcccagaatgtgttcaaggtaatttggcacgattttgatatttggatcttctggcttcgagtttggaaaagcagagaacacagatgatctttgaggagaggtctgaaattcagaaattcagaaacctgaatttctctacgggttcattgatcaacggctgttatggggaattaatngagttaatttggctagccttcttaactttcttgtgctaataaaattcttacttattattggctactcaaatataactttcatcctttgcttattttgatttgtcatgggtcactaggttgagtag

SEQ ID NO: 17641 - DNA, 403 bp, Zea mays
  unsure (1)..(403): unsure at all n locations
aaaaatatttccaccaggtttcttcaatccgatgcaacatctacttgttcacctaccatacgaaactaaggtaggaggtcctgtgcaatatagatggatgtatcacatcgaaaggacactaaaaaagctacgtgcaatggttggtaataagagacgagttgaagggtgcatcgctgaagaattcaaatacaaagagatagcatcgttcacgggcctgtactttgcagaggaacacaatgtcaatgcccatacgttgcggtatcatgtcgacgagccccctattagtgatattgaaatttttcaatggaggggcaaaactgtaggacccagcacaacatactgtttcaccaacgacgaatggaagactgctntactttacatgtataacaacatggaagagatg

SEQ ID NO: 17642 - DNA, 246 bp, Zea mays
catgttagtcttagcaattaagcaagtgtcgagttcagctctatcaaaatctaccaagtatagctgaccctttaacattcccttaaatgctattgaatcatcacttcttctaaagacagtgacacctatatcagtgaatagacaagtgtagcccatttgacataattgagatacagaaagcaaattgtaatctaatgaatctacaagaaaaacattggaaatagaatggtcacgagatatagctat

SEQ ID NO: 17643 - DNA, 435 bp, Zea mays
  unsure (1)..(435): unsure at all n locations
agcttgcacttactaccaaaccgcacccgcattttatcacattcaatggctcaacaatagtggtaaggtcaaggtaaccaagctggtacgaattaattntgctattggttcatatcgcgatgttgttgactgtgatgttgtgcctatggatgcttgtaatattctgctaggtagaccatggcaatttgattcagattgtatgcatcatggtagatcaaatcaatattctctcatataccatgataagaaaattattttgcttcccatgtcccctgaggctattgtgcgtgatgatgttgctaaagctaccaaagctaaaactgagaacaacaagaatattaaagttgttggtaataacaaagatgggataaaattgaaaggacatttgcttgcttcaacaaaaactgatgttaatgaattatttgctctcactac

SEQ ID NO: 17644 - DNA, 397 bp, Zea mays
  unsure (1)..(397): unsure at all n locations
tctccaccatgtcgctgctagccaagttgttgcagctacctctatctatgatcaaacgacatgaacgctccttaatgacacactnttgttgaaacaacgtatgtcgctgaatctgctctgccttctccatttgtgcactaagcacacgctgtacaatgaggctctcataatgctctgcatcatctgcaccaatctgttcttcgggtggttccttagtgcctacatcatcagccgcaagcaaagcaagtgtagcttcatccaaatcactagcagaggaatacccaccatcgtctnttaccaccaaaacacgctgattatgacaataacgctgcacgtgtccatagcccttgcatcgataacacagaacatctcttgttctacctgtggaagctactga

SEQ ID NO: 17645 - DNA, 341 bp, Zea mays
ttagtgggccgacacagaaggcaagtgtgcgtaccaaatcagttcgcgatgtgatcttatttatacccctaaggcgttgaaaattgaaaggccccgcttgtcagtagatgttgctattctaccaaaggaaggtgttttttccgaccttccgctcaaggccttcgtgcatatcgcaatccgaatttattatttacaaattaatattgcgaggggctactgttgggggccttcattcttcgaaagtcctcacaaacatgatttgacaatgtcttacgagtggattatgtgaacaagtatattctgatcctgagatatgaatattgaccactgccatgacgaat

SEQ ID NO: 17646 - DNA, 383 bp, Zea mays
tcagctccatctatgttatggattggctttgagtcagtccaattttcttctgtccttcttgcagcttcctgacttccatggatagcaatgggtccctgatccgaaggtatcttcatgcaaagataagcatgatgaaagattgcttctaaggcattgagggtaccacgaccaataattgcattgtaagggtattccatgtcaacaatgtcaaacacaacttgctcagttctagtgttgttgatgaacccgaaggtcactgacatggtgatcttgcctagtgctacaatctgtcttccttcgaagccacagagaggatgtgtagcatcatgaatcttatcctctggctcttgcatttgtctgaaggccttagcaaatatgatgtc

SEQ ID NO: 17647 - DNA, 443 bp, Zea mays
agcttctaaagagagaatatgtgttatgactatctcgtgtctgttttgagaaagatagaccttgtgcagcgtgagaggtagggaagcaagtagaaactaaccatccaggcaaaaatgtgatgacaacgtcaagaccactggaactcctccatatggatctcttctggcccgttgcttatcttagcatcgagagaagtaagtatggtcttgtaattgttgatgatttttcccgcttcacttgggtattctttttgcatgataaatcagaaacccaaggtactctaaagcgcttcctaaggagagctcaaaatgagtttgagctcaaggtgaagaagatcatgagcgacaatggatctgaatttaagaatcttcaagtagaagaatttcttgaggaagaaggcataagcatgagttctccgctccctacacaccacaacaaaatg

SEQ ID NO: 17648 - DNA, 473 bp, Zea mays
  unsure (1)..(473): unsure at all n locations
tcttaccacgcgcccgtggatatcttgagagagatgagcaatgcgtcttctccttagatgtctttggttcttggtcccacacaatttcttttgtgaccctgcatcttgatgcttattcaaacattggctttcttttgaacagcaggggttagcacatggtgatatacaattcaaatgcgcactcgtgcgagagtgaggttcacatgaatntaagttcgcaattataacctcatgagcaacattaagcatgatatggtcatcaactaattcattatgagaatgagatagcatatcatatttttcacttagagcaagtgtttctaaatttatcatttctacttgacccttaagcatagaattctcagttttaagttgagcaacatcagataatacatcattgatatttctttgctcanataanatagattcataccgttggaccacattatcatgagagcactntagctcctcat

SEQ ID NO: 17649 - DNA, 430 bp, Zea mays
agcttgtgcaatagtcaagattattggttctttttctcggaagcagacgggataataatcttagtcatgtttggactttaactttcgtttatgttggaaagtacttgaaagacttttcctgtggtaattctaggcgtatgttgctgtgctggttggggtttactggtgaaccatatgttttctatcccactatgaatatggtacctcaagttacctggatgttcactgttgtgttggtacatgtcaattttgcctcgttcatccatgtccactgagggcttgttcggttattttcaatccatatagattggaggtgattgatacagattggaggggattttacttatcagggattgaaacccccttacatccctctattcatatggattgggtagaaccgaacaatccttgagtgagtttgcgcatgtgc

SEQ ID NO: 17650 - DNA, 471 bp, Zea mays
  unsure (1)..(471): unsure at all n locations
ntgaagcacanattatcgaagatggtggggggtcacgagagtatgtctaagatgccttgattgatcatnttgcttaaaaaatgcaggaacctaaaaccagcacgaatacttttctagccggggtactggtaacccgacggataaatttatccacacgagtacgagtatgagtaagattatatatccgcgactttatatgagtaatccgatgagtagattttttctggacagatatggatatgagatgatactaaacgacgagtacatactccgtgccatctctagaagttatttgtaccaaattgactactgctgggccgagaattgaacgtatangcccatatacctgcttgcatagcctacgacgttggctgattgacgccagagacgttcatggagagtagattagtagccctccatctcgtggactacttttggcgcgttctttcttttgttcttgacacgtccgac

SEQ ID NO: 17651 - DNA, 359 bp, Zea mays
caaccttccggctatgaagacagtgagaatcctaaccatgtctataagctctgtaaggcgctttatgaggttcagcaggccccaagaacatggtttgaatgcctaagagatttgcttatcactaatggaataaagacggaaagccgaacctacgctcttaccaaaacacttgaaaaaatttgtttgagtgccaatttatgttgatgatattatatttgggctactaacgaatctacatgtgaagaagttagtaggatcatgacacatagattccagatgtctatgatgtgggaagtgaaagatttctaggattcaagaaagcaactccagagggacctcctaagcaaacaagtatactc

SEQ ID NO: 17652 - DNA, 432 bp, Zea mays
  unsure (1)..(432): unsure at all n locations
tctaaggggagaacacatttgggactaacaaatgttcattttgttaaagacaggatttgtagcgcatgtcaggcagggaagcaaagtggtgttcatcatccacacaagaacatcatgacgactgatagaccagtcgagctcctacacatggacctattcggctcgatagcttacataagcatcggcgggagtaagtactgtctagttattgtggatgactattctcgcttcacttgggtgttctttntacaggaaaaatctcatacccaagagaccttaaagggattcttgagacgggctcanaatgagttcggcttaaggatcanaaagaatagaagagataacgggacggagttcaagaattctcanatcgaaggtttcttgaggagganggcataagcatgattctcttctcctacacccacaacaaat

SEQ ID NO: 17653 - DNA, 415 bp, Zea mays
  unsure (1)..(415): unsure at all n locations
tatgaatcgctcattggtagantgctctttatctcatattttagggtattcggctgcaaatgttatattttgagaaaggaaagccgactttctaaacttgaaaagatatgtgatgagggttttcttcttggatattcatccaatagtaaggcttatagagtcttcaacaatactcatggcattattgaataagcatatgatgttgagtttgatgaaacaaatgggtctcaagatgagagtgataatcttgatgatgttggtggaactcaattgataaatgccatgaaaacaatggccattggtgaaatatagccaaaggaagatgatgatgaatatagtgtggttgtaattccttcatcttctactctaaatgaagaagatcaccacagccaacacaaagatgaaactatggata

SEQ ID NO: 17654 - DNA, 297 bp, Zea mays
  unsure (1)..(297): unsure at all n locations
gctngtggcgccctcgggcgtcttgtcgcagccgaagtactaagtctcccacttgtatgtctcggcgacgaacacttcgggcgtggtagcgtcgcagggactgctgataccacgctgagtgtagtaaggccacgtcccgagcctcttctagctgtgccaatgggtcctctcggctggtctggttgccttggtcgtcataagcctttgtcctcggggaaccgtattccaagtccgtgggtaagatggtctcggccccatatactaggaanaacggcgagaaacccgtggcccagctcg

SEQ ID NO: 17655 - DNA, 369 bp, Zea mays
  unsure (1)..(369): unsure at all n locations
cttcatccctacatgtgctaaacggagatgcccatccttttttgctatncntagcaantaagcatgcatctagaccagcctcctcttttgcaaaatcaactaaataaagtttgtcgtctagtacacccttaaaagctaatgaaccatcactccttctaaagacagacacatctacatttgtgaataagcaattataccccatattacaaagctgactcacagacaacaggttatatccaagcgactcaactaagaacacattataaatagagtgctcggatgaaatagcaattattcctaaccctttcaccttgccttggttaccatcaccgaatatgaatgactcttggggaatcctgctcttgacgt

SEQ ID NO: 17656 - DNA, 354 bp, Zea mays
  unsure (1)..(354): unsure at all n locations
ggatgcaaagcttagataccactgaaatataaggcgaagaagcttcaaagtcgtttctaaggggatgcaaagcttaaagactccaaagacattcccaaggggatacagaatcttgggtgatccaatgtgggtgagtgtgtgtgttccgcataaccatcatattgcatcatatcatcacatcatttcgcataacattacatcatacatcatatcgcatcaacaacgaagattggatacgaagcaagtcttccacaataacttgaactaaaatgtgctgaggcacagaggcaaacttcaaaaaatacaattttatcagaattgctatagaangngcttctttctttatgaagcatg

SEQ ID NO: 17657 - DNA, 336 bp, Zea mays
ctaagcttacgagagaggggttggccttgaagtgagtcgtctgagctagcctccttttcttttcttgcgaaggccctgtgcatccactattatagatacaatgggatggtccagctgtacatatgggggtgtagctatgcgcttacgtggccggcggagaagtgcttgagccctgtagaagcgtagctagcggtgcaggcctgggtcctgctgacgtttctttgtcttcgtatagagctgagaacaatcaacgtcatggacgcatgcagggaaccatcattaccttgtgccggagtgatctagatgtgacaccggacatgatcctttgtagcctga

SEQ ID NO: 17658 - DNA, 378 bp, Zea mays
agcttctaaagggggaacacattttgggactatcaaatgtttattttgagaaagacaggatttgtatcgcatgccaagccgggaagcaagttggctctcaccattcacacaagaacataatgacaagtgacaggccactggagctccttcacatggatctattcagcccgatcgcttacataagcatcggcgggagtaagcactgtctagctattgtggatgatttttctcgcttcacttgggtgttctttttgcaggacaaatctcaaacccaagagaccttaaagggattcttgagacgggctcaaaatgaagtcggcttaaggatcaaaaaaattataagcgacaacgggacgcgagtcaagaactctcaaattg

SEQ ID NO: 17659 - DNA, 432 bp, Zea mays
  unsure (1)..(432): unsure at all n locations
ttcttatgtatcgggctaaacaaaattttcatattcttgttcatgaatcataagcttgtttgatcaagtgaccttaccaaatctactgggttggtttggagcaagaaatattgttactccctctcacattaagataattagcctacaaatatgtaaagaattacaatattagaaattgatttataatgggatgttctctgaaataccacaacattaactaggagaagcatacactaaaatatatcttgattatcttaggtgttcaaaaaatgttgaatattaactattatgctagtgttatttcaattgtgtacaagcttantttgatataattattcacatgtagacaattaaattgcagttctaggaaaatattgagacatcattacatgtacangtgatatgaagaatgacacaccgacactatcatta

SEQ ID NO: 17660 - DNA, 458 bp, Zea mays
  unsure (1)..(458): unsure at all n locations
acctgaggcatgcaagcttatatgaagcactttttagccgncctttctacttgttatatcgagcaagacgctctagattgtacatgctcttacagtctaaggctatctccagccacgttctctaaatttcattcgttaaaggaatattctctgttatttacaacacactctaaaagattctattatctcagtctccagtaacatcttctaaattcggttctctatagctacagtgttaacagatttcttttcgtctatttctttagtntatatttaatttcttttcattacaccctaattcaaaaaaacatgcacgacaatagctctttaaaaaatttagattgcgtatttcttgacattaagactacgtaccgtacattttgaatagatttgagtatcatgcaatatttacgtagacatattaccagccctttccatattttcgtagtcatatacac

SEQ ID NO: 17661 - DNA, 355 bp, Zea mays
  unsure (1)..(355): unsure at all n locations
ctaagcttctaatggagaacacgtgataggtctaaccaatgtttatctttataagatagaccctgtgcagcttgtcaagcagggaaacaggtgggaggctctcatcacaccaagaatgtgatgacaacatcaagacccctggagctgctacatatggacctcttcggacccgtcgcctatctgagcataggaggaagtaagtatggtctagttatcgttgatgacatttcccgcttcacttgngtgttctttttgcaggataagtctgaaacccaagggactctcaagcgcttcctaaggagagctcanaatgagtttgagctcaaggtgaanaagataatgagcgacaacgggt

SEQ ID NO: 17662 - DNA, 441 bp, Zea mays
  unsure (1)..(441): unsure at all n locations
agctngatgactacaagaagacctttgatgatcttcatgggtagacgtctaactgcaactggcaatggtttcttgggacaaataaaaattctttgccgatttgctttcttatggttggtatggaattatactggataattagttgggtctgttggcatatcctcctaaactttctagcatcactgtcaattttggcactagatttgttctcaattgctatttaagaaaggtattggataaagggttatttggcactaagtttgttcccaaatgctaaaattatatcgaataatatgtgtgtcatcacaattcacaatcatatatgtttacagcgatattttgccacatatatatngaatatcataatgatggttggcctttcacatctatatattacactaattttaactcatatggcaacgcacgagcacatacctagta

SEQ ID NO: 17663 - DNA, 262 bp, Zea mays
cagtatcgagttcaactctattataatcaactaagtattgctgaccctctaatacttccttaaatgctactgaaacatcacttcttctaaagataggtacacctatatctgtaaaaagacagctgtaacccattttgcatatttagatataaaagccaatataatctaaagaatctacagaaaaacattggaaagaatggcacgtgataagcatttaccaagtctttgacaaacctgatttcatccccaatgtgatgctttt

SEQ ID NO: 17664 - DNA, 422 bp, Zea mays
gcttgtgggcttgtcgccggacatgatcttcctcttgtgttgatctcccgacatcacttcgagttggtagactctaatgaagcaccacgctctgataccaattgaaagtctcctagaaggggggagaataggcgtaatctaaaatttacaactttaaacacacactacaagccggggttagcgttagaactataatcaagtctaggagagaggggaaaacacatcaaatggagatcaagcgaatgaacacggtgatttgttttaccgaggttcggttccaaagaacctagtccccattgaggaggtcacaaagaccgggtctattccaaccctttccctctctcaaacggtcacttagagcgaatgagcctttcccttaatcaatcgggtcactaaaaccccgcaaggaccaccacactctt

SEQ ID NO: 17665 - DNA, 366 bp, Zea mays
  unsure (1)..(366): unsure at all n locations
aacacgtgataggtttgactaacgtgcattttttttattatagaccctgtgcagcttgtcaagcaggtaaacaagtatgaggagcacatcacaacaagaatgtgatgaccacttcaagacccctggagctgctgcatatggacctcttctgacccgtcgcctatctaagcataggagggagtaagtatggtctaattattgttgatgactnttcccgcttcacttgggtggtctttttgcaggaaaagtccgaaacccaagggaccctcaaacgctttctatgagagactcaaatgaagttgagcttcaggtgaagaagataaggagcgacaacggatctgagttcaagaaccttcaagtggagga

SEQ ID NO: 17666 - DNA, 470 bp, Zea mays
  unsure (1)..(470): unsure at all n locations
gatcctcaaagtcacctgcngcatgcagcttcaatctcttcaagttccacaattgagttttgtgatcattagtgattagtgacttgagagagagagtgatctgtgtattatttgtcgctcttgtcgcttggctttttgcaatcgtgctttcttcttctcccattcttattctcaagtgacttgtaatcaaagcaagagacaccaagtgtgtggtggtccttgtggggtctaaatgacccgtttgattaaggagaaagctcactcggtctaagtgaccgtttgagagagggaaagtgttgaaagagacccggtatttgtgaccacctcaacggggattagattcattggaaccaaacctcggtaaaacaaatcaccgtgtcatccgctntattttattgggtgatttgttttcccctctctctcggacttggagtttattctaacgctaaccccagcttgtagtgtgccta

SEQ ID NO: 17667 - DNA, 281 bp, Zea mays
cccatgctcttatgcgatgacatctcagagtagaaggtgctactgggatctcaactgtcctaacaacaggagaaaaccttgataacgtttctgtttaacaacaaagatgatcttgcattgacaactaatgatctttgcggagtcaacaaggatgttattgaacactcgctcaatgttgatccatccttcagacccagaaagcataggcttcgtatgatgtctgatgacaaggccgaatgtgctccgaatgaaatgaacagactcctcttcgccggagttat

SEQ ID NO: 17668 - DNA, 314 bp, Zea mays
  unsure (1)..(314): unsure at all n locations
tttctatcacccccgctctatgtgcgctcactcatatcctcgaccggggggcattacaagtttatatgataacatcgtgagccagaataatggtgaactaactgagtctgtctacctataattcagccgactcatcctcaaccacctccgatgtgcggcgctcctgtgcgggaaggacgggtcactgctgtgattaatgctcggatgtagttggggcaactgggcttgcgccaaccccgccttgtactgatctggcttactggtcgntcctcccaggcccacgaagggatgaccttacgaggtaacgcgccttt

SEQ ID NO: 17669 - DNA, 82 bp, Zea mays
tggggcgcgcctggggaggctttataagcaccgatcggtgcactggcggacgtggaccggcgagtgcgcgcgggcgtgcact

SEQ ID NO: 17670 - DNA, 425 bp, Zea mays
  unsure (1)..(425): unsure at all n locations
gcttctaaagggagagcacattttatgacttacttattgttcatttgagaaagacagggtttgttgcgcatgtcaagcaagaaagcaagttggcgctcatcatccacacaagaacataatgacgactgacaggccgctcgagttactccacatggatttattcggcccgatcgcttacataagcatctgcaggagtagggactgtcttgttattgcggatgattattctcgcttcacttgggtattctttttacaggaaaaatcacaaacccaagaaactntgaagggattcttgagacgggctcaaaatgagttcggattaaggatcaagaagataacaagcgataacggggctcaatagaacgctttccttatgacgagtgcatcaagcatgagttctcttctccctacacacctcaacaaaa

SEQ ID NO: 17671 - DNA, 239 bp, Zea mays
  unsure (1)..(239): unsure at all n locations
agagggggagcttgtccgactaccctactattattatttcaagaaatattttaaggcaccttaccaagaatggctcgatacaatcgaaataatgagtactgaaattcttggaaattactctaaaaaagaggaccaactgatgacagcagccttctgcacccggccgaagcgaaggctgaacagggtgcttgatgctatangatttgaatatgctgattatggtcgactgggcggagatg

SEQ ID NO: 17672 - DNA, 404 bp, Zea mays
gctttgacatctatgccatcataaggattggtaatatttcaacgacaatcatcgagactgtgccgaagaaccaagaaatgtcagattcgcactgcatattaatggaatgaatccatttgctgagaggagcatcaagcatagcacatggtcagtgatcctcaccatctacaacctttctccatggttgatacaaaaacggaagtacatattgctaaccattcttatttctatacctacacaacctgaagttggcatggatgtatttttggagcccttaatggacggtatgaaaatattatgggaaacaactgttcaaatattggacgagtattgtaaagattcattcatgttgagagcaattattctgttacgatcaatgattacgctgttctcttcacattatc

SEQ ID NO: 17673 - DNA, 365 bp, Zea mays
  unsure (1)..(365): unsure at all n locations
tctaaagggagaacacattttgggactaaccaatgtttatttttataaatacagggtttgtagcgcatgtcaagcatganagcaagttggctctcaccatccacacaagaacatcatgatgaccgacaggccgctngagctacttcacatggatttattcggcccgactgtttacataagcatcgaccggagtaagtattgtcttgtaattgtggatgactattctcgcttcactcgngtattctttttataggagaaatctcanacccaagaaactttaagggattcttgagacgggctcanaatgagtntggattaacgatcaagaaaaatagaagcgacaacgggacggagttcaagaactc

SEQ ID NO: 17674 - DNA, 405 bp, Zea mays
  unsure (1)..(405): unsure at all n locations
gtatcatatgctaattatatacgaatngactcaagcctagctaccggtgcataagtttcaccgaaatccaaaccttcgacttgtgaatatcccttggccacaagtcgagctttgttccttgtcaccacaccatgctcatcttgtttgttgcggaagacccactnggttcctacaacattntggttaagacgtggaactaaatgccatacctcgttcctcgtgaagttgttgagctcctcttgcatcaccatcacccaatctgaatcttggagtgcttcctctaccctgtgtggctcaatagaggaaacaaaagagtaatgctcacaaaagtgtgcaacacgagatctaatggttacccccttatgaatgtcgccgaggatggtgttcacggggtgatctcattga

SEQ ID NO: 17675 - DNA, 479 bp, Zea mays
  unsure (1)..(479): unsure at all n locations
ttgacaacaccattgacattntacataanatatctgagatcaatatatattagttcattcctcaacatgcaaaagcgggtcttatcaagtgtcttagtgaaaatatccgctaattgatcttccgacctcactccttctaaaatgatatctcctttagcaacatgatctctaaggaagtgatgacggatatcaatgtgcttggtgcgagagtgttgtacagggttattagcaattntaacagcactctcattatcacacaacaaaggtaccttttctagaactacgccatagtctagaagaagttgttcatatataaaattgtgtcaacagcacctgcggaatgtattccttcgtagttgacaaggaacactatttgctntttgatgccatgaactagtgactaccagcgatggcatcccaaagtcttttctataatttgcaccgcatatccgaatcgataccaataataaagtactctt

SEQ ID NO: 17676 - DNA, 452 bp, Zea mays
agcttgtgaagattcttcatcccaacatgggctagtcgttgatgctcttaccaacccatattagtcttagcaattaagcaagtatcgagtttagctttgttaaaatcaactaagtatagctgaccctctaatactcccttaaatgctactgaatcatcacttcttctaaagatagtaacacctacatctataaagagacagttgtagcccattttgcataattgagaaacattaagcaaattgtaatctaaagaatctacaagaaagacattggaaatagaatggtcaggtgatatagcaattttaccaagtcctttgaccaaaccttgatttccatccccgaatgtgatagctcgttggggaatcttcgttttctcataggaggagaacatccttttctcccctgtcatgtggtttgtgcatccactatcaattatccaactcgagccccc

SEQ ID NO: 17677 - DNA, 438 bp, Zea mays
  unsure (1)..(438): unsure at all n locations
gctcttattcttctctggccctttgtactttttgttcagctgcgcatagncaggatattcgaaacccagtgcatcaagcactcggttcagccttcgcttcggacgggtgccgaaggctgctgacatcagttgatcctcttttttcgaataatttccaagaatttcattacacatcacctcaactgtatccagccactcttggcagggcttcttaaaatatttcttgaatctgaagtggtaaggaagccggacaagatccccttccttcttctccccctttaactttggcatttcccattttttcagagtagggaagactttgaatgctaagaattcttgaaccagatccctggtaccaatatgctctgcaatgattctgaattcatccattgcccgttgagtttgaccctctggtgacatgtcgcagtggggtcgggt

SEQ ID NO: 17678 - DNA, 468 bp, Zea mays
  unsure (1)..(468): unsure at all n locations
acgcggctcctgtgtgtcagcggtgaacgctagggagttctatttgctctgcttctgtgcgccaatggcgacctctgcccatgagacgccgaccatgagggaagaataggagcaactattgctgctgttgcaggagggagagcgcgggaagagatatactcaacgccaacgggtggcaaggtgggccagcgcttgggatgcccgacggctggccagggggtggccggcgtatggccagagggtggctggcggctgtgggtgggacggagggaagagaaagctggctctggtactaagttggaatgtgaaaccctgaccctaactcatggttgcgagtttgattaataggctcacgttggttcgcctgaaccaataacatangggtataactgtaattacaatggggcttacccccacaaccctaatcgtgcactctaataatgtgcacgatggacacaacgggtatac

SEQ ID NO: 17679 - DNA, 467 bp, Zea mays
  unsure (1)..(467): unsure at all n locations
acctgcngcatgcaagcctgaagctatgtgatcaagncttgtttgtgaattccctatctcttgcctatctaagccgtaaactctgttcatagcattcaaggccattggcatgacactctaggtgatcaagggtttataagtcacgaaggtgaagatgaagaagcatattggtgacttgaatgagaccgtggttaccttcgagaagaccatggaacaagaaaggctaccaatgaaggcctatatgagaagctagactcggccactgaggccaaggactcatgctccgaccgagaaacaaagtagaatcttatgttggctctatcttgcataattccatgtgctgaaacactgccttatgttccaaagggttaaaaagtgttgaaagcccataaggtctacctgaagaccatgatgaaccatttatatgtgttcgagtttgtgatggctcatcaaatattcaaatgctc

SEQ ID NO: 17680 - DNA, 314 bp, Zea mays
  unsure (1)..(314): unsure at all n locations
acaagcaccatctcttaacatagattntctatggataaactcaacacangagatggcattagtagcacaagcactagtttcttattcagcaaccctttatatgcgaaagacaagcgtgttgctaaaaatagagaaacgtcataatatggactaaatctcccttgagcccttaagcacaatatattatgaatgatatggataatatgcatggttattcaatgaagtctaaagggctaacttaatccatattatggtgagtgtctaatatggaataataaaatccaaattaactagatagaaaatacgttacataa

SEQ ID NO: 17681 - DNA, 450 bp, Zea mays
  unsure (1)..(450): unsure at all n locations
agctngcacctgtgtcctaatttcctatggctttcatctcctgcattnntatattgcatttatctgttttttattttctattgcttagattttatctgtctgtacatcttgtgatcatgtgtgggagagaaatttgacacatcctcttcacaacctttgtgacaggtgttatttagaatggtggacccatgctgtctaattgtttccttcctcgtagaggataatgcaaatatgctgatcgcaatggtggatgcagtgacaaattttatcttctgctgaccgagaaacattccatggtttgcatttggaatgaacaaatgtggaggtttggaagtgcaaaatatctgaacactagaaagcaaactgaatgcagtgatatattttctttccgtggattnatttaatcatgaataaacgacatttttgtctcttctggaaaattctcacatg

SEQ ID NO: 17682 - DNA, 442 bp, Zea mays
gggatcttccagttgccatagtcaggagaggcggctgcatatatatgtgtgcgatgcggtgttccatcctgagaagtccgcgcgacgccggcggaccgacccgagataccaggcggcggcacggcaaattcgttgaagtccgatgccaacggcggaggcgagcctgacatgtgggtcccagaagtcagtggctagtgggagtgggcgagatgcgcgcaaccggtgccaagcccacgaagccaacgtcaggtttacacgcacgcgcgtattggagtctggcgcgagggcccgcccagtcagcgcccatggtttctagctgggccgcgcgcgtgtgtgaaaaaaaataagagtgggccgaggcgaggaggatttggccagtgccgtggttgttccttttaatttttattttggttatttctattttctattcttctcaattcaa

SEQ ID NO: 17683 - DNA, 388 bp, Zea mays
  unsure (1)..(388): unsure at all n locations
tacgcaccttgaaactaagctngaccactacagcgtggccaagaggtgctcatgagtcgtgaataatattctatatcaagaaggaaaagaagcctcaatctgaaacctaccgccacaagtacctgaacgctgaacctgaacatgttcaaaggcccattgccagctgccagcttggcataagcggctccggaccacagcagcagcaggagcaggcagacgcaccagaaatggtgctcgacgcctgacttacgaaacgtgggccgtggggtatattgtttcagttgcctccaagttagataacgtggggtatccgttcgaaatttaaaaaacaacaataataggacaacaccatcaatttaaaaatccttctttcatccctaaatgtttc

SEQ ID NO: 17684 - DNA, 443 bp, Zea mays
  unsure (1)..(443): unsure at all n locations
agctntatcaaatggacgtgaagagtgccttcttctattgaccaatcaaggaggaggtctatgttgagcaacctcccggttttgaagatagtgagtaccctaatcacgtctataaactctctaaggcgctttatgggctcaaacaagccccaagagcatggtatgaatgcctaagagactttcttatttctaatgacttcaaagtcagaaaagtcgatcctactctttntactaaaacaattgccaatgatttgtttgtatgccaaattcatgttgatgatattatatttgggtctactaacaaatctacatgtgaagaagttagtaggatcatgatacataaattcgagatgtctatgatggnggagttgaagtattttctaggattccaagtgaagcaactccaagagggcaccttcattagccaaacgaagtacattcaa

SEQ ID NO: 17685 - DNA, 306 bp, Zea mays
  unsure (1)..(306): unsure at all n locations
tggaaagtgagcttgcangatatgattggacaaagggtgagtttcttcaatcactctttgatcgggtgatggtgttggtcaacaaaataagagttcttgggagtgaagattggagtgactccaatgtcacaagattgttcatgagagcttatanagaaaaggataagagtcttgccaggatgataagggatcgagatgactatgaggatatgacgcctcatccaatatntgcaaaaattcaacaacacgagtccgaagaagcccccatcaagacaagagactctcatgccttgatcacaaatgaac

SEQ ID NO: 17686 - DNA, 447 bp, Zea mays
  unsure (1)..(447): unsure at all n locations
agcttgtgagatgagatgtatcgtttaccttatattcgtgaagctagagagattgtatatgttgatggatgagctcaattagaataatataccactagacttcaagatagctgtattagagtcaaggcaatggtgtctaaagtctaaaggatgccagcaatgggctatattattagaggcagggatgagctgattgaacaaacatttttgggattattagattatacacctcatatgcagcctaccgggtcaattattcatatacaaatgtagttaagtgtactgtacaatgatacatcgatcaactctgaacatatggcatcaatatgtattaggcatttctctattagtcaaatganatggtacagttgtaaattatatatctaatgaagaaaggaacttgagtttgcctgattgtttntaactttgtatctaaatacagctgac

SEQ ID NO: 17687 - DNA, 321 bp, Zea mays
aaactcagcttgagttgcctgttttttacttttcttatggttcttaattattacatcatttacggtttaaggccatgactcaaagtagatacgtttatggttattttgataacgatattgttgtagtttcgaaaaccaagggacaataaaacttgtgttccgtggggatgctaacacggactcagtccgaatggtgaatcacgaggattcaagcagagggtttgagatagatgggtatactgcgttaggcttccaccctagtctagtgtagtgatgatcatagtactgcttgaggactatgttacaacttggtgggtgtgt

SEQ ID NO: 17688 - DNA, 280 bp, Zea mays
gttcctagaaacatacatgaggcactgcacttagggggagtattcaacactcatgtcactcatgaaaacccctagagcgagccaaaatgcaaattgcaccattggcctattatcctcaaaaattatttatcctatggcaaaacattttggaaaggatatgacggtgccaatacttgtcccaacaagtgttattctgtgtgataataagtcgggatttggttagtttggaaactacatataaaaacgcaaaatgtgtcaatctctcctcagactgggctca

SEQ ID NO: 17689 - DNA, 196 bp, Zea mays
tgggatgacacacatatatactctatgtgtacaaagcatatagtgactaacggctagctcaacgattataatagtttctggagcgcagggccacaagcggcgtacccacacagttgtatgtgcttcttcatatatggaacctagccttgtaaattaacataccaaggtactgatatccgaagtaatctctctagat

SEQ ID NO: 17690 - DNA, 444 bp, Zea mays
agcttgtggtgacacttcgagcctttctttctatgaaatgatgagtatctgaggcctgactatgtctgctatcgatagtgtgctggacgatgctattcctgaggaccttttgcttgaattgcctgaaatcagagttgtctacgttcatgtagagtgcctggacgaagtgtcttctgctggtttcctggccagggcagaggtaagcctgccagtctgccctggtacttcagcccccgagggtgcttcggtcggatccccctctgctgcttcaatggatgttcatgttgggtcaccaatgccccggactgatgatgtcgtggtaacaagttctgttgtgcccattggtctagccgacccaaccaccttagaggtcagtggtcttggcactaaaaatccaatgggtgttcctggtacgtgaatcccaatgggtgtatctagtattga

SEQ ID NO: 17691 - DNA, 230 bp, Zea mays
  unsure (1)..(230): unsure at all n locations
acacaagaacatcatgacaactgacagatcactcgagctactccacatggatctanttggtccgatcgcttacataagcatcgacaggagtaagtactgtctagtcattgtggatgagtattctcgcttcacttaggtgttcttttnttaggataaatctcanacccaagagaccttaaagggagtcttaagacgagctcanaactgagttggtttaacgataaaaaaga

SEQ ID NO: 17692 - DNA, 429 bp, Zea mays
  unsure (1)..(429): unsure at all n locations
agcttctaaaggtagaacacanttctggctctatatatatgttcattnngagaaagacaggggttgtagcgcatgtcatgcagggaagcaagttggtgttcatcatccacacaagaacatcatgttgactgacaggccacatgagctcctacacatggacctattcggccgatagcttacataagcatcggcgggagtaagtactgtctagttattgtggatgattattctcgcttcacttgggtgttctttttgcaggaaaaatcacaaacccaagaaaccttaaagggattcttgagacaggctaaaaatgagttcggcttaaggatcaagaaaattagaagcgacaacgggacggagttcaagaactcacaaatcgaaggcttccttgaggagganggcatcaagcatgagttctcttctccctac

SEQ ID NO: 17693 - DNA, 441 bp, Zea mays
  unsure (1)..(441): unsure at all n locations
ntaagtttagggattacaccttgtaactacaccttcttacccttgtacatgaactccatccattttgcagtccagtgtatggacataggaccaagaccctccaaccagaccattcctagtataaggccataaccatccaatggttagaacatgaaatcaatacaaaaagttattccctcacatagccattgacagtttggtacccatttttaacaccacaaatagtacccatcaactactttgactgtaataggtctgatcaaattctgcactcctttcactacttccatcagatgggtacccataaaactattcgagctacctgaaaccaccaataccagcacctgttgacaatgaatgangccatanacggtagtcctattgttttactacaacttactgctgccatagacatagccaacactgcatcctcattttcat

SEQ ID NO: 17694 - DNA, 439 bp, Zea mays
  unsure (1)..(439): unsure at all n locations
gcttaaaggatactattcaactaaactcanattatagtgataagaggcccaagtatgaaaacttcctctccttcaattggttgtcttctatccttagtgggatgtaccatagtataggttaaattccttgcaatataaaatgttcaatagtgcatataactttgacatcaactatatgtgtgcactaatttaaaggaatttagtctatccttttgggtttcaataatgatgattcatttgccatccacatataaggatcatcatttgtgaaaccctctcttgtgtttctaatgctctcttctctaagtgtttcaacaaggtcctcccaagttctttgaagatgaattcaaaatctacaaatataagagtcttgggtgttcaattattgagtttcaattgatctcatatcaagtatgatcgaatcaagaaaagatgaaag

SEQ ID NO: 17695 - DNA, 448 bp, Zea mays
  unsure (1)..(448): unsure at all n locations
gcatttgcatgatgacttacaacgcttcaaatttcgtgagttaaaagttctttcaaaggcaagtttgaaaaattgcaaagtcttggatgcgcggaccgtacgggcctctagggcggaccgttcgcgatccaccagggggtccgaagtcttgaccacttgagcaagtacattgttccattgcactgcggaccgtacgggtcttatggccggaccgtccgcagtcatgaccagagaaggctggtttcgggtcagtccctgaattatagcgcggatcgtccggctgtgatgggcggacagtccgcaagtgtcaaacatgtttttaacagggactgtgtaatacccactntgtaagaaaagtctaaaaggagaaaatatattcctttatatatatgtgtgttgnccctaatttattattcgtgtgaacacctcattaanaaaataacttaat

SEQ ID NO: 17696 - DNA, 435 bp, Zea mays
  unsure (1)..(435): unsure at all n locations
agctngagggtctcggcgtagatgatgttgaggcagctgcccccatccatcaggaccttggtgagcctgacatcgccgacaacggggtcgacgacgagcgggtatttccccgggctcggcacatgatcggggtggtcggcctggtcgaaagtgatgggcttgtcggaccagtctaggtagactggcgccgccaccttcaccgagcagacctcccggcgctcttgcttgcggtgccgagccgaggtattcgccgcatgccctccatagatcatgaagcagtcgcggacctcggggaattctcctgctaggtgatcttcgttcttgtcgtcgtcgcgggccctgccaccctcggcgggtggcccggccctgtggaagtgacgccgaagcataacgcactcctcgagggtatgcttgacnggcccctgatggtagggg

SEQ ID NO: 17697 - DNA, 369 bp, Zea mays
tagcataggctaataatatacgaatggactcaagcctagctacgggtgcataggtttcaccgaaatccaaaccttcgacttgggagtatcccttggccacaagtcgggctttgttccttgtcaccacaccatgctcgtcttgcttgttgtggaagacccacttggttcctacaacattttggttaggacgaggaactaaatgccatacctcgttcctagtgaaattgttgagctcctcttgcatcgccatcacccaatccgaatcttggagtgcttcctctaccctgtgtggctcaatagaggaaacaaaagagtaatgttcacagaaatgtgcaacacgagatcgagtagttacccccttatgaatat

SEQ ID NO: 17698 - DNA, 355 bp, Zea mays
  unsure (1)..(355): unsure at all n locations
tctaagggagaacacgtgatatgtttgactaacgtgcatttcttatattatagactcttgtgcagctngtcaagcaggtaaacatgtgggaggagcacatcacatcaagaacgtgatgaccacttcaagacccctggagctgctgcatatggacctcttctgacctgtcgcctatctgagcatatgaggaagtaagtatggtttagttattgttgatgacttttcccgcttcacttgggtgttctttttgcaggagaaatccgaaacccaagggactctcatacgctttctcatgagagctcaaaatgagtttgagctcacagtgaacgagataagaagcgacaacgggtccgag

SEQ ID NO: 17699 - DNA, 450 bp, Zea mays
ctgcagcttgaaaatatctggatgcagttcgaatgttgtaagctttcttcgaaggtttttccgtcaagaatattccaagaggtcaaaatgagcatgcagatttgctagccaaatcagcggctcaggggctcccactaccctccgaagtattttttgaaacaataaaagcaccttctgttgagctcatggaaagagcagtgcttactatttctccaatacacagtgaagactggagaactaaaataatatcttacctccaaggcaattgtctttcatgtgacgaagcttataacaagagaatggaggcaagaacaagaccatatgtgataatagaaggggaattgtataaacatggagtttgttcaccactcctcaagtgtttatcaaggactgagggtatggaattaatgaagagatacatgcggcctatgtggatctcacattggatct

SEQ ID NO: 17700 - DNA, 354 bp, Zea mays
  unsure (1)..(354): unsure at all n locations
tctaagggagaacacgtgatatgtttgactaacgtacaattcgaaaaatatataccttgtgcagcttgtcaagcaggtaaacaagtgggaggagcgcatcacagcaagaatgtgatgaccacatcaagacccctggagctggtacatatggacctcttctgacccgtcgcctatctaagcatatgaggaagtaagtatggtctagttattgttgatgacttttcccacttcacttgggtattctttttgcaggataagtctgaaacccaagggaccctcaagcgcttnctaaggagagctcanaatgaagttgagctcacagtgaagaagataagaagcgacaacgggtccgag

SEQ ID NO: 17701 - DNA, 448 bp, Zea mays
  unsure (1)..(448): unsure at all n locations
agcttncacacgcttggcccagtgatcggctattcatgttttaatagctctctgataagtcgctccagcgtttttgcggccgaacgacatggaggtatagcaaaaagcttcgaatggagtgatgaatgctgttttttcctcgtcttcttttgccagactgatctgatgatatccaaagtagcaatccaagaaagacaacacataacatccagcggtggaatctaccacctgatctatcctacgaagcccgaagggatcctttggacagtgtttgttgagatccgtatagtcgacgcacatgcgccaatccactttattctttntgagtacaagaacagggttggctaaccattcgggatgtaacacctctccaataaatccagccgcgaccaagcgagccagctcagcccggatgggctcgctcttgttggcgtgaaacgacgtaatt

SEQ ID NO: 17702 - DNA, 370 bp, Zea mays
  unsure (1)..(370): unsure at all n locations
caagtctatttcaaaccaagtcataggtatattgaaagggaattggagtcttctgcgaaaacaaaggcttccactccgtaactcatacttcgccatcactccaagcaactctctattctttgggggagaaatgagcatcaaagaaaaggacttcgtctttgggagagagtaagggcccanagataaagaaccggacttcgcctttggtataatcttaactcatttatttatgaccaaagaggaagacattacttcgagggctctaataattccgtttttggcgatctcatgccaaaagggggagaaatgagcccaaagcanaaaggaccgcaccaccacctatntcaaaaacttagtatttttcaagagt

SEQ ID NO: 17703 - DNA, 415 bp, Zea mays
gcttatgaataattggcgccacttctactctctctcggatatgaccagaccggactaagtgtgtccttgtgaggccacatatgccgcgcacaattctcttatcagccacacttaattggtggacatgtcacactttattgagcgctactgatgcttcataccacataaacacacggaccgctgatctcggaaaaagaccattgaagccgagtgggacccgatgagaacataagacacccttgaatcgacgacaacttaaccatacaaatgtgatatgaagactgacatgcacatagaagatttactccatccgaagcctagatcttgagtacaaacacggacgtgatagggcaccagtgacccatggagactaacatcgacgagatcatactctatggcctagaaatgacacttg

SEQ ID NO: 17704 - DNA, 446 bp, Zea mays
agcttgctgctcgcgcggcgcgttttaatatatattatcaaactgcacgccactcgaattagacttttacgaagcaagaagggaccaccattagtattaaaagccgataaagttgtaagatttgtgtactagctcagaagataacgttctaaaactactaaaatattcatgtggcgcctgttggtgtcagtaggcatacatgttgaccacgtttagatgttcactatcaaaatccggctctttgtctttgacactttgtcaaatatattttatcggacactttgccgaatgtttttgagtgtctgaaacactcgacaaagcggctgcgtccgatagtggtttcggtagttaggtgtgtgtatgtatatttgatgtttgtgtgtgatatcattgtgtggtcatactggaaaagtggaaaaggaacagataactcctgtagcactggg

SEQ ID NO: 17705 - DNA, 367 bp, Zea mays
  unsure (1)..(367): unsure at all n locations
tctattgaagaatgatacataatttatctggttctcaagatgcaacgaagccttcgagcagctgaaggtattattgaccactgctccggtattggctcaaccggacattgaaaagccttttgatgtgtattgtgacacatcgggcagtggtcttgggtgtgtcttaatgcaagaaggacgagttatagcatatgcttcaagacagttgcaccgacatgaggaacattatacaactcatgacttagaattagctgctatggttcatgcccttaaaatatggcgtcattatctgctangaagattctgccatatatatacagatcataaaagcttgaagtacatntttacctagtcagaattaaatatg

SEQ ID NO: 17706 - DNA, 295 bp, Zea mays
tccacttacgccctgatggcttgaacgccaccgcgatgcctctccgcgccgaagggccaatcatcctcgatgatgttctttgagcacctgagtatcatcttaaagctcaacaaaatttcctattacttcctcgggagacattagaggttttttaggaataccctcaattcattgaactcgcgtaagattaagaaaaaccacggatctaataataacctggaccatctcatggtcatcccatttggtgcttccgaggatgcgcacttggttcaccaaagactttaagcggttggac

SEQ ID NO: 17707 - DNA, 516 bp, Zea mays
  unsure (1)..(516): unsure at all n locations
gctgacacatagctcttttgaatacccttgatcatatctcttttatattctatgactaatgtgtgttcaagtttatttcaaaccaagtcatatgtatattgaaagggaattggagtcttccgcgaagacaaaggcttccactccgtaactcatacttcgccaccactccgagcaactctctcttctttgggggagaaatgagcataaaggaaaaggacttcatccttgggggagagagtaaaagctcaaacgcaaaaggacttcgcctttggtataatcttaactcacttatttatgaccaaaggggaagattgcacttcgagggctctaatgattcccgttttggcgaattcatgccaaaanggggagaaatgagcccaaagcaaaaggaccgcaccaccaccaattttcaaaacttaatggtttcaactgtttcaaaagtatttatcaatggatcctattgtgtcaaaacggagaaagtgtatttcaaaatgattatcaaaccctctgacacta

SEQ ID NO: 17708 - DNA, 449 bp, Zea mays
aagcttctggtatgctcatgaatgattatatgattcactagcctggggcaaagaacagtaccataacaactttggctgctacagcttcgtctctcggtccggggcaagctgtcccgtaccaacctttccgaagagatggcccggcgattggatgacagaatggttttatgtgaagaatgacttatcagcacgagaagacatcagaggtataattatgcgtcctatttggcaaagcttctgccttcggaggccgaatgttgaaatgaacgaagccgccgaagagtgccaaagagccttcggcgttgtctgctcttttataggaacaagggacttagtacaagagcatattgccttcagggtgtggccgcttgcggagaaatgggaaatgccacaagaaaccgttaaagacgccgacgaaggtggacttgtcacgtttaagtacactttta

SEQ ID NO: 17709 - DNA, 279 bp, Zea mays
attgtcaaaatactgaaggctgcgcagaagtcaaacagccacacggaaatcaactctgttgatctcccgaagaggctccttcacattagctcgtgaaaatacttttgttttgtgtttatacctcgctaaggctggtagttactagtataaataccccctatgtctatgatgtaaggcagcttaagataatctaatacagaaccccttttgttcagctgtgtgctaacaaatattgagagtaatctctacccctttgctcttgtgaattcctttccggga

SEQ ID NO: 17710 - DNA, 438 bp, Zea mays
  unsure (1)..(438): unsure at all n locations
agcttcttaatgctctntctatatgattcaatcacctatactgaacaggaccaccgaccttagcctcatatggaagatgtataaagagatgctgcatatgattgaagaaacccggtggaaatattttttccaatttgcacaanagcaccggtgcctctttctccagctgttccatcacatctcttctgatttctttagcacacaactgtctgtagaaatagctaacttcagctaacgttttccacacagcttcggaaatgtacccacgaaacattacaggcatgagcctctccataattatgtggaagtcatggttcttcagtccattcatcttcattgtcttcaagttcacagatcttctaaaaccagcggcataaccatcggggaatatatatccttatccacttatcactttttctgttgttagatttagacata

SEQ ID NO: 17711 - DNA, 117 bp, Zea mays
cccatcattgccataagaacatcatgacgaccgacatgcctcaggagctgctacacatggacccggtcgggcctgttgcttacatatgcatcgtgtggagtaaagcctgtgtattta

SEQ ID NO: 17712 - DNA, 437 bp, Zea mays
agcatttgcagttcgtgtatgcatggttcatgtatggatgcctcccggccggcctgctgctcgatccaagttgacccagaggccataggcatgccacgaccactgcacgaccgcacgaggtatcctctcgtagtctcgtctgcatggggatcggtctctgtcgggtcggtccacaggtcggttttcggccacacaggtcgtccgcgcagcgccagctaaagcacggcacgcacgctacatacatcttctctatgcccagcccccctgatacgcacccaccacacttcgtgaggaaagaaagcaaaggagaaatgcacgctcaccaggaaagatccgcttttgcctagttagtgtgcatgcaacgcaccacggcttcctttgggctcttctaacctcctctcaggcaagaatgtccgttattgatcacgttactctta

SEQ ID NO: 17713 - DNA, 435 bp, Zea mays
  unsure (1)..(435): unsure at all n locations
cagttcaaaatcaagaacttcaagtgctacttttatactgcaagaacttcaacacttcatctttagtgganaagtctaaggctagctcctcaaataataatatntgcaaacattgtacaaaatatcatgcttcttgttgtttgactaaccatgcaaggaagaanagctcacaggttaaggtcaaagaaatattgaagaaatgctctatcaatgatgggctaaagaaagttgaacccaagtacaactccttgatgcccaacaatgggaaaaaggggcttgggtacaactcatacaaggtaaaccctagcataagcataaggtgtggagatcccccaagttcatagagggaactaccctatatgatgcattggggagaattcacttctcanatgacangtcaactcaagtaaaggtaacttgagtcacacaaaggat

SEQ ID NO: 17714 - DNA, 308 bp, Zea mays
tcatgatgaggaaagaatatactctgaatctgtattcacgatgattaaaatgagaaatatcttaagcattgcacatctaactttacgtgatgaatattatccatatgtaatcgtgtgtagaatctgctttctccgtacccatacccaccacacataatggggaaagattttcctctatatttgtatccgcgagaattaaaatcttctcatacccaaactctaatagagaaattttccatgatttaacgggtatcggatctccattgacacatatagcaatatgagtggattccatgcagagccgcgta

SEQ ID NO: 17715 - DNA, 444 bp, Zea mays
  unsure (1)..(444): unsure at all n locations
agcttgtgcaaagtccactcgaactaatcttctgagaaacccgactcccgctgcaacatgacacccgaaggtccaacacaacaagcaatgaatgaattcagaattattgcagagcatatcagtacaagagacctggttcaggagtttttggctttcaaagtttttcctagtttgaaagaatgggaaatgccgaagctgaagggggagaagaaagaaggtgaacttgtgcgtctaccttactatttcaaatttaagaaatactttaaaacaccttgccaagagtggctggatacaattgaagtaatgtgtaatgaaatacttggcaactattccaaaaaagaagatcaattgatgactgcggccttcggcacccgtccgaagcgaagactgaaccgagtgctggacgccttgggttttgaataccctgactatgaanatctgaac

SEQ ID NO: 17716 - DNA, 375 bp, Zea mays
  unsure (1)..(375): unsure at all n locations
tacagataanaaaatggttcattataacctccaatataatgcanagagaatgatacatcacagaaaacaaagttgtaatgatacttatatgtcatatcatcatgggcagggcagtaatgtaggaagcttactctaacatattcaagatcttctcgcaattttaacagattattgttgacaccgtcaccatttgaacgttgttgcttctcgagtcgccttatcatcctctaaatcttccgtctctcccctgcttctttatcactcctactttccagatgacatatacatacatccgaaaaaggggggtgctctttgatggcttactgctcctgcgtataacattctaatttcgctatataatatacgtatatacct

SEQ ID NO: 17717 - DNA, 435 bp, Zea mays
  unsure (1)..(435): unsure at all n locations
agcttgtaagttgtataaactatctttattatcttgagatacatgtaatcattgatcatttctagactaatttgaactctatgtgctgcaaactgttttctcataacctccacattcctgaacttattatgttactgtgttgcatctgacatgcttctgttcttcatatacaaactgttagacaattcacatgtgaattaacctggtatatttgttttttgcagcctgctcttcttatttccttgatagagcagagtacgaagtcaactgatcataatgcttccaccaatgatcgtgacaatagagttttggttacttcaaaaagtaatgctagacttgttgaccaaatcttggactatattgataggtccattgagctcatgaataggtaaaggatatatngtatttgtcaccatattagagggatctgatctt

SEQ ID NO: 17718 - DNA, 386 bp, Zea mays
  unsure (1)..(386): unsure at all n locations
gcttctcgtgccctgacgcccgagttctccgtatcctcggcgtacatgggaatcttcttgtagaagggatgatgaacacagtgcgccgctcggcacgggcgcactgtttgccaacagactggacaggcgcgccgtctgctggatgaccttgacgccgtctgcctgtagattggacagggcgcattaaatgctgagagggcacgtcacccgtcagtgtgctggcaagtggcgcgtcctctccgcaataaatgcagaggctgcacgcctgtatgggccttacatcangctcagcccgttggcttatgtcacgggtctcaagccacgcggcagcagcgggtcttcgcatgagcggtgagcgtatggcaaggcctggacacgtgtcaaca

SEQ ID NO: 17719 - DNA, 445 bp, Zea mays
  unsure (1)..(445): unsure at all n locations
agctntcctctcaggtcgaggtaagcattaatgcacaaattctccctctttgacatcaaacaccaaaaccatattcaagcaagaacataggatgatgtcaagggacagcacggtattaagcagggaaaatgcaacactctaacattactcccccttacacattaaacatatgcaacacaagcattggagaaaaattaaggtacaaatacccaaaaaggtcaatacctccttttgtacctttaccatgttatggtgtactatccatctaagtaggcggagttcctttagtcatcaattcaagagttccatcttgaaagctttatctctacggagctgctttacacttatgtatgagcctttatgctgaccttntcttgttgctaagatacanaaattacaacaagttatagtattgtggcacaagatgaagcttctattctagaga

SEQ ID NO: 17720 - DNA, 367 bp, Zea mays
  unsure (1)..(367): unsure at all n locations
gtacgaagctcaacccgtcgcattcaatgctactgaagataagaaggagtctacaccgagtagaacacccatcgacgcctccaagctcgacaatgaggaaatggcgctcgtcatcaagagcttccgccaaatcctcaagcaaaggagggggaaagattacaagccccgctccaagaaggtttgctacaagtgtggtaagcccggtcactttatagcaaaatgtcctatntctagtgacagtgacaggggcgacgacaggaaggggagaacaaaggagaagaagaggtactacaagaagaagggcggcgatgcccatgtttgtcgcgagtgggactccgtcgaaagctctagcgacttctccgacgac

SEQ ID NO: 17721 - DNA, 452 bp, Zea mays
  unsure (1)..(452): unsure at all n locations
gagctggtttgaccacacgagagcatccccactcttatcacattcaatggnttaacaacaacggtaagttcaaggtaacaaaaacagcaagggtgcattnttctattggttcttaccatgactgttgatttcgatgtggtgaatatggatgcttgctctcttttactgggacagccttgggagtttgatactgatgctattcaccatggtagatctaataaatatactttcatgcataagggaaagaaaatagtgttgcttcctatgactcccactgaaattgtccactttgaacatgagaaaaagactaatgctaagcaaaaaggtgttttgaactctgaaaatcagcaacctattaagttaaaaactcctactttgctagccactaaatctgatcttgatgagttacatgcctctgttggactctgctatgccttagtgtgcaaaaatgc

SEQ ID NO: 17722 - DNA, 417 bp, Zea mays
  unsure (1)..(417): unsure at all n locations
ctaagctcacgcgttaccagaggttatgtacacgcttgaatntggactatgaaagagtagaatagcgggtcgacagatagggtgtcgcggcggcgttctacggagcagaggagtgttccggtgatgggactctagcaaacttcaattggtcggctccgagagcaatagaaagctataaacaagctataacaagaagcaatcggggagttattgacccgaggagtgctgtccacggaggagttcttcatggcagtgcgaagaacaggggcggaatggttttgtggactgtgtgagttcttctggtggaaaagagtcgattgcacaagagcttgtgtgcatgatgtggtgaagaagcaggatccgagctcaatttataggccgatggccggagttggatgagaatcgcggagctgtaac

SEQ ID NO: 17723 - DNA, 211 bp, Zea mays
atcatatgtgtcagcatgatagcctgcgtactgacacaggtcattgaaagcctgagcgtactgcaacacactatgaatcccctaaagtagtgccagaaactcattgagcttgcggtccatgatgcctgccggtatgtgatgccctctgaatgctgccttgaactcttcccatttcaccacgtggtcaactggctgcatagcgaggaagtga

SEQ ID NO: 17724 - DNA, 442 bp, Zea mays
  unsure (1)..(442): unsure at all n locations
agcttatgaagattcttcatcccaacgtgggctagtcggcgatgccagagccaacccatgttagtcttagcaattaagcaagtgtcgagttcagctctattaaaatcaactaagtatagctgaccctctaacactcccttaaatgctactgaatcatcacttcttctaaagacagtaacacctatatccgtaaaaagacaattgtagcccattttgcataattgagaaactaaaagcaagttgtaatctaaagaatctacaagaaaaacattggaaatggaatggtcaggtgatatagcaattttaccaagtcctttgacgaaaccttgatttccatccccgaatgtgatagctctttggggatcatggtttttctcataggaggaagaacatcctttctccctagtcatgtnggttgtgcacccgctatcgattattcaac

SEQ ID NO: 17725 - DNA, 336 bp, Zea mays
  unsure (1)..(336): unsure at all n locations
catactctggtatgtanggagagtggcacgaagcattaagtaagacctgcttcggctgattctgctgggtttctgcttcggcgatctctttttgcttttgaatggtaatctgacacgttcttgtcgtgtggcccttgtcttcaccacagaataagcaatagattttcctgggctaatccccatatcttcctctgaagcccctaccgcctcggccccttggagttggtggcttgaaggagcattgctgctgtcctgacgactgtgaagtgtgatgtggcctctgaaactggcctcctttgtcatcgttctgactagagctgtggattgatctgacat

SEQ ID NO: 17726 - DNA, 447 bp, Zea mays
  unsure (1)..(447): unsure at all n locations
agctntaccaaatggacgtganaagtgcctttctcaatggaccaatcaaggaagaggtctatgtagagcaacctcctggctttgaagatagtgagtaccctaaccatgtgtataaactctcaaaggcgctttataggctcaagcaagccccaagagcatggtatgaatgcctgtgagatttccttatcactaatggcttcaaagtcggtaaagccgatcctacactctttactaaaaccattgcaaatgatttgtttgtatgctaaatttatgtagatgatatcatatttgggtctactaacaaatctacttgtgaagagtttagtaggataatgattcaaaaattcgagatgtctatgatggcggagttgaagtatttcttaggattttaagtgaagcaactncaagagggcaccttcatcagccaaaccaagtatatacaagaca

SEQ ID NO: 17727 - DNA, 341 bp, Zea mays
  unsure (1)..(341): unsure at all n locations
tcttggagtcccacttgaatgtgtggaagatccaagggccatccatgaagttacctgacttagagcttggcccttgtgtggggctccaatgaagactatgggaagcatgagctccctaaaccctcaacaaaaatattggagtcatcgataggaagttttctactctttctcatttaatattcgacactatatttagttcttacataggttgtgtgcttactttccaattttagcttgctaggctagtgataggattggaacctgngttgcatagctcttttgcgatagagatatcaacacacctgtannatcatggttgtgcatttagaatagttactttc

SEQ ID NO: 17728 - DNA, 440 bp, Zea mays
  unsure (1)..(440): unsure at all n locations
agcttctcctgtccggaataatctactgtatttctgacagtcgatttagcatagttatagatgaacttttggcacctgtaaaacatataatctagagcaaactagttagtccaattgtttgtgttgggcgattcaaccaccaaaactatttaggaactaggtgtaagcctaattccctttcaaccacaccatcaagcagccccatcaattgcaccagttcagcagcagctaccgttgagagccgagagacgaatgcgaggcgcagaccttttgaaagaacgtcgctgactgaggcatttttatgtcgtgcgtgtgtgtacagcgacggcattgcctccacgaggggccctgagggcagccagcagtcataccaganagccgtagtacgcccatcaccaacctccaccgtggtcagcaaccgatagtctgggaggagccga

SEQ ID NO: 17729 - DNA, 356 bp, Zea mays
  unsure (1)..(356): unsure at all n locations
agaacacatcttacgattaacaaatgttcattnttagaaagacaggagttgtagcgcatgccaagcagggaagcaagttggcactcatcatccgcataaaaacataatgacgaccgacaggccactagagcttctacacatggatctattcggcccgatcgcttacataagcatcggcgggagtaagtactgtctagttattgtggatgattattctcgcttcacttgggtattctttttgcaggaaaatctcaaacccaagagagcttaaagggattcttgagacgggctcaaaatgagttcggcttaaggatcaagaaaattagaagcgacaacggtgacggagtcaagaactc

SEQ ID NO: 17730 - DNA, 438 bp, Zea mays
  unsure (1)..(438): unsure at all n locations
agcttgagcaacaaataacgattttgttatgcttacttgtaaaaatatttccaccaggattcttcaatccgatgcaacatctacttggtcacctaccatacgaagctaacgtaagaggtcctgtgcaatatagatggatgtatcacatcgaaaggacactaaagaagctacgtgcaatggttggtaataacagatgagttgaaaggtgcatcgctgaataattcaaataccaagagatagcatcgttcacgggcctgtactttgcagacgaacacaatgtcaatgcccatacgttgcggtatcatgtcgacgagccccctattagtgatattgaaatatttcaacggaggggcaaaactgtangacccatcacaacatactgtttcaccaacgacgaatggaagactgctntactctacatgtataacaacatggaag

SEQ ID NO: 17731 - DNA, 158 bp, Zea mays
tggttccttatttgaatggatgaatggatgtatgcttgcaatcgcatacagaacgaaccggctgaagacactgatgaactcgcacgatatgtccctgagcagcagtcggttggaggaggcaagtgttcgctgacctatctctgttctatacattcttt

SEQ ID NO: 17732 - DNA, 431 bp, Zea mays
  unsure (1)..(431): unsure at all n locations
agcttgagntttgagagccctatattgcatattatcagtgactctctcaattaaggactttgccacccagatttgtctaggtctactcttatttggtggacctaggaatgtaaccttaatctttccatttgcaacctttcttagaacatagtgagcattgaaagcaaatggtcttgagtgcttatgtaagggagttggtggtttagctttgcagttgtgggcaaaatgaccttcatttccacactcaaagcatttgataggcttgtgagtctgctttggcttgtattgagtaatagctctcttttgcacaaaagcattgtatccaataccactcttgttatttttcataacagtgttcataagcagctcatcttggaggtattgaccctcgttgaacttttgcacacttggtngcagatgttcatttcact

SEQ ID NO: 17733 - DNA, 425 bp, Zea mays
  unsure (1)..(425): unsure at all n locations
ctttaaactcagctgaccccccacgtactaagtacgaagctattttatttctgtcatcgncgagttcactcacgtctgacgaatcccagaaacttgacggcatatgttcgcgcagatcgtgggcgcgtctatggggacgtcccagctgaagatccccacgaagcaagggtcgacgtcgacctactcctacttctactcttgcggcggtcgcactgcgccgaacgagtgctgcgtcgtcgtggtagagatccatcacggcggcacgctgaagacgctgctgtacaaccaccgggacaagaagcttttctacaggaaggtcgttcggctcgcgctagatctcgccagacggtgagtgagtacgtcatgaatgagttgatgtatcatgtatgtagtagcgctttacgcaccactatatatatggtcgc

SEQ ID NO: 17734 - DNA, 438 bp, Zea mays
  unsure (1)..(438): unsure at all n locations
agctntatgtgtcttgngtggacttgtgtggactgtgatgcttttgcgcgatccataggagaactaatgaaaagccgtatccaaataaataaaatgcgcgtacttgtgatgttatttttgtgttgcgtaaatatataaaatgttgtcatctttttaatggtgttaatgtcgatcgacgataaagcgtagataactaatgctaacgtgtggttgtctacggtgtcttccaatttaaatgtttagttcgtcactgagtctttgtgtatgtgtgctacttttgtgctcctttcattatattcatacatatgcatcgtgcatctcatttangaccgagaggtgatgatcgtgcacgtgatgtggtgccaacaacaagatgtcgttgatggacgacctgaagaatggtgaacttacccagtggatgctcgccaagcgagtacc

SEQ ID NO: 17735 - DNA, 284 bp, Zea mays
  unsure (1)..(284): unsure at all n locations
tgaagttttccgagttctccattttgagtaccacatcatctacgtaggcctncacacgcttgccccagtgatcggctaagcatgtatgaatggctctctgataagtcgctccagcgtttttgaggccgaacgacatggaggtataacagaaagcaccaaacggagtaatgaacgctgttttttcctcgtcttcttttgccaaactaatctgatggtatccggaatagcaatctatgaaagacagcacagaacatccagcggtggagtccaccacctgatctatt

SEQ ID NO: 17736 - DNA, 427 bp, Zea mays
  unsure (1)..(427): unsure at all n locations
agctttgtgggagagatagtacattgtgatgattcatgctcagnggatgccacttactccctccgcttgattttatttgtcgccggttagtacaaaattgaattaagtagcgccaaataaataaaaatggaggtagtactattgagcagagctagaaagaaacgaagacttgtttgatggtgtttgactgcagaggctatgaacctgttgatatttccattggagctggctggtaggctgagtctgtatgttttttcttgatctctcatgaatgttaatgactgcttacatatacaaaaccaatgttgtagatgttaacaattaatattttcatagctattcgattttcataggtattcgcattcaagagatgaactctggtattatattcagtactgcagttntcagcacagctgttacttcactg

SEQ ID NO: 17737 - DNA, 241 bp, Zea mays
agaaaccgaatcccttaccctcgaagcatccttcgaagatcttgattatatcattcgacatgctgcgggaaagaaattatccaaagaagaaatttttgaagccaaacactatgcctgggaactgaagtacccgaagggggccttattgtttaatggtacaagtgaagatgattttttgtattgtcttccaaacaacaaagaattatctgtctgccgggagatggccagaagtatgggtttt

SEQ ID NO: 17738 - DNA, 435 bp, Zea mays
agcttaccaatgacgaggcatgtggccatctttaaggtcttcaatcatcaagcctacatcgacatagtccttaatcactcagacaaagacactacaccgagacttccttctcgtgcaagtcacccgcccggtctcatctttatcatttaaaacccaaagtttggtacctggtagaggtacatctttttagatgttgaacccatcacggccatgatggattcaccatcaagtcttttctttgaaaacttcccatcccatatgaagcatcatctttgtttaaaacaaaacattttgttttctaaggcaagactaagcatcaaaaaacttttaagtaaaacaggtatcaaggaatggtaatcagttcctaggaaggaaatccagcaattgtttagcatacaactcctatcacctaatgcatcatctcaagtgataaag

SEQ ID NO: 17739 - DNA, 468 bp, Zea mays
  unsure (1)..(468): unsure at all n locations
gtnctaattaccgtcatgtacccttctcacaattcatgtctatattctccaagagaaggtttgagaacccaaaggccaagaaacacattccctcaatggcttttaaaagcccaaaccaccaaaccctcttatgaagtaaaccaagtaactggacannntcatatgccttcaacttgaactttgtgcaaccgctagtcttgacatgggtcaatatgggtctcaatctcccaaatatactcttactcttgtcnaacactcccatatgttagccaccacaattagtcctctggcttctcttagtccatgccccaacgcccatccttcactactnttagtccatcgatacaaactctacttcaccttaaacttcgtcattgaccatgttcgagctctacatctatgcaccaccacaaaccaagtgataagttgcaccatatgttgatgtaatggttagtccataaactcaag

SEQ ID NO: 17740 - DNA, 365 bp, Zea mays
aaactctaagaactcttgtaataacctttgtaaagaatattgtcatttaagaattagattttactctgtaaattttgtccataccttgtaatatatttttacctttacatcaatgtatggagtgcttcgatgtgaacgaaactagcatttttttgagccgaaggcgaaaaacaccttctcttcttttcgtacacaacgaagcatgaaactactgcttctttttcttcttgccgaagccttatctttagagccgaagcatccgcctgtgttatgatgatgatcctatgtatgtctaaatgaatgtttatgaatgcaaatgtatgatgtaatgtgtcgcgcaaatgaatgttcaaacacacgcatac

SEQ ID NO: 17741 - DNA, 382 bp, Zea mays
  unsure (1)..(382): unsure at all n locations
acccagcgatctcaccctccgtgcctacaaataactccattttttaaattttttcacgnccaacaattttataatttcatgcccttttccttatttttttgaattctgcttattgggctcaactaaggcttttattatggttacaacaatcttacccttttgaatgacccatttgctttgatcatgatacttttaagtatatgcttggcgaattctttattcttagttaatttgatgctcatgcttactttggttcacataaaatgatggttcttgggtctggcattttgagagaaaccctaagtgacactggggtgttacaccctttcccccttaaaggatcttgtcccagatttgggccacagtctcccaaggtgaagcg

SEQ ID NO: 17742 - DNA, 432 bp, Zea mays
gtcacctgcggcatgcaagcttgtgaagattcttcatcccaacatgtgtttttctgttatgccacacccaacccacactactcttagcaatgaagcaagtatcgagctccagctctattaacatcaacctaatatagttgaccctctaataatcccttaaaagctacctgaattatcacttcttctaaagacagtaacatcctatatccgtaaaaagacagttgtagcccactttacataattgagaaacacaaacgccattgttatataaagaatctacagaaaaacattggaaatagaatggtcaggcgatatagcaatattaccaagtcctttgaccaaaccttggatttcatccccgaatgtgatacttccttggagacctcccctttcaccggaggacgagaacatccttttctcccctggcatgtg

SEQ ID NO: 17743 - DNA, 436 bp, Zea mays
  unsure (1)..(436): unsure at all n locations
tgtggaggttcttcatccccacatgtgctaagcggcgatgcctcaaccagcccatgcaagtcttagccattaagcatgcatctagaccgacctcttcttttgcaaaatcaaccaaataaagtttggcgtctagtacacccttaaaagctagggaaccatcacatcttttaaagacagacacatctacatttgtaaatagacaattatatcccatattgcataattgactaaccgataacaaattatatccaagcgactcagctaanaagacattagaaatagagtgctcggatgaaatagcaattntacctaacccttttaccttgccttggttcccatcaccgaatattattgaatcttggggatccttattcttgacgtaggaagagaacatcctcttttcccctgtcatgtggtttgtgcatccgctgtcgat

SEQ ID NO: 17744 - DNA, 418 bp, Zea mays
agcttttcaccatattatcacgggtatcttgataaggtttagcatgacactttcccttcaaaatagttaagctccttcttagccttccaacttcttccttgagctctttattttcttatgtgatagaaatatcactaattcctgaaatttctagctcaatggaagattgactctcttgagagcaacatttgttagcacatgataatatagtttctacttgagtacatgtgcatatgtgaggttggtatgatttaaaattagttaacacaacctcatgagccatttctaacatgatatgtgaatccataaatttattatgagagcacacaagcatatcatgtttttcttgcaaagctagattttcaatatttagcctttctatcatgttcttgaacacaacatttttattttctaattg

SEQ ID NO: 17745 - DNA, 434 bp, Zea mays
  unsure (1)..(434): unsure at all n locations
ccgtgatctctaagtcacctgcggcatgcaagcttctaaagggagaacacgngatntgtttgactacttacaattcgaaaaagatagaccttgtgcagcttgtcaagcaggtaaacaggtgggaggagcgcatcacaggaagaatgtgatgaccacttcaagacccctggagctgctgcatatggacctcttcggacccgtcgcctatctgagcatagggggaagtaagtatggtctagttattgttgatgacttttcccgcttcacttgggtgttctttttgcaggataagtctgaaacccaagggaccctcaagcgcttcctcaggagagctcaaaatgagtttgagctcaaggtgaagaagataaggagcgacaacgggtccgagttcaagaatcttcaagtggaggagttccttgaggaggaagggatca

SEQ ID NO: 17746 - DNA, 437 bp, Zea mays
actcagcttgcgttcctatgaaggaagacctagatccaggctacttttactaacacttatcacttgtcattttggaacggcctgccctgcatagttgtctactattaccacaatttcccctacttggtttgttgcatttacagtaccactttcagtctcattgtttggctattgccacagtactatgcagcataagtacaactaatacgcacttcagtaattatgaatttggacatattagtactttgactccaccaagagaaagaaaagcacagatgccatacaagcaaacataacaaaccctgctctctcatactgttctagaataacttgctctttttccaaagcttcgcgaccaacaattgataattctaccaccatatgaagaattgtatgcataaacgtgacctgacctccacatttcagttcagagatcc

SEQ ID NO: 17747 - DNA, 430 bp, Zea mays
ggccatttcttcgatattctcttcaacattaataatgttggacccacgaatccagtcattggcacaaatcaaacgctcgaccattgttggtgtgagcgagctcctaagatcatctagtgttcttccacctgaactaaatgctgactcggaggctactgttgagatcagaatagttaaaaggtcacgggccatgcgagcaagtattggtagtctagtagcattgtccttcacctattaagaatgtcaaaaccaatcttatcttcttcattgtccttagataaatacttgtctagttcagatttgacagtaatatttccaccccccattattgttcatgtgctgagcaacaatagacctcatcaatcgtttgctatgtgatggttgctctttagagtcaatggcttgtggtgtcttctcatgtggagcatac

SEQ ID NO: 17748 - DNA, 309 bp, Zea mays
ggaggatatgaagaagttaaccatgatagttcgtttcagttgtttaaacctttaatttcctcctttatacaaaacacgtttacaatcgtaccttcggcttcttgatgtaagctaaagcgaaggtgcttcagaggagaaattacacagggcaattatcagcctccaaaaaggcactttatgcatagaatggcacatatatatataggggaacacacagtttcacatgaaatcacatatgtgtgtgtgaccaccatgtgtgtggaccaatgatgtgagggagaaaatgtcgtctacctttatcattctgga

SEQ ID NO: 17749 - DNA, 412 bp, Zea mays
  unsure (1)..(412): unsure at all n locations
caagctttgaagaaactcttatctaccgttgtgatccnngcgcccccgccagtgctcgaggggttgcagcggttctggagaaaactggttgtgaacatgttaaagatgcagctcacgcagaaactgtcttctccatagacaacgctaatgagccttcggccgaagctactttgataggcgaaaaattctattccgatgtttggatgaagggcggccgtgagatagccgatgaagctataaagaaaaatgaaaaagaatttcatgacgcttgagaagaagctaagcgagctgaagaggctgctgagcgcacaaggcgtataggtattattactgaattttagcttcggtgtttatatttggcttcagattaacaacttgttcttttctacagctgaacattccccaccacctg

SEQ ID NO: 17750 - DNA, 413 bp, Zea mays
tagccttacaaccaccttttcttgcgccatcttataaaggccggacggggaaacttagttgtggcgtagaattttagaacaatttttcaaacatagaaaaattatattattataaaaacaacttttggatgcacatgtatttgtatcatcaagcattagcattttcacaagtacactttttactgtactacattcagactgtttactcaatgtccaccttgaaacaagcttggtatgagactgcagctaatttagcattgcatgttatgtatccaatactgaatgttctaatagtttaatttcacaacatacaaatttataccttgcctgtgaatcccatgttaattggcaattgaccagtggactgcaacattaatttcaattgagatggtgctggagtgcaagttgtggca

SEQ ID NO: 17751 - DNA, 423 bp, Zea mays
tcgcatctctgaactaactcggctgcatcgttcttcttgtctttcaatagaatcctgacctgaaaaccttcccgactagtgttctggatgctgcatgtactccacactgccctgcatggacttcctccagaagttgcttcccggtggacgggagaacgcacttcatgaggacgcctgacgcgcccctcctgtataatacctccccaatgagtgtatagtgagctgattgtctggcaatgcgttctgtcgagttcttgtcatctggttcttcttcattctttatatacttaataatcggccgtctccagtcatcagagtctgactcgggttgatctatgacgttgcactcttctgcttgatccattgagatactcggctgcaggatttcttgcacgaagactccgggtgggacctgagttcgac

SEQ ID NO: 17752 - DNA, 411 bp, Zea mays
aagctgggaaggactttatttcacatgtgttaatcggcgatgccacagccagcccatgctagtcttagcaattaagcatgcatctagaccggcctcctcttttgcaaaatcaactaagtaaagtttgccgtctaatacacccttaaaagctagtgaaccatcacttcttctaatgacagacacatctacatttgtgaatagacaattatatcccatattgcataattgactaacagataacaaattatatccaagagactcaactaaaaacacattaaatatagagtgctcggatgaaatagcaattttacctaacccttttaccttgccttgattcccatcaccaaatattattgaatcttgggaatccttgtttttgacgtaggaggtgaacatcttcttctcccccat

SEQ ID NO: 17753 - DNA, 222 bp, Zea mays
ccagaagcgtgaatgattgcgaggcgattatacaccaaggcgtgatatgaagacccctgctgatgcgtatctacaaggaaggtttttcgacttggggaaacttgcctgtccatctattatattcaacaatttatgcagggcactgtggggaccttggctcgaggtctaaacaaataaagtatttggaataggtgacagatttggacaattcgctactgtaac

SEQ ID NO: 17754 - DNA, 366 bp, Zea mays
gagtcaattcaattcttattaacccaagctatcaatcttcaatcatctatatattcaagattgacccacaattgttttgaattattatgtctaaaactcatatcatctcggggaagatattgatgttgtatgaaataaaaaattatcacgtgcggaaaaatcaaggcctacaacatggaggaaagccaaaggatggtaacagttatgcttttaagtgcaagtattttaaattatcatttctcatgtgtcttgtgtagtcacataaaaaaggaagcacttcaaatgtctataacattatgtcaccattctttgaagaaattcctctcatatggtagattgcatattcatcatctatttaccatacca

SEQ ID NO: 17755 - DNA, 432 bp, Zea mays
cccgggatcttaagtcacctgccgcatgcaagctttgtctatgcagacttataccataataagataacacgcaatgggagtggagagatggcgagagtaacgtgtaccctctgtggcaagaggctggacgatggtgtgtctgtgctctcggttcgcgtgaacctgatctggtattaaaaaacccggtggcgagttgacatatggaagggttaggtgctacatatgtcgtgtgattggagatcctcagttgagtattaatcgattcggatcgccgttacttctcggacatgaagacttagtcactgacttacatgtagcaatcgagtgaactgatgggatgataaaagacggctagtgcagatcaagtgattgaactatggtagaaagaactctagatgcaggtaattttacttaacctgacaagtaaaaatg

SEQ ID NO: 17756 - DNA, 423 bp, Zea mays
  unsure (1)..(423): unsure at all n locations
ngattcccgtctccaaagatgatcgaatcttgagaatctttgtttttgacgtaggaggtgaacatcttcttctcccccgtcatgtggtttgtgcatccactatcgataatccagcttgagcccctggatgcataaacctgcaaggcaaattaggcttgggttttaggtacccaactcttgttgggtcctacaaggttagtaacaatatccttagggacccaaatgcaagtcttgtctcccttgcatttggcccccatctttttagcaaccactttttcatttttacatgaaagaacaaatgtagtgttgcaagcatgaaaaatagtggtaggtttattacagactttccgaggagcatgagacacaaaatttctcctagacctaccattaacattggaactcgaagcaatcatgccatgtgag

SEQ ID NO: 17757 - DNA, 380 bp, Zea mays
tcactacccagatcaaaagaaaagagaccacacatgaaagtggtatatccgtttgatccaatagagatgatagatgttgcttgatcacttgacaaacaacatagaaattgtttcaagggaggagtccacggaagatcacacatcagtgtagttccacaatggatcatgactagagaccttgataccagcatccgacgagtagcacatccctgtgtgcgcattcacaggaggctcttagtttcgctgcggcaccataagtccttaatcgtgacaccactaccgaactgacaccaataacaatctcacgtagcaaaaatagattgtgccaagataacgcattgacatagtctcataatggattacaactactaactgtgata

SEQ ID NO: 17758 - DNA, 434 bp, Zea mays
  unsure (1)..(434): unsure at all n locations
ttgatagtgataatgaaggtactgaagcctattaagaattgcatatctaaacatgtaagaccatacatccatcttctatctatctttacatagaaaaaggtgtcacatgtgtggagtcataaaaattaaacactagaggcacaccattatgaagaacatgggagaaaaaaataatggtttgtgaggtatcacagaatgtgtttatcaaaattataattggtagcccctttcgaaaaacaaatattctaattcaagccatataaaattggcaaggataattataggcaaataaaaaattggatccataatgaacaacaattgtagcttanaacaatgagttgctagatgtcacatggatgtgttcaaaactaanattggtagtcgtaataatttaaaaattctattatactccatgcaagaactaaagtatcatg

SEQ ID NO: 17759 - DNA, 438 bp, Zea mays
  unsure (1)..(438): unsure at all n locations
tgaggcatgcaagctngaccctaaattactaagnataccttattattcttttattttcaagaacaagccctaccttattaaagtgatcattcaccatccaagtttaattgctaaattgcatatcataccatgcatatattttactcattgcatttattagattgcaatctcgctgacggagagtacgtgttcatccccgagcaaggagctgtccacgaagaagaccaggagcaagctcccgacactgccatcgaggatctccccgcagccctagctattgaaggtaagccccggctttatgcataaccgtatctatatatgttactttactgcacttaatgtgtgtaggattgtaatgtgcacttaagtgtatgagttgcttgaaacctctaattgcatgaacttacgatatcttcttgagatggatactagtatgct

SEQ ID NO: 17760 - DNA, 438 bp, Zea mays
tgaagccatgcgtagtagcataggctaataatatgcgtattgactcatgttctagctacgggtgcataggtttcaccgaaatccaaaccttcgacttgggagtataccttggccacaagccaagctttgttccttgtcaccacaccatgctcatcttgtttgttgcggaagacccatttggttcctacaacattttgattaggacgtggaactaaatgccatacctcattcctagtgaagttgatgagctcctcttgcatcgccatcacccaatccgaatcttggagtgcttcctctaccctgtgtggctcaatagaggaaacaaaagagttatgctcacaaaaatgtgcaacacgagatctagtagttacccccttatgaatgtcgccgaggatggtgttcactgggtgatctcgttggattgcttggcggactctt

SEQ ID NO: 17761 - DNA, 427 bp, Zea mays
agcaccgcagctgcactatttactgtagatgccacttttatttctttatgacagaacccactcctagttgagagttgtagtgcaaagtggcccatttacacaacttttgattatttttgtctaaagcatagcctttttatttttgaacctcaatttcctagaacaggctatagtgaccaataacaacccattgtaatttttacagaatttttggagaaagttaaatcatggttgtagtacaaacctacactagaattcataaatagaaaataaagaaagggaaaatgaatgatggaaattagtgtcatcctaaaacccttgtaaattgtccactgaaatatacacaaggaataccaatccactatgcttatccttaacaaaacctaaacctagagtgatacgcataaaccactaaaaaccacgtacg

SEQ ID NO: 17762 - DNA, 436 bp, Zea mays
  unsure (1)..(436): unsure at all n locations
tgtgaagattcttcattccaacatgtgctagncggcgatgccagagtctgcccatgttagncttagcaattaagcaagtgtcgagttcagctctatcaaaatctactaagtatagctgaccctctaacactcccttaaatgctactgaatcgtcacttcttctaaagacagtaacaccaatatctgtaaaaagacagttgtaacccattttacataattgagaaacagaaagcaaattgtaatctaaagaatctacaagaaaaacattggaaatggaatggtcaggagatatagcaattttacccaatcctttgaccaaaccttgtgttggcacttgctctcagtggcaaggaagccaacaagggtgaacggtggtgacaacagggttacgcgcacggnggcaatagctctgttgatctagcctctcacgggcgct

SEQ ID NO: 17763 - DNA, 415 bp, Zea mays
agcttgagtgtgtctgtgacatctatcctagtcatggtgtgcagagaaatgcccaggtcctccggtagctcactctcggctggaatgccttcgtcgtccatctcgagcaaaaacacgccgcggcctgtgcacttgtgatctggcgtgtacttttccgggcaatggtagcattccccgctggcacgtttggcggcgacctcgtcaggtgtgagtcgacggaggcgaggccggcttgtcgctgaagttgctggacgtgcccctgaacctgctgatgatctggatgaggctgttgcaggtgtgtatgacgtcttgccggggctgggtgtggtacccaagcgccgctcatacgctctggccaagtggagggcatgctgaagggtggatggcctctccaactcgacgtcagtgcggagcg

SEQ ID NO: 17764 - DNA, 437 bp, Zea mays
tcatgcaactctacgctcatctaagcctagaagataatgtggtcatgctcaaacttctaaaaagagcgagagagcaaagcgaagctcatcaaatgctagaatatgttctctccatgaaaatgctacgctttgacgagttgactaaagaacatgaggagctaaagtgctctcatgttgatttggtccaaaggtatgaaactatttcaattgagcaagataactctttacattgtactgctcaattagtaaataagaatgccttgcttaaggaccaaatggaaaagctaaaaaatgaaaatctagcttttcaagaaaaatatgatatgcttctatattctaatgaaattcttatggatgatcatatcatattaaacattgctcatgaggttgtaatagaaaacttaaaatcccaacaacctcactcatgcacatgtatt

SEQ ID NO: 17765 - DNA, 419 bp, Zea mays
tgcaagcttatgaaattatctacaacttcttttttaacccacagtttaattctgttgataaaatcgcctaactcttaagagaacagattctgcacagaattatgagactgaaaaactgctataatcaaactgtcataactttctgttctgatgtccgattgaggtgttcttcacggccacggaaagatctacaaattatctaccactcatatatagactttttttatttttttgaggccactaagatcacggaaaactggtatgcacagaaactgtcgaatctgccattctgcagaaattaaattcgaaatcaaaacctaaccccacacctaatccaacctctaatccttcaatccacatgatccacaacctccaaaagcacataattatatggagaaacaaggatcctatccttacct

SEQ ID NO: 17766 - DNA, 437 bp, Zea mays
actaagcttataaatggacgtgaaaaggccttcctcaatggaccaatcaatgaagaggtctatgttgagcaacctcccggctttgaagacagtgagtaccctaaccatgtctataagctctctaaggcgctttatgggctcaagcaagccccaagagcatggtatgaatgccttaaagatttccttattgctaatggcttcaaagtcggtaaagccgatcctactctattcactaaaactcttgaaaatgatttgtttgtatgccaaatttatgttgatgatactgagagcacctagagggggggtgaataggtgatcctgaataacttcaaaacttaagccacaaaaacttgttaagtgttagcacaattatggccaagtggctagagaggagtcaaaacacaataaccacaagatatcaatcacagagatgacac

SEQ ID NO: 17767 - DNA, 343 bp, Zea mays
tcaaagctatagcattcaatcggatggatggactgtcgcaatctctgatcaaacacgaatgttgtgaataacacaactatggtgtgcgagcagcctgttgttccctcacgaataagattcctgcatagatcgccaaggggagcgcacgctaaccaaagcgaacctgaatttattggtctgtgacattgtgaataggttacacgaactaaatgccatccatttgcgatgcggggcatgtgcatatctctgatattataaataacaaaatacagactcataaggagggaatctcacaaaagcccatggcgccaaggtctcatcccctcctttgctgtctaaatga

SEQ ID NO: 17768 - DNA, 429 bp, Zea mays
  unsure (1)..(429): unsure at all n locations
tatgaaattatctacaacttcttttaccttcccacagtttatttctgcngataaaattgcctaactcttaagagaacagattctgcacagaattatgagactgaaaaactgctataccataactttctgttctgatgtccgattgcggtgttcttcgtggccacggaaagatctacaaattatctacgactcatatatagactttttatttttttgaggccactaagaccacggaaaactggcatgaacagaaactgttgaatctgtcattctgcagaaattaaattcgaaatcaaaacctaaccccacacctaatccaacctctaatccttcaatccacatgatccacaacctccaaaagcacataattatagggaggaacaaggatcccatccttacctagggttttccctaagaaaaatctgcaag

SEQ ID NO: 17769 - DNA, 375 bp, Zea mays
atgccacagccagcccatgctagtcttagcaattaagcatgcatctagaccggcctcctcttttgcaaaatcaactaagtaaagtttgtcgtcaaatacacccttaaaagctaatgaaccatcacttcttctaaagacagacacatctacatttatgaatagacaattatatcccatattacataattgacttacggataacaaattatatccaagcgactctactaagaatacattagaaatagagtgctcatttgagattgcaatcttgcctaaacctttcaccttgccttggttcccatcaccgaatatgattgagtcttggggatccttgttcttgacgtaggaagagaacatcctcttctccccgtcatg

SEQ ID NO: 17770 - DNA, 415 bp, Zea mays
  unsure (1)..(415): unsure at all n locations
ngccccgagactctgttctaatggttctggtgagtactaagtcttcttctttgaactctcttgggatggcggtgttgtcgcgtcatgccttagtctacgtttggtatttgctaagtgcctctaaagcaaagacacggtctccgtcgacgaggtccttaaaggttggttcgtcgacgtcaggggtggttgtggggctttctcatggagatccgtgatttagctcttgcggcgtcattgcttcggatccgtacatcaagcggaaaggtgtgaacccagtcgctctagattctgttgtgtttaatgcccatatgactttgggaagttggtccgcccatttgccttgtttgtcatcaagtagcattntcttgattgcgctgaaaatcttgccgttggcgcgctcgactactccgttgga

SEQ ID NO: 17771 - DNA, 418 bp, Zea mays
atgcaagcttgcgctgacatatttgcctttcatttatccaaatcggcccaaccgtgcctgcgtttgctgggaagaaaggggaacaacatgatcatgatacaccgacaaaaggagccgacacagaggctatcctcatatacttacccacttcgggccatgaccaaacatgcatgcggggaggctccttgagcctcggtccccgcgggtaccaccaatgttcgccccgttgccggcttcggcatcttccctgcctcgggcgcccgaggcgccagagggacggtttgcccacacgcatacactacgacctgatgatcagccttctgtgcagtcggcacgggcaacgacttttggggagcgggcgggtcggtctgactcccggggttacctcaactacctcggccaacgggtcaagtacccc

SEQ ID NO: 17772 - DNA, 425 bp, Zea mays
tcgacaatctttctggaaggagcaggattcaaggtttttgttgtttctaatacaacatctagtacatttgccatcctcctcctcttaggagttgtggcagaacttttttgtgtctttgacattgttgtttctgttgaagggcttaaaatatctggcatctttgttacttcttcagtttttgacttttcagccttatctttgtcaaccttcgtttcaactggcatcttcccttgccttcaaatcattcttcacgtaaaaccattcctccatccaagctccaggccatcttttccggaatgttggcaccgggtggcttgtattgtggcgagcgataaatccataacagccaaaattgttatgatattgttctttgcccatggccttcgtctcatatacaagctcgtgcatactgcaaaagcatttca

SEQ ID NO: 17773 - DNA, 350 bp, Zea mays
  unsure (1)..(350): unsure at all n locations
gctattcngtgacctataaatactcagcttgcaatttctgacattgaaccactatctcttcagcttctgcttcgcgggnatcttccgcaaccgcaggaattgctacttttgtcgctgaagcccaaggccgtgttcgttcaatggcttgcagtatgttcacaattcatcgtttcttctgcccttcagtcttctcttctgtagccgagggcgtttcgttcctctgtaaaagttttgtcagttccaatcccacaggacttatcagcttgaagggcggagaatcggtcattacctctcaaatttcaatcacttccgcagcaattggcgacggaggggttttctctactgcttta

SEQ ID NO: 17774 - DNA, 411 bp, Zea mays
  unsure (1)..(411): unsure at all n locations
agctntgttctatagaaggttagactatttgttccaccagcattgattatgccagatctgcataagggatctgacatttattgtgatgcatgtggccaacgacttggatgtgtgcttatgcaagaaggtcacgtgattgcctatgcatctcgtcagttgcggaaacatgaattgaactaccccactcatgatttananctggcagcagttgtgcatgcactttagatttggagacattatattatgggaactaactgccaagtatatacggatcataagagtttgaagtatatattcactcagaaggatctcaaccttagacaacgccgttggttggagctcattaaagattatgatttggagattcactatcacccgggcaaggcgaatttggctgcaaatgccttgagt

SEQ ID NO: 17775 - DNA, 422 bp, Zea mays
  unsure (1)..(422): unsure at all n locations
taagggaggacatactcacatgagcagccatctatattcagcagagcttctctcactattcgtagatgcggcggcatgtggcaagttggaacagtaattgtatcaaaatcttcatgaatccagagctagagctccccttcaatggaagaaacgggagcccatagctagtagctcacgctgtcaggcagctgaagaacgtatatgagagtaagtagtcggggcgagcaagaacctgngacgggtgggggactagagtggagcggtggcgggtctgctccaactcgaagtggactaacttctggtactagcagcctgacccaaggccgccgccgccgctcatttcagtggtgaaagcaaggggatggagcttgggaagagcacatatgcaaggtgggaaaaagccacacgtacgcggggacctt

SEQ ID NO: 17776 - DNA, 405 bp, Zea mays
agcttcatttcctccacattatgtaacttacccaaagataagggaataaaacttctcctacaaaaacaaggtttttccctgagtacgcaattactcagcaagacttacccgactaaagaaaagactctcaagggtatgctggcttttgggaatcaaggtaaagctcatcaaagttcaaggactcattttgcagaaaagcttactagaagtgggtccttaagccaagttttatttcacaagttagtttattacctgaatcttctagcctgaatctagcattttcctaatctagaccattcacttgacctacactaggttgcttttaatcaaaacattgttatacttgttaactacgctgcaggtcgaagatctagtcttcataaccgagaagtaacggtgatccga

SEQ ID NO: 17777 - DNA, 420 bp, Zea mays
  unsure (1)..(420): unsure at all n locations
tgttgcgcggctngcgcctatataattatatatacgttctccatccacacgtcgntaaaacagcttcatcgtcgtcgagcaaagcagctagctagctacagagccagagagatacggaacgttagttgttttgagcagctagctatctagttagctaggtaagtaatggcacggcgacaacagtggagcatgggcggcctcgcggccgtggcggtgctcgccgtgctgtgcgtgctctgctcgggccacccggtgccgggcgggcatggcagcggcggcggcgggttcgtcaacacgctgcagccgcacttctacgaccacgcgtgcccgcagatgcaggccatcgtgggctccgtcgttgcgaatgcgcacgcggaggacccgcgcatggcggcgtcgctgctgcggatgcacttccac

SEQ ID NO: 17778 - DNA, 433 bp, Zea mays
agcttgactttcgcattcaaacgaagctctatttagtgtctgcttcgtcagaagaagagcttcggaagaaaggttattaatttccaagcaattttcaaggaattcaaaatcaaatggccagagtgcgttctactgctagagctgagcgcgaaggagacgaaaccgaagctgcggaaactgttcctatctcggaagcaatgaggcgatctgggttggtgacatcggaagacacccctgctgccgaagcagaacaagcagatattgaagagactgattctgaaggtgatcacagtatcgcagtaccaagcaagcctagccacttggacttcggaaagtcaaccatctctaaggctgattttcctaagatggtgaagtcgggctactttagcgaagatgagaaaaagctgattcgctttggcggagaagagactac

SEQ ID NO: 17779 - DNA, 426 bp, Zea mays
  unsure (1)..(426): unsure at all n locations
tgcattgcatatttaaatttcttggtttgcatctagggcttgtctaatctaattgagataaccgcccacaaagcgagtgaaaaaacttaactcggatcaaacttgacaagtcttagttttaagcttttagcacttaaattcttactttttatgcaattgttggttcttgaaatatgcatgaggttctgcacttanggggagtattcaaaactcaaatcactcatgaaaacctctagtgcaaggccaaaatgcaaatatcaccatttgcctattttctctaaaaattatctagcctatggcaaaatattttgaaaattatgagaaaatatatgagggtgccaatacctgtcccaacaagtgttattttgtgggattataagttgggatttggtttggttgaaaactagatagaanaattcaaaaaat

SEQ ID NO: 17780 - DNA, 281 bp, Zea mays
acttctctgatcattcacttaacggcactccattccaccctcctgggtgcacctgcttcccgggcggccatccaaccaacaggtccttaccgagaggcactcgagaaaccgcctgagcccccttgtacgacacaagtactacatcataatataaagaagggaaacagccgtatcattgataacttcttattactgctcattgattacaagttgaccaataccctatgattaagccttaataatccaacccacctaggtcaactacgacagcgataacaaaa

SEQ ID NO: 17781 - DNA, 438 bp, Zea mays
  unsure (1)..(438): unsure at all n locations
gcttcggtctctgccttgctgcntttgtccacgtgacctctatatacttgtttatcagncntgagaatcgcccttcttatacccatttccttaagtttctgaagccccaaaaggagggcttcatactctgcaatattatttgtgcagctgaagtccaatcttactgcataacaggntctgactttggatggtgcaactaggacgacagtttcccctgcaccgaaggttccccaatacccatcacaaaatatcgtccaagcttcagcatcatttattctttcttcatcatgagcccctggcgtccaatcggcaatgaagtctgctaacgcctaagattgaatcgaagacatgtgtacataatcaatggtgaattcattgagttctgtggcccattttccgacccttcctgtagcttctatgttcctcatcatgtccttc

SEQ ID NO: 17782 - DNA, 421 bp, Zea mays
agcttatgaagattcttcatcctaacgtgtcttgtcggctatgctagagtcaacccatattactcttagcaattaagcaagtatcgagttcagctctattgaaatcaactaagtatagctgaccctctaatactcccttaaatgctactgaatcatcacttattctaaagacagtaacacctatatccgtaaaaagacaattgtagcccattttgcataattgagaaactgaaagcaagttatagtctaaagaatctacaagaaaaacattggaaatagaatggtcaggtgatatagcaattttaccaagtcctttgaccaaaccttgatttccatccccgaatgtgatagctctttggggatcattgtttttctcataggaggaggacatccttttctccccagtcatgtggtttgtgca

SEQ ID NO: 17783 - DNA, 435 bp, Zea mays
  unsure (1)..(435): unsure at all n locations
tctaaagggagagcacattntaggattaacaaatgttctatttgagaaagacaggatntgtagcgcatgccaagcagggaagcaagttggtgctcaccatccacataagaacatcatgacgacagacaagccactggagctcctacacatggatctattcggcccgattgcttacataagcatcggcgggagtaagtactgtctagtaattgtggatgattattctcgcttcacttgggtgttcgttttgcaggaaaaatctcatacccaagagaccttaaagggattcttaagacgggctcaaaacgagttcggcttaaggatcaagaaaattagaagcgacaacgggacggagttcaagaactctcaaattgaaggcttccttgaggaggagggcatcaagcatgagttctcttctccctacacgccacaaca

SEQ ID NO: 17784 - DNA, 428 bp, Zea mays
  unsure (1)..(428): unsure at all n locations
acctgangcatcaagcttgactctaggatgcagcaattttgtttcttttaggatgctgctgccaaggaaggtgatggcaagagaccttgcagtgatgagctggctaatcaaaatactacaaagacaaatgagccagccaagaagaggggtgtgggtcggcctccaaaaagcgagcagaggattgctggggcacaggaaaatagccccatcaaaggcaggaaaagtagcactggggcacaggtagatagccccagcaaaggcaggaagaggagtgcggaagcacatgatgatagctccagcaaagggggcaagaggagccggcggtgaagctaccatcagctcaatgccggtgaaactgtgtacaacttaaccatatatcataggttgttcccttcaggtttgtttacctgacaaaaaaaagttattgt

SEQ ID NO: 17785 - DNA, 439 bp, Zea mays
  unsure (1)..(439): unsure at all n locations
actcagcttatggctgaactgaattatcagaaagtggtcacttgcttttttgacagaaatgagctgacaacactatattggccatccaaacagaaatgagctgacaacacaagctttttggacacaaaatgttcacaaacagaaatgagctttttggacagaaatggcagttaaacagagacttaactgagctgacaacacaagctctgcattntcatacttaaggtacaaacagaaattgttcactgccacaaacagagattgttcacacaacataagctttgttcacagaatacatacttaaggtactgccacaaacagaaattgttcatacaacttaagctttgttcatagaattcaaacttaagctactgccaganacagaaattaagctgctactcagaagccgatcttcttcttcggagtaagcttctttttg

SEQ ID NO: 17786 - DNA, 441 bp, Zea mays
  unsure (1)..(441): unsure at all n locations
gcatgcaanntngacaaaccctcacannncncngcattatttgaaatattgttagctctgtgcgcgngaggagaccctcttcacacgagggtggtgctcggtgatccctgtgctcggtatctcacgcatatcgagcaaatgcacgtgttctgaaactgagtggcatcatccctcgagaggtaacttccatattgtgccataacttggttccagtcggtacccatgctgtacaatgaaggtactcgcacaaaaatagaacatatttaactaaataagtgtactacatttcaggcaaccctatgaaatgaatacaaaccatgacactgttatcagtctcatgcacaacaaagacagtagtggcgaggactacatatattgcaaagttcataacattaagcattaccaaagataggtatggacaaacataaccagcatatgaac

SEQ ID NO: 17787 - DNA, 307 bp, Zea mays
cttccgcatgacagcagaaaagggaaccgacttaaagatgaaaaggcaaattagaccccgaaggattactatagagttattgataaatgtaaagggcattaatgtaattctacacgggctgcgtcccttgcctataaatagatgaacagtacacccgtattgttcacgctgacttggcattcgcttttcgcatcacgcctgtacctttactttccgttagtccgaaggtacatttataattttgctatttgaacatgataatgaaaataaaaataaattgataataatatttaaattattcttcggg

SEQ ID NO: 17788 - DNA, 350 bp, Zea mays
agccgactaattcatcaatattatatagtgaaaaaatattgtatgatgttattaattttaagcactaacatgaaataagaattctagtttttttataaattatcttagtccatgattctattttctaactaattgttatattgaactaaagttgtgtcacagtaacaataccaaaataataaagttaaccatatttagatctagttttgtagtctatgcggacattcccgctgcgacatgtggttctggtgattgatgttgttgggctgttggcgctcattctgttgtttcacgtgatcaccttctctatactctggttgtggggctatggcaaagacaagtcaagtggt

SEQ ID NO: 17789 - DNA, 428 bp, Zea mays
  unsure (1)..(428): unsure at all n locations
ttgaacaatcattntaagatcaatagaactcctgaactaattggcaaccactcgaaaacattgaaaaaaaagtacattatgatcaaccaacttatgagcaagagtggtgctaactgggatgaagagaactttatcatccgatatgaccatgagatgtacacaagtcattttaaggtaataagtttgttgtacattttcttttgttattaatgctctgcactaaaaaaatttgtttgtccattggtaggatgagaatggaaaggagatcaacaagggtgatgatgagtacataaacaagcctcttccatactatggaaatctagctaccatcttcggtgatagtgttgcaacaggtcaatttgtgaagacctcaagtgaacctcttgctgttgatgttgaagaggatgagatgaatgttggaacaccat

SEQ ID NO: 17790 - DNA, 410 bp, Zea mays
gcttgtggagattctttattccgacatgtgctagtcagcgatgccagatccagcccatgttagtcttagcaattaagcaagtgtcgagttcagctctatcaaaatctactaagtatagctgaccctctaacactcccttaaatgctattgaatcatcacttcgtctaaagacagtaacacctatatccgtaaaaagacagttgtagcccattttacataattgagaaactgaaagcaagttataatctaaggaatctacaagaaaaacattggaaatggaatggtcaggagatatatctattttacccaatcctttgaccaaaccttggtttctatccccgaatgtgatagcttgttggggatcttggtttttctcataagaggagaacatcttcttcttccctgtcatg

SEQ ID NO: 17791 - DNA, 427 bp, Zea mays
tctaaagctatttcgaaaacaaaatcttatggacactctgtgagttcaactagagtgaggtttgggaaacagagatccttcctgttgaaaagcagttaaacttattcagctgagttgagcttcttcagctgagttgaactttttcagatgagttgagcttctttagttgagttgagcttcttcagttgagttgaactttatcagttgagttgaacttcttcagctgagttgagcttcttcagctgagttgagcttttcagctaagttgagcttcttcagctgagttgagcttctttagctgagttgagcttcttcaactgagttgagcttcttcagctgagttgagctttttcagctgagttgagcttcttcagctgagttgagcttctttagccgagttgaactttcttagctgagttgaactttc

SEQ ID NO: 17792 - DNA, 408 bp, Zea mays
  unsure (1)..(408): unsure at all n locations
agctntatcaaaaggatttgatatgtgctctcctcaatggaccaatcaaggaagaggtctatgttgagcaacctcccggctttgaagacagtgagtatcctaaccatgtctataggctctctaaggcgctttatgggctcaagcaagccccaagagcatggtatgaatgtcttagagatttccttattgctaatggcttcaaagtcggaaaagccgatcctacactctttactaaaactcttgaaaatgacttgtttgtatgccaaatttatgttgatgatattatatttgggtctactaacgagtctacatgtgaagagtttagtaggattatgacacagaaattcgagatgtctatgatgggggagttgaagtatttcttacgattccaagtaaaacaactccaag

SEQ ID NO: 17793 - DNA, 427 bp, Zea mays
taaggaataagttaatccacacatgactcttagaaatgttaatttcatgaccaaaaaaagactacaaacatgactcaatcttgaaatgctggctaaactatgagcttgtcggttatgaaattaattgcgcaaaccaagaaaaagcgggttggctgtgtacttaaaagcccagcatcaatactggatggccttgtatgattatcattgagtataacccaagtaacatcttacacatgctgctattcatcttaatatatggaacgtgtggcagcaatgaggcaaaagtacaatagtatagtatgacactaaatacccagatgtaagcaaatacctgctttgttcgagtttctggtggcaatgaaccatagaccacagagcaaagatgttttccctccctttcaattcttttctgaatgcatggaaaatt

SEQ ID NO: 17794 - DNA, 410 bp, Zea mays
  unsure (1)..(410): unsure at all n locations
agctnancagggancttatcggcattctttttcattggaagatctcgctcgttagcaaaaacaagcaacacagcatcacgtaactcatcctgcaacaggtaacatttccatagctgtgagcacagcacacaaagttccataccaaggaaaggattctcaagggcacgagaatttaccttattcagcattcgggggagctcatcccttgcttcaacaacacggtccctatcattgctgtccacaacaaagatgagaccctgcgtgttctggaagtaatgcctccacagtggcctgatctgtttttttcagacaatgggggagaaatcacgacaccgtttgaaatgaagacgacaagcaaattcagaaattgaacagcaggatgtagaataatacttttcacagtgaacaag

SEQ ID NO: 17795 - DNA, 426 bp, Zea mays
  unsure (1)..(426): unsure at all n locations
tcgcnaggtgaacgaaaatagagattttgttaatggttgttttggttcaagtgagtcaggttgatgtgataaaaatcaaggataccacggaaaaaaggagatatgggaaggccgaggccgcgaagaaggaaaggagtgtaaaccactgactcgtgggtatcttcagttgggacagtggtcccgtggcaagaacgccaagaacagagttcccgtggagggagaaccccgatggaaacaaggcggagaagctcagcttcagaaatcacagacatatggttacctgcgaaaggtaactgactgttggggtcgatggcggggatcactgcagcagacgagttcgcggttttcctcttgggcgccatcttgtttctcgctggcgaaacaaagcangaggcgagtggcggaggagactcagatgcggaaatg

SEQ ID NO: 17796 - DNA, 414 bp, Zea mays
  unsure (1)..(414): unsure at all n locations
agcttctaatgggagattatatttcgtgtttaaccaangcncattctgagaaagacagggtttgtagcgcatgtcaagcagggaagcaagttggtacccatcatccacacaagaacatcatgacgaccgacaggccgcttgaactactccacatggatctattcggcccgatcgcttacataagcatcggcgggagtaagtattgtcttgtaattgtggatgattattctcgcttcacttgggtgttctttttgcaggaaaaatcacaaacccaagaaactttaaaaggattcttgagacgggctcaaaatgagttaggattaaggatcaagaaaataagaagtgacaacgggacggagttcaagaactcacaaatagaaggctttcttgaggacaagggcatcaagcatgagt

SEQ ID NO: 17797 - DNA, 400 bp, Zea mays
  unsure (1)..(400): unsure at all n locations
tagcattgcttttaataagttggtcaatatttttattttctattgctaagnataagtacataccaataagatatcacaattaataatatatcccacaatgcaatgcaaatgataagttaagtgtaattccataagttaaaaatgtgagagtcccgagtcgctcttgaccgtgagcactgctgatataccagttttacactctgcagagattgtaccctttacccacaagtcatgttactcatttgccaagggattgtgacttcccattcatctctaccaaagagacgaggtgggatagcacttagagatctttacaaagttccactagtatgaaaaaaaccctacagatttatgcagagggggtatatgaatcccttgtctgataagctataacaacagt

SEQ ID NO: 17798 - DNA, 408 bp, Zea mays
agccttggatgtgcatcgtcttcaccagttcttaaaaggcttggcccaaggacccgtatccactcccacgcatagatcaaatcgtggattctacctctgggtgcgacctcttgtccttcttaaatgcttactctggtttccatcaaatccagatgtctagggaagataggaagcataccgcttttataacagtggatgggctttactgctatgtcgtaatgccttatggtctgaagaacgccttgccaacatttgtgcgggcgatgagtaagactttcggggacctgatcagggacagagtagaggtatacgtcgatgacatcgtggtcaagactaagagagagtcgaccctagtggaagacttaaccctggtctttgacaagctacgggcaacgcgcacgaagctaa

SEQ ID NO: 17799 - DNA, 410 bp, Zea mays
tggcgcgcgcgggtacgtgtcctaaggcgtttctatctccccaacaatgatgggatggcccaagggaatcacggcgacacggtagaaacgctaggccacgcggcggagaaccgtcgaccggagttggagaagaaacgcaagccgcggatgtgctggcaggccttctgcgcggcggtttccggtgagggcacggggtcgccgcttaaccagaggtcgccacctcggtaactctttgccatggtgccaagaaactttactgcgaccaccgacgaccggtcacgccgcggtggtgttcttatcgccagcgaggtccaagaccttatcctctgcgcgatattttcagatgacggcaaacagtgctctgaattcaaaaagagcttgactgacagagcaacttggagcacgatttt

SEQ ID NO: 17800 - DNA, 404 bp, Zea mays
  unsure (1)..(404): unsure at all n locations
agcttccatactttntcatttaatgtgtgtcggaacttgctctctgctgcaaggggatccaacggggggagtagtgacgtaaacagggttctcgcgcaagatggcaatagctctgttaacctagcctctcacgagcactgtgcgggggtatttataggtatctgagcgccctgcgtcctgtgttaaggacgcatgtgccctcagacacctaggttatccccagaatattcccataaagcagggttacagactgtaattacagggatgcctttacaaattaggcccgtaacatgcggcggccacgcagggcccgttacaatgggctggatcacacgtgggcctctgtgctggacgaggccgcacggtgggatgacttcgtcacaggtcttcgtctgatgtcgtac

SEQ ID NO: 17801 - DNA, 419 bp, Zea mays
tcagtttcgtccccctcacgttcaaccctagctgtatatcggactctggccatttaactatgaacttgtgaaactttaatacttttttctccgaagcaggcttcaagatggagcttcgttcaattctgacaaacaagcttcggcgatggttaaaaattttggcagcaaaacagtgcaaatagcagtaaatgctgtggtaacttcacacctactcgtctgtttatatagtgccgcaggtaagaaggcgaagcgccagaagttttgcaccaggcggacacccgctcgcactcgctgtacggtgggccgcaaagactgaacagtaattctgcacggtggggtcgccacgcgcagggaaattgaatcgtttctcgacaacgagctcagggaaggtgtttttgagaccttcggcgctccgaagc

SEQ ID NO: 17802 - DNA, 407 bp, Zea mays
  unsure (1)..(407): unsure at all n locations
agctntgaatggacgtttnctcaagcaatatcatccgagtatgtggcaagatgcttaagaaaaccgatgtattcgcaccgagttagttgcttttggtttgctcagctccaccaaaaggcagggaggcatatgttgagcaccaaaatgagccgtcggacggtccgcgtgcgcagaacagattagggttcccagttctctgttgtggttgctgaccagattcacagaattagctcggtgagcctgtttgtcacaggaccagccctcccctctataacaatcgacgaatcctgccgatttgtaatcctcaactgggacctaccactaataaaattacacttcatcttacgactacctctaatatagctttacctcagttgtacaaaccacccacatttttctttctcttc

SEQ ID NO: 17803 - DNA, 420 bp, Zea mays
  unsure (1)..(420): unsure at all n locations
agcttctccagggtttgtgggggtttcctatcataatacttatccataggtcctggccgaagccctttgatcatggcctcaatgacaatttcattgggcactgtaggcgcttgtgctctcagatgcaggaaccttcggacatacgcctaaaggtacacctcgtggtcttgcgtgcactggaataaagcctgagcagtgactggcttcgtctgaaatccttggaagcttgtaattagcatatccttaagcttctgccatgatgtgattgtccctggccggagagaagagtacaagtatgtgtgacacttttaactgccatgacgaaggattttgccataaccgtagtgttgcccccatatgaagatatggttgtctcatagctcattanaaactgcttcgggtctgagtgcccatcataca

SEQ ID NO: 17804 - DNA, 436 bp, Zea mays
  unsure (1)..(436): unsure at all n locations
tgcattgcatatttaaattccctgtattgcatctaggactcgtctattctagttgagataaccgccaacaaagcgagtgaagaagcttaactcgggtcaaacttgacaagtcttagttntaagtttttagcacttaaattcttaccttttatgcaattattgggtcttgaaatatgcatgaggtactgcacttanggggagtattcaacactcaaatcactcatgaaaacccctagtgcaagccaaaatgcaaatttcaccatttgcctattttctctaaaaattatctagcctatggcaaaatattttgaaaagtatatgagggtgccaatacctgtcccaacaagtgttattttgtgtgattataagttgggatttggtttggttggaagttagatagaaaaattcaaatntttccaatcttccctctgtctgg

SEQ ID NO: 17805 - DNA, 307 bp, Zea mays
ggtagtgatatattacactatgttcaataattcgtcttcaacttagctgaaaataaatattcagacaaagaccggtgagcgatcgcgccatctgaaaacaggtctgtcgtctctccctcgcagatgatgcttggtttcacgcttgcatttcttccggggacatattttgaagtttgattcacgttcaactctggccggcccgacctggtagctagctagctttgacgagaaacatgcatacgacgacgacgaatgaatctggatcgtcatgggcatgcacgcgtgcagcaaactgctaaaggacagt

SEQ ID NO: 17806 - DNA, 437 bp, Zea mays
  unsure (1)..(437): unsure at all n locations
tgcgaagctcccttgtgtgcgcgcncagccaaggttcctctctgcgtgcgtgcgaactccgntgcgagcgtcgatctgtacccacaaagtctcgccggtgctcgactggctcggcctgaccgtcgccctgctgtttcatgccctagaccgttaaatcgccgttaatcttgtcgtgcacggtgccgtctcgaacctgccatgtccgttgccggtcgacgaccccgccctgctgcttatcccgtcgccaagctgtgtgccgctgttccgtgacctcgacggtgcgcaaggtcgctcgccccagaaccacatcgccgtcgtggcttttggagttcatcgtgacgcgctgctgatgatctgcatattacgggagatcttcacaagttcacgcagcttcgtggtaattaatttggatggtgatctgcattatttagtgctat

SEQ ID NO: 17807 - DNA, 437 bp, Zea mays
  unsure (1)..(437): unsure at all n locations
gatccttaagtcacctgcngctgcagctatccggggagtattacgcgcatctgtctccagccgcaagaaggcattggaacagctttggctctcttcgtagctttagggccggtttggtggacaaacaaatgaaggcggtctatggagaggattccctttattatttaattttaaatagcgaggtgattcttccatttttctgtttaccaaacaaattcttcggttgtgtttggtttctatagactaatttttagtctcttttattttatttattttagtctctaaattggtaaatacgaaaattgaaattgagttttagtagtttccgtatttaataatctagagactaaaatagaataaaatgaagggactaaaagttagtcactaaaaaccaaacacccccttaatacgtttctgtgttttgctgctgctgccgc

SEQ ID NO: 17808 - DNA, 431 bp, Zea mays
  unsure (1)..(431): unsure at all n locations
tctaaagggagaacacantttgggactaacagatgtttattttgagaaagacaggatttgtagcgcatgtcaggcagggaagcaagttggtgctcatcatccacacaagaacatcatgacgactgacaggccactcgagctcctacacatggatctattcggcccgatagcttacataagcatcggcgggagtaagtactgtctagttattgtgtatgactattctcacttcacttgggtgttctttttgcaggaaaaatctcatacccaagagaccttaaagggattctagagacgggttcaaaacgagttcggcttaaggatcaagaaaataagaagcgataacggaacggagttcaagaactctcaaatcgaaggcttccttgaggaggagggcatcaatcatgagttctcttctccctacacaccac

SEQ ID NO: 17809 - DNA, 421 bp, Zea mays
  unsure (1)..(421): unsure at all n locations
agcttcttaatcaaggaactcttagctttttcttctctgctatagngatataatagaaaaaaggatccaggttctttgaaggagaagactattgtgtaaacagtgcgtgaacagcgagctgaggatggcccttgatgagtgcctgcgccccgatcgaagacaaatcctctcctcgtacgcgtcacgcagcaataatagaaacatcatcacgacttaataatactgtaattattactagcatgtatacggtatcatgagtacaacagtacgttgctaggacttctgcacacatctatggggaatataattggggatggagaggaagaggagaacgcacacacatcagcatttttaagaacaaagtcaatgctaaacagtatcatcattcacggcctctctacagcatgtggtcagtacgtag

SEQ ID NO: 17810 - DNA, 431 bp, Zea mays
ggaaccgagaacccgcgtcaccggagtagcgcaatcgtgctcgtcggagttcaaaaacccgccggcgcacgtggaccgggtaagcctcggcaccattttccaattcgttgcgcgcatggcctctacatcaccccgtggagctcctcgtgcaccttaattgagctataccgtcgtgggttggccggaacaggagccgccgacgatccccgccgcctgtgttcgtggccagggtagctcctaccacctccgacgccgacccgcacaccgacgtgaccgttgtgacctcccggacatcactgaccaccccgccggagctctactgccgccggtaagcctcgccgccgtaatctatgccgcgggtactgtttgcgtcagccagggagcgcgggttagatttcggttaggtccagggggttttgtgcaatgtcagt

SEQ ID NO: 17811 - DNA, 376 bp, Zea mays
tcgcttccgcatttctttatctccgatgttctgtaatgtctacaagatgggtggaacgttcctggtgaggtaaggaaagataccgaacttgtcaagtgacttaggaacatctacagggtgtctgatgtctgttagacaaggacaactgtaggtgggcctaattacttgggaggttttgtcacaataaacgctgataccgctgaaatagaaggcgaagaagctcctaagggaggcttacagcgaaaaataaacgctgatcttcggcaactatcattttgcataacatcacatcatttgcatagcataacatcatacatcatattgcatcaatgacgcaagaatggggttcaatgttgttcttcggagattgttttga

SEQ ID NO: 17812 - DNA, 428 bp, Zea mays
tctgcattgaccaccacatccacgtagactggtcaactgttgctcatccgaggacaaatgggcaagtatagcgtgccaacgacatgatcttacaaggccttaagccaagagtcttcaatgaactaaacaagtttggaataagatggcttaccgagctctcctcggtgattcagagtttaaggacaacctcgagctgggccacgtgtttcacgccattttttctagcctatggggcagaggccgtcttacccataaacttagagcatggctccccgaggctatgagcatacaacgaaagcagcaaccaggtcaaccgtgaagactcgcttggccagctagaagaggcttaggacgtaacactcctccactcggccaagtaccaacaatcactctgacgctaccatgtgaggcgtgctcggccttggggg

SEQ ID NO: 17813 - DNA, 406 bp, Zea mays
  unsure (1)..(406): unsure at all n locations
agcttaccacattngattcatgagtgtttcctctctgtatnggncttgcttggctgccccttgtgaccttttagcaccgtcttgaatctcttgatgatgagagccatctcttcatcattaagtccggccgcctcaatttgtgccaccttgctaggtagcgtctccttgcttcttgttgccttgagagcaagaggttgaggctcattgattggaccattcaatgcgtcatccacgtatcttgcttccttgatcatcattcgcccgctcacgaactttccaagtatctcctcaggtgtcatcttggtgtacctaggattctcacgaatattgtttacaagatgaggatcaaggacagtaaaagaccttatcattaggcggacgacgtcgtggttcgtccatcgcgtgc

SEQ ID NO: 17814 - DNA, 419 bp, Zea mays
tagaagatacctatgatccataaaaggaacattaaattgatgatcccattacagagaacgagaatatacctgatcataggagaaggaagcatgtaagactcagtaatatcttacaaaagaaggctgagaggccaaagtactttgagaatagaaaggttgtcaagatctgaaaacaataaaatattataaaagtgctccctttgcacaacattatgaataagtacacaaaacatacatatgttaaaatggttaacgaaaaacgtgggaattcaaaatacaccagtgtcatacaactttgtcgcaaatcagtcaaccgtgtcaaattctcagaaacagatgatgccaaaaagcaatgttgtagcactgcacacgatcacacaaattctactgcataccatcttgccacgaaggtgatgcat

SEQ ID NO: 17815 - DNA, 414 bp, Zea mays
  unsure (1)..(414): unsure at all n locations
agcttcggcgtcnnggtttatttcttctttctgagcccccggcatccaatcaacgatgaagtctgctaatgtcgggtaccgtaattaagggtacccccaacactcctaaacacggctggtaagcaccctcagcacaaactgcaaagactgatgggcatggttcaggtcaaggcctcgtctaccaagggacgcaatcccgcctcgcccgtgcccggccttgggcgggaacagtagtcccggacgaattcacgcctcacccgagggcctcctcatgcagtgggcgcaccctctgctcgcccgaggcccagctcgggcaggcttcgtcgagaagcaaccttggcctaatcgcctcaccaaccgactgtatcgcatgcgcattcaatgcgaggatcgcctgacaccttatactgacac

SEQ ID NO: 17816 - DNA, 425 bp, Zea mays
tgtaatggaacctaaattggctatgtcttactaattttcatctcagacataaaacaattggtttctattcatgttgttagagcaacaccttaattttggcgtgtcctctgccatcgacccctgcgcatgcgccactcgctttggtgctccccgagttcttgtccggtcaaaccagaagccgttctctcgttcatcggttcaggtgtgagtctgccgccgaccacagctcacccttgacttgaggtgttcagctgttggcacgcacgcactacgcagtgcggtctgatacggcgatgcagtagtgctaaccttgtcgttgccgttttatagaaagataataaagagcagtacagttgctgcgacggcgatgcttgagagcacaaaagcgtttccgtcacgtccgaaggaacctttttattggttcc

SEQ ID NO: 17817 - DNA, 435 bp, Zea mays
  unsure (1)..(435): unsure at all n locations
ggatccttaagtcacctgcggcatgcaagcttctgtgccgatctttcaactgttgttgatgngnnncattctgtcggagccagctctgcaaaaatttacaccttcagctgctaatctacccagcacgttagaatatattgaaggcgaggttgatgcccttgacgaagttattggtggtcatgccgacttctgcgccctggtagcttctcggggcacagccacctcttttctgaaggctggctgcacgcatggaaatattgtgaacagaccaaacttcagcttgtcagcatcagatctgatagatatcccaagcctagcccgaagcattggaaatagattcatgacccagatctgggtaggtggcgggcgaaaaatggcgggtgacgaagctcgaagtcatcttaagccggtaagaaacttatatttgttactttt

SEQ ID NO: 17818 - DNA, 418 bp, Zea mays
  unsure (1)..(418): unsure at all n locations
tcagcaacttcaacactcttttttggaattgtgctntgttacttaattgtctccaagacgtctagtacatttaccattcttttcctttttggggtcactgatggccccttttggttttttgctgtttcaatatttactgcaggactcaaaacttctaatgttttttccttagtcggctttttcgcttcttccattttttctgtggatggtgcttcggccatctctgcagtttctggcagcaaggttggctgttcagcttcggtggccgaagaagcttctccggtgaactcaggcaccgaagctggttcaatatagcgtggccggtgtgtgaggacttttatcctctttctctttgattctggctcgctaggagcagttgcagcttcctcttctgcagaggttgtgttctttcttttct

SEQ ID NO: 17819 - DNA, 419 bp, Zea mays
  unsure (1)..(419): unsure at all n locations
gatccttaagtcacctgcggcatgcaagcttctatagggagaacatntgatatgtttgactaacgnacaattcgaaaaagatagaccttgtgcagctcgtcaagcaggtaaacaggtgggaggagcgcatcacagcaagaatgtgatgaccacttcaagacccttggagctgctgcatatggacctcttcggacccgtcgcctatctgagcatagggggaagtaagtatggtctagttattgttgatgacttttcccgcttcacttgggtgttctttttgcaggataagtctgaaacccaagggaccctcaagcgcttcctaaggagagctcaaaatgagtttgagctcaaggtgaagaagataaggagcgacaacgggtccgagttcaagaatcttcaagtggaagaattccttgagg

SEQ ID NO: 17820 - DNA, 423 bp, Zea mays
  unsure (1)..(423): unsure at all n locations
tgccgcagtaacaagtttaactctggaatgtgaaatttacacagcagccactcccgctccgaaggttccccaggacccatcgcaaaacactgtccatgcttcggtgtctttatttgcttcttcctcctgagcccctggcgtccagtcagcaatgaagtctgctaacgcctgngactgaatcgaagatctatgaacatattcaatacaaaattcattgagctctgcagcccattttccaatccttccagtagcttctcggttcctcataatatccttcagaggttgtgaagaaggaacaattatgttgtaagcttgaaaatagtgccgaagcttcctggatgccatcaaaacaacatataacaccttctctaattctgtgtagtttttctttgatatactaagaacttcagatacaaaatatac

SEQ ID NO: 17821 - DNA, 429 bp, Zea mays
agcttgtggcgccctcgggcatcttgtattatctcgaagctcttaatcttccacctggaagcctcggggccgaatccttcgggcgtggtagcgtcgcaaagactgctgataccgcgctgagtgtagcatggctacgtcccgagcctcttctagctggtccaatgaatcctctcggctggtctggttgttttggttgtcgtatgcctttgtcctcggggagccgtattctaagtccgtgggtaggatggcctcggccccatagactaggaaaaacggcgagaaacccgtggcccggctcggcgtcgtcctcagactccaaaccaccgagggtagctattttatccaccgcttgccaaacttgttgaggtcgttgtagatccttggttttagcccctgcaaaatcatgccattggcgcgcttcacctgccc

SEQ ID NO: 17822 - DNA, 433 bp, Zea mays
  unsure (1)..(433): unsure at all n locations
cttatcaaatggatgtgaaaagagccttcctcaagggattaatcnatgtagatgtctatgnngagcaacctcccggctttgaagatagtgagtaccctaactatgtatataaactctctaaagcgctttatgggctcaagcaagccccgagagcatggtatgaatgcctaaaaaattttcttatcactaatggcttcaaagtcngaaaggccgatcctactttatttactaaaactcttgacaatgatttgtttgtatgccaaatttatgttgatgatattatatttgggtctactaacgaatctacatgtgaggaaattagtatgatcatgacacggaaattgaaatgtccatgatgggggagttgaagtacttcttgggatttcaagtgagacaacttcaagagggcaccttcattagccaaaccaagtat

SEQ ID NO: 17823 - DNA, 424 bp, Zea mays
  unsure (1)..(424): unsure at all n locations
catgcaagctggggaaggttcttcatccccacatgtgctaagcggctanttcacagccagcccatgctagtcgtagctattaagcatgcatctagaccggcttcttcttttgcaaaatcaactaagtaaagtttgccatctaatacacccttaaacgctagggaaccatcactctttctaaagacagacacatctacatttgtaaatagacagttatatcccatattgcataattgactaaccgatagcaaattatatccaagagactctactaaaaacacattagagatagagtgctcatttgaaattgcaattntacctaacccttttaccttgctttgattcccatcaccgaatatgattgaatcttgggaatccttattcttgacgtaggaggtgaacattntcttctctcccgtcatat

SEQ ID NO: 17824 - DNA, 427 bp, Zea mays
  unsure (1)..(427): unsure at all n locations
aactaagctntctaagctctcatgggcttaagcaagctccacgttcttggtatgtattgcttaagganntcttgctttccacagacttcaaaattgggaaggttgacactaccctattcactaaaagaattggcaaagacttatttgtttgtcaaatctacgttgatgatattatttttggatctactaatgaattattttgtgaggagttcggaaaaatgatgtcaaaagaatttgaaatgtctatgataggagaattgagcttctttcttggccttcaaatcaaacaattgaaagatggaatttttataagtcaatcaaaatatttgaaggacatgctcaagaagtttggtttagaaaatgctaagcctatcaagactccaatggcaacaaatggtcatctagacttagatgaaggaggtactat

SEQ ID NO: 17825 - DNA, 419 bp, Zea mays
  unsure (1)..(419): unsure at all n locations
gcaagcttactctgagtggatccttaaaaatttatttttactttgtacgctaagnaaggggacctgcatctagagttctttctaccctagttcaagcacttggcctatactagccgtctttttatcatcccttcagttcactggattgctacatgtaggtcagtgaccaagtcttcatgtccgagaagtaacagcgatccggatcgattaatacccagctggggatctctgatcacacgacatatgtagcacttaacccttgcatatgtcaactcgccactagggttcttaagaccagatcaggttcacgccaaccgagagcacagatacaccactgtccagcctcttgccatggagggcacacgctactctcgccatctctccactgacattgcgtgttggcttattctggtattagt

SEQ ID NO: 17826 - DNA, 432 bp, Zea mays
  unsure (1)..(432): unsure at all n locations
ngaagctggcctctgcgctatgacaaaggacaatcttttatatagctttgcatataatagnctgaaggtatgaaaattgtatatttggaaatctataatttttaaattattcttttattcttatactaattcttttcatatagggtttaatacttagcaacgctttgagagcgcaaaagaatgctgaagacgagagctataatattgctttcaacaacctacgaacagaggttattaagctgaggaacgaagctttgaaaaaagataaaattctgcttacattggtggataagataaaagaagacgaagctacttctaaaactcaagctgaggctcagaagcgcgaaattgaagatcttcagaaacagttagccagagctaagaagagcgcatacttgaagagacgaaacgagaacttagcgatcagtgggc

SEQ ID NO: 17827 - DNA, 417 bp, Zea mays
  unsure (1)..(417): unsure at all n locations
agcttaaagccatggtaagtagcataggtctttattatgttattngactcaagcctagctacaggtgcataagtttcaccgaaatccaaaccttcgacttgggagtatcccttggccacaagtcgagctttgttccttgtcaccacaccatgctcgtcttgcttgttgcggaagacccatttggttcctacaacattttggttaggacgtggaactaaatgccatacctcattcctagtgaagttgttgagctcctcttgcattgccaccacccaatctgaatcttggagtgcttcctctaccctgtgtggctcaatagaagaaacaaaagagtaatgttcacaaaattgtgcaacacgagatcgagtagttacccccttatgaatgtcgccgaggatggtgtcgacggggtgatct

SEQ ID NO: 17828 - DNA, 432 bp, Zea mays
  unsure (1)..(432): unsure at all n locations
tgcatgaagtattgtacataatgtatatataaaatctatgtaataatctaataatattnngnaggattcgcataacaccaggactggatgtgaacatgcgttaacaataataacaactggtaaccaggtacatattaaaataatattgttcatttgtctaaaatgaaaatatatatttatgctgcatgtaaatgttgatgtatttgggttgggctctaaaggaggacaacatgagaatttcacatgaggttggtgatacaagttctccgtgtcacgtagcacatgaacaaatggaacatattgctgcatcctcagaagctaaaaaggtgagcattgataaatgattntactgattggtataaatatatgtaaatatgcgtatactaaatagtaacttctattattatgcagaggttgaattttaatgtggat

SEQ ID NO: 17829 - DNA, 420 bp, Zea mays
agcttcggctccatctatgaagggatatcctttgtgatatcacctagagggggggcgaatatgtgatcctgtaaaatcaaacactaaatagccacaaacttggttattagagtgttagttcgactaagtagctttgaagcgagttcctgtgaacacaactgagagcacctagagggggggtgaataggtgatcctgtaaaaacttagaacttaaagccacaaaacttgattaagtgttagcacaattaaatcatgtggctaaggactaagctcgtgtgaaacacaatagtcacaaagagaacaagcatacaagacacgatgatttatcccgtggttcgaccaagtataacacttgcctactccacgttgtggcgtcccaatggacgagagttgcactcaactcctctcaagtgatccaat

SEQ ID NO: 17830 - DNA, 442 bp, Zea mays
  unsure (1)..(442): unsure at all n locations
actcaagcttgtgaagagtattgtnggccttgctgctggctccctttatcatcactttgagtggagttatgaattgacctgacatgcctcggatgaaatcttcctctgaagcccctggtcatctcagagaacctgaatgcctcctcccttctctggcggaaatcattgttagctcggatgtactcgtccattttttggagcagcttctccaaagtttgtggtggcttcctggcaaagtattgtgctgagggtcctggccgaagtcccttaatcatggcctcaatgacaatttcattgggcactgttggcgcttgtgccctcaggcgcagaaaccttcggacatacgcctgaaggtattcttcatggtcctgngtacactggaagagagcctgagcggtgactggctttgtctganatccttggaagctggttatcaacatat

SEQ ID NO: 17831 - DNA, 373 bp, Zea mays
cacgcaagggccgagctctcggtcacgtaactatgtggataaaccagagccttgtccataagaaagcaatgcttcggttatgtgtaaacccttaaaatatagttagaagaagactccgtagctcatttaatatttaagaataatagtagagtttatctcaatatgtgatttgctatttacgcatattctttaaataaataaacaaatatgaatatgcatcatgctgacttcttttgttatgttgcattttgactttggaacaagaaacttaaaacatgggaagatttgaatttgaaatgaatggaaagaataaaacaacaaggaggctcataccttcggttgggccaaaaccttacctgctattacaaccaaa

SEQ ID NO: 17832 - DNA, 431 bp, Zea mays
ctcgaccgggagaggcgtcatggagaggatcttcctgttagtttgcgccgacgtgcgcgtcgcgatgtgggaggagggcgcgcaaccgccacgggggcagccgcttgaggaggttgtcgaggtatactggctattttctcttctacaattctcttaagctgttggttgtacgtgctacacttgaatacttgatacttactaatcgttcaaaaaaaaaactcgacccggggtgcatagatagaaggtcacagcgaacggtcccgaccgatcccgaccgagaaaccccctaaccctgccatcctgtcactaacggggtgactcacaggctgcccacacagcaaaggcacccaggccgacgttgccacagccgagtcgctccctcgagagcgagcgagaacagcgaggggatttttatttgtgagaaatcaggg

SEQ ID NO: 17833 - DNA, 379 bp, Zea mays
cttaatgccagggcgtctaccactataaaacatacttctagcaaatttaaaattttcattgtccaagtcatgctcattaattttagcactaagttgagctatgtgatcattttgttgtttaattaaagctaggtgatcatggatagcatcaacattaatgtctctacatctagtacaaatagtaacatgatcaacactagatgtagatggtttgcaagcatttaattcatcaatcttagcatgtaacatggcattcttatttctaagattggaaatagaaacattgcaaacgtttaaatctttagccttagaaattaatttatcattctcaatcttaaggctagaaagagattcattcaacttgtcaatcttagtaatc

SEQ ID NO: 17834 - DNA, 419 bp, Zea mays
  unsure (1)..(419): unsure at all n locations
ngatagttgctataatagactntcctacaaaaaattctgtaaggatctttgcaatataattatggaaaaaacttatgtaaatttgtacataccttgtaatatattttgtctcctttatccatgtacaatctgctttgctgtggacgaaactactctntttgagccgaaggcgaaaaacaccttcccttcttttcgtacacaacgaagcatgaaaaattttctttttcttcgaaatttttcctcattgccgaagcatctgtcttttttgtgtgatatgataatgattctatatatgtctaaatgaatgtttatgaatgcaaatgacatgatgtaatgtatcgtgcanatgaatattgaaacacatattcaaaaaccataatcatagcccttcatccccttgggaatgattcaaatctttt

SEQ ID NO: 17835 - DNA, 409 bp, Zea mays
  unsure (1)..(409): unsure at all n locations
agctacatatncggcttgtttattggangtcttagacaaacaaccgaagagcatatgtgagttgctcacctccacgtgcaatgaagaggatccctgcagctttagcgagccatcgaaatacatccgacatacttctgcagtctccgggttatctggtacctgttgctcggtccactctgatacgaagtcgactagcgcttgggtctttattgcggtacgaggctgaaactcaatatcgtgagctcccagctcgcagacccacttggctattcttccgatggcttctttgttgtggagaatatcccctattggaaattgaaagtcgtctagacgggggtgaatagggcgaatctgaaatttacaaacttaatcacaactacaagtcgggttagcgttagacatataaacg

SEQ ID NO: 17836 - DNA, 420 bp, Zea mays
  unsure (1)..(420): unsure at all n locations
tcgcagagtggggtctctaatctactttctcataaatcnttgaggtaggcactgcaggtgctggtgggggttcatggattgaaatcttggacaatgctcgcaagtctactatagatgctaccactgatgcaggcaagaaagttaaggagctgactgatgcagttgcacctcatgtccagcagctatttgatacatatccaaatcttgaaaaggtagttgttccacttggcggaacaatatttggtacaatgatggcatggttggtcatgcctatcattctaaggaggcttcacaagtacgcatcacaaagtcctatatcagcacttctggggaactccaccaagaatgatgttttgtaccaaactagtctctggtgtgcattagaggatcctgcaaaatatctgatcacgttcatggcat

SEQ ID NO: 17837 - DNA, 300 bp, Zea mays
  unsure (1)..(300): unsure at all n locations
ccaaggcctcttcgccttaattgcccttgtttctctctcccaacactttccttcttgatcatacaacttgtttctcaaacaaagaatggccttttctggggccgcggaggtcatcacatgataatatcttgaccaattgattactagcgcaagaatgaggatcatatgactttaaactagtaattactacctcatgagcaatatcgagcatgatatgatcatcaactactttactatgacagtatgacaatgtatcatacttttcactaagagcaagcttttntaaattcattgtttcta

SEQ ID NO: 17838 - DNA, 424 bp, Zea mays
  unsure (1)..(424): unsure at all n locations
ntgtaccacatgtcttcatgcttggtgtcttcctgctttatatcttttggtgttgccgatactcttgcttctcagtatcatgtgcgatgtgtcgcatctcttcagctgctttgtcaatcttcttttgcaactcagacagctgaagcatttttttctcttattttctccacttattggtgtatggcttcaaggttgctgatttcttgatctagctcctcatcttgtggagttgggctgacaaccttcattttctggctttgggcttctctttagagaattccatcttgattggtgtccatgtgacggaacctcccaagtcattaggcccacctacagttgtccttgtccaacggacctcagacaatcctgcaggtgctcctgatcacttgacaagttcggtatctgtattctttaccttgcccaa

SEQ ID NO: 17839 - DNA, 237 bp, Zea mays
tcaatacagccccacggaacctcgggccaaccctcgcgggacgccaaacgtgaacccacatgtacaagctgccacctttcactgtaggagttttggtggctggttttgcgcgaccctttgtcctcggaaccgatttaattgggcaaaacctcgcctaaataaaaaaggaaacccggtcgtgcgttcctaatcaactacaggtgtcttatcacgttgcaattggagcgtgaatctcgt

SEQ ID NO: 17840 - DNA, 423 bp, Zea mays
gcttataccaaattggagagtgatgtggtgtgatggcgattggtaaatgataccgatagagtggagtggaagccttgtcttcgccgaagactccatttccctttcaatctacgacttagtatagaaatacacttaaaaacacattagtagtagacataaaagagatatgatcaaaggtatataaatgagctatgtgtgcaatgtttcaatcaaagttctgagaatcaagtatatttagctcattcctaagtttgctaaaggttttctcatctaatggtttggtaaagatatcggctaattgttctttggtgctaacatatgcgatctcgatatcccccctttggtggtggtccctggaaaagtgataccgaatgtctatgtgcttagtgcggctgtgttcaacgggattatcccgcatgcgga

SEQ ID NO: 17841 - DNA, 411 bp, Zea mays
  unsure (1)..(411): unsure at all n locations
agcnncaatctacactatattttatgtttacaagacngaaacttaaatgcttaatataaatgcggaaacttaaagagcanagtagagaagcaaactctcgtggacgacgccggtatttttaccgaggtatccggaaccacgcaaggtcccgactaatcctcgttggtgcccctacgcaaagggaagcccacgcgagggccaagcaccacggtcgagtaactccgtagagagccacaggccttctccacgcgcaagtggtgctccgcttccggctcctcttggacgctccccgtcgtctccactatcgagctttcggccaaaacgctgcgggcctcgttccctccggtatacggtggcggccgtgacataaacgcggttgtcacagtctcgcaagactctcgccccactcgg

SEQ ID NO: 17842 - DNA, 425 bp, Zea mays
  unsure (1)..(425): unsure at all n locations
ntctaaaaagtctcggatcactctctttggtgatcttaatattaagttatggatgtttaaagtctgaagactgaatctgtccaattctggacagcaaagccttctagtgtcctttacccttgatacatattaaaccagccagggatgtttataaataatttgtagaacatttaactagctttccagaaagtctaagatcactttgtttagatgtctgaatctttagttgtgaatttttgaagttgcaagtctgaatctatccgaatctggacagagctgttgtgttagcactatttaaccttgttaagtgtctagtcaccttgttatgacaataccaaagttgtggagcactttctaagctttccagaaagttctagtttgatatttttggactaataattgaagagttatgattaaaacgagta

SEQ ID NO: 17843 - DNA, 404 bp, Zea mays
agcttgtgacaatatagtctatttgatgaatgacaagcgatatttattgcctcggcccaataagaatccgatatattatattccgctaacatagacctagccatatcaatgatagttatattctttctttcaacaataccattttgttccggggtatatttggaagagaattcatgtttaatacccttgtcatcacaatattcatcaattcttgcatttttgaattccgacccattatcacttctaaccttttttatgtcgaaatcaaattgattttgagccaatatagcaaatgacttgaatgtttcaaacacattagatttgtctcgaagaaaataaacccaagtaaatcttgaataatcatccacaatcacaagacaataagaattaccaccaatacttac

SEQ ID NO: 17844 - DNA, 412 bp, Zea mays
  unsure (1)..(412): unsure at all n locations
tgtggactcctccatgcgcctatggggtctcttttatattcccaangcagctaggagatgttggaggccaacaaggaaggccatccttgccttctgtcgggtggcgcaccggacagtccggtgctccaccgtacggtcactgcagacggtccggtgccgatctccttcctcttctggcgcagatgaccgctgcaccttcgggccagttggcgcaccggacactgtccagtgcacaccggacagtctggtgccccctgccgaacattggtgcgggccacgcgtcacccgcggagtgcgcggctgaccgttgcgctggcgaccgttggctcaccggacagtccggtgcaccaccggacagtccggtgaattatagtcgtacgccgtcgatttttcccgagagcggccttatcac

SEQ ID NO: 17845 - DNA, 456 bp, Zea mays
  unsure (1)..(456): unsure at all n locations
acccgtgaactcacagtcacctgcggcatgcagcttctaagggagaacacattntgggactaaccaatgtttattttgagaaagacatggtttgtagcgcatgtcaagcagggaagcaagttggtgttcatcatccacacaagaacatcatgacgacagacaggtcactcgagctactccacatggacctatttggcccgatcgcttacataagcatcggtgggagtaagtactgtctagttattgtggatgattattctcgcttcacttgggtgttctttttgcaggataaatctcaaacccaagagaccttaaagggattcttgagacgggctcaaaatgagttcggcttaaggatcaaaaagattagaagcgacaacgggacgaagttcaagaactcacaaatagaaggttttcttgaggatgagggcatcaagcatgagttctcttctccct

SEQ ID NO: 17846 - DNA, 317 bp, Zea mays
  unsure (1)..(317): unsure at all n locations
ctcatcaagaaggaggagcacttgaaccagaaggaggaggtcgtcacaaagctctatgccaagctgagtgcctttaacaaaatcctggaggagcaacgggtcgagcagaccgcgactgtggagagcctgccaaggctgtaacgagagcttgatggcaagtcccacgacgccgccctcaccgaggagaggctcaaagcgaaaggaggatccttggacaggcgggagacagacctctccgggcgggaggcaaacctcgccaggcgagagaangatctcgccttcaaggaggaaatgcttgaaaggcaggagaagtcact

SEQ ID NO: 17847 - DNA, 393 bp, Zea mays
ttagtttttgtaacatctaacaaaagctgaaatagaagagcttaaagagtatgcccaatcctgtggatacaaacctggggcactcctcttcggaggcgttgatgacgagaaactagagtgtattcgggaccaaacaggggccaaagttatcagtactctgtccaagagtattggattcccgaagctagaaacagacatcagccgctaccgacgacaacatgtcgttggtagtttattttactccaacttcaaggtgaatgacttgtcctttaacctttattgcttctaataaaaacatgtctgacgaaggttgtgtttgtgtagagtatgttattgagcaaagccttgcaaatgcagcaagatcttgaagataaaaagcatgaaattataatc

SEQ ID NO: 17848 - DNA, 437 bp, Zea mays
aactcagctgccctcgatcatggttcttatccattcttgaactatgtggatttgttcgtaccactccattactcgaaacattgctgtagtgcacaatgtgttccatgtatcccaatagaagaagtgtcttctggttccagatcgaaccattgatgtggtggatgttaccttggaaccagacttaacatattcagaacatccgattcgagtcctagatcacaaggacagggtcacccgaagaagagttctcaaattttataagatacaattgaaccaacatgctgaagatgaagctacatgggaaacccaagacttcttagaaaagaacttccctggctttttagtttcatgtaatttgtgagatatgtacaattggaatagacccataccaccctctgctttgtacaagaaataaggaaataaaaatatgacgtgtt

SEQ ID NO: 17849 - DNA, 416 bp, Zea mays
catgcaagcttaccgcatttgaagcatgatcgctttctttggtttattcttgctcggctggccattgcgaccctttagcaccgtcttgaatctcttgataatgagggccatttcttcttcattaagaccggccgcctcaatttgcgccaccttgctgggtagcgcctccttgttccctgtggctttgagagcaaaaggttgaggctcgttgatcggtccattcaaggcgtcgtccacataccttgcctccttgatcatcattcgcccgctgaccaattttactaagacttcttcgggcgacattttggtgtacctgtgattctcaccaatattattcaccaaatgaggaatcaaaacggtcaaggacctgagcattagtcggacgacgtcgtggtccgttcatcgcgtgcttccgt

SEQ ID NO: 17850 - DNA, 433 bp, Zea mays
  unsure (1)..(433): unsure at all n locations
gcttctaagggagaacacgtgataggtctaaccaacgtttatttcgaatattatataccttgcgcagcttgtcaagcagggaaataggtgggaggctctcatcacaccaaaaatgtgatgacaacatcaagacccctggagctgctacatatggacctcttccgacccgtcgcctatctgagcctaggaggaagtaagtatggtctagttattcgtgatgacttttcccgcttcacttgggtgttctttntgcaagataagtctgaaacccaagggaccctcaagcgcttcctcacgagagctcacaatgagtttgagctcaaggtgaagaatataatgagcgacaacgggtcccagttcaagaaccttcaagtggaggagttccttgaggaggaagggatcaagcacgagttctccgctctctacacaccac

SEQ ID NO: 17851 - DNA, 427 bp, Zea mays
agcacctgcggctgcagcttgggtgtaggtgagcgaagcgttcctgaaatatcttgtctatatgcgagggcttatttttctcttctctatttgagaactccccgtctccttttatagctcgaggagggaaaccctgttatatggttcctcggttggaccagatggagcaaagctttgtcttgtcgtcttgtttttcgtcgatgattcttgcctttgacggaaagagtctctgctgacgctgcccttctcccgtcatgtcgttgtgcttgcacatgcgggattgtcatgtcttatcatgtgatccatcctttgagctgtggggtggtcgtggcgtggccggcctgtactcagtaagtgtgtcttccgtgaatggtcaatcaacctgtctcccacgttagagtctgtgtgcctgatttccatacgtcat

SEQ ID NO: 17852 - DNA, 432 bp, Zea mays
  unsure (1)..(432): unsure at all n locations
ntaactctcgcgagacctttccccgcctctntctaactatggtaaattcattactggatgcgatattctatgcatgtttcatctacttgttctcttgtatggtgtgttgntggtttcctaatttcaatggatggatgtatgtatgtatgtgtgcactcgcataaagaacgatccggttgaagagcccgaggaactcgcaggagaagcccctgagcagcagtcggttggtggaggcaagtgtcccttgacctatctctgtcctattcattatttaattcacctcccgcattacacatctatacctaaggattgactagcttttgttatccatgtccttgtttacctatctgggttggattattattattattatttagctntatgctattgctcaactctaatcaatgaacatgatgagattatctatgatac

SEQ ID NO: 17853 - DNA, 346 bp, Zea mays
cggaccgccaaccggacaactaactcacgattaattttcattgtgctcgggcaactaactaacgattaatgacaacgggatctacctacgggtgggactgagatctacattttatactatcaaatttaacgatcgaattatgattgaactcctggaaagcacaactgtgtcattgcgttctgttcagaatttttatgtgctaatggattccaaccacacacataaaggattttctattgggactaaaagctaacaccaggttcacagtagtttcatacagatcaaatattcatgttcacaccaaccatactattggaggaataaagaattgaaaccaaacgaaatg

SEQ ID NO: 17854 - DNA, 342 bp, Zea mays
ccagcttactctgcgagaccttctatttcttcaactatgtagtttattataatgtgaattctagcatattacttatttgtctctcgatggcgactgctgttcctaattgaaggatgatgttgtatcttgcatcgattaaaacgatcgtcaagacccgagaactccagagaacccctgacacatcctgtgtggagcaatgtcctgactattctgcctaatattttattacctccgcttaacagttgctaagatgactacttgtatcctgcctgttactattgggtgatatattgctacttatctctgtcaacttatcatgaccgagaaatttatatcctggtt

SEQ ID NO: 17855 - DNA, 323 bp, Zea mays
tgaagcgacggctgaccctccgatgggaaggctcgacagcctcgtgatcttcctcgagccttcaaccatgcactcaaaactaacagaatgcccgacaacttcctcgggggtcattttcgtatactcgcgatcaccacgaattaattgaccttgagttgcgtctacgaaaatgagagatcttacaataaccttaaccattacgtggtcgcccaattttatgctcccgaggatgcgcacttggttcacgagagtattgagccgggcgcacatttggtgtggctctttccccttgagaagccgaacccgacgacctcccctcatcg

SEQ ID NO: 17856 - DNA, 388 bp, Zea mays
  unsure (1)..(388): unsure at all n locations
tcagntggaaatctgatgccagggaaatttcactgggcttgttgaacattttagaacgtaactgaaatatgaaccatagatattacgtaatcaaaagagaaacaatatcatgccccaaacaaggatgcaagtcgtacagagtgccacatataccatagagtttttccaagacaaaaaaaaaggccctagtgctgcatttgaaaagaccaacttggtaacgtgtcagcacacacgtcattcgccattgactagactcggcagactttctgattgttaatatcatcaccacaccacatgcacgttgtttccccggtttgagggttgatttgtgtcctatctatataatacattattatttaatgataacataataactcgccactttttt

SEQ ID NO: 17857 - DNA, 413 bp, Zea mays
  unsure (1)..(413): unsure at all n locations
agcttaaagccatgataagtagcatatgtctataaatgcgaatngactcaagcctagctacgggtgcataggtttcaccgaaatccaaaccttcgacttgggagtatcccttggccacaagtcgggctttgttccttgtcaccacaccatgctcatcttgtttgttgcggaagacccatttggttcctacaacattttggttaggacgtggaactaaatgccatacctcattcctagtgaagttgttgagctcctcttgcatcgccaccacccaatccgaatcttgaagtgcttcctctatcctgtgtggctctatagaggaaacaaaagagtaatgttcacaaaaatgtgcaacacgagatctagtagttacccctttatgaatgtcgccgaggatggtgtcgacggggtga

SEQ ID NO: 17858 - DNA, 430 bp, Zea mays
tatgaagattcttcatcccaacatgggctattcggctgtgccagagccaacccatgttagtcttagcaattaagcatgtgtcgagctcagctctatcaaaatctactaagtatagctgaccctctaacacacccttaaatgctattgaatcatcacttcttctaaagacagtgacacctacatcagtaaaaagacagttgtagcccatttgacataattgggaaacagaaagcaagttgtaatctaaagaatctacaagaaaaacattggaaatagaatggtcaggagatatagcaattttacccaatcctttgaccaaaccttgatttccatccccgaatgtgatagctcgttggggatcttggtttttctcatatgaggagaacatccttttctccccggtcatgtggtttgtgcacccgctgtcgag

SEQ ID NO: 17859 - DNA, 439 bp, Zea mays
ggatccttaagtcacctgcggcatgcaagcttcgtctaacaactctttgtgccatcatcctgcacacaaatgagtataaggtgatcagaaataaaggaaaacaaaggtaaaagacaggtaaaagtctcatactgaatcaagcaatttttgagcttcatccccagccagctcgcgcccgcctttagcccaaatttgagtaataaatttgttccctatgctttgagcttcagccgggatatcaattatatctgacgccgatagattaaaagttggcttgttaaccaccttggcgtgagtgcatcccgccttcacaaacgcagcagccgtcccacgagaagctaccaaggcacagaaatctccgtacccacttataacttcgtcgagggcgtcaacttcgttttcaatatgttcgaaggccctggggatgtcttcggctgaa

SEQ ID NO: 17860 - DNA, 429 bp, Zea mays
tgaaggacaaacttaaaagcaagccccagtatactttgtctatgaagttctaagtttatcaaataaaaactatacagagttggagaaggtgttgtatgctgtgttaatgacctccaggaagctttggcattattttcaagcataccacataattgttccttcatcacagcctctgaaggatattatgaggaacagagaagctactggaaggattggaaagtgggctgcggagcttaacaaattcagtattgattatgtgcaagatcctcaattcagtcccaggcgttagcagacttcattgctgattggacgctaggagctcaggaagaagaagcaaataaagatgtcaaagcttggacagtgttctgcgacagttcctagggaaccttcggtgcaggtgcggctgctgtcctagttgcaccttccaaa

SEQ ID NO: 17861 - DNA, 349 bp, Zea mays
tgggaaattctttacactgccacgaaaacgcttcttgctgaacaaaagggcacaatgatcgatttgtcacctgaggcagtctgggcactaaacacgaatgagtgcagggcgactgggtatactcccttccgccttctatacaggtcggaggccatgaccccgcaagataaaaagcatgggttcccgcgaacagtttcctcaaccgtccccgacgtggacgagccaacttcataggatctcattgacggagaccgagtcttcgccctacatgccctaaacaaataccaagcccagaccagagcatggcgccaccacacattcatcccgagggagtgcagagaacgtgacc

SEQ ID NO: 17862 - DNA, 424 bp, Zea mays
tgttatagccatagaagaaaactagctttggaagcgttcaattttaggcaggtcaagacccttcggcgcccagcgaaagaaacgctcatatgaagcgtctaatgaagaacgtgatgagggccatccttgacacccctactcctgtgattcagaaggaaattactcctgctatatctgaccaaggtgcgcaacaagctgagaacagtggcggacctcttgtgacaactatgtcagaaatcgatagacttattgcgaatgttgcacctagaaaaaatactgaggggggcagttgctgatagagacttcaacgtcggagggaaatagaactaaggaaacctctttggaagatagaagaatcgatcttcgacacctgagtggccgacaacttttctaagatgatatatcggaactggaagaaatttgc

SEQ ID NO: 17863 - DNA, 414 bp, Zea mays
  unsure (1)..(414): unsure at all n locations
agcttgtggaaagacattgaacctaaagttctatgtcttaagtgaagggcaaggtggaacggagggaaaacgggaggaggcgcgcggcgacnggcggcagggctgttcggccttgcgtttgggctgaaaacgaggggttcgccatggcgcacgggccgaaaactgaggctggggcacgaccccgaaaataagctaagtccaagcatgtggaaagacaccgaacctaaagtgcatgtcttgagtgaagggcacggtggaacggagggaaaacgggaggaggcgcgctgccacgggcggcagggctgttcggccttgcgtttgggctgaaaacgaggtgttcgccaaggcgcgcgggccgaaaactgaggctcgggcacgaccccgaaaataagctaagtccaagcatgtggaaag

SEQ ID NO: 17864 - DNA, 406 bp, Zea mays
tggacttagctaattatggaggtcgtgcccgagcctctgttttcgacccttgcgccatggcgaacccctcgttttcagcccatacgcaaggccgaacagccctgccgcccgtcgccgcgtgcctccgtgtcgttttccctccgttccaccgtgcccttcaccaaagacatccactttaagttcggtgtgtttccacatgcttggacttagtttattttcgggttcgtgccacagccaccatttccggcccgcgcgccatggcgaaccacctgttttcagcccagacgcatggccgaacagccctgccgcccgtcgccgcgggcctccgtgtcgtttccctccgttccaccgtgcccttcacccaagacatacacattaacttcggtgtcttttcacacgcttggac

SEQ ID NO: 17865 - DNA, 407 bp, Zea mays
agcttgtagatgaagctgtctaagctcatctagccaagcggatgctgaagttgacattgtctattgcaggtaaaacatcaaaaaagcaaaaatggtggacatggaccaaggggccagaactgagaactagactgattttgcatgtaaagttccactgagaactagactgatttgtatgtgaccaccgattctggtatctgatctttgaattattgtcgtgttgttgcagacggaaggaaatcaacagcaccaccagcaccagaaacatccatgtggatcttatagagcttctttggcacatttatttggtacatttcttggataagctcctatgatgctatacattctttagattgatgttttagctttgtatgatatgcagatacacactcagggataagctccta

SEQ ID NO: 17866 - DNA, 424 bp, Zea mays
tgtataactgtgtaatagagaagtgaccccctcaccatccctgccttgtaccaaaaataaggaaataaaaatgtgacacatttccttttccattacttaccctaggacttttaatctcgggacgagattcttttatggggggaaggatgtaacacccctggtgttactataactaaaacttgagcatggcatcataagcattggcattgcatatgtttgacacacctagagtgcattcactaggcaaaaatttcaaacaagttgtattgttttaatgttttgcaaataggaccctgaataggaaactttaccctaaatagggattaaaggggtaagacacaacccaagttgagaaaacctaaaagctttatggtaaaagtcataaaatgaccccaaaaataaacttgaattacctttatacccc

SEQ ID NO: 17867 - DNA, 425 bp, Zea mays
  unsure (1)..(425): unsure at all n locations
ccgggatcttaagtcacctgaggctgcagctccttttataattttttgccataaaggnggaggacagaaatgtcggctcctattatataaagctaaccataaccattggaatattagatgcatgaatgactatggtgaatacgagtgcatggcaaataaagctagtataataccctcagactgaaatataaacattggttggttaactaaccttaagaacacccttgacaaaataatcagatccaccattcctcaattccaaggcctcatatatctctgagaggtcaattgtttaaagataaaaacgtcaaaattttgtgcatatgtgccaaacatacagaattggaggcaaacacaaaaaaaggtgacctattcaaaaagcaaaggtgtttggaccacagacagagatttctcacaaaaatcca

SEQ ID NO: 17868 - DNA, 421 bp, Zea mays
tgtgcacacctccgtgaggctccccgagcgatgaattgtagtttccttcgccggagaagccagtccacccacgccggagcacttaccctcgccggagttcgtggaccgggtaatccactcagccattcttcgattccttgcgcacacagtcgctacgtgaccccgtgaagctcaccgtgccgtcggattgaaccagatcgccgtcgtttggccggtatactcgccgccgacgaggatacccgcctgcgctcgtggaccaggcgattccggccacctccgacgacgagccgtacctcgacgtgaccgccagagcctccccgagccgaccccacccttcgccggacctccctcgccggcggtaagccgcgccgtcctttctttcctacagctactgttcggtttagaagaaagaccgcgggtg

SEQ ID NO: 17869 - DNA, 424 bp, Zea mays
  unsure (1)..(424): unsure at all n locations
agcttgngttcgcccnccttgnggaggagtgtggtgcatttatgaaacctaacgggcggctacagccccgacgaatctttgtaaaggctacgtagtgaaaccctgcctattcaccttggtagtgtttaagggtttgatcggcccgaggcaagagggaatcatggcttgtgggtaaagtgcacaacttctgcagagtgttatgaaactgatatatcagccatactcgcggttatgagcggccaagggagctccagtgattagtggtacttgatcagagatgtttaaattgcaggtggcaatgagattgatgattcttggtattggctctagtaatggtaagtggtactctttccgtttggaaaggagtacgtttgggttaataatgtgggttaattctaaaacttggctttctctactagtaata

SEQ ID NO: 17870 - DNA, 432 bp, Zea mays
tacccatgataaggcatgtgaccagttaaagggtccttagtcagcatgtcaacatcgagacggtccttaatcgactcagacagagacactacaccgagactctcttctcggtctcagcttaatcatttcaaacccaaagtttggtacctggcagaggtacatctttttcgatgttgaacccatcatggccatgatggatccaccatcatgttttattttcaaaaacatccctcccactttgcaacatcatcttttgtaaaaacaaaacattttgttttgctagagcaagactaagcataggaaaaaccttttgtaaaacagggattcaaacgaaggtaatcaaattcaaggaaggaaatgcaggaattgttttagcactcaactcctatcacctaatgcatcaagcaagtgagaaagatttttaaagaatca

SEQ ID NO: 17871 - DNA, 286 bp, Zea mays
ttattaagggtggtgtagtcgatgcacatctgaaggttcccgtttgcctttggaaccatgactggattggccagccacactgggtgattaacctcttcgatgaagccagcgtccagcagcttccggacctccttttggatgaagtcctgccgctcaacggactgtctccaaggcttctgactcaccggtttggcgtcaacgtggatctttagatggtgctcgatcaccttcctggggatcctaggcatctgcgacggctcccatgcgaacatgtcggcatttgcct

SEQ ID NO: 17872 - DNA, 317 bp, Zea mays
accactaaccatcatgctacgaccagcgtttggataacttctgcgttcaactattgtgtacaggctatgagtacctgttcgcgccagtggcatttataatgtgcatatagaccttactgggatgcgagcatatgccaaagcttcatgcaaacatctaccattttacatgaataaaggcgacgagcgcttaacgatcaacaaatacactggcgattctagacctgatcgagccgttatatgggggcacctgacatcggaacatgcgacttactaccctaaagaagaacggtcggcatttctatgaatggactgaaaat

SEQ ID NO: 17873 - DNA, 418 bp, Zea mays
agcttatagatattctgagatgaccaggtgtttctgattattgctccacccaaggcatgttaggacgacacacaatcccagccaaagtgaagacagaggcaatcacaaccaaggacatcaacacagttccaagtcatctgggacgcagcaaagctcctttagaccaccagccccaagaggtagagggggacgaacctttgaaggaagattcagctcacaaccaagaaggttgttctgcttgttctatggagaagataaggggcacacaactaggaaatgccaagttataatacagaaacaaaaggagatagctgaggccgaagcatggtataatcaacagccattttcacaacccgaagctaaccaagtcctacatactgcttcgtgctattccccgtacattcctgagtatgtgggc

SEQ ID NO: 17874 - DNA, 431 bp, Zea mays
  unsure (1)..(431): unsure at all n locations
tctccgagggcaggacggngttggggatggctctgctatccggtcttctgtggcagagggattgggcggccgcggactctctgcgcacgggcaaacggcgactagctaactccggcgaggtgtggagggtgcgcggaatggtgtagtctaagcctgggagggctttataagctctagcgtgggccacggcgcgggtttggcttgggcgcggcgcggggcacgcgagggcgcgcgcgagcgtgctctggcgcgggcagaaggcgtcgaacacgtggcagtgagtttcttccaatgttcaaacgcttccagagatcgcaaacgtgcgaatctcgccatgaatccggcgcagacctcctcctggcacctagggctatctcacatgtgtgagttccaagggatgatacgccctatatagggagatagacgggcgc

SEQ ID NO: 17875 - DNA, 421 bp, Zea mays
  unsure (1)..(421): unsure at all n locations
agcttcaactccatctatattanggagtgtcttggaatctttccagctnccttcggcccttctggcagcttcctgactcccatgaatagcaataggcccttggtccgaaggtatcttcatgcagagataagctgggtgaagaattgcttcaaaagcatttagggtaccacgaccaatgatggcgttgtaggggtattccatgtcaacaatatcaaacacaatttgctcagtccttgtgttattaacaaatccgaaggttaccggcatggtaatcttcccgagtgccacaatctgccgccctccgaagccacaaagagggtgcgtagcatcatgaatcttgtcttcaggctcttgcatctgtctgaaggctttggcaaatataatgtcagctgcactggctgtgtcgactatgacattgtga

SEQ ID NO: 17876 - DNA, 425 bp, Zea mays
  unsure (1)..(425): unsure at all n locations
tgaagccatggtaagtagcataggctaataatattcgaattgactctttcctagctacgggtgcataggtttcaccgaaatccaaaccttcgacttgggagtatcctttggccacaagtcgagctttgttccttgtcaccacaccatgctcatcttgcttgttgcggaagacccatttggttcctacaacattctgattaggacgtggaactaaatgccatacctcattcctagtgaagttgttgagctcctcttgcatcgccaccacccaatccgaatcttgaagtgcttcctctatcctgtgtggctcaatagaggaaacaaaagagtaatgctcacaaaaatgtgcaacacgagatctagtggttacccccttatgaatgtcgcctangatggtgtcgacggggtgatctcgctggattgct

SEQ ID NO: 17877 - DNA, 420 bp, Zea mays
agcttggcttgaagtcgggtatgggagattttatgatacttatttattaactcaacctattaaggggaagacagcccccgcgcctcgtattaagagaagaccttacacaggtcaagaaaaccaccaaactcatacacagcgacactgtagccccatgtgagaacggccacggttgaaccttagacatgtgctttggtgtgggacaaacgagaggatttttttgaccctagactgaaattcgctcccatggggagtcgaattgacctaaggagtgctactcaggccacctaatcaactcaactagaggccctttcgtagactacaataaataagattatgtcaatttcaaagaaaaactcaaaaaatgtgtacttggctcgttatccacccttatgtagcgtgcactggagcaaacccatc

SEQ ID NO: 17878 - DNA, 289 bp, Zea mays
ttccacgtatctcagctgcagaaatgtgttcacctacccagctgaatactaccggaaccagacattgagatagaaccagacttgtcctaccgagagaaccccgtcacagtattagcatcaaaacgagagatcaactcgggctaggtcaatcagaatgtataaggttcagtggagtcaccattcagcacattaaactacatgggagactgaggattttctactctctcgattccccaacttttaacccaaaggagtcggtttggaaccccaaaaccccacccccactgtg

SEQ ID NO: 17879 - DNA, 344 bp, Zea mays
tttgctcccctccaggtcttcaagaatggtaggctttgctatgaagtggtacgaccgattgacaacgcgcactacccaattgaaccaatctatctacattatcatgccttaagtgtagacgtaacataactctagttgtaatccgacgcagcataactctagttgtaatttcccgaccttaatcttcacctctattcgactatacgtcatctagagacgctttggatggcttacgatccctcctccccaacgggtccctctcaggaggcgagatttaggtcaatacgaagccttctgcgctgcggacggtccacacccttgcagggaagagcgtagttatttgc

SEQ ID NO: 17880 - DNA, 431 bp, Zea mays
  unsure (1)..(431): unsure at all n locations
tgatataaaacaacagattaagctatgttaaagaatcttatttcataaccagntactggcctatgtattcttcttaccaaatacgtttccttgcaaaactatattcccatatgcttttaattgtcaataccaggaaaggaaagataatcacgcaacagcaaacagaaatgaatcctccaaatcctccacctgttgaaatcgatcaagtggttgctgcccaaagactggtaatacaacaattaacagacctggtgaccgagatgcaaaatcagataagacaagaacgcgaggaaatacgtcaggtccgccaagaaataaggcaagcgcggttggagagacaacaacagcctccaccaccaccagcagctccaccaagctacataaacatatatataaattactactatntgtaagatctagatgttacttta

SEQ ID NO: 17881 - DNA, 424 bp, Zea mays
gtcacctgcggcatgcagctttggaaagagctttatggagcttctttcggttctccggacagataatcaaggagccctctggttcaaggatcgcctgtgcgtgccactgggagaaacacgagagaccctgctcgatgaagcccacaactcagcttactctatccacccagggaccaccaagatgtacttagaccttaagaccaggtattggtggaaagggatgaaaagggaaatagcacagtatgtggcccgatgtgacacctgccagcgaacaaaggccgaacatcagaagcctgcaggcctgcttcaacccctcccaatacccgaatggaagtgggaagaaataggcatggatttcgtcaccggactgcccagatcacaaagaggaaatgactccatatgggtaatcatcgatcgtctcacc

SEQ ID NO: 17882 - DNA, 429 bp, Zea mays
tgtgaaggttcttcatccccacatgtgctaagcggcttttccatatccagcccatgctagtcttagctattaagcatgcatctagaccggcctcttcttttgcaaaatcaactaaataaagtttgccgtctaatacacccttaaaagctagtgaaccatcacttcttctaaagacagacacatctacatttgtaaatagacagttatatcccatattgcataattgactaaccgatagcaaattgtaaccaagagactcaactaaaaacacatttgagatagagtgctcattagaaattgcaattttacctaacccttttaccttgccttgattcccatcaccgaatataattgaatcatgggaatccttattcttgacgtaggaggtgaacatcttcttctcccccgtcatatggtttgtgcatccgc

SEQ ID NO: 17883 - DNA, 412 bp, Zea mays
  unsure (1)..(412): unsure at all n locations
agcttgagccaaaaaatattttttggtttattatgcaacaagcaagcttcggctttggtcaatattttggcagcaaaacagcgcaataacaatgaatgttgtggtaacttcacacctacctgtctgtttatatagtgtcgcaggtgggaaggtgaatagtcaagatcttccgcaccggacaaacagccacccgcactcactgaacggtgggccacagagtccgagaaggtgaatcgccagggcgcgcgtaactgctgcaagatggggtcacctcgcgctcggattattttaatcgtttctcagcaacgagctcagggaagggtgttttcggatcttcggcatcccgaagcctagaagattttntcacggatcaagctcgttacgaaaaacgatctatcaacgcgaaggggct

SEQ ID NO: 17884 - DNA, 425 bp, Zea mays
ttgtctcgggcggaccaataccagagatgccaacacttcttgggagtggagagatggcgagagtagcgtgtaccctccatggcaagaggctggacggtggtgtatctgtactctcgggtggtgagaacccggtctggtcttgagaaacccggtggtgagttgacatatgccagggttaattgctacatatgtcgtgtggttggagatccccagctaggtattaatcgattcggatcgtcgttacttctcggacatgaagacttggccactgccctacacgtagcaattcagttaagtgaagggttgataaaagacggctagcatagtctaagtgcttgaaatataatatatagaactctagatgtaggtaatgacttaacctgctaatgaaactggatctttatcgatccactgttagtaagcat

SEQ ID NO: 17885 - DNA, 315 bp, Zea mays
ccatgcctgacaagaggtttcccctgtcgtgctgcgcacttctctcacaagaacattggcttcgactctggctttcactacatgttttgtcaaacaatttggactatctctcacttctgccacagaatcgtcgcttttgacaattgtcaaatgaccccaccctctagtctgagctcttaacgtaaccctaacagaaggcaatatcaaaccctgcagtctttcacctatccttctctgcctatgaaacaacttcctgggcatctctctcaatttattccctaagccacaaccggtgcgtgcctgtgaacccttccc

SEQ ID NO: 17886 - DNA, 429 bp, Zea mays
tctaaagggagaacacgtgataagtatgactaacgtatatttcttaaaagatagaccttgtgcagcttgtcaagcaagtaaacaggtgggaggagcgcatcacagcaagaatgtgatgaccactttaagacccctggagctgctgcatatggacctcttcggacccgtcgcctatctgagcatatggggaagtaagtatggtctagttattgtcgatgacttttcccgcttcacttgggtgttctttttgcaggataagtctgaaacccaatggaccctcaagcgcttcctcaggagagctcaaaatgagtttgagctcaaggtgaagaagataaggagcgacaacgggtccgagttcaagaatcttcaagtggaggagttccttgaggaggaagggatcaagcacgagttctccgctccctacacacc

SEQ ID NO: 17887 - DNA, 335 bp, Zea mays
actcatatatctattgcacttaagcctttacatttatattggggcaccctggttgtgtgctttaccgttgatatatatgaaacctagggtgcgtaactcattgtgaaagaaaacaatacttttaaatagtttatttattgcctaaggttcgactacaccaaaataaaacactcaacttttaaattgctttttagattggctaattccccccccccccctcttaggcgtgacgttcctttcaatcctatctgatggcacaccgaccatgtttgatgaatacatgtgtgtgaagctatttctgcgagctcttttacccagtgcacatagaaatttat

SEQ ID NO: 17888 - DNA, 416 bp, Zea mays
  unsure (1)..(416): unsure at all n locations
tagcctcagaacgacaatttcacatgctttgtaacttttattcnccgncgnactcaactcggacgaatcaacatgtcaactcttgcttaaatctactacacccgacaagttcttgaacatccttcaaaacaatatctcatggagaacaagcataccttgatgttgtggaagccatccccggcccggatggagatcttgctgggcgtgtagctctcgtcgagcttgaaatccacgtagagagcaacaagctgccacgcaacatataaccgattaatctcaaaaccatcgaatcacaagccaagagagaatagcatctctactgaagcaggcacctgcagctgcaccttcttctggaaccggatgttcaccaggtgcggcttcgccccatcagacctgagaccaaaatcgcagaaccc

SEQ ID NO: 17889 - DNA, 400 bp, Zea mays
  unsure (1)..(400): unsure at all n locations
cagcctctttgggagacttttttatgtttatccaggncatttgagaaagacaggatctgcagcgcatgccaagcaaggaagcaaattggcgcccattattcacacaagaacatcatgacgaccgacaggccactggagctcctacatatggatctatttggcccgaacgcttacataagcatcggcggaagtaagtactgtctagttattgtggatgattattctcgcttcacttgggtattctttttgcaggaaaaatcttatacccaagagactttaaaaggattcttgagacgggctcaaaatgagttcggctcgaggatcaaaaagattagaagcgacaatgggacggagttcaagaactctcatattaaagactttcttgaggaggagggcatca

SEQ ID NO: 17890 - DNA, 440 bp, Zea mays
  unsure (1)..(440): unsure at all n locations
acacttnaatactaagcttctaagggagaacacgtgataagtctaactatatgttattttcgaaaaagatagaccttgtgcagcttgttaagcaagtaaataggtgggaagctctcatcatgcaaaaaatgtgatgaccacatcaagacctttggagttgcttcatacggacctctttggacccgtcgcctatctaagcatatgaggaagtaagtatggtcttgttatagttgatgattttccctgcttcacttgggtattctttttgcaggataaatctgaaacccaagggaccctcaagcgcttcctaaggagagctcaaaatgagtttgagctcaaggtgaagaatattatgagcgacaacgggtctgagtttaagaaccttcaagtggaggagtaccttgaggaggaaggaatcaagcacgagttctccgctccct

SEQ ID NO: 17891 - DNA, 357 bp, Zea mays
cacctgcggcatgcagctcgctagcgtcgattttgggaatctttcaacggcgaagtaggtgaggcattatcctcaaacagggacacaaaagagaactctttatagggtacgcctcaacgtaagcgtgaaggtaatcctatatatattacaacggttaaaggtgatcacagacaacaatgttagagggaaggtaaatgaacatcacaacaaaggatataaataccatacagaatggggttaagacatgacctgccaatgaaaaaggagagggtgcgtccagcgccaaatgggtaaattctcactctcaaaatgacgtgaaagagaggggatttttaaagagtatgaataaagatgagt

SEQ ID NO: 17892 - DNA, 423 bp, Zea mays
taacacccctaaaagattgtctaactctgtttatgactaagctcccatggctcacgataacgagggttacattttataccctgccggttatcctgagcacaaaattaggagaattcactctaggaagtctcactctggctctcatcgtgctttcatgtataagagtgaggcatctagttctaggcaatcaacacatgctaaattgcctaagaagaaaactcctattgcatcaaatgaatctaatatttcatttaagacttttgatgcttcatatgtgctcactaacaaaacaggcaaagtagttgccaaatatgttgggggaaaacacaaggggtcaaagacttgtgtttgggtacccaaggtgcttgtttctaatggcaaaggacccaagacagtttgggtacctaagaacaaggcctaaac

SEQ ID NO: 17893 - DNA, 417 bp, Zea mays
agcttgtacagtcaatagtactggactataatcgaagcacatatactaagcgatatgctgcttctgaaatacttttattttctatgccattttgctttttaatatggaacaagcaatgcaaatttagttttaatttcttgtaatgattttgcctctatcataataaaatatatcttcacagatttacgaagctcaaaagtcgttcctaagggaatgcagagctaaatttaccgaagctactaaaaagtcgttcctaagggagcgcaatgtaagttttgagctcaaaagtcgttcctaagggaatgcagagcctaaattgccgaagctacaaaaagtcgctcctaagggagcgcagcgtaagttttctgctcaaaagtcattcccaacggaatgcagagccaaatacggtcgaaatat

SEQ ID NO: 17894 - DNA, 136 bp, Zea mays
aactagtccaacatatattatacgggagggcatttccatttttaccaatacccacaaatatacttccccaactactgataagcttaccagttcatttataaggtgcacgacaaaataatagatacatttaatacat

SEQ ID NO: 17895 - DNA, 410 bp, Zea mays
  unsure (1)..(410): unsure at all n locations
acctgaggcatgcaagctttaataagcaaaacaagccctagtccaaaggctttgttccgtccgctagggggcccaaccaggtagcatatccatggggcccacatctactataacctaccctatgactccctcccnccgactatagatgctacagcgccaatttcttcactcacacaatggctccctctccttcgtagactccccctctgcccgggcggcgtcgactgtctccccttcatgaaggggacgctatacacgtctgctcgcctcccattcgtggctctttttggaaaaggcttatgaaggcgaggcgaaagtcgatggcgcatatctcccagcgatcggagtggtcttcatttcgtcgtctacacgcacgaggatatatggatctggttaattgcatttctcgc

SEQ ID NO: 17896 - DNA, 409 bp, Zea mays
tatgaagatacttcattccaacatgggctaggcggcggtgccagattctaccttagttacgattagcaatcaagcacgtgtcgaagccatctctatcaaaatgtaccaagactagctgaccctctaacactcccttaaacgctattgaatcattacttcttctaaagacagtgacacctacatgagtaaagagacagtcgtagcccatttgacataattgagatacagaaagcacattgaaatctaaagaatctacaagaaaaacattggaaatagtatgctcagatgatatagcaaatttacccaatcctttgactaaaccttgattttcatccccgaatgtgatagctcgttggggatcttggtttctctcatatgagcagaaccatcttcttctcccctgctatgt

SEQ ID NO: 17897 - DNA, 446 bp, Zea mays
actcaactggcgaatgcactctcgaacagcagcgcccaatcagttgtcacaatttttctatctaatctgacaagggttggcgcttcccgcttcattataccaagtaaattgtctacccaaaagatcaatttccaccaactcaagctcattaagaagacgacgaaaacggcccatcattgccctgtcgacatattgattatctttggcttccactttataaatgaggttgaaatcccctccaacagcccacggtccaacacacgtaaggcgaatgctacgaagttcttgccgaaattgcaccttcaggacgtccgattgtgggccatatactccagtgaaccaccaaggggggccctcactctgctggaactgaacagaaacagaataaacatccacccttgatgcaatagccttgcacacattgcccttcccagccaccaggatgc

SEQ ID NO: 17898 - DNA, 401 bp, Zea mays
  unsure (1)..(401): unsure at all n locations
cnattattaggattttgctctttgtgaaaagatagccgaccgacttcctagttggaaggcatctcttctcaaccttgctggtaggatggctcttgtctggtttgtcctatcaactatcccggtgtaccttcttattgccatgaatgtgcctaagtgggtgatcaaatctattgataagttgcggcgggggtttctttggaaagaaaagaaagaagtggatgggggcagctgtttagtgtcatgggacaaagttactaggccactaaaactttttttgaacaaacgcacgagagttgtgtgtcattatattaagaagaaaaagaaacatatgaaagacaagacttgtcaacccctaatacaaaggcccctatgccgagacctccctgaaattaacacaacac

SEQ ID NO: 17899 - DNA, 333 bp, Zea mays
  unsure (1)..(333): unsure at all n locations
cttttgcatcaggcttcagaccctgtcttcgctctgtctcacacgaagatattcagccttatgattgcctcgggggtaagttggtgaagatagacttcaaagatcttcagcacttccacgacgaagctgctcaagggcaatcgcagcccagccttcaaaaagcttcggaataccacgacttcattttcttcggggtctgggcaagtcttctccccttcgtcggccctcacaacggacagatcccggaaataccttcccctcatattaacaagatgattctctntgatagttgatttaccataaactgaatggcttggtcgccaggggcgatct

SEQ ID NO: 17900 - DNA, 415 bp, Zea mays
  unsure (1)..(415): unsure at all n locations
agcttcatcttgcgccttaatactatatctcgttctaagtttggtgtcttagcaacaagaaaaggtcaggataaaggatcaggcacaagtgtgaaggagctccctagagataaagctttcaagatggaaatcttaaattgatgacaaaagcaactccgtctacttagatggaaagtacaccataacaatggtaaaggtacaaaaggaggtattgacctttttgcgtatntgtaccttaatttttctccaattcttgtgttgcatatgtttaatgtgtaagggggagaaatgttagtgtgttgcattttccctgcttaataccctgttgtccctcaacatcatcctatgttcttgcttgaatatggttctggtgtttgatgtcaaagggggagaatttgtgcattaaagcttacct

SEQ ID NO: 17901 - DNA, 426 bp, Zea mays
tcggtcatcgcacacggacagcttcagccgaagctgtttcttcctgtaggaccttccgcgacgaagcatggtcccaacagtagccccttcgcggtgctagatcgtttttcgtaacgagcttgatccgtgaaaaagtctcttgggcttcgggaagccgaaggtccgaaaaaacaccttccctgagctcgttgtcgagaaacgatttaatttcgagcgtgtagcggtcccacctcgcagagttaatatttggtctccgcggtccactgcgcaacgggtgtaagcagctgtccgcctggtgtaaaaatcctggcgcttcgccttcttgcctgcatcactatataaacagacgggtaggtgtgaagttaccagagcattcattgctatttgcactgttttgctgccaaaattttcaaccgtagccgaagc

SEQ ID NO: 17902 - DNA, 412 bp, Zea mays
agcttgtaaaaagctgaaaaaacatgtctgatatccttggattcgacatatttatgtttacatgcactgacaatactactaccccgagatgactgtagcccagcgtgactgtaaacgtcggcccacagagatattatgcaaagattatgtactagttgaaagggaaatgtgcccttgggccatttctaaagtgttttggtgattaagtgcccaacacaaatgctctaagtattaatttgtgttaaagactcaagaagtgcaaatcaagttataaggtatgtttctagacttagtacattgatttgaatactaatgtattgtgtctaagtgttagaaataggagaaattggtttggaatggagttggctgtgtacagccaaatgcagctcggtctgggtgcaccggacagtgt

SEQ ID NO: 17903 - DNA, 426 bp, Zea mays
tcggctttgaaaaacagttttttagtgtttccgaagatgtctggagataagaaggctgctgctgagacgaacctgagtctggacgaagagaaaaacttggggtttcttatagcgatgtcgaagaccaacacagaaaaaatcaccaaggagattttagaaggcttgtctgaggatactggtgacagcgacagttatgatgtggacagcggtggtgaagactccgaagatcgtccctggtgaccaagccattcagtttatggtaagtcaactatcaaagagaaccatcttgtcaacatgagaggaaggtatttccgggatttgtccattgtgagggccgacgaaggggagaagacttgtccacaccctgaagagaatgaagtcgtagtgtaccgaagctttttgaaagctgggctgcgatttcccttg

SEQ ID NO: 17904 - DNA, 80 bp, Zea mays
  unsure (1)..(80): unsure at all n locations
agcttggccgacgaaaattatttccgtttttttcatgnggcctgcgcgacgaaaaatattaatggggcccacgcaaaata

SEQ ID NO: 17905 - DNA, 425 bp, Zea mays
tcgcaacatcaccgcaatagctatcctctcaacacttttgattttgtcatgcttgttagttagtacgtcatactagacttccttttactagttcatcttcccgcaccacacaatcgtttgaaataatacattgtgatttgtggacttctcttatagctagtgtctctggttataaatattacttggttcttcttgatcatttcaccaattacttatggacgtttcctctccgtttgaaatctgacaccgtcaccactgtcacttccttttttcctatgtttccacccagtttggcagcactgtgaaagcagttcaatgtcataatgggagggaatttgttaactccaccatgcgctcgttcctcctcactcgaggtaccattcttcgcatgtcctatccctatacctctccccaagacggtaagc

SEQ ID NO: 17906 - DNA, 426 bp, Zea mays
tgctagtcgtgtacatacatacaattaatcataacgttcatgtttttagtccaagctggtagactctccattgtctggaagcatatgcatgcatgcttcccaaagtccaagctaggtagcaacacaattcaaagatgtttacttttcttttttatttcttgacagagagagagagatcgatagctacctgccatgcatgttcacatcactctgctagctagcttaacttgcttgccgccggtttcttggcacttgctgcgttttcttgctttcattatattgtccggccgctagctcgatctcacagccgtttacgaacctgttgtcgttgccaacaattatgttcattatatatgtacaatattagttgtatccagtgcgtaactaaacgtatactccgtggctatctaatctagctgtatagtc

SEQ ID NO: 17907 - DNA, 424 bp, Zea mays
  unsure (1)..(424): unsure at all n locations
tatctcaacctgagaggaaagcttatcctaatgggtgatgtgtnagnttaagctttgctagtgtgttattcatatgcttcttcttgcagtattatatgtgttgcatcatatggactagtgcttgcgctgctatgaattaattggcatctattgtgttctttctgaaatagatagtcataaagacaatggtgcatatggttagatagtcatgtggataatggtgcatgtggctaatggtgctttaagattgttttaaattagtatcttagtttaaatgggtattagtttgaattggtatcttaatggtgaatagtgatacgttgatattcctatgatatatccactaaattgaatgatggttaaactctggatacatgcatatgggtgttattagaattatgttttgaatcttgacacaatgcat

SEQ ID NO: 17908 - DNA, 324 bp, Zea mays
  unsure (1)..(324): unsure at all n locations
taccattcagagaattatcttgaagaatcaactctgttaactgagtcaaatttgccattgaactcggtatgctttcagaaaaattggaacctacaatatgtaacctcaccaatttactgagctgcccaattgtatagggtatcgatgacccataaaactgaccgaanattcccatagtgttcaagtgggtgaggttgccaattgtatctggcactggcccagagagcagactactattcatacctatatacataagtctcaagtttgttagcttgccaattgtagctggaattggcccaaaaaacccatcttcaatgtgcaaac

SEQ ID NO: 17909 - DNA, 425 bp, Zea mays
tgcattgcatatttaaacttcttgtattgcatctatggcttgtctaacctagttaagataaccaccaacaaagcgagtgaaaaagcttaactcaagctcaaacttgacaagtcttagttttaagcttttagcacataaattcctacttactatgcaattgttggttcttgagatatgcatgaggcactacatgtggcagaaccgcccgaattattccagcttaagtgcctaagtcacgcatcaagggccacgacacacttaaatcggaataacccgtcagtccctcagatctagtctgataaagccacttaaccaggatcaaataccacatactcactcgaaggtgagtcacagaagaaatacaataaaacaggaaacctcaaattaaagtattgaattattacataaatcggagtttttcaagt

SEQ ID NO: 17910 - DNA, 429 bp, Zea mays
ggatcttaagtcacctgcggcatgcaagcttctttatggagaacacgtgatacgtttgactaacgcgcatttcgaaaaagatagaccttgtgcagcttgtcaagcaggtaaacaagtgggaggagcgcatcacagcaagaatgtgatgaccacttcaagacccctggagctgctgcatatggacctcttcggacccgtcgcctatctgagcataggagggagtaagtatggtttagttattgttgatgacttttcccgcttcacttgggtattctttttgcaggataagtctgaaacccaagggaccctcaagcgcttcctcaggagagctcaaaatgagtttgagctcaaagtgaagaagataaggagcgacaacgggtccgagttcaagaaccttcaagtggaggagtttcttgaggaggaagggat

SEQ ID NO: 17911 - DNA, 421 bp, Zea mays
tgaatgaattagtgtttcgatttagagttttggacagtttacttgtatggatttgaaaagattacttgtatgaaatgttgaaattgttatttgatgctaaaaatattattggaatgctattggaatgttaatttgtgataaatttccgctagaatgatgctgtaattttagtgggcgtggcgggtaacggatatccgttggataacggatactcggtgggtacgggtacggatatagatccgtacccacgagcgtaaatgggtatgggtatggattgggttttacttcgcgggtatggatacgcgaaacatatatccgcgttctacccgcccgattaccatccctatagatcaccaattggttcttcatgaccagctggagtatctggtgccatcgattgtgatgtcgcagttcacaactc

SEQ ID NO: 17912 - DNA, 332 bp, Zea mays
ttgattatgccagatctgcagaagggatttgacatttattgtgatgcatgtggccaacgacttggatgtgtgcttatgcaagaaggtcatgtgattgcctatgcatctcgtcagttgcggaagcatgaattgaactaccccactcatgatttatagctggcactacttgtgcatgcactgaagatttggagacactacattatgggaactaagtgtcaagtgtacacgtatcataagagttcgaagtatatattcacttagaaggatctcaaccttacgcaacgctgttgtgtggagctcattaacgattatgatttggagattcactatca

SEQ ID NO: 17913 - DNA, 392 bp, Zea mays
ttgacatataatcactccgaccttcagcctgctgcccatttgcttcgatagctgattacaggaaattttgtggctttccgataggcgaagttatagcaaccaaaattgtcgtgcaatccatcctttctagccttcgtctgataatgcagcttgtgaacccggcaaaagctgtcccgaaatggttccactgcttggcttcggagtgcccagatataaacgctaagcctgacgatagcgttaggggtcagctggtgaaaatagataccgaacctcttcagtacctctgcaatgatcccatgtagggggaatcttaacccagccttcagaaagctcttgaaataacaattcatccttctccggctttggggagtctcttctccccgaagcgtata

SEQ ID NO: 17914 - DNA, 365 bp, Zea mays
tgtgatattcatatgcttcttctcgcagtattatatgtgttgcatcatatggactaaagcttgcgctgctatgaattaataggcatctattgcgttctttctgaaatagatagccatcgtggataatggtgcatgtggttcgatagtcatgtggataatggcgcatgtggctcatggcgctttaagattgtttcaaattaatatcttagtctaaaatggtattaatttgaattggtatcttaatggtgaatactggtaggctgatattcctgcgatatatccactaaattgaatgaaggttaactccgaatacaagcaattatgacgtataacatcatggtgcgaatcttgacaccatgcattcc

SEQ ID NO: 17915 - DNA, 240 bp, Zea mays
tatagattacaccaccacaggagatgttattgcaagtgtatactgaccactgctggtacacaaacaactttagccatttctcaggaaattaactaatctaatactgtttgcagggattccgctgatagtcgctatgtccctaatgaaagattttttgatgacatctgtgctgaagatcctaattctgttttcacatctcacgctcctgattctgctgaagaacctgaagtcaccaatgat

SEQ ID NO: 17916 - DNA, 311 bp, Zea mays
ctgaccctgtgtcatcacgagaaattgctgcgccggactgaatcaaatctatgccatatcatgcgaactattgagtcgacccacttcatctttagactctctttctataatatccttaaggcggaaaagacaatattggatgcttgaaatatgcaacttctgaggcattaaaacagctacacacctttcatttgataatttcttgataacgaaactggacaagatccgacctgtttaatgccttagctttctgacacccgactactgaaggcaactgccatccacaagacctgcctgggataagtgtaata

SEQ ID NO: 17917 - DNA, 394 bp, Zea mays
agcttgcatttgggtccctaatgatattgttactaaccttgtacgacccaacaagagttgggtacctaagacccaagcctaaaattgccttgcacgtttatgcatccgggggctcaagctggattatcgacagtggatgcacaaaccatatgacgggggagaagaagatgttcacctcctacgtcaagaataaggattcccaagattcaatcatattcggtgatgggaaccaaggcaaggtgaaaggtttacgcaagattgcaatatccaatgagcactctatctctaatgtgtttttagttgagtctcttggatacaatttactatctgtcagtcaattatgtaatatgggatataaattgtctatctacacaatgtagatgtgtctgtcttt

SEQ ID NO: 17918 - DNA, 395 bp, Zea mays
  unsure (1)..(395): unsure at all n locations
tctcttggacaagtgctgcacttaccgctgagtgcgaatctgtcacatataacaacagaggagcccctagcgttggtggagttagtgttgttaggtctatcaaatattgcttcagctcttcgaaggctctctgctgcactggtccctattggaaaacttcggctgacttcaacacttcgaaaaatggtaaatntctctctgctgatctagatatgaatctattgagagatgctagtcttcctgtcaatctttgagcccccttctttgtacttggtggttccattcaaaggatagcttcgattttatttggattagcctcaatcccttttgttgaaactaggcagccaagaaattttcctttctttactccaaagacacatttntctggattcaac

SEQ ID NO: 17919 - DNA, 353 bp, Zea mays
ttaagtcacctgacgcatgcaagcttgagccgaagcattgcctcatcggttaagcgatttcaccctcgccggacttcggtcttccgccgccgcgcgtggaccgagctaaccagtgagtcttcgttcaatttcttgcacccacatcttccctggcatcccgtgaagccctctgacccgttcaattgaactatcatgtcgtgagtaggccggactcctcggcgccgacgagcatctccgcctgcgcacgtggaccggccgactccgaccatccccgacggcgacccgcacattgttgtgatccccgagaccttccctacgtcctcgaccacctcaccggagcaatctcgcccgcg

SEQ ID NO: 17920 - DNA, 462 bp, Zea mays
tgtgaagggtcttcatccccacatgtgctaagcggtgatgcctctaccagcccatgctagtcttagcaattaagcatgcatctagaccagcctcttcttttgcaaaatcaactaagtaaagcttgccgtctaatacacccttaaaggctagtgaaccatcacatcttttaaagacagacacatctacatttgtaaacaaacagttatatcccatattgcataattgactaacagatagcaaattatatccaagagactctactaaaaacacattagagatagagtgctcatttgagattgcaattttacctaaccctcttaccttgccttgattcccatcaccgaatattattgaatcttgggaatctttgtttatgacgtacgaggtgaacatcttcttctcctccgtcatatggattgtgcatacgctgtcgataatccagctagaacccccggatgcat

SEQ ID NO: 17921 - DNA, 273 bp, Zea mays
agatgcaagaatgaatgcttgacaacttaaaccaggtatgaacccgggtctacatgcacgaacatgccttctctcttcccttcatataagagataccaggaatgcaggaagatctaggtacactgcatgaatgagactgacgagtcctacctcttcgacctctacatacggaagctctctccattgtgccttgcccctagccttacttgcttcagacctatccttaagaccatatatggaaatatctttcacaggagagaattctcacaacta

SEQ ID NO: 17922 - DNA, 366 bp, Zea mays
tatgctaattgtctctagcctagctacgggcgcataggtttcaccgcaatccaaaccttcgacttgggagtattctttggtcacaagtagaactttgctccttgtgcacacaccaagctcatctggcttggtgtggaagacccaatttgatcctaccatatttttattaggacgtgcaaccaaatgccataccttattcctaatgaagttgctgagctcctcttgcattgccaccacccaatccgaatcttggaatgctttctctaccctgcgtgggtcaaagaggaaacacacgaggaatgttcacaaaaatgtgcaacacgacaacttgcagtatcccccttatgaactgtccccacgatggtg

SEQ ID NO: 17923 - DNA, 426 bp, Zea mays
  unsure (1)..(426): unsure at all n locations
tcgaccgggatctctgagtcacctgccgcatgcaagcttccgtcactacgactttattctcttcatggtgtggacaagtcttttccccttcgtcggccctcacaatggacaaatcccggaaatatcttcctctcatgttgacaagatgattttctttgatagttgatttgccgaaaaccgcatggcttggttgccaagggcgatcttcggagtcctcaccgccactgtccacattataactgtcgctatcaccagtatcttcggacaaaccttncagaatctccttggtgattttttctgtattggtcttcaacatcgctataagaaaccccaggtttttctcttcgtcaagactcaccttcatctcagcgatagccttcttatcttcagacatcttcggaaacactaaaaaacttgtttcaaagc

SEQ ID NO: 17924 - DNA, 336 bp, Zea mays
  unsure (1)..(336): unsure at all n locations
catggctcacgataacgagggctatatcntatatcctgtcggatatcccgagcataagattatgagaattcatgctaggaaacctcataatgtttcacatcatgcatttatgtataagaatgaggcgtcttgctctatgcaatcaacccatgttaaattgcctaaaaagaaatcttctattgcatcaaatgagtctaatgtttcatttaaaacttttgatgcttcatatgtgcttactaacaaatcaggcaaagtagttgccaaatatatcgcgggcaaacacaacggctccaagacttgtgtttggatacccaaggtgcttgtttctaatatcaa

SEQ ID NO: 17925 - DNA, 334 bp, Zea mays
  unsure (1)..(334): unsure at all n locations
atatgcatattatatccttcttagtccattccaatttctataattntgtaatattatggtttatcatctagtaccattgttttcacatgaaagtcatattaaaatttatatcctatttaatcttgtgtaaaacacataaaatcattagaaattcataacttaaatctatgatcccgatttgatccattcaaattgcgttagtctcgtataaatatttaatatgcaatagcaacacttattgtaccatgtctcattattttataattagatctatatttaacttatgttggttagtcttgttaaactgctcatctactaaaatatgatctatggt

SEQ ID NO: 17926 - DNA, 340 bp, Zea mays
tactaacgcgccactcgacaaagatagaccttgtgcaccttgtccagcaggtaaacaagtgggaggagcacatcacagcaagaatgtgatgaccactcttagacccctggagctgctgcatatggacctcttcggacccgtcccctatttgagtatacgaggaagtccgtatggtctaattattgttgatgacttttcccgcttcacttgggtgttctttttgcacgataagtctgaaattcaagggaccctcaagcgctttctcacgagagctaaaaatgagtttgagctccaggtggaagaagataacgagcgacaacgggtcccgagttcaagaacc

SEQ ID NO: 17927 - DNA, 369 bp, Zea mays
tcgctaggtgaacgacaatagagattttgataatggagttatggttcaagcgagtcatgttgatgtgataaaaatcaacgattccccggaaaaaaggagatatgggaacgccgagaccgcgaataaagaaaggagtgtataccactgactcgtgggtatcttcggttgggacagttgtcccgtggcaagaacgccaagagcagagttcccgtggagggagaaccccgatggagacaaggcggagaagctcaacttcacaaatcacagacatatggttacctgccaagggtaactgactgttggggtcgatggcggggatcactgcggcagactagttcgcggtctttctcttgggcgccatcttgcttc

SEQ ID NO: 17928 - DNA, 476 bp, Zea mays
  unsure (1)..(476): unsure at all n locations
acctgacgcatgcaagctcggtacctgacagaggtacatcttttttaatgttgaacctatcaaggcctttgatagatccatcatcaagttttatttttgaaaaacatnccacccacttttgccacatcatattttgtaaaaacaaaaccttttgtttttctaaagcaaagctaagcatcaaaaagcttttgtaaaacaggtgattaaagaaggtaatccaattcaaggaaggtaatgcaggaatggttttatcaagcaactcctatcacctaatgcagcaatcaagtgagaaagattttaaaatagcaaggaaggtggcaaatgcaccggggcttgccttcgtttacaggtgattcgggttccgatccacagatgtcgaagtataaactattcccagtcggggattccgaaggtggtggtgttctgtcttccgggacttctacctcttcttcacgttctaatcataaccatacata

SEQ ID NO: 17929 - DNA, 308 bp, Zea mays
  unsure (1)..(308): unsure at all n locations
acaaccacatgtaccagcacagtatcttttgtacataccggngacttggcccttccgatgcctagggctagatatgaaaggacctttcaagaaagcacaaggaggatacactcacgtgctggtagcaatcgacaaattcactaaatggaatagagtcaaacccattgaatccttaacctcagctaaagcccgggaaatcataccagacataatattcacgttccgaataccgaacagtatcataaccgacctgngaaccaacttcacaagctcaaagaacttccatttctgcagccaaaaagaatcat

SEQ ID NO: 17930 - DNA, 262 bp, Zea mays
aatgagtgagcacgagtggttggtcacacaacgcgccaaacaagtctgcggcatgggcgcatttatacccttgatgcgctgaaagtttaacaaacccacttgtcattgaatgttgctattctaaccaagggaaggtgttttttctgaccttcggcataaagccctcgttcatattgcaatctgcatttattatttcaaacataattaatattgcgaggggctactgttgggggcctttcgctttccaaagtccctaaaaaca

SEQ ID NO: 17931 - DNA, 379 bp, Zea mays
tgaagacctgctacccccaggactgtatccaaaatctatgcacataatccatgccaaactcattgagtttcccaccccattttccaacccttccagaaacctccctatttctcataatatccttcaatggatgtgaggaagggacaaatatattgcaagcttgaaaataatgcctaagcttactggaagccatcaaaacagcatacaacaccttctccaattctgtataactctcctttgattaactatgaacttccgagacgaagtatattggggctcgttttctgacttgcccttcagccttttttggaaagtgccgcactaccggtgagcgcaagctgcccatttacaacagaagagccctgtcatggtgaaacaa

SEQ ID NO: 17932 - DNA, 382 bp, Zea mays
taagtcttcgatgaaggtttccgagttctctgtgttgaataccacgtcatctacgtaggcttccacacgcttgccccagtgatcagctaaccatgtctgaatagctctctgataagttgctccaacgtttttgagaccgaacgggatggaggtataacagaaagcaccaaaccgagtgatgaacgctgtttttttcctcgtcttcctttgccaaactaatctgatggtatccggaatagcaatcccagaaagatagcacggaacatctagcggtggagttcaccacctggtctatcctcgggagcccgaagggatccttccgacagtgcttgttgagatcaatatagtcgacgcacatgcgccaatccaattattttttttg

SEQ ID NO: 17933 - DNA, 432 bp, Zea mays
tccttcgaagggtttctggccaaatatccctagaggactattgtacatgctgatttgctagctaagacagcagcacaggggctgcccttaccttccgatgtgttcttcgaaacaataaaagcaccttcggtggaacttcttgaaagagcagtccttaacatatctcctggttttagcgaagattggagaaccgagatcatctcttaccttcacggtaaattcctttcagatgacgaagcttataacaagaggatagaggcaagagctcgtccatatgtcatgataaaaggggagttgtaccaacatggagtttgtgctccgctgctcaaatgtttatccacagccgaaggtatagagttaatgaaagaaatacatgccggcctgtgtggatctcacatcggatctatgccgttactctgaaaacgtttccgc

SEQ ID NO: 17934 - DNA, 439 bp, Zea mays
cctacgtcattgtatacaacacacagcggagtagggtattacgctccgacgaccccaaccactctaaactctcgcgtgttcttgtgttcttcccattttccaactaatgagcaaaacacttaggccccttctcatcttatggtttaaggcgggtgcactccgccacccagccggagatttcctctccgacaggactcatgttgagatggctaagagatgcttaatgagcatatgactcatatgggattatggaccgaagctatcaacaatgtctatcatgagtccaatcacatctttcttcatgcttttcaaaacaaagatctcttatgagttgcgatttggatggccacccaacgttaccatttcaaagtgtttggctatagatgctttgtgttgaaacacaaaaatttggacaagttttaatcattgtctttctgac

SEQ ID NO: 17935 - DNA, 404 bp, Zea mays
atggggggccccgtgcacgaaccttggtgctatccaatcgagagatgtctaaagactattcgaaagaaatgtagaaataaatgccaaatccaagcttccattgcagaagcatacattctataggaagtctcaaacttcacaacaacttattatggtgacaaactggcgagcgtgcataatccaccccctcgttacaatgaatgggacaatgaatcgaaccttaacatatttcgaggccaactcggaagcgcaagtggctcgaacaccaagaccttgacacatgaagagtggcggcatatcatgctatacgtattgactaacccttgaagaagtgacgccatacatggaacaatttctttatgaattctagcgtcgatcacgggatcccacttcacatgaatatg

SEQ ID NO: 17936 - DNA, 322 bp, Zea mays
cccatgttagtcttagcgattaagcaagtatcgagttcacctctattgaaatcaactaagtatagctgaccctctaatactcccttaaaagctactgaatcatcacttcttctaaagacagcgacacctgtatctgtaaaaagacagttgtagcccattttacataattgggaaacagaaagcaagttgtaatctaaagagtctacaggaaaaacattggaaatagaatggtcaggtgatatagcaattttacccaatcctttgaccaaacccttgatttccatccccgaatgtgatagcctcgtggggatcttggcttttc

SEQ ID NO: 17937 - DNA, 296 bp, Zea mays
  unsure (1)..(296): unsure at all n locations
acagctatatatagggctcgcgaaatacgccgcggaactcacccttcttcctctccgcctgcgctctgcccacgagcccgtcggagaggcacccgctggccatnttactcggtgcctgtgcctccttcaccgagacgagcgacgaggacgatgacgccgacgccgacgcccacggcgagctgctgttggcccgcgcgaaagccgccgcataacacccctgcgcggcaggccgcggcagcaccggcggcggcggcgacacgcactccatgctgaagcaactcttatggctaccgcta

SEQ ID NO: 17938 - DNA, 310 bp, Zea mays
  unsure (1)..(310): unsure at all n locations
cctgcaccctactggaatgcttcacatccaaagggatttgatgtgtattgcgatgcactacaccttggacttggatgtgtgctaatgccaccaaggaaaggtgattgcttatgcttcaagacagttgacgaaacatgagaagaattatcctacacatgatttggaaatacaatatcaccccggaaaagcaaatgtagtanctgatgctttgagcccgaagggtcacgtgaacaacatcactactcatttgatgtcacaagaattatgctgggaaatggaatgactcaaccttgatttctcaataatgtag

SEQ ID NO: 17939 - DNA, 445 bp, Zea mays
  unsure (1)..(445): unsure at all n locations
cgcactcagccgaagcaccattggtggttttgattcgtcacaagaggaatagcttccggaaaattaaaaaagtcaacaacttgatcaaaaattgtaaggaattcatcatcaaatggcaagggtacattccactgctagggttacacgtgacggagaagaagccaaagctgctgaaaccgctccgattttcgaagtgatgaaatggtcggggctggtaatgccggaggatgtttctgacgaaggtggacctgccactgaagctgagcacgttgatgctaaggaaggtgaatntgaagatgattacagtgccctgccatctaaacccagccacttggagtttgcgaggtccactgttaccgaagatgatatgcctaagttgatgatagtaggctatttcagagaagccatacagaaactgattcactttggcggagatgaaattact

SEQ ID NO: 17940 - DNA, 442 bp, Zea mays
  unsure (1)..(442): unsure at all n locations
tanaagggagtccctcttcctcattcacacatgattttatttctgtaacacgcctcaaatcaatactacaatcaacactacaatggactatggcgaaagcatgaaccggtataacccagtgtctcagtttcttgctcggatccccatgatccaccatttaaagtgagtctacctttgcatcccccactgaacacaaatctattgccccccggtttttgaaaccacgacagttggcgcgctatgtaagggaccgcaagcgtggcaaaacgactttttttcactgcgatggccagttcatcaacacttgccggggcgaagccttcaaccccaggagcagcatcaagtttggttctttctactttcttgccactgccaccaacaagctctacctttctgggcccaaggcaacagatgctggacgcatangacccgaacgccccac

SEQ ID NO: 17941 - DNA, 188 bp, Zea mays
cttactcccgataagaagagatatttccaatccatgtcacggtttaagggaacagcctaacccaaatgtttgctttttgggtgtatatatgaaccacaagtaacggtggttgccttgctattgttaactgatgatagcgagaacatttctatcgcattccatggtccacatttaacattcataatgac

SEQ ID NO: 17942 - DNA, 462 bp, Zea mays
  unsure (1)..(462): unsure at all n locations
cgtcaccggatccggatggagtgagagcatagcgacctccttacaagcacagcgggtcaaagacggaggcggagatccatgacggagccagagccatgcacgcacgatgctcttcagtctccactccacaccacacccttgtgctagaatatgattggattcctcgccacaacgcacaccatgtaaaaaaaaaacaataattaattaacagcaataatgcaggcagcagcgccgcccacaggcctctccactcgtcccgtcctcccgtagtccaacttggctggctggctggctggcctcgggcctcctgtctctgtgtcagattgacagaggtggtgctcagcggcagcgtcacactgctccgctcaacanctggttgcgcggagtgagagcgactggcgctgcagacagcgacatcctgctcctccatggaaacgtccagaaccgggcggactcccatgc

SEQ ID NO: 17943 - DNA, 430 bp, Zea mays
atactctcagtcacctgccgcatgcaagcttgtagaactggcactctcttcgggtgtatcagaacccctctgctctgatcagtttcaagcctccttcgcacatacacaagatggccatttgcccctggattgcccagcgtgtgatgattggtcggactcaaggggccataacgctgtggtcgctttatgccaactgtagcagcaactttgttttcacgaaaaggagaagttgtgggttgctcattaacaacattcttgggctgttttggtgattccctcactgctgccgtattctctgaaactgagtgcgggttgtcaccacgaggcatggtgcctctgccacgaagtaacctggatcgatttatatgtcatcagcaccatttaatggtattaattaccaacaagcaccaagaccaacttgccacatgcc

SEQ ID NO: 17944 - DNA, 469 bp, Zea mays
  unsure (1)..(469): unsure at all n locations
tggaaattgaaactaggtgttcactacacgcatcaatgttttagtctttacacctagtacaaattacaacatgttctacacaagaattagatttatttgccacttctaatttagcatttaaatcattgttgacaccttctaaagtagaaatggtgttatgacaagtagataattcaccagagagcatttcattccttttaatttctagagcaagagaattttgtgcactaacaaatttatcatgctcctcatataaaagatcttcttgtttttctagtaatctattcttgtcattcaaagcatcaatcaactcattaatcttatctatcttagatctatctaagcccttgaataagcatgaatagtctatgtcatcatcatcactagactcattatcactagaagaagcataagtggagtctcgagtactcaccttcttctcctttgcataangcatgtgtgacgctcg

SEQ ID NO: 17945 - DNA, 211 bp, Zea mays
  unsure (1)..(211): unsure at all n locations
gacatccaacacccaaaccatattccagcaagaacatggatgatgccacggacacccggtattaaacccggaaaatgcaacactctaacattactcccccttacacactaaacatatgccacacaagcattggagaaaaactaaggtacacatacgcacaaaagccaatacctncttttgtacctttaccatgttatggtgtactttccat

SEQ ID NO: 17946 - DNA, 334 bp, Zea mays
atggcaaatcaaaatgtaggattaaatgcctccaaataatgaaataataaatgtgtgcctccgaaattatggtaatgaatctatatacatgaatgaaagttataaattgtgtgtcaaacattctttagccctcaccgtggtaaaaaaactgatgtcaaaatccattgaccctggagtcactcggtcaggatcacaatgatgcgtagcaggcacgtactaaatgctggcactcaacctttaacacgcgcagacttgacaacatgcatgccccaacccactatccaaaccatccgccgttcggacgcggctgcgggcacacacacgagcagagaga

SEQ ID NO: 17947 - DNA, 385 bp, Zea mays
tgctgttctaatagcaccctctaaagtcacaacatgttatgccataaagttagacttcacttgtacaaataacattgtcgagtacgaagctctacttttagggcttcgaaaactaaaggcaatgggaataagaagggccatccttaaaactgattcacaagttatttctggcaacgtggataagagtagcaaggcaatagacccgaagcttgaaaagtacttggatgcagcccaaagattggaagcttcttttgagggatttttgtaaaaaaaatatcccaaggggagaaaatgagcatgcagatttgctagctaagtcagccgcacacgagcttcctcttgcttcggaagtattttttgaaacaataaaagcaccctcagtcca

SEQ ID NO: 17948 - DNA, 456 bp, Zea mays
tggttgtttctgcgttcaggcgttgagccttgcatatgatatcttctagatttggcttgacttccaggccaccgttgtcttccagacatgcatttagctgagctgattctttcttccaatcttccagaaagtttggtcctttaaccccgaaaggttttcggctgagggcgtctgctactacgttggcctttccggggtggtagtggatttctaggtcataatctttgatcaattcgagccaccttctttgacggaggttgaggtccggttgcgtgaagatgtacttcagactcttgtgatcagtgaagatgtggcatttgttcccaatcagataatgcctccaaatttttagggcgtgcactatggctgccaattccagatcgtgggtaggatagttctgttcgtgcggcttgagttagcgagatgcataagcaatgactttctcattttgcatta

SEQ ID NO: 17949 - DNA, 465 bp, Zea mays
  unsure (1)..(465): unsure at all n locations
atgcaagcttgtgaagattcttcattccaacatgtgctagtcggcgatgccagagccagcccatgttagtcttagcaattaagcaagtgtcgagttcagctctatcaaaatctaccaagtatagctgaccctctaacacccccttaaatgttattgaatcatcacttcttctaaagacaatgacacctacatcagtgaaaagacagttgtagcccattctgcataattgagatacagaaagcaaattgtaatctaatgagtctacaagaaaaacattggaaatagaatggtcaggagatatagctattttaccaagacctttgaccaaaccttgatttccatccccgaatgtgatagctcgttggggatcttggtttttctcatatgaggagaacatctttttctcccctgtcatgtggtttgtgcacccgctgtcgaatatccaacttgagcncccggatgcat

SEQ ID NO: 17950 - DNA, 409 bp, Zea mays
  unsure (1)..(409): unsure at all n locations
tggcttgcacgtggtgtggctactgtccatcggtccttggcagcgcctactaantggtgcactgtatgggctattgagcaacggttgctgcttgctggtagatgctagtgctactagatgctagcctgctagccgcagtctgcgggcatgaactgctgcagcctggtgaaactagagtatgagacggtngccaggtggcagctgccacgactggggctgcagctcgggcagccctgggtgtgaatccgccactttgtgtttgattgctggacaactgttactcttgatccaaactaaacagtcttatctaaagaattgtctcatctcattcaagttcgttatcgcaaccaaacacacctttcactatccatgggttgcattagaaaaaaacatgagtctaattatagat

SEQ ID NO: 17951 - DNA, 401 bp, Zea mays
gacccaagcgactgcagctgcagcttatgagggagctcggcatatttattctttcttgcgaactgctcctcctgcagaccttcggcgaccaagcatggttccaaccgatagcatgataatcaacacacatcgcgccagagccatcttctttgggactaaaagaacgggaactgcacatggtgataaagattcacgaacataccctttgtccaaaagctcttctaactgtcaatggatttcctttgtttcttcacgactggcgcggcacgctggacgatttggaagcgaagcacctggtaccaaatcaatttgatggtcaattccacagagcggaggaagcttacctggtatctcatcaagaacaacatccttcaacgcctgtaacaaaacacaaacacact

SEQ ID NO: 17952 - DNA, 406 bp, Zea mays
atcgagagagtccaccaatacattgaaacatctttgcgatgctttgtgcatgcatgtcctatcaagcgggctcactggcttctagtcactgaattttggtataacactaattttcactcaaccttgggccaatcaccctttaaagtgctatatggccatgcacctccgcattttggcattcataatgattctatggtactagtggaggatcttgcagtctggttgctagacagggaagtggctatcaagctaatacaacatctgttatgaccctaggatcgaatgaaaaaacaagcagataaacagcgaactaaagggtatttcacgttggtgatttcgtttatctggagttgcagccctacgtgcagtcctcggttgctacccgtactaataaaaaattggcatt

SEQ ID NO: 17953 - DNA, 459 bp, Zea mays
tactggcaggttaacaacgaacgacagagaggcctgttcacattgctaagcgaacgagaatatttggatggatcctactgatacatgacggcgccacgccggcgaacatcgtaaaggataagtacggcaccgagctatgaatcagttttttttaagaatggaactacgatatacatgctccgagttgtcacacaggaacttgatccgtggcccaatggataatgcggtggtctaccgaagcatagatattgggttcgatccccagcggaattcgtgaatggctaatattcttatttcttgggtttgtgccaatcgatgcttgcaaactttggattacattctcacgtgctcaattctatcccagcggagtctttgtttgtctactattatcttctcgcaaatcgatgttggcaaactttggactgcatattccagaactcaataatggtgggattcaca

SEQ ID NO: 17954 - DNA, 458 bp, Zea mays
aagtcacctgcggcatgcaagcttcagtgcagaggtctttgtagtctctcaatattgcataaacacatgtgaataaacactacttgcattacattatacttaatagtgcttaaacatgtatgaatgaaaatatattggtgatttgcagccatcgaatgcccgaacaagaaaaagtctaggaataatatagcccaaatagcaaataaattgagtatttgagatcctcatgtgtgtagaaagttcaaagaagacatcatttgtgagcaaaaactagctagaaaaatattttctcgacctagatacatcctaggggaattaatagcttccaaagaatgtttgtgactcgatagaattgagaccccaaaaacacctaaaaccagtgagctagctcacgaaaatgggtaaaacgtgataattagtacgagagcacatgacgtcccacaagaaaatggatcgag

SEQ ID NO: 17955 - DNA, 456 bp, Zea mays
  unsure (1)..(456): unsure at all n locations
tgtggaggaccagatcatcgaagcatataagtttctggatgataagtggtcacccaagttttgttgatgaagcaccacaagactaatcaaggaaggaatccatgtgggaattcgcaagagaaaggtttgtgtgttggcatccatgcttcctcaataagctagctggaaagcgaaagccagaagcctgaagatgatccttcagtagccagaatcagcgtttgcaatcggcaaccagatgctcctcaaggccagattttgttgaagtttcatctccttgaagagtctgcaaagtgaagatatgtagctgaagtaaagctatacccataacccttctaagtcgaatctcgaggacgagattcattntaagtggggtagaattgtagcatcccaaaaattcaaatcttgaaattntctcaaacttgctctaaattcanaatgaatttcaaatttcatttc

SEQ ID NO: 17956 - DNA, 402 bp, Zea mays
gtccacctgacgcatgcaagcttgtacttacgaccaaaccgcacccgtatccatattatattttatggctcaccaatagtggcaaggtcaaggtaaccaagctggtacgaattaattctgctattgtgtcatatcgcgatgttgttgaccgtgatgttgcgcctatggatgctactaatattctgctacgtagaccatggcaatttgattcacattgtatgcctcatggtagatcaaatcaatattctctcatacaccactgataagaaaattattttgccttccatgtcccctgaggctattgtgcgtgatgatgttgctaaagctcacaaagctcaaactgagaacaacaagaatattaaagctgttggtaataacacagatgggactacattgaaagga

SEQ ID NO: 17957 - DNA, 427 bp, Zea mays
  unsure (1)..(427): unsure at all n locations
tncgaattaactctacatatttagcctcagtttcagccagttagtccttctgtcgattggagctcgaagtctttcttttcaatgatggcagtttgctcttttattttgctttccaagttttcaattatagcttcgtgctttttgtcctccaagtcttgttgcatcttcagagctttgctcagtagcatgctctgaacagaaacaacttatgttaagtaatattttcattgttaacggcaataaaaaccagagaaaaaggttgttaccttgaagttagaataaaacaagctgccgacgatatgttgtcgtcggtagcggctgatgtctgtctctatcttcggaaaaccgatactcttcgatagagtaccgattaccttagccccagtctggtctcgaataccggctaatttttcattcatctacaccc

SEQ ID NO: 17958 - DNA, 323 bp, Zea mays
  unsure (1)..(323): unsure at all n locations
gctgagataaaatagagatttaaatggctctgaaatatatctgatcaataaaagcatctggcaacgttctagcgttcacaggcccttaccacattatgaatttctgacagctcattattatgcagcttatctttcagattttacttattcagtaacatgaggcagtgaatnttgcagacatatacaccggatctgctgaatcctccacaaaacgaactttaaaaaaaacgcactaactggtctgatatatctattatttatctatcttaacacacgagcagcattttcctttcacttaatgccgtgagcatttaccactgact

SEQ ID NO: 17959 - DNA, 398 bp, Zea mays
  unsure (1)..(398): unsure at all n locations
taccggacccgcataaaggtggccagaataaaccgaatcttacaaaaagcggttcgattgggggaaaccatattgtgcagccgacctgctaaccggctagccaacaatttagtcaccaacttcgcgaaactatgaaccagacttattgcgcggaaattcctcacactagtggcccccttcaccttgggaagaagagtaatgaaagctgaattcagaggacccaggtttctgaaatatttagcccaaatgcagtgaacggccggcatgaaatcagtcatgattaccgaccagcagcttntggaaaatctaccagcgaacccgtcgggacccgaggattggtgcgaaggaagggccctagatgtatcccagactntctcctgcgagacaggcacatcaag

SEQ ID NO: 17960 - DNA, 235 bp, Zea mays
gatcgtttttcgtaacgagcttgatccgtgaaaaaagtctcttaggcttcaggaagccaaaggtccgaaaaacaccttccctgagctcgttgtcgagaaacgatacagtttccgagcgcgtaacggtcccaccctgcaggtttactatttggtcccaccgcgcagcgggtgtgagcagctgtttgcctggtgtaaaaatcctgacgattcaccttcttacctgcagtactatata

SEQ ID NO: 17961 - DNA, 400 bp, Zea mays
  unsure (1)..(400): unsure at all n locations
cttcagctccatctatgttatggagtgcttttgaattagtcttgttttcttctgcccttctggcagctttctggctttcatgaataacgatgggtccttgatccgaaagtatcttcatgcaaagataggccgggtgaagaattgcttcaaaagcattgagggtgccacgaccaataattgcattggtagggtatttcatgtcaacaatgtcaaacacaacttgctcagttctagtgtttgtgatgaacccgaaggtcactgacatggtgatcttgcccagtgctacaatctgtcttccttcgaagccacagagaggatgtgtagcatcatgaatcttatcttctggctcttgcatttgtctgaaggccttaacanatatgatatcagctgcactggctgt

SEQ ID NO: 17962 - DNA, 358 bp, Zea mays
gcaaggaaacaagtgggaggagcgcatcacaacacgaatgcgacgaccactccaagacccccggagcaggtgcatacggaccccatccgacacattgcccaacagagcataggagggagcaaagatgcgccacccaatggtgacgactgttcacgcatcacaagggggtaccttttgcacgataagcctgcaacccaatggaccctcaagcgccttctcatgagagctcaaaatgagcttgagccgcaagtcaagaaaataacgagagacaaccgatccgagcacaacaacattcaagcggaggagacccctgaagaggaaagagagaagcacgagatatccgcgtcctacacaccac

SEQ ID NO: 17963 - DNA, 401 bp, Zea mays
agcttgacgcagcaacctcatgtgatgatttgactcacgaagagccaactagtctacacgctgaatcgactgaaaaagctgaagccctgactttatacaaccaataactgaagaattacttgactgatgcaactactagaggaaaagttgctattgagaacaatgattccaacaatgagttggcagcggataatcaaaggcttaagaatgaggtcaacaaactaaaaagtgaaaatgaacatcttgcaacctgtgtgcaaaagttcaacaagggtcaatacctccaaaatgagctgcttatgaacactgttatgaaaaataaccagagcggtatcggatacaacgcttttgtgcaaaagaaagctatcactcaacaccagccaaagcgaaactcacaagcc

SEQ ID NO: 17964 - DNA, 439 bp, Zea mays
tggggagggtcctcatccccacatgtgctaagcggtgatgttacatcccgcccatgcaggtcttagccatcaagcatgcatctagaccgggctcttcttttgcaaaatcaactaaataaagtttgccgtctagcacacccttaaaagctagtgaaccatcacatcttctaaagacagacacatctacatttgcaaatagaccattatatcccatattacataattgaccgacagatagtaaatgatatccaagagactcaactaaaaacacattagagatagagtgctcattaaatattgcaatcttgcctaaacctttcaccttgccttggttcccatcatcgaatatgattgaatcttgggaatccttattcttgacgtacgaagtgaacatcctcttctccctcgccatatggttcgtgcatccgctgtcgataat

SEQ ID NO: 17965 - DNA, 423 bp, Zea mays
tatagctccgcggtgactggcgtggcaccctcgtgtgttttattcatgcgctgctacaccggggaccgccatggatacaaccaccgtgtgcttctccgtctgcggccgccagcgcatccggctcgaattgaccgttgtcgctgccgctccctataaattgagcccgcgaatagcttcgcaacttcattactcactcagccaccgctattcgctagcaggtccttgccagagcttgtgaatatcggatatacccgaaagtaggcttcgacgccgagaagaacagctcgctgcggacaactcgatatcggttagctcgcgtgcctctgtttcttgttctagaatccataagcaccgcgcgaaccccgtgaaccatacgatgaactggaccaccacccatcgccaggaacatccttatccctcccc

SEQ ID NO: 17966 - DNA, 374 bp, Zea mays
  unsure (1)..(374): unsure at all n locations
acattttatatcctgctaggtataccgagcacaaaattatgagaattcactctagaaagtctcactctgtctctcatcatgcttttatgtataagagtgaggcatctagttctaggcaattcactcatgtcaaattgcctaaaaagaaatctcctattgcatcaagtgagcctattgtttcatttaagacttttgatgcctcatatgttntaactaacaaatcacgcaaagtagctgccaaatatgttggggccaaacacaagggctcaaagacttgtgtttgggtacccaaggtgcttggttctaatgtcaaaggacccaagaccgtttgtgtacctaagaacaaggcctaaacttgttttgtaggttatgca

SEQ ID NO: 17967 - DNA, 430 bp, Zea mays
  unsure (1)..(430): unsure at all n locations
ctcgaccgngatctctaagtcgactgaggcatgaagccatgaagattttcattccacatgtgctagtcggcggtgccagagccaacccttgttagtcttagcaattaagccagtgtcgagttcagctctatcaaaatctaccaagtacagctgaccctctaacacttccttaaatgctactgaatcatcactccttctaaagactgacacctacatcagtaaaaagacagctgtagcccatttgacataattgagaaaccaaaagcaaatcgtaatctaaggaatctacacgaaaaacattggaaatggaatggtcaggtgatatagcaattttacccagtcttttgaccaaaccttggtttccattcccgaagtgatagctncgctgggatcctggttttctcgaggaggagaacatcttttctcccct

SEQ ID NO: 17968 - DNA, 242 bp, Zea mays
atgatcatgcatataaactcgagtcgcctcccgagctgtgggttactcctacatcttaacattgcagatttgaaacccgatttgggggaagaagatgagcttgagtctacgaccactccacttcaacacgggcaggatgatgaggacatcacttctatacataccctgaatggaccgataacacgattcgcgtgcatgacatctaattcttcaaggtacgcctaccctattcaaggcgtttc

SEQ ID NO: 17969 - DNA, 438 bp, Zea mays
  unsure (1)..(438): unsure at all n locations
tgagaaataccacacctctttataccaaagtctggcacatatcttgntctaaaatcaaagtttactgacactacagtttctcaaaccacaaacatccaatacagcctcttgtttggatgtacttctcgaaaaagtgtggttctataagccaaaaaagaggccacaacttgtgagttactaagaactccaaatgactgcacagttttaataaaaccatggcttttataaactaccaagatttgtcatatccaaacagagttcgtcgcttttaaaaaacaacatattttacaaaaccctagctttatccaatgctactttgcatccaaagaggaccagatgcaaatggaaacacatgagtatggcacaaactttanggggagtagaccctagaggtacatgttgcacacaaattgtagctntgntagctgctatcacatt

SEQ ID NO: 17970 - DNA, 356 bp, Zea mays
cagattaccttggttggtgcgcatgcaacgggcataacaagagcatcccccatactctctacacctaagtatggtccgggcagagtactttccctttttagcaagcgaggcacaaaaacttgcgtgaactcccttccaagaggaacatctcccaccttagtggttgggccggttgagataatatttgctattgcaacaggaactctcagatctcatcatagaatataacatcacttcttctacaacctaataaaatatgcgaagcaagattacccagcttaaataatgaaacataaatatgaagtgatagacgagaaaactacaggattatcacctgcactttgagatgatccatg

SEQ ID NO: 17971 - DNA, 431 bp, Zea mays
  unsure (1)..(431): unsure at all n locations
ttaagctctttgacaattaaatcacttcacctaggttcaatttatatgcattaaagcatgaatgaattcttgagaagttaaactagatatgaagcagggatatgcatggacatgctttctgttccttttaaacaagatatgtaaagagagtatagaaaaaggaagatttaggtacaagtttgaatgaaaggaagtggttttacccttttgtaccttcacatagagacgctctcttcattgggctctgtccttagtcttagttgcttaagacctatacttaatgacaatatgtggaaatactttgcacaagagagagntctagaacacatagggatctttttcaaggtattgttagcatatatcaaatggatcacaagctcgataaatgaactatgaactcttcttttttcttagtgctatcaagatagatg

SEQ ID NO: 17972 - DNA, 402 bp, Zea mays
cttagagtcacctgaggatgcaagttgatgtatcataagtcaaggaaatattatgttttggatttcattgcggagatggctcgatatttttaatggcttaaatactttttatgcgatggcacaaagtaatgagaggctgaactgccgctacccctaaaacaatttgaaatgacatgaaactatcatagcgagcctcatatgtcacaatgaacaaactttgatggaggtggatcgagaattttattacttggaacgggctattaaactttctttatttattttaccataacaatataatactgaccaaaattgactgacaaaatctaaaattctatgtggcgatactttgcgttcacatacttgcacaaaatctaaaatctcttacatctttattgaaggtat

SEQ ID NO: 17973 - DNA, 456 bp, Zea mays
ttacgcgatgtgaacatctgtatcgactcacttgagtacagtgtatacaatgttccacaacagcatgatggatctctcaaccaaatgccacagacagcaccacgcacattcttgcattaatattcattcaggatgcataaacagcttctatggtcactttcttgtcatcatgtaaagctcgcaggaataaaagaaaaaatctcactcagcaagagcgagatgacatatacaaagccctgctacaaaagagcaacaatgggacattgaggaaaatttccactcgactagtttctcaaacattcaattgtagcatgagaactgtacagagaatttgggagagggcaaaggcatgcattcaagctggaaccacaattgatgcgcagttcacaacacctatgaattgtgccagacaaaattcaagctgatttgcgtcccttgtgagaatctctcatgaaa

SEQ ID NO: 17974 - DNA, 351 bp, Zea mays
  unsure (1)..(351): unsure at all n locations
actgcaagctttgncgtgctcgagagaatcaatctttctttctattaactcaagctatcaatcttcaccgatctatatccaagattgactcacagctattttgaattgttatatctaaaactcatatcatctcggcgaagatattgctgttgtaggaaatacagatttagcgctatgccgcacagctcaggtctacaacatggacgacagccaaaggatggcaacaactatgctcttaagcgccagcatcttaaattatcatttcttatgtgtcttgcgcagccacatacaaacagacagcacttcacaacgttcctacactatgccaccattctttgcacaaattcctct

SEQ ID NO: 17975 - DNA, 333 bp, Zea mays
  unsure (1)..(333): unsure at all n locations
gctttatgatctcgatagatgtgacagacattccccaggagataatgatgccagatttttagggcatgaaccactgcagctaactccagaacatgagggggatagtggtcctcatgccggcgcacatggcttgaagcataagctatcacttgggcttcttgcatcaaaacacaggcgataccattgcctgatgcgtcacaatacacatcaaagggctcttcaatatccggttgagccaataccggagcagtggntaataataccttcaattgttcacaggcttcattacactttgaagaccaaataaatttagtatcattcttcaataaactt

SEQ ID NO: 17976 - DNA, 198 bp, Zea mays
tgcaccatttctcaattccttccgcgcatggcctgtacatcacccagcggagcttctcgtgcactttaatttaaccctaccgccgtggcttgtccggagcaggtgtcgtcaccgagctccgccgcctgcactcgaggtcagagcagctatagacacttccggcgctgatccgcacaccgacgtgaccgacgcgtactt

SEQ ID NO: 17977 - DNA, 259 bp, Zea mays
  unsure (1)..(259): unsure at all n locations
ggatcttaagcgactgaggatgaagctttacaggagaacacgtgaaggtctaaccaacgtacatttcgaanaagatagaccttgcgcagcttgtcaagcagctaaacaagtgggaggagcacatcacagcacgaatgtgatgaccactctaagacctctggagctgctgcatatggacctcttcggacccgccgcctatctgagcataggaggaagcacgtccggcctagctattggtgatgactcttcctgctctcac

SEQ ID NO: 17978 - DNA, 346 bp, Zea mays
tatgaagattctttaatccagcatgggctagtcggcggtgccataaccaacccatgctagtcttagcaattaagcaagtgtcgagttcagctctatcaaaatctaccaagtatagctgaccctctaacactcccttaaatgctattgaatcatcacttcttctaaagacagtgacacctacatcacgacatagatagctgtagcccattctgcataattgagatacagaaagcaaactgtcatctaatgaatctacaagaacaacactgtcacaagaacgctcacgacatacacgaattttaccccaacctttgaccacaccttgattcccatccccgcacgcgct

SEQ ID NO: 17979 - DNA, 374 bp, Zea mays
  unsure (1)..(374): unsure at all n locations
gctcttcatcctcacatgtgctaaacggngatgccacagccagcccatgcacgtcttagcaattaggcacgcatctagaccggcctcctcttttgcaaaatcaaccacaaaaagttccggcgtctagtacacccttaaaagctagtgaaccatcacaccttctaaagacagacacatctacatttgcgaacaaacaattatatcccattttacaaagctgactaacggataacagactatatccaagcgactcaactaaaaacacattataaatagagcgctcggatgaaatagcaaccttccctaacccttttaccctgccttggntcccatcaccgaatatgaatgaaacttgggaaacccttgtcttgacg

SEQ ID NO: 17980 - DNA, 288 bp, Zea mays
ggtgtcaactgcttgacgctgtaactgttagctcggacggtactccgaagcggcaaacaatgtcttgccagaagaatttttgggcaggctttgatgttattgtagaaacagccctcgcttcgatccatttggtgaagtattcgacggctacgaaggcgaacttgaggttcccctgagcggtgggcaggggcccgacaatgtccaggccccagcgctggagaggccatgtatgggcaatcagctttgtatactgcgaggggctgcctgaccgaggagaaaacttctggc

SEQ ID NO: 17981 - DNA, 261 bp, Zea mays
  unsure (1)..(261): unsure at all n locations
tttcctctagccttggtcttgcagatctacagaagggcaaggaatgtcgtgcagggctcaacgctgtgggaatctacctgcggtaagaatcatgaaatagccatcagatttggctgggtcttgcgctgattttgctaatttttgatttgccacctcgcaatattaaattcacttggcaaaaaaatataacttgtgataagcccttccatctatctctactaatttntagagcatgctagtgcgacgcgacttctttttttc

SEQ ID NO: 17982 - DNA, 276 bp, Zea mays
  unsure (1)..(276): unsure at all n locations
atatttaacccggaattgggccggttaccggngtcgatggtctggatagggttgacccggcgtcggcccattctaataataatccagcaggtatgtggtgacccgaccatgcatccgtgaaattcgtcatatacagagtggttggcaggccagagtaaacaattctttggtagcttcattcattacagaaaaacgtacgtgtcggtatacgggcagcctgcatggccgacgcgcggctcggtagcaggtctggtcagcaggcgggacactgtcacc

SEQ ID NO: 17983 - DNA, 387 bp, Zea mays
ctcgacccgagatctctaagtcacctgaggatgcagcttgaacacggttaatatcgcatatactgagcgcaagagactgatggtatatggagattctctggtagttatcagccaaataaacaaggaatgggattgtttaagtgattcaatgggaaaatactgcgctgccgttcgaaagctggaagataaattcgagggcctggagtttcatcatatagaaagagatcggaacacggcagccaatgtactgtcaaagctcggatccggtcggactcaggtccccgcccggggtcttcatgcaagacattctccagccgagtatctcgacggatcaaatagaagagtgccacatcatagatcaacccgagtcacacttctgatgacctg

SEQ ID NO: 17984 - DNA, 464 bp, Zea mays
ggactctcggaatcgaacgaagctccaacttgaagcctgctttgtcagaagaaaaaacttcggaagaaaatagtatttaatttccacaaattcagaattaaatggccatagtgcgttctaccgctagggttgagcgtgaggggggcgaagctgaaggttcggagactgttcccatctccgaagcgatgcaaagatccggactggtaacttcggaaaagatccccagtgatgatgcagaacaagcagaacaagcaattgccgaagcagaagaagaagatattgaggaaaatgatcccgaagacgattatcgtattgccatgccaagcaagcccagccacttggacttcggaaagtctactgtttcgaaggctgatctcttcaagatggtaaagtcgggctttttcaatgaaaatcagaagaagctattacgctctcggggagaagagactaccccaaagtcggag

SEQ ID NO: 17985 - DNA, 284 bp, Zea mays
tggcgttggcgacggatggttggggtgagctggccaccgtgaccgaagctcacgcggcttggcgggcggtggagctctctgttcacggccaatgttccggtgattcaccgccgcgagtgtgcgtggctgacgcaacgatgtccaacggctactggcctttataagcgccggctcaaggagggccagcggtggacttgaccctccgtggtggctaacgcactctggttgggcgaaccgccgcgtgccaactatggtcgaacacgtgtgtgtgttgcttctgcccc

SEQ ID NO: 17986 - DNA, 325 bp, Zea mays
gcgccggacaaggcgccagctggccggtggcgccactccgtgcgcgcgccggcctgctcttgcgcacacagagcgcggcgaacacgtggagcttttattctgccttgtgtccacagctcacccaaatcgcaaacgtgcgaatctggcaaaaatctggcgcgaggctttttctggcacctaaggctggctctcatccgtgagctgccatggcagatatggcctacgtagggagatctctggtcgccaaatcgggtgtgtcacactgcccacctcgcgacaaaaaccatgctcaggcatgttaaacgtcagagtcttgggcttagct

SEQ ID NO: 17987 - DNA, 334 bp, Zea mays
ctacggtatgaaacatatccatgagaaaatagaagccggcaaagctaattgcctccgaaacgacgaccaacgaataatacggctcaatgattgcatagatgcgcctaaaacgctgtagttcgctaacaaatcttggatgacacctattgtagccgatattccattcatcccggaagtactaagatgtctcaatacttaaagcaccactattggtggacaaaatgaacattgagactgcacgctatgtggcaagatgtgacacctgtacacgtgccaatgcagcgcatatgaagacccctggaccactgaaatctttgcccattcccacctagaa

SEQ ID NO: 17988 - DNA, 412 bp, Zea mays
agcttctaaagggagaacacatgctacgtatattcttatgttcattctgagaaagacagggtttgtagcgcatgccacgcatgaaagcaagttggaacccatcattcacacaagaacatcatgacgaccgacaggccgcttgagctactcccaatggatctattccgcccgatcgcttacataagcatcggcgggagtaagtactgtctagttattgcggatgattattctcgctctacttgggtgttctttttacaggaaaaatctcaaaccccagaaaccttatagggattcttgagaccggctcaaaacgagttccgcttaacgatcaagaaaattataagcgaccacgggacggagttcaagaactctcaaatcgaatgctctcttgaggaggagggcattaagcatg

SEQ ID NO: 17989 - DNA, 341 bp, Zea mays
  unsure (1)..(341): unsure at all n locations
tatagaaactcaactttgggacaaatcagccttctggagtagagggacttcattttttacagtcgnctagctcgataaatgtagagggtttacccatattaggttatctgttaaatttctatggttttttccccttctcacaggttcactttatagtcgctgcctgtgaaaatatgatcagtggcacaagcatgaaacctggtgacattggaactgcttcccatgggaagacaattgaggtatggtttttttttccaacttggtataaatgaccagaacgtgcatgattcatgaagctttgctataagggatctgctcgttcggaatgtaatcctttagca

SEQ ID NO: 17990 - DNA, 348 bp, Zea mays
actgagctgcacctctcacattcttgacccttttctttcttagtaacaacatgtcccactacgggttatgaagctgggttttggcctatcctccttcttcatccaaatttgatgatagcctgaataacaatccaccagactcataagctctgatgaagctgctgcatcaactagagaatctatccttggcaatggaaattcctccttcggacacgccttgttgagatcagtcaaatcaatacaccttctccatttaccattgggcttttttaccataacagggttaggcaccccttctgcgtattttacctctctgataactccaacactgaagagccttcttacttc

SEQ ID NO: 17991 - DNA, 424 bp, Zea mays
ttggccccacctgtaagctcgcatactcccatgaggtgtgctctgtggccactatcggcaccataaaactagggtaccccttactactgtgtaaagacgcagtacccatgcagctatctttagtcgcgtggtaaaatagttgtatgtgggaccacggcatgactcgccccaggttctggcgactactctgggccaacaacagcgcctgaccccactacatgggcgggtctggggccgccacgtgttcagagaaactgatatacttcgaggcatcaacagtgagtctggacccccatgggagagtgttggacccctgtatatacggtctaggcctccaagtttggaccaggacctcctcgtgtacgaaccaaacccctataatgggatccggactccccgtatggcgtctgggcttgccacagtg

SEQ ID NO: 17992 - DNA, 291 bp, Zea mays
  unsure (1)..(291): unsure at all n locations
caagctctaagggagaacacattttccgacttaccaatggttactttgagaaagacaggatcngttgcgcatgccataccgggaagcaagttggacctctcatccacaccacaacatcatgaccagcgacacgcccatggagctcctacacatggatttattcgggccgatcgcttacataagcatcggggggcagtaggaccggctagccatcgtggatgatacttctcgcttcacttgggcgttctttttgcaggaaaaatcccataccaagagacctttaagggattc

SEQ ID NO: 17993 - DNA, 397 bp, Zea mays
  unsure (1)..(397): unsure at all n locations
ntaccaaatggacgtgaagaatgctttcctcaactgctctttcttgttgaggtctatgatgagcaacctcccggcctatgaagacagagagtatcctaaccatgtctataggctctctaaggcgctttacgggctcaagcaaaccccaagagcatggtatgaatgccttaaagatttccttattgctaatagcttcaaagtcggcaacgccgatcctactttatttactaaaactctcgacaatgattcgtttgtatgccaaatttatgttgatgatattatatttgggtctactaattaatctacatgtgaggaatttattaggatcatgacacagacattctagatgtccatgatgacggagttgaagtattttctatgattccagtcaagcaac

SEQ ID NO: 17994 - DNA, 207 bp, Zea mays
acactaattcgctaaacctaccatctaagaaggcactctttacatccatttggtaaaacttgcaaatacgggcacacacacaaacaagcagaatccggatagcttctaatcttgctacgggagccaatgtctccccaaaagccaatcctccaattagagcatattcttgtgcaactaacctcgcctcgtttctactaccacaccatc

SEQ ID NO: 17995 - DNA, 212 bp, Zea mays
aacacggcgaacttttctctctacggaggagccaccctgtcgcgtactctcattgtcggcggcgaactggatgtgcgccaccgaacccaccgtggtggacgctatgccacagcataagcccgatagcctctccatgacacaggggtacggtggagccagagctcgggaaccaaggtgtggactcgctaccatggatgagcacaacgtctaac

SEQ ID NO: 17996 - DNA, 343 bp, Zea mays
agcttaagtagactatgtgacaggtagcatatatggctttttaccccaccaaagtttggaaagaaaaagttgaatttattaaactgggcacacatcatgaactacaagtctcacaaaatacattggccaaaatacattggccatagaatactacatcaaattaatacatggctattgtcgaggaggcagctctatcacagacaaatagctcagataggctcgttcatatgtgataaacggcgatcaatgatctcatccgagtcaaaagaagagttgtctacatccgaaccaaactgctcaatacaatcacaatgaacatcagatttgaaatcatcgtacactc

SEQ ID NO: 17997 - DNA, 371 bp, Zea mays
tggtgccgatggagaaacagaaatgcttgacatcttggctgttgaactgctagccgttgtcaactgttagctccgacggtactccgaaacggacaacaatgttctgccaaaagaatatttgggaccgtcttgatgtgattgtggaaacagccctcgcttcaatccatttagtgaagtattctacgggtacgaaggccaactttaagttcccctgatccgtgggcaggggcccagctatgtccaagccccaccgctggacaggccatgtatgggcgatcagctttttatactgcgatgggttgtctgaccgacgagacaactcttggcttgcttctcatgaccctgtgacggcgattgctgcgcacatcatt

SEQ ID NO: 17998 - DNA, 257 bp, Zea mays
  unsure (1)..(257): unsure at all n locations
gaatgctgtggtaacttcaccactacttgtcagtttatatagtgctgcaagtaaaaatgcgaagccgcggaattgttacaacaggcgcgcagtaacttgtaccccgctgcgcagtggaccgcaaggatcaaacagtaactttgcaatgtgggaccgacacgcgctccgaagtcggatcgtttctcctcaaccagctcacggaaggtgttttttggaccttcggcttccngaagctgaagaggcttctttcacgggtc

SEQ ID NO: 17999 - DNA, 310 bp, Zea mays
ttcaagttatgaaacatttgattatctcttgcgttggtttatgaaaatgacgcacaagtcagattcctggaataaatattaccgtgaataaatgtccacatgcaaaaaggaattaaattaaaaacattattcacacaaaaaaatttgcatgcaaggctcttctttaaatactactccctctatccaacaatataatttaagaatctcggtaatacttatctactactacacatagtgcaatggttacagatgagcttccggagagatgtattacatggttttactggtatagacgtatacattaacacac

SEQ ID NO: 18000 - DNA, 355 bp, Zea mays
  unsure (1)..(355): unsure at all n locations
agcttatgaagattctctatcccaacatgatctattcggcggtgccagagccaacccatgttagtnttaacaattaagcaagtgtcgagttcacctctatcaaaatctaccaagtatagctgaccctccaacactcccttaaatgctattgaatcatcacttcttctaaagacagtgacacctacatcagtgaatagatagatgtagcccatttgacataattgagataccgaaagcaaattgtaatctaaagaatcaacaagaaaaacattggaaatggaatggtcaggagatatagcaattttacccaaacctttgaccaagccttgatttccatccccgaatgtgatcgctc

SEQ ID NO: 18001 - DNA, 422 bp, Zea mays
  unsure (1)..(422): unsure at all n locations
ggatcttaagtcacctgaggctgcagcttgcgntaataacctttaaagcaatgaaccatcacttcttctaaaaacagacacatctacatttgtaaatagacagttatatcccatattgcataattgactaatagatagcaaattatatccaagagactctactaaaaacacattagagatagagtgctcatttgagattgcaattttacctaacccttttaccttgccttgattcccatcaccgaatattattgaatcttgggaatctttgttttttacgtaggaggtgaacatctgtcttctccccgtcatatggtttgtgcactcgctgtcgataatccagcttgaacccccggatgcataaacctgcaagggcaaatttacgcttgcgtcttacgtacccaacttatgttgggtcctac

SEQ ID NO: 18002 - DNA, 431 bp, Zea mays
  unsure (1)..(431): unsure at all n locations
atgctggtaccagctttaagggttcagactttttttctctgctcaggccctgttccagtgcactgaagaccatgatgagtaccttcacgcatatgtccgaaggttcctgcgcctgaaagcatatgcgcctacagtgcccaatgaaatcatcattgaggccatgatcaaaggtcttcggccagggcctaccgctcaatacttcactaggaagcccnccccagactctggagaagctgcttcacaaaatggatgaatacatccaggctgacaacgacttccaccaaagaagggaggaagcttacagattctctgagatgactatgggctttggaggaagaattcaccctacgcatgtcagatcaatccacagctccagtcagaatgatgacaaaggaagccagcttcataggacacagtacacctcacagtct

SEQ ID NO: 18003 - DNA, 288 bp, Zea mays
  unsure (1)..(288): unsure at all n locations
caaccccccatatcatgcaaagagaatgatacatcacacaaaacaaaggtgtaatgatacatatatgtcatatcatcatgggcacggtactaatgtaagaagctcactctgacatattcaagatcttctcncacattctgacacattattgttgacaccatcaccatttgaaccgtgttgcttctcgagtcgccctatcatcctctcaatcttccgtctatcccctgctttttatcactgcctatttccagataacatatacataaaacaagggggatgctctttgct

SEQ ID NO: 18004 - DNA, 209 bp, Zea mays
ggcgccgatatatgcaaaaaccatgcaatagaatagcctgagcgaccatcgacgtctccttttgactgtccgagggacggccaggaatcgctgaagacgaactgcctggcctttcataacttaaacctcaagcgtcaacgctgacgccgaataggctcgggctttattggcttttcctcgcgcgtataagggactcaagtaccagcgga

SEQ ID NO: 18005 - DNA, 362 bp, Zea mays
cagcttctaaagggagagcacactttaggaataacaaatgcgcatttttagatagacaggaattgttacgcatgccaagccaggaagctagttggagctcatcatccacataagaacatcatgacgactgacaggccactggatctcctacacatggatctattcgggccgatagcttacattaacatcggcgggagtaagcactgtctagtaatggggatgactattctcgcctcacttgcgagtcttcttgcagaaaaatctatacccacgaaccttaaaggaatcttgaacgggctaaaacgagtcggctaaggatcaagaaattaacaacgacaactggacggagttcaagaactctc

SEQ ID NO: 18006 - DNA, 368 bp, Zea mays
atgggcgtggagcggtggcgggagtaacgtgtaccctcccgtggcagaggctggaccgtggtgtatctgtgctctcggttgcgtgaacctgatctggtcttaaaaacccctgggtcgagttgacatatgcaacgattaagtgctacatatgtcatgtggttagagatcctcagctgagtaaatcgattccgatcgccgttatatccccggagagtggagacttgatcactgacctacaacctaagtcaggatgtgaacttcgcgaataaaaatgatgttgtatcgatgagatgatgaaattagactagaggccaacagagtctattaatatttaatctggcgttaaaatgttgaaagtcacgactcac

SEQ ID NO: 18007 - DNA, 452 bp, Zea mays
  unsure (1)..(452): unsure at all n locations
atcactaatcatgagacaactccgtgagcaccgtttttaccaagaattaagaagttacaaacttcttactaatttttattggagccttccacaaaggaagcccacctatggccaagctcctaatcaagtgaaataagttacaatccagaaatgaagaattatttcttatgtccaggacactaattntactatctttgttaaattaatggcaataaataaacttcaatcaggaaagcacatagaaataacatggatcttgccaatcaccgtaacaagtatcatataataagggtatgcacaacccacataaatgtattgtatattaaggggtatcaagtgagtaagcgtcaaaagaacacaagagatgtatcttggtaaaggaatgtctctagcaccgtcgtctaagtctagataccagttagctatacacccatataaatgaatcgtatctt

SEQ ID NO: 18008 - DNA, 415 bp, Zea mays
  unsure (1)..(415): unsure at all n locations
tactcaagctttccaaaagatctggatcactctctgtggagatctgaattatattttatggatgcncaaagtccgaagaccgaatctgtccaattctggacagcaaagccttctagtgacttttgtccttagctaaacattgaatcaccttgagatatctataaaacaaatgtacaccattttattacctcttcagaaagcctacgacccattatgtcggacgcctgaacctgtaggtgtgaattattgaagtctcaagcccgaatctggccaaatctggacagagctgctgtattagcacaactcgaccttgctaagagtctaatcatattgagatgattataccaaagctatagaccggttcccaagctttccaacaaggatttgttcactattattggataaatacttgaag

SEQ ID NO: 18009 - DNA, 340 bp, Zea mays
tcttcatcctctctgtgctaagcggcgatgccacagccagcccatgctagtcttagctattaagcatgcatctagaccggcctcttcttttggcaacataactaaataaagcttgccgctcaatacacccttaaaagctagtgaaccatcactttttctaaagacagacacatttacattcgtaaatagacagctataccccatggtgcataattgactaacagatagcaaattataaccaagagactctactaaaaacacattagagatagagtgctcattagaaattgcaattttacctaacccttttaccttgccttgattcccatcaccgaatatg

SEQ ID NO: 18010 - DNA, 379 bp, Zea mays
cttgcatatcaaggtgatcgagttgaaaacagctacggcacatcaaggatcactacataataacgtgacttacagccaatgaggtaacaactacagttatgtggtgtaagtcataaggctcaagatcaagctctaagaatgagatcaaggtcactataaggagaacaagtgtcaaaactagaactggaagcagcccacaagagctaagttcaccttaatctttagtttgggttggtcctatgtttggagatgttctatgtaacctttgcaggatgttggagccaagatatgtcaatctacatcaagtcaagccgacttgatgatttatgagttcaacatcaaagctcacgcatgttaaatgctattgatgtaataatta

SEQ ID NO: 18011 - DNA, 260 bp, Zea mays
accaagcgtttcctaaacaacctcaccctaatctttgcccaatgccacacacacgcactcggcaaagaaccccttgccgagtgctaaatcaaaggcactccggccaagcatatctgtcactctcataaaattcttgccgaatgccagatcgccggcactcgcgacagacctctattatacacaccggaagcctctccccatcccttcttcacctttcactttcactttcacaccgtccgcccacgcgcccaaacaccgct

SEQ ID NO: 18012 - DNA, 439 bp, Zea mays
  unsure (1)..(439): unsure at all n locations
cgcttcagnctatcattcgcaggccaacggagtctttgatcgcgccaaccggacaatgttcacagctgtcnagaagatgctcctcgatgaaaaaaagggccgatggaccgacttattaccggaggcagactgggcgttaaacacaactgagagtagggcaaccgggtacactcctttccgccttctataccgatcggaggccatgaccccgcaagaaataaagcatgggtccccgcgtacagattcgtcagccgtccccgacgtggacgagccaacttcaaaagatctcattgacggagaccgggtcttcgctctacaagccctaaacaaataccaagcccagaccaaagcatggcgcgaccacgcagtcatcccgagggagatcagcgagggggacctcggactcgtgcaacagctctgactgagtccaaggcaagtt

SEQ ID NO: 18013 - DNA, 402 bp, Zea mays
  unsure (1)..(402): unsure at all n locations
gctgcttccgncgaccaggcgaagcccacgcttttatgcgatgacgctacacagcacaaggtgctattgggatctcaactgtccgaagaacacgagaaaaccttgataaggtttctgttcaacaacaaagatgtttctgcatggtcagctaatgatctttgcggacgcaacagggatgttattgaacactcgctcaatgttgatccatcctctagacctacaaagcacaggcttctgaagatgtctgatgacaacgccgaacgtgctcggaatgaactacaaagactcctcagcgtcggagtcatcacagaagtaaaatacccagaacggctggctcacactgttatggccaaaaaggccaaccacacatggacgatgtgtattgattttactgatctccac

SEQ ID NO: 18014 - DNA, 461 bp, Zea mays
cgtgaagggacttcatccccacatgtgctaagcggttatgctacagccagcccatgctagtcttagcaattaagcatgcatctagaccggcctcctcttttgcaaaatcaactaaatacaggttgtcgtctaatacacccttaaaagctaatgaaccatcacttcttctaaagacagacacatctacatttgtgaataagcagttatatcccattttgcataattgactaacggatagcagattatatccaagagactcaaccaaaaacacattagaaatagagtgctcatttgatattgcaattttgcctaagcctttcaccttgccttgattcccatcaccgaatatgattgaatctcggggatccttgttctcgacataggaagtgaacatactcttctccccagtcatgtggtttgtgccttcgctgacgataattcacttgaacacccggatgcat

SEQ ID NO: 18015 - DNA, 272 bp, Zea mays
  unsure (1)..(272): unsure at all n locations
gatccttaagacaactgacgcatgcaagcttcagcttcatctatgctcttgtttgttcttgancctcttcaacctccctccgcccttctggtcacttcctgactttcatgaatagcaatgggcccttggtcccaaagtatctctatgcaacgatagggtagatgaaggattgcttccaaggccttgacagctccacgaccaacgattgtcttgctagggtattccatattaacaattataaataccacctgttcagcccttgcattgctaac

SEQ ID NO: 18016 - DNA, 448 bp, Zea mays
  unsure (1)..(448): unsure at all n locations
agcttgttgggttgcctgtgcccgacatgatttancccaccccgagcacgatccaacccattgttcactaggccttgccacccatgtccgttgtccattatgtcgtgccaacacgacccatgcaccgtgttgtgcctgggccttatgtgcggtagaccggctaagcccatcattttcttttttccatggcattgcctacattttttctattctcataaaaatatctatattacattttactatagaatataaaaccttacaatatgtgtgttctgttcactacgggagtgtgaatttgtggttggagccaaaaccatagttcaaacccncacttgcgtacaattttctacttgcattataatagaaaaatgccttacgaattttgtcggcgttttcagaaccggggggtccctaacccgaccagtgaatgtcgncgcgtgccccaacc

SEQ ID NO: 18017 - DNA, 378 bp, Zea mays
  unsure (1)..(378): unsure at all n locations
tcatacatacagaannagttggcctgagcttaanactttgttttatgtcgagctgttttttgcgtagctacctccatgtcttgcataacaaaaatgatcgttccttgatgcatgatccgatcatttagaagtttagagagttaagttcaaatggtaagaattattcattaagaaggtccacaacttcttgtaactttgtggttggcttcttcatggagtcaaagatgtgtacaatgtcttgtttcattaatatcactagaatatacaacgaatgttgtagaaatgttaaagtacacattcaatcatgaaaaggtatgcgctacgagatgtggacattaacttacaactatgatgtataagcatgttttgcttataata

SEQ ID NO: 18018 - DNA, 275 bp, Zea mays
  unsure (1)..(275): unsure at all n locations
cccttatttaatcgggttgatatacacttatacttaataattgctaataaaatcttgaccaacttattaaaagcaatgctcagtcttaaccattatttgttgatcagccttacacaatacatgagccccatcgtaagtgagctcatgcatatttttccccacacttgttgagtgatgaacatctgtgagctcacccttgcaataaccgnccccataggtgaagagcaagtaccatcgaaggaggactaatacgacgaggtcgacgagatgtgtcg

SEQ ID NO: 18019 - DNA, 360 bp, Zea mays
  unsure (1)..(360): unsure at all n locations
cccacccatggtagtcttagccattaagcaagggtcgagttcagctctatcaaaatctaccaagtatagctgaccctctaacactcccttaacagctattggatcatcacttcttctaaagacagtgacatctatatcagtaaaaagacagttgtagcccatttgacataattgggaaacagaaagcaagttgtaatctaaagaatcaacacgaaaaacatttgaaatagaatggtcaggagatatagcaattttaccaagtcctttgaccaaaccttgatttccatccccgaatgtgatagctcgttggggatcttgggttttctcatatgaggagaacatnctcttcttccctgtcat

SEQ ID NO: 18020 - DNA, 447 bp, Zea mays
  unsure (1)..(447): unsure at all n locations
tcatgaagccagggcttctgggctctctatatcaattgctaatcgaagncctgaacacacttcaaaattaccttcatcaacttactcccaaagctatcatcacggtggggatctttatatgggccatgaggagctagggacacgaaccaagtgcaaaatgtttctgcaacattcatgagctatcttataagaccaaagctaccgataacgagaacatcacaacaacttctgttgttacagcttcatgccacgctctgaggtgagctacccagtttcgacatttctgaagagatggtcgggggcctggatgcataaatggttctacgtgaagaatgacctgagtgacacggaggatattaaagggattattcaacgttctatatgttctcgctttggcattaagaggccatccactgcccttgggaatgattacaagcattgtcagcg

SEQ ID NO: 18021 - DNA, 306 bp, Zea mays
cagcctctaagggacagcccatttacgactaacaaatgcccatttgcgaaacacaggcttgcacgcatgtcaagcagaaagccgtggcgctcatcgccacaccagaacatacgaccacccgctggaacccatgtacctaagttctcttaaaccaaccaaccatatttatggacaagctgctgactcattacttaaaaaaatccagtatctaagatagacacaaaggttcaaagaaatggactaataccagggcctacaataaatagaaggtaattaattgtgccattatgagtttacacacaaagg

SEQ ID NO: 18022 - DNA, 363 bp, Zea mays
gcgcatgtcaagcaagaaagccagttggcacttattatccacacaagaacatactgataccgacaggtcgcttgagccaccccacaaggatttattcggctcgatcgcttacataagcatccaccggagtaagtattgtcctgtaattgcggatgataattatcgctatactcgggtgttcttttcgcaggaaacatcacaaacccaaaagacctctaagggattcttgagacgggatcaaaatgagttccgattaaggatcaagaaaataataagcgactacgggacggagttcaagaactctcataatgaatgcttcttgaggaggacggcatcaagcatgaaatctcttcttcctacaca

SEQ ID NO: 18023 - DNA, 388 bp, Zea mays
  unsure (1)..(388): unsure at all n locations
ctgcagcttgcncagggcctgccaaattgtcttttattccttacatacaacgacaccaaggccagtcgttagacataagtctggtcgccagacttttgtctatatcctattgtgtggcataataccaaaggatgattgaccaaagcagggcgaacaggaacaacattgtatgaccccactaggtaatgtcctcctgctagaggcaccggaggacaatactatgcatgattgtgacaccatctatgttgcacttatgaatgaagtagctagagtatgtgttagaggcaactacaccattgctaatgatgccttggcagcacaacacaacaaagcgcttcaactaaacaaaaccctaaccgacgtgcttaatatcattacgtaatgacac

SEQ ID NO: 18024 - DNA, 400 bp, Zea mays
  unsure (1)..(400): unsure at all n locations
taagcttctagtcgtgccacctatcttgacctatcaactanggatggtgtgttgtggtccatgaattactntgtagatgcacaacaacaaattgcatgttagatttcagctagttcgtgtggattggcttgcgttggttgcactgattggctccattgagctaattgctagcttttccaagttggtaaagaatattttagttaatcccgtgcatgattagtattcttattcatgtaatcaagtagtgtaactatttttagctagttgcatgtgacaacaagcgatgttgaagccagaactgtgatgtgttcacagtgcggataagagtggtcattgccatatcatgcatgaaaagtcctcgcactttacgcatgcacaatgtancatgagtgcacatgac

SEQ ID NO: 18025 - DNA, 65 bp, Zea mays
gttattgccggctcttcaattcttcgcatggcaggaacagttcctcttgattcagcagctgaaga

SEQ ID NO: 18026 - DNA, 351 bp, Zea mays
gagaaagcagcttctttatatatttctgagcctatgctcttatgtgaggacatagcagagcacacggtgcttgtgggctctcaattatctgaagagcacgagaaaaccctgataaggtcttcggtcaacaacaaaaatgtttttgcctggtcagccaatgatctctgcgtgagaaatagggatgatattgaacactcgctcaatgttgacccatccttcagacccataaagcagacgcttccaaaaattgctgatgataaggcagaacgtgctcgtaatgaaatcaaaagactcctcactgcacgagttatcagagaagtacagtacccacaatggctagtaacactgtat

SEQ ID NO: 18027 - DNA, 183 bp, Zea mays
  unsure (1)..(183): unsure at all n locations
accggaccntaagccgaccgacgcatgcagcttgagcgcaggggctgttgtattttttactacaccaaaccgaagacctttctctttgagaggcctgaagccagaacaagcaggccactagtccaagacctcaggaggaggagccggaccaaacaatcacaaacatggagataaatcatcagc

SEQ ID NO: 18028 - DNA, 150 bp, Zea mays
  unsure (1)..(150): unsure at all n locations
cacaaagaattctctcacaagccctaatgcgctcgagatgaaattgagactttgagcgcgacgatcacttgaattgcgtctttggagtgaggcgcattgctnctgcattgaacgcactattgcgaatgctcggatggttggagcggacgc

SEQ ID NO: 18029 - DNA, 397 bp, Zea mays
  unsure (1)..(397): unsure at all n locations
agcttataaagggagaacacattttatgactaacaaatgttcattntgagaaagacagggtttgtagcgcatgccaagcaggaaagcaagttggcactcatcatccacacaagaacatcatgacaagcgacaggccactggagctcctacacatggatttattccgcccgatagcttacataagcatcggcgggagtaagtactgtctaattattgtggatgattattctcgcttcacttgggtgttctttttgcaggaaaaatctcatacccaagaaaccttaaagggattcttgagacgggctcaaaacgagttcggcttaaggatcaagaaaattacaagcgacaacgggacggagttcaagaactcacaaattgaaagctttcttgacgagga

SEQ ID NO: 18030 - DNA, 476 bp, Zea mays
  unsure (1)..(476): unsure at all n locations
gaccttaaaactcagctatgaaattttattccacatgagctagtcggcggtgctcagagccaacccatgttagtcttagcaattaagcaagtgtcgagttcagctctatcaaaatctaccaagtatagctgaccctctaacactcccttaaatgctattgaatcatcacttcttctaaagacagtgacacctacatcagtaaatagacagttgtagcccatgtgacataattgagatacggaaagcaaattgtaatctaatgaatcaacaagaaaaacattggaaatggaatggtcaggagatatagcaattntacccaaacctttgaccaaaccttggtttccatccccgaatgtgatagctcgttggggatcttggtttttctcgtaggaggaagaacatttcttctcccctgtcatgtnggttgtgcacccgctatcgatgatccaacttgagccctccgatgcataagccta

SEQ ID NO: 18031 - DNA, 342 bp, Zea mays
  unsure (1)..(342): unsure at all n locations
cgggaagatccttcatcccaacatgggcaagtcggtgatgtctgagccaacccatggtggncttagcaattcagcaagtgtctaggtcagctcgactgaaatcaactaagcagagctgaccctctagcactcccttaaaagctattgaatcatcacttcttctaaagatagggacaactatattagtgaatagacagctgtagcccattttacacaattgacaaacatacaacacattgtactctaaacaatctaccacgaaaaacattggaaatggcatggtcaggacatataacaattctacccaaaccttcgaccaaactctggatttcatccccgaat

SEQ ID NO: 18032 - DNA, 445 bp, Zea mays
tatttctgcttgtgcattggaagcctttcagcttatttctgggtgcagcaaaagtgtgtcaaactatctcacgtacaacggtctataaggaactcacattaaagtaattgagtttgtccgcgacaacgattaccttgtatgtgggcctggtagcattggtcagctggatacctcatctactctttcagatttcatcacaatgcttgaagagcaccccaagttgcagttgtcgaaggctattgtgatgcacgagggtaacaacatgtacatgcagctgcggaaggtgctggagcacatgacatggacaaacctgagtgtttccatgtttgagctcctcaaagaggttccctacaccattgcttctgatcgttcatgcactcagttggagttcgacattgctggaactggtctcacgtatgaatctagcaactgtattggtgtatac

SEQ ID NO: 18033 - DNA, 389 bp, Zea mays
gacactatcgacatctcatgcctccttacaagcagagtctgcatctttttgctcctctattaagaaatgttcatgacatccatgtcactttgactggtagtaggtctctattcttagattcctgtttggataagggggatggaatccaaatccttaggatttagttcaactctgaactaaatttctagagcacaccccttatttgagcacccatgtatgggccagattatgtgattccctgtaccatcaaccagttgactaataaatactcacctgctgcctgcattcctcttctttttctttgagagcgaacatgtagtctttccacattgccagaagcgggagctgtaaaagcttatgttagtacttttgtcaaagaaataagactt

SEQ ID NO: 18034 - DNA, 435 bp, Zea mays
tataaaactcagctgtcttagatttgtgaggcgggtcgcattctttaatcacaaacggaagccttcatggtttaggaccattcaggagaacgtcagtccccaaaacattgttctttgatttctattgacacatatctaaactatttcagattcatttacctagtgacaagaagcactatccacctacgctaaaagatgaagtctggagggtggaaaaaatatgaaaggatggctcattccataagaggctgaacaaatctggaatatctacagttgaggattttcttaggctcgtagttcgggacccacagaaattgcgcagcgtaagttcgcatgtgggtgtgttattaacttactattattatactttcatttttatgtggttcacgttatgactattaatgctcttctgtgatagatacttggaagtggtat

SEQ ID NO: 18035 - DNA, 439 bp, Zea mays
  unsure (1)..(439): unsure at all n locations
ttntctttcttgtacatgacgaaacataaaagaccgcttttttctctcttgccgaagccttttcttctttgtacatgacgaaacataaaagaccgcttcttcctcttgccgaagctttctctttcttgcacatgacgaaacatacaagaccgcttcttcctcttgccgaacctatttcttttttgtacataaccgaacataaaagatcacttcttccttttgccgaagcaaccacttaggaacacaaatgctatgaatgaatgcttatgaatgcaaatgctatgatgtaatgtgcgaatgaatgtccatagcattaaccgaagccacactcaaccatatttccttggatcaaccacacatagcttgcattccttcgaacgacttggagtttctcgcttttactatacgataaacctgattccttagaccgtttgagttc

SEQ ID NO: 18036 - DNA, 397 bp, Zea mays
  unsure (1)..(397): unsure at all n locations
agcttatcagcattcanagactctgtttgtatatatcttactatgagtggatccttaacaagtccattcttattatcaggctaagtaattacctgcatctagagttttttctatcctagatcaaagacttggcctacactagccgtcttgtatcatcccttcagttcactggtttgctacgtgtaagtcagtgaccaagtcttcatgtccgagaagtaacgacgatccgaatcgattaatacccagctgggaatctccaaccacatgacatatgtagcacttaacccttgcatatgtcaactcgccaccgcatttctcaagaccagaatgggttcacgccaatggagagcacatatacaccacccgtcagcctcttgccaatgagggtacacgctac

SEQ ID NO: 18037 - DNA, 346 bp, Zea mays
tcgacgccaccaagccctaattcatgcctgtgtgcatgaacggcaagactccgtccatcatacgtgcaaccaatggcgtcgtccaatttatcttttctggtcgtgccttctttgcgtgctcgtcttgacgcctcgtagccaccgaccgagccgcttgcccttttcctttctgtctctgtttctggaaaggagacaacgacagcgagcgagcatagggaaaaacctgacgggttttcagcaaaccttcatatactcaatggaatagtgtcctatgacctacaaagtagatccgcgtctggttaatactcgatgggttacatgcaaatggttttcatttctttttttt

SEQ ID NO: 18038 - DNA, 305 bp, Zea mays
gacgcgaatgtctactatttcgagggtgtaaaaaaactaattaggctattctttcctcctctaaccatccattcataaatgctttcggggatgcttatgggtcaatttggacgggagcccacggtaccgcaccgcgcctaatgtacggcggccaaattcagcgctacatctacggcgtccaaagtgtgacgcactatggcacttggagcagccgttcaaacaggctccatatgtcttctctgggtgaataatgcttggctagcacgacattgtaatataatcctacgttttaattcaattttttt

SEQ ID NO: 18039 - DNA, 300 bp, Zea mays
cactgctgcaacttcctgactctgacacgacattcgagctcgagtgtgacgcgagcgccactgggattggaggagcgctcattcaaggaggtaaacctgttgctttctttagtgaaaaattgcatgcgccaactctgaattattctacatatgacaaacaattatatgctttagtatgagttttacaaacttggcaacattatctatggtctaaagaatttgtcatacattcggatcatgaatctttgaagtatcttaagggaccatctaatctaaacaaacgacacgctaaacggattg

SEQ ID NO: 18040 - DNA, 447 bp, Zea mays
  unsure (1)..(447): unsure at all n locations
cttaaaatggacgtcttacgctcttatcaatgttgcttaacctgctagacaaataactatggaatcaaaacatacctttacaacacgagcaatagcaacagtatcaatttcatcattgcggctgactcctgagttacaagagggaactttctgtctataagaagccaacaagcgacaaatgacttaacaaacctgaaaacaattaccattgttgaatacccagattgnttcagcacccaggtcctccgcaagctttgatgtagatttcagagttaatttgtgtcagtgaggacaccaacacggaatgaaagctcgaactgaagcagtataaactgtcacctgaagacataatattattcaagcgcattatcagtccagtaatgccaaacatcactcgaagaggccaggcttctcatttcatggaccaatacattctctccacctata

SEQ ID NO: 18041 - DNA, 277 bp, Zea mays
gacaggatgatagggctctctactagatccccatgaagctcagatggtaaactcgcatacattctatatttacttagcatgcatatgcatctatttcataaacgtctgatagttgtctaccttcgaacttaagttgagcaccatacttaagaagtatcaaatcgtcacagtttcaagcttgaactgagctccattctcttattcaacgataacagtggcatgtctattctacagcaatttctgcctcataggccactagaatctggctatttttgct

SEQ ID NO: 18042 - DNA, 348 bp, Zea mays
tggagtcgccgattagaagcctacttggcgcagatttcttcttcttttcttccattgctttgaatgcaacgggttgcacctcggatgtggaggtgtcgtctcgctctaagttgacaatgtgcttggagtctttgatcattagttcaaagctcacaaacttgccaattacttccttgggagacatctgtttatatataggcgctccacatattagtggcacttaagtggcattacaaaaaacaagtgatctaagaataaccttgaccatctcatggtcatcccgcttggtgctcccgaggttgcgcacttggttcaccattgtcttgagcctgttgcacatagcttgca

SEQ ID NO: 18043 - DNA, 206 bp, Zea mays
  unsure (1)..(206): unsure at all n locations
tgtgtgtgcccgtcaagaatgacctatttaaaaacacacgctgacttgttctcacgctgcacgcncctctttgctgcttctgctcctccgaagccagttactcaaaaaggctagaaatcagtagctgtcatgctttgcaagagcccagaacaagtgattgctgaacggcaccagcaacacaagctctcccacgtccacctctaaca

SEQ ID NO: 18044 - DNA, 464 bp, Zea mays
tgagacgggaacaaccgtggcatgcactaaatcccttgtataaaatgtcaaggacttgaggatcgccaagagggaggaacaaaagaagaacatcaatacctcttccaaaagcctcaaccacaccttcataaaaggtaacatccaaggtaataatcaagtctcacttcacactaagaaaagtaagaagtgtagtgaacgctttgaaaaggggcactcgattaggtcatgtccctatattaaaaatgattcgattattgacaaggatgataaagtttgctttaaatgctccaagaagggacacttatttagatcttgtccccatttaaaacaaaaaggcataatgttagaaaagaaaatattcactaaccatgtagcaagcaagaaacaaggaaggaagaaatttcaaggctcgaagatcgcctatgctacatatgccgcaagaagggacattaatgcaaagattg

SEQ ID NO: 18045 - DNA, 332 bp, Zea mays
  unsure (1)..(332): unsure at all n locations
cgcattcttttatctctgatgctctgtaatgcctgcaagacgggtgaaacgttcctggtaaggtaaggaaagataccgaacttcgcaagtagttcaggggcacctacagggttgtctgaagtccgttggacaaggacaactgtaggtggcgctaattacttgggaggttccgtcacagtgttgcacgcacctactttggatgaggcacaccctcagggactttggctacaatctgaganaagtcccactcctatgtgacaatgagagtgctatncgcatggcggacaatcctcgtgagcaccagcgcacaaagcacatagacatccggcatc

SEQ ID NO: 18046 - DNA, 295 bp, Zea mays
ttacacacaacatctcgccttcagggtgtggccgcttgttgagaaatgggaaatgccacaagaaaccataaaagaggcccacgcaggtgagcttgcgagactgaagcacacctctaaatttggagactcatttattgagccagatgatgagtggctgaaaagtattgacaatttaagtgatgagctactcgggacctactcgaaggctgaagataatgcaatgtcagcagccttcggaggccgaaaaaagaagagactgaatccggtatttgatgccattggggttgtctattct

SEQ ID NO: 18047 - DNA, 327 bp, Zea mays
  unsure (1)..(327): unsure at all n locations
cacacacacgtactttcaatctgctgcggtcttgttatgttgtctgnggcctggcttttgatgatcagatgctcactgtcgtttggcagacatgcgtaaaggggtgctcggagtcagagagggatgctatctttgatgttctacagccacatttgcttaccctttcttgcaagaaatatgccgtttttcttgtaaagaagcttatagaactcggtacatttcgtacagctttatatacagatcagatcatgtgtggtcatgttgctatgctagaatgttacatgataggttgataccacccttagctgcattaacaagatgctattt

SEQ ID NO: 18048 - DNA, 273 bp, Zea mays
tccgataccaaccgaaagctgcctagaggtgggtgaataggccagccataacttttcctacaaaaactagaagcagactaggcaaaactgaatggatctcgaaaatcacccaggtaactttggaaatgaaatgttctaaaagatccacacggctcaaagtaccacatctgagaagggcacttcttaaaatccacacaccacaaaaggatatacaaacggttcacgcaacggtgagagaacgaataacaccatccaacacaacgtgcgagaaca

SEQ ID NO: 18049 - DNA, 452 bp, Zea mays
  unsure (1)..(452): unsure at all n locations
ttacggacctataaaactaagcttgcgctagacacccttaaaagctagtgaaccatcacatcttctaaagacagacacatctacatttgtgaataagcaggtatatcccatattacataactgactaacagatagcaaattatatccaagagactctactaaaaacacattaaagatagagtgctcattggagattgcaattttacctagcccttttaccttgccttgattcccatcaccgaatattattgaatcttgggaatccttattcttgacgtaggaggtgaacatcttcttcttccccgtcatatggnttgtgcatccgctgtcaataatccagcttggaaccccggatgcataaacctggcaggcaaatttaggcttgcgtcttaggtacccaactcatgttgggtcctacaagggtagcacaaatatccttagggacccaaatg

SEQ ID NO: 18050 - DNA, 456 bp, Zea mays
tatgaagattcttcatcccaacatgggctagtctgcgatgcctgatccaacccatgttagtcttatcaattaagcaagtgtcgagtttagctctatcaaaatctaccaagtatagctgaccctctaacactcccttaaatgctattgaatcatcacttcttctaaagacagtgacacctacatcagtaaatagatagttgtagcccatttgacataattgagatacggatagcaaattgtaatctaatgaatctacaagaaaaacattggaaatagaatggtcaggtgatatagcaattgtacccaatcctttgaccaaaccttgatttccatccccgaatgtgatagctcgttggggatcttggtttttctcgtaggaggagaacatactctttctccctgtcatgtggtttgtgcacccgctatcgatgattcaacttgagcccccggatgcat

SEQ ID NO: 18051 - DNA, 419 bp, Zea mays
gcttcaatccaatcggactcacttctaaactccttcttatatagcgggtgaaaaccaacaaaacagtagtctagtgatagtgaggagtcatttgattggagccttggatcattaacattgagatatccacgtcaatcgacctaccaatcaaaagatcgaccctagcagtttagaggaactaaaattgtcattacaatcaaatatatggttaaatatatggctagccaaaaaatgaatgacatccttgtccttatatctgaactttggaaagtggaggaatatcaaactccaaactaaataacgtactctaatgagtgaatttcaattcctctaaaatgaagggactcaaacactccgttagagtgagatcctagctctttagtaccgaaagacaagatgtccaacctcaaatgcttgat

SEQ ID NO: 18052 - DNA, 478 bp, Zea mays
taagcttcaccgatccactgtcaccatctgctgctgccatagcattatcctgtattgggagagctcacagtttagcctagtctgtcaactattgaaacttttactaattgaatgtactgacatcgtgtaaaatggtcggaattgatttaccgaacaggtgtataatataaatctatatacataagttgtcacaacgatgtctatgtgacatactggtagtgcacaaactggcttaaaaacatgcgttagtttcctccaacagttacctaagacttaacatctattatatctttaatctttgtcaaggccatacttgctcttgtgagatgtctacccaaactcaccctcaatctcataacctttttgcataacaatggtgacaagtatcatatgggcagaacaaatgacatgtgcataatataaatggataccatcatgcaatgatgttctatgcattaagtgtagcttgtgatatctg

SEQ ID NO: 18053 - DNA, 337 bp, Zea mays
agctctggtctccaaagacagattttggatccttacattattttcaccagtaagtagtggcaatgaattatcctcagctgtcaaagaacactcactgcaatattattttcgtcttaccatcctcaatcatacgaacagactgaacgtgtgatccaatggctcgatatgtctcttctcagctttgtgcatgctcgcccttctatatggcgtctattggctataccgcggtagaatagtggtacaatactagctatcatacttcactgcgcaggacaccttttgcaagtattatatgggtatgccccacgtgataatggcttgactgcaccaatgctcc

SEQ ID NO: 18054 - DNA, 471 bp, Zea mays
  unsure (1)..(471): unsure at all n locations
agcttgacattgtctccctgttagaagacaatgccatccttaatcccagggcgtctcccattatagagcatgcttctagcaaatttaaattgttcattttctaagtcatgctgnatcaattttggcactaagttgagctatgtgatcattctggtgtttaattaaagctaggtgatcatgaatagcatcaacattaatgtctctacatctagtacaaatagtaacatgctcaacggtagatgtagaaggtttgcaaacatttaattcatcaatcttagcatgtaacatgacatgttcatttctaagattggaaacaatatcatttgcaacatttaaagttttagccttagtaattagtntatcattttctatcttaaagctaccaattgattcattcaacttggcaatcttagcaatcaaattagcattatcatttttaaagtttgcaagagaatcatacaaacatttaat

SEQ ID NO: 18055 - DNA, 425 bp, Zea mays
  unsure (1)..(425): unsure at all n locations
gatatatacaatatcttctctacgaagcatgagaataatggatggtgttttatctccgatggctcataaaatggtatgtatgcaaaatttcatgcatcgcatagaattaaactataaatagattatatattacattcaaggttacaatgaattacacatgttacattccaaatgtttatacaatagcatttaatcctgcttaataactatatatgtagcttcgtgcagtatttgatctacaaccttgtacataatggctccagtcatttttctaatttcatcgtaacccttcaggtgggggcccggagatgcctcaacatgttctgagggaatataagatgctgntatattactattacgaactgcgaacaatgtctggaatcacaaattacaacatattgtaatccactaattaatacctattt

SEQ ID NO: 18056 - DNA, 425 bp, Zea mays
  unsure (1)..(425): unsure at all n locations
agcttctgtgccatnaccacagatagataatggatggtcatttatttgtgattntccaaagntttatgccgaagaagcactttccactaccttgctatttcaaaaatgtcaaacaacagatttcatatttttcctatgttctttataacaaaagatttactatcccaaaggttggggtgttttcaccttggggttattcttgtagggcttttctaagatttccttgttttcttaaaatagaaggcatcctatttattttatactaaaccagggtataatcaattnttctagtaacctacactgaataagtatactaacaaaaatatgggggctccctggttcttatttaaatcacttttcctattttctttaaccttaagcataatgtaaaataaatggcaaactctaccttaatgggatgtaca

SEQ ID NO: 18057 - DNA, 453 bp, Zea mays
  unsure (1)..(453): unsure at all n locations
agcttgaaccgatgacccgcatcatcggaatagctaaaccgtgctcgccggagttcatcaccccgccggcgcacgtggaccgggtaaatcactgcgccattttccgattcaatgcacagatagcctctacaccaccccgggaagctcaccgtgccgttagattggactaggtcgccgtggtttggccggcatacccaccgccgacgaggaccccccgcctgcgcacgtcgaccgagcgattccggccatccccaccgtcgagccgtacatcactgtgaccgccagagcctccccgagctaaccctacccctcgccggacctatctcgccgccggtaagccgtgccacccctttcttctctgcggttgctgtttacacttgggagggaccgccggggagaggaagagatagtcagggggttntgcgcattgtcagtcacacagaggaatagtga

SEQ ID NO: 18058 - DNA, 401 bp, Zea mays
  unsure (1)..(401): unsure at all n locations
agcttctcactctcaacattcaatacaagatttttgtntcacaccaaagacacattcaaagcattcgatcctctccaagttccaaaatcaagtcaagtgtttagtgacttgagagagggtgattcgtgtttcttttgttgctcttgttgcatggttgctttcttcttctccctctaatctttccaagtgatttgtaaagctagcaagagacacctaattgtgtggtgatccttgcggggtctcatggacccgtgagattaagaagcactcaactggtctaagtgaccgattgagagaaagagaaagagttgaaatagacccggcctttgtggcctcctcaacggggagtatgtttcttgtaactgtacctctggaaacaaatcgtcgtgttcacttgtctt

SEQ ID NO: 18059 - DNA, 477 bp, Zea mays
gacacttaatactcagcctcgatggagtttcaaacttcatactgttacgataaaacaacattggtctgtacataaattaatgccctggatcgctttgcaaggcttcttcgtaaatttgttcatagatcttcatggtttcatcatcttcagccttctttatggctctggcataaatggctttggcttcagcagtagcatacttaactttagctctggtatgtttcacttcaatcacaacttgtgaagtggaagcttttcaataaaggttagtaacacaattacccaacataaagtcttaaagtttagaggatgaaaagtcaaatacctttggttttcttgccctaaagcttctttctgatatctacaaccttcttagctgtttgtcttgcctataacatttttcaacactgtgcataagcatatcacgcgatagagacatatagtggaaaaatgtacctttctctgttcttatggata

SEQ ID NO: 18060 - DNA, 438 bp, Zea mays
  unsure (1)..(438): unsure at all n locations
ccatcattgctcctctcatctttagttggggaagtgggaaagtggcaatcatacggacccatcaaaagaggccccttcatctttggtggcctaactggattggatatttggacgagtgttcttcttggcttggccacccgcctactccgtcttcttcatacgagacaagccgtgcgcttcttcttggcctatcccttcgagcaggtgcgtgcgagcggcctcctcgccttcatgattccgtcctcgcatcgcatggccttctgcgtcagcagatgcctgacgggtggagatttgggagaatcccagtgattctgtgaatccttcttgttctctgcttcgtcggttcggggttttaaggttnttgcgctcaatttcttccctgcaggtcactttgggcactaatggttgctgctgtctagtcactgaaactctactttg

SEQ ID NO: 18061 - DNA, 332 bp, Zea mays
ctttgataccaattgaaagttgcctatagggggggtgaataggcaagttaaaactttttcaacaaaactagaagcaaactgggtaaacctgaattgatctcgaaattcacccgattaactctggaaatgagatattctaaatgatccacagggttcaaagtagtagatctgagaaggtcacttctcaaaatccacacaccaaaaagatataaacaaatctttcacggaatggtgagagaacgaagaacacaaacactatgagctatatcacatgagacacaagatgtatcccgatgttctgtcacaccaccaatgtgccctacttcctcttg

SEQ ID NO: 18062 - DNA, 329 bp, Zea mays
  unsure (1)..(329): unsure at all n locations
tatataaatggttcaatatgtgcatataactcttgaccgtatactatgatgtgtgcacttattttaaaaggaatttagtctatcccttttgggtttcaataatgatgattcatttgccatccgtatataaggatcatcatttgtgaaaccctcccttgtgtttctaatgctctcttgtctaagtgtttcaataaagtccttccaagtgctctcaagatggattcanaatctacggatataagaggcttggttgtacaaacattgaagttcatcgatctcaaatcaaaatgagtgatcaagaaagatgaaaaacgtcaagatcacttggt

SEQ ID NO: 18063 - DNA, 433 bp, Zea mays
acatatatatcctcatgcttgtagttattgaatggcactgcccactgtaccgtcgccattccttatgtgttgagtttatcgatacattgtcataccttgtgaactatatgaaatgacatgacaatgtggtcgttgatgacttgtccctaaggaaagagttgttgaactcacttgaggtaaaaagtttgggtcttgaaaattcgaatgatatgtataatgatgaatcctgtattttcagaaccatacaatcattgcaataatggaacaaggtgggaaaaatatcttatacatgatggatttttgtgtatagctaactaactatgtgttccacattcttcgcgtagattgcgtgtattgcaggagtcacatggaggcggtctaacaggacatttgggacatacatacatatgaaatgctcatgatcattcatttg

SEQ ID NO: 18064 - DNA, 337 bp, Zea mays
tcacacttttggaccaattcggcagcatcgttcttcgctgttggccaatagaaaccagatctgaaagccttcccgaccagagtcctggacgccgcatgtaccccacactgcccggcatggatttcatccaacaattgtttcccggtagtcgattgaatacatttcatgagggctcctgctgcacctctcctgtccagtaaaccccctatgatggtgtagtgggccgactgcctcgcgatgcgttccactacagccttgtcattcgactcttcttcattttttatatacctgataatatgctctctccagtcgttggtgtccgactctagttggctca

SEQ ID NO: 18065 - DNA, 282 bp, Zea mays
cttgccatggcgcggagaacgtttgtgttgtcccttctatcggatcgggctgttcatgactacggaatctttcaccggagcaaccccatcgctgcagatccgccacgaccgtagatgggtccctacgcctcgacgttcgccggtatgatcactttcgttgtgttcgccatcgcttccacttcgtaatgatcacatgggattgaagaatatcacagtcgggtgatgtgtctcgtgcaccggcgatggcgccgtcacatgggctgggcggcggcgcctctgctc

SEQ ID NO: 18066 - DNA, 356 bp, Zea mays
aagctttcccctaacttaattgcacttatgttcttctaatgagctctggccacagtgaccgagagcctggtggctatatcatcgtgttcccggcgatgggtggcggtctaattcaattgagcgggtctaaaagctttaggagggcctagggatgctagaacaagcaatagagggacttggactgacctgagttgagctggccgcggcgagctgagttttgcggtggcggagagtcgatttgggggaaatgaacaattcgcggttgctggtggataattggaggcaagcgtgggtgcgctggcttcatggtaacttggcgcaacagccccggtcatcatattataggagggtaaagc

SEQ ID NO: 18067 - DNA, 415 bp, Zea mays
tgatgcttttatgctagtattttgggatgcacacctgagcctaattacattggttccagacacaactatagatgatgctcgggcatcgtatactattggaagataatacctgaatgaacaaattgtacactctatgttatgtacagttagtcccatcaatgaagtgattgtaaacaacagtagagttaatagtgacatgcagcaaagcatttaaaaatctaatcattaccatgaagatagagcatataaacaaccagtgctttgaatgatcatattttaatcttatcagtaaaaagagcaactggatgatcatatcaagagtagtcaaaacatacgatctgatctcaactgattaacatactgctgttgatgcctgatgggctccttaggcctctcatgtttgttactaatatcg

SEQ ID NO: 18068 - DNA, 465 bp, Zea mays
  unsure (1)..(465): unsure at all n locations
agcttagaacttcngatacaaagtatattatggcttgctctttgatttacccttccaatttctcctgcacaaacgccacactcactgcagagtgcgaagctgccacatacaatagtaacggagcccctggcgcgggtggagttaatgttgttatatcaatcaagtattgcttcagctcttcgaaagctttctgttgacctgngccccattgaaagacttcggctgactttagtatttcaaagaatggcaagtttctttctgctgatctagatataaatctattcaatgaagccagtcttcttgtcaaccgttgggcccccttctttgtgctcggcggttccattcgaaggatggcttcgatcttgcttgggttagcttcaatccccttcgttgaaaccagacaaccaaggaacttacccttcttcactccaaagacacacttttcaggattaatttcaggtcagc

SEQ ID NO: 18069 - DNA, 396 bp, Zea mays
  unsure (1)..(396): unsure at all n locations
ntaccgcatggacgtgaactgtgcctgactcaatggaccaatcactgaatatgtctatgttgagcaacctcccagctgtgatgatagtgagtaccctaaccatgtgtataaactatctatggcgctttatgggctcatgcaatcgctaacatcatggcatgaatgtctaagagattttcttatcagtaatgactctatagtccataaagccgatgctactctctttactataacacttgctgatgatgtgtttgcttgccacacatatgttgatgatatcatatctgggtctactaatgaatctacatgtgaatagtgtagtcggatcatgactcaaacattccagacgtcatgatgggggaggcgaatatctcttatgatttcaagtaagcaact

SEQ ID NO: 18070 - DNA, 471 bp, Zea mays
acttctgggtcttctaaagttgaaagcaatggggatgatataggctttcctcaaaactgattctcaagttatttctggccatgttgacaaaagctgcaaagcaagagatccgaagcttgaaaaatatttggatacagttcaaagacttgaagcctccttcgaatggttttctgttaagaatattccacgacgagaaaatgaacacgctgatctactagccaagtcatgcagcacaggggctaccattaccttcggaagttttctttgaaacaataaaagcaccttctgttgaccttcttgaaagagcagtgctcaatacatctcctgtttatagcgaagattggagaaccgagatcatttcttttctccagggcaattgtctttcatatgacgaagactatcataagagaatagcggcgagagcacgtccatatgtaataatagaatgggagttatacaagcatagagtct

SEQ ID NO: 18071 - DNA, 406 bp, Zea mays
cttatagaactcagtacgatactaccctcacactcgtctacatcagatatctcggtcgaatcactacatccttcaagtactgcatgctgaccaaaatagtgaatatcatatctcattgtactatgccagttacacattacctgctcaagtgcatgccaatgatcagtcatgagggttgacatgaacctactcaatttgctcataacaaaagagatattgggtctttgtgcactaacaagagacatgagtgaatcgatgatctgataatatctcatatggtctaaaccaattctcttgttcttttgcaatgtcacactgggatcataaggagttcgagaacgtgtttgaaagtccctatagggggtgatttgcctaaacctaaattacatcttctacactactacac

SEQ ID NO: 18072 - DNA, 459 bp, Zea mays
  unsure (1)..(459): unsure at all n locations
ttactttgtctctgaagtattaagtttatcaaagaanaattacacagaattggagaaagtgttgtatgctatattaatggcctccaaaaagcttcggcattatttccaagcttatcatataattgttccctcatcacagcctctaaagggtattatgaggaacagagaagtcactggaagggttggaaaatgggtcacagagctcaatgaattcactattgattacgtgcacagatcttcaatccagtcccaagcgctagcagatttcatcgctgattggacgctatgggccatgaagatgagacaagcaaagatgccgaagcttggacagtgttctgtgatggttcttatggagccttcggtgcatgagcagctgcggtcctagtggcaccttcaaaaatcataacatgttatgcagtcaagctggattttagttgcacaaacaatattgctgaatat

SEQ ID NO: 18073 - DNA, 464 bp, Zea mays
  unsure (1)..(464): unsure at all n locations
agcttcaagattttaatgcccaaacctccatttttctttgtgtgacaaactntgttccaatttaccaagtgatactttnttttcctccaccaccttgccaaagaaatcgtcttcttttggcatctagctttttaatagtagtttttggaagaagatacatggacatatgataaataggtgaattagtcaagcaagcatcaataagggtaattctcccagccatggataggcaatttcctttccatgtttcaagtttcttatcaaatttttcttcaagcccaatccagtctgcaatgcgaagtctattgtggctcacagggacacctaagtatttcatatgcaaagtaccaatctggcatttgaaaagatcagcaaaatttgttggtgtttcctcatcaccatttattacanaaatctcactctttgagaatagttatttcataccagacatcagctcatacata

SEQ ID NO: 18074 - DNA, 473 bp, Zea mays
  unsure (1)..(473): unsure at all n locations
acactatgaaactaagcttcacatctttacttgcttcttcctcctgagcccctgccgtccaatcatcgatgaagtctgctaacgcctgtgactgaatcgatgatctatgcacataatctatgctaaattcattgagttccgcagcccactttccaatccttccaatagcttctctgttcctcataatatccttcataggctgtgatgaaggaacaattatatggtatgcttgaaagtagtgtcgaagcttcctataggccattaagatagcatatagcaccttctccaattctgtatagtttttctttgataaactgagaacttcggagacaaagtacacggnggcttgctttntaatttgtccttcaagcttctcctggacaagcgccgcactcactgcagagtgcgaatctgccacatacagcagtatatgagcccctagcgctggtggagttagcgtcgttagatctatc

SEQ ID NO: 18075 - DNA, 407 bp, Zea mays
  unsure (1)..(407): unsure at all n locations
agcttggtgccaatggagaagcacaagtctctttgtctgtctatcanattgcctgccattgtcaactgtgagctcggacgggactctgaatcggcaaacaatgttttgccagaagaatttctgggcagtcttcgatgttatcggtgatactgctcttgcctcgatccacttaatgaaatactcgactgcgacgaaagtgaacttgaggttcccttgggccgtgggtagtggcccgacaatgtccacgccccatcgcttaaagggccacgtgtgggcgattatctttgtgaactacgaaaggccttccgagcgtgaagaaaacttttggcaggcttctcatgaccttgtgacccgattcgcggcgcatattatagcatgccagtatataccttgacaaatcaccttgg

SEQ ID NO: 18076 - DNA, 439 bp, Zea mays
  unsure (1)..(439): unsure at all n locations
tggatgtgaagagtgccttcctcaatggaccaatcaaggaagaggtctatgttgagcaacctcccggctgtgaagatagtgagtaccctaatcacgtttataaactctctaaggcactttatgggctcaagctatccccaagagcatggtatgaatgcctaagagatttccttatcactaatggcttcaaagtcggaaaagccgatcctacactctgtactaaaaccattgcaaatgatttgtttgtatgccaaatttatgttgatgatatcatatttgggtctactaacaaatctacttgtgaagagtttagtaggataatgattcananattcgagatgtctatgatgggagagttgaagtatttcttaggatttcaagtgaagcaactncaagagggcactttcatcatccataacaagtacattcaagatatact

SEQ ID NO: 18077 - DNA, 424 bp, Zea mays
  unsure (1)..(424): unsure at all n locations
taagcgtgccgngatntgtgcctcatctccgcaggtcaagggangacagcagcagcgcctgcccccgcatggcaccaagcgccgtcgcagtggattgtccaaaccttctctgcggacggatccgactgtgttattggcccggtccaatcgacgacgaagtctgctagaacttgtgacttgatcgctgtcctgcgctccaaagtgatgtggtagccggagagatctgccgcccatttggcgatccgtactgatgccttcgggtttctgaataattcaccgagtcccctatccgaggtgacacagaccatgaatgcttcaaagtattggcgcaattngcgcgaagacataacaactgcatatgcaatcttttcgagctccatcatagtacaatttgacggtgtgagcacttcggagataatatact

SEQ ID NO: 18078 - DNA, 439 bp, Zea mays
tggacttcatatatattgtggatcgccggtgaattattcctatatcccttggcctttctggcagcttcctgactcccatgaatagcaactggtccccgatccgaacgtatcttcatgcaaagatatgctggatgaagaaatgcttcgatagcatggagtgttccacgaccaatgatagcattgtgaggatactccatgtcaacaatgtcaatacacaacttgctcagtccttgtattgttgacgaatccgaacgtcactggcatggtaatattgccaagcgctacaatctgtcttgctccaaagccacaaatagggtgcgtagcatcatgaatcattgcttatggctcttgcatttgtctgaaggccttaacaaatattatatccactgcactgcctgtatgaaccaaaacattgtggatcataattctttgatcacac

SEQ ID NO: 18079 - DNA, 366 bp, Zea mays
  unsure (1)..(366): unsure at all n locations
agcttgtccgaaagatnccttnnggctccctataatagatcatgtagcttactcgactcctggatgntctatgctctccttcctagactgctactccagataccatcagatcagcttggcaaaagaagatgaggagaaaactgctttcatcacctcatttggagctttctgttatacctccatgtcgttcggcctcaagaacgctagagcgacttaccagagagccatccaaacatgcttagccaatcactggggcaagcgggtgaaagcctacgtcgatgatgtggttatcaaaacagaaaactcagaatacttcatcgaagatttgcagctggtcttcaacagcttgaggcgctaccggtggaa

SEQ ID NO: 18080 - DNA, 443 bp, Zea mays
  unsure (1)..(443): unsure at all n locations
ctggatagtatctagatgcagtccgaaggttggaagcctcttttgaaggtttctctgtaaagaatatcccaaggggagaaaatgaacatgcagacttattagccaaatcagcggcacaagggcttccactacttggaagtattttttgaaacaataaaagcaccttcagtcgagctcatggaaagagcggtgttcacaatttcaccggtacacagtgaagattggaggactgagattgtatctttcctccagggcaactgtctttcggatgatgaagtttacaataaaagaatggaagcaatgacaaggccatatgtaatcatataaggggaattatacaagcacagagtctgctctccattgctcaagtgctngtccagagctgaagtcaaaaattaatgaaggaaatacatgcatggttatgtggggtccacattgggtct

SEQ ID NO: 18081 - DNA, 457 bp, Zea mays
agcttctccgacgacaagaccgtcttcgctttccttggtccgacctccagctctttggctttaatatctggttctcgtccctcgagtggggacgcgaacgaaagccttccagcggtagcttccgccctgagaccatcgctgctgctgcagaagtcgccggcgagtcacccagagtatgtcgtcccgcaggctctccgatgtggaggttgttcatacccgcgggagtggaaccggagttccgtttgtaatggcatcttgagtgccggtgtctgttcattgtggctgtcggggcctaaacatctatgtatttgagcgcaataccgtgtcttccccttgtttcgagtattggaactcgcctgtcgactagctgagccgcttaacctagtgcgagttgccctgtgcggaatgtgacgagtgaaggatccgtatcccggaggcgtatgagtccctcggctct

SEQ ID NO: 18082 - DNA, 465 bp, Zea mays
  unsure (1)..(465): unsure at all n locations
accccggtatattggtccattccctatacttgagcaatgtggaccattggcataccgactccaactacccgaaacattgtctactgtgcataatgtgttccacgtgtcacaattgaagaagtgtcttcgggttcctgatcgaaccgttgaagtgacagatgttgtccttgaaccatacttgacatattctgagcaccctattctagtcttggaccaaaatgacaggatcacccgaagaaaaactctcaagttctacaagatacagtggaaccaacattccgaagatgaagctacatgggaaactcaagactttttagataagaatttcccacgctttttatcctcttgtaatttgtaaagcatgtatagctgttgtaataaaggagtgattcccanaccacccctgcctgtaccaganataaggaaataaaagtatgtcgcgttgtcttttccattacttaccct

SEQ ID NO: 18083 - DNA, 464 bp, Zea mays
  unsure (1)..(464): unsure at all n locations
agcttgcttactaggtaagatgaccaaagctctcttcacgggtntaccggagaggacgttagatntattggaactcatacatactgatgtgtgcggaccaatgagtacgacagctacgggaggattccaatacttcataaccttcactgatgattttagtagatatgggtatgtctacttaatgaaacacaagtctgaatccttataaaagttcaaagagtttcagaatgaattagataatcagcgtgacaagaaaattaaagcactgcgatcagatcgtggtggtgaatattngagtcatgagtttagcaatcatctaaagagttgtggaattgttccacagcttacgccgcctggaacgcctcagaggaatggcatgtctgagcgacgtaatcngactttattggatatgtgtcgatcaatgatgagccagtcggacctaccttcgtcgttttggggataca

SEQ ID NO: 18084 - DNA, 409 bp, Zea mays
tctgaatcctgtacaagcgatggagctcgtgaacctgtggcatcagagaagatgtcggtcaatgtactgtgctttattttcttctgaagcccatcatcttctaatgctggaaaccactctaagctttttgagcttacttgctgtctgaaagtctcttcatgcttcagcatggccaccttcatcgtgtctttatcgcaatgcctgaatgctcgctccatgggcattgtgagagtagtgcttctcactctgtctttttcgatctgcaatgaagtgaattcaaataagatgtgagtactatgcaaatgcaactgagagagaaatgcaacactacaatgagaaatgcaaaacattacatgcagatgaacgaacgaaatgagagatagagagagagagagagagagagagagag

SEQ ID NO: 18085 - DNA, 443 bp, Zea mays
agcttacccatccctccatttatttatcattagttttattccgctgcatttcgaacaatgatcactacttttgctaaaactccgatgatgatgcaataaatgtgatactccttaatgtatggttttatgctttattgtatttgttatctgcctcaccatcgggtgagtacgtggtacttgatcctgttaatggcctcgttggactagatccggaggactgatgtgttattcctatttaagtgtggtctatcctctaaggcgggacttatgcacttaatttggaataattcgggcggttctcgcacaggtatgccacttctccacgtctttcttgaatctagtatgagccaatgtatcgaggtgctatcttgccctaatattcgaaccttttgatccccctgatgggtgacaccttcaagtaaacataatctcctaccttgaac

SEQ ID NO: 18086 - DNA, 446 bp, Zea mays
  unsure (1)..(446): unsure at all n locations
tactaagcttctaagggatacacattttatgactaacaaatgttcattttgagaaagacagggtttgtagcgcatgccatgcatgaaagcaagttggagcccatcatccacacaagaacatcatgacgaccgacaggccgcttgagctactccacatggatctattcggcccgattgcttacataagcatcggcgggagtaagtattgtcttgtaatagtggatgattattctcgcttcacttgggtattctttttgcaggaaaaatctcaaacccaagaaaccttaaagggattcttgagacgagctcaaaacgagttcggcttaaggatcaagataattagaagcgacaacgggacggagttcaagaactctcatatngaaggctctcctgaggagganggcatcaagcatgagttctcttctccctacaccccacaacaaaat

SEQ ID NO: 18087 - DNA, 404 bp, Zea mays
agcttgccctcgcccacgccgacgctcgatgtgcgaggacaagtacaaagatctggaggcccgaagcgcggatggtggcggtgatcccgtcggcgacggagacttctcgagccgcctccgcctcggcaccgacgacaggggccgtcagcccgccggcagatccccactcggatcctcccggacgagcagggcaccgacctccccgtggaggcaccgtaccggtgcaaaggcaggaccgccccagaacacgaacgccgccctagcagcgcgcgacatcttgtgcggtcctcccgtgcacacggcgcggcagccgccttccggcaggagggggcaccgggggccaacccgacgagcccgacacgctggggctgacgatgcctgccgtcgactggccccgcgttgtc

SEQ ID NO: 18088 - DNA, 235 bp, Zea mays
tatacgaaccaaacgacagtgccacatgtaggtaggacttaaactattaggacgatgccttgtatcactaatattacagataggtgcatcttcaggatttaaaatgaataacccattcataatggatgcataacacactacatgccattcttataatcacacaaccatagtgtcactcggagatgaaaaccatccttcataaacatgaatgagacatagtgtgtcgactcatact

SEQ ID NO: 18089 - DNA, 455 bp, Zea mays
  unsure (1)..(455): unsure at all n locations
agcttgtaatagagcgatttaatgcgaatgaagagatactntgtccatgccgcaagtgtttgaatcggcttagtggacatagaggacaggtggaggaccacttatatcttcatgggatagctagtacatacactaggtggatatatcatggagaagccatggatgacataattaatgaaaatggtgattacgaggatgaacatgtgagtttcaatgatgatgctggtatgaatcaagatgaagaagatcctgatgataggattaatggtatggtagaggagttatacacagccgaagatcaaggtaaaaggaaatctatgtttggagatatactagaggagatgaaacaagaactttatcctggtgcaacttatacaagattttcgtgtgtggtgaagttgcttcatattaaagtcgtttatcgtatcagcaatggttgcttcactgcaatactg

SEQ ID NO: 18090 - DNA, 279 bp, Zea mays
ctctatactattgttcacacttaaggcatgaatgtaattttgcacatgctgcttgctatgcctataaatatatgaatagtactctcctactgttcacgctgacttgtattcattcgtgcgtcacacttggacttttgccttctgtcaatccgaatgaataatgtaattcaatattgttcatgttcatgcatgatggtataataaatggatatgagaagcgttatatgagtattcatgaaattactcatgtatcatattcttctacttccattaatatat

SEQ ID NO: 18091 - DNA, 460 bp, Zea mays
  unsure (1)..(460): unsure at all n locations
agcttagcanaagaaatttctagaatcaagtatattgatctcatgcctaagtctggtaaaagattgttcatcaagtggcttggtaaagatatcggctaattgatctttagtattaatgtaagaaatctcgatatcccccttttgttggtgatccctaagaaaatgataccgaatggctatgtgcttattgcggctatgctcgacgggattgtcggccattttaattgcactctcattatcacatagcaaagggactttggttaatttgtaaccgtagtcccgcagggtttgcctcatccaaagcaattgcgcgcaacaatgtcctgcggcaatgtactcggcttcggcggtggaaagaagcgaccgaatttgcttctttgaagcccaagacaccaaggatctttccaagaactggcaagtccccgatgtgctcttcctatttgatttgaccccgcccaat

SEQ ID NO: 18092 - DNA, 465 bp, Zea mays
  unsure (1)..(465): unsure at all n locations
ctatcaaatggacgtgaagagtgccttcctcaatggaccaatcaaggaggaggtctatgttgagcaacctcccggctttgaagatagtgagtaccctaaccatgtttataggctctctaatgcgctttatgggcttaagcaagccccgagagcatggtatgaatgccctagagatttccttattgcaaatggcttcaaagtcggcaaggccgatcctactttattcactaaaactcttgacaatgatttgtttgtatgccaaatttatgttgatgatatcatatttgggtctactaatgaatctacttgtgaagaatttagtaggatcatgacacanaaattcgagatgtctatgatgggggagttgaagtattttctaggattccaaatcaagcaactccatgagggcaccttcatttgccaaacgaagtacactcaagacattctaaccgagtttggaatgaa

SEQ ID NO: 18093 - DNA, 436 bp, Zea mays
agctttctcaagcttcaattgagtcagtctctgtttctgttgtctgaacgtgctcataccttcgatcctccgccctgttaccgtgggctggttgattcaatgccccattattgaaattggttgaggggaaatactcgggaggggttcaattcggtgacatccgttcgggagcgccagtctttgcgtaaattggcctatacacgagctcgccggagctcttcacgatgttgctcgccgtgagggacgtatttggggaagaagcgaagttcacggaccttatcgtaaggtgtcagtgactcttatatattctgtagaacgttttgagattatttaagaccttcggggcgttttcgcataattacagccaacgcgcgcgggcacagtttttctgggtcttagcttgttgggctgaaattaacccaacactatttacctt

SEQ ID NO: 18094 - DNA, 411 bp, Zea mays
tatgggctcacagaatatctaaacatagtgctactaaagtatctctttttgagcttatctatgggtagaaagcaatgttgcctgtggaaataagtttgaatgctgtcaggttcgccagacaaaatgatctaaccgtcattgattattataattcaatgatggataatattgatgaggtgaccgacaagatggtgatagctgtgggagcaatataaaatgacaagatcatggtagccatggcctacaatatgaaggtcatagcaaagtcatttcaagtatgggacctggtgtggaagactatcctgcctctaatgaataaagaccgacagtttgggaaatggtcgccaagctgggaaggtccttataaagtaaaatatgtaatgtctggtaacgcctattttctatcaacat

SEQ ID NO: 18095 - DNA, 431 bp, Zea mays
agcttctaaggcttccagacgaagccagtcttattttatgctgtgtttcaatgcacgcaagatcacgaggagtatctccaggcatacgtccgaaggttcttgcatctgagagcacaaacgcctacagtgcccaatgaaattgtcattgaggccatgatcaaggggcttcgtccagaaactactgctcagtgttttgctagaaagcctccacagactttggagaagccgcttcgaaagatggatgaatacatccacgctgataatgactttcgtcatagaatggaggatgcctacaggttctctgagatgaccaaaggcttctgatgaagaatccacccaaggcacgtcagatcgatccactccaaccataatgacgacagaagaagtcagtatcagaggccacaatatttccttgctatgcttcggggcac

SEQ ID NO: 18096 - DNA, 482 bp, Zea mays
tctcgtcaagggatgagtacagtgcaccgtgcagcacggtctctctatttctgctacagactggacaggtgcgccgtctgcatggtggccctggcgccgcctgccatcggaatggacatgtcacaataaatgtcgtgggggcacatcgcctgtcatataggtggacaggcggcgtgtcccctccgcaataaatgcggaggtcgcgcggcccatagcccttacgtcatgctccgctcgctggcctacgtcacggacaataagccatgtggcagcattataccctcatccgattggggagcggatgcgctctctatggatcctgtacacgcgtctataccggacccatgcctatgtcacggcacttcctctctcgggaccttgttatgggtggtccggagctcacttattgtggtactgaacctatccaatggattcgggctgcttacttcatgggtatgggttgtgcgtacaggggtcatgtg

SEQ ID NO: 18097 - DNA, 467 bp, Zea mays
  unsure (1)..(467): unsure at all n locations
agcttgaaatgtgntttccttccatcatttttgatattcaatgtcacctaatcatacatctcgtggatcagataaaaatattagggccactataattacatcatatgtttcagtcggagcgatacctgagagtattaaaaggttatgtgcgaaatcgcgctcacccagaggggtcaatcatggaaggatacactacaaaagaagtgattgagagttgtatagattacatcagagacggaacaatgataggtgtgcctgtacctaaacatgagggttaactatgtgggagagggagaatgggcaggaaaacttcttgcgttgatgattataagctagtacattgtgctcatggtagtgtactacaacgtctcgcgatagcagaaccttacatagagaaacacctggatcggctttgttagaacatcagaaccgcattaggactggatcatgatggagcacaacatcgt

SEQ ID NO: 18098 - DNA, 466 bp, Zea mays
tggacgacgatgtcgtactccgctataatggtctgatccacgtttatgtacttcttcaagcctgacctggtaaaagaaactgaagacaaagttcagaaaataatacataatatgaagaaagcccaaactcgtcaaaagagttatgcagaccgacgacgacaacccttatgctttctcgtaggagattatgtctacttgaaagtttcaccaatgaaaggtgtatcgtgtttcgggattaaagggaagcttgcaaccaggtacattggtccattccctatacttgatcaatgtggaccagttgcatatctactccaactacccgagacattgtctgttgtgcataatgtgttccacgtgtcacaattgataaggtgtcttcggattcccgatcgaaccgttgatgtaacagatgttgtccttgaaccagacttgacatatttcgaacatcccattcgagtcttggatc

SEQ ID NO: 18099 - DNA, 480 bp, Zea mays
  unsure (1)..(480): unsure at all n locations
ctgcagcatgcaagcttgtgaagattcttcatcccaacatgtgctagtctgcgatgccagagccagcccatgttagtcttagcaattaagcaagtgtcgagttcagctctatcaaaatatactaagtatagctgaccctctaacactcccttaaatgctattgaatcatcacttcttctaaagacagtgacacctacatcagtgaatagacagttgtagcccattttgcataattgagatacagaaagcaaattgtaatctaaagaatctacaagaaaaacattggaaatagaatggtcaggggatatagcaattttacccaatcctttgaccaaaccttgatttccatccctgaatgtgatagctcgttgggaatcttggttnttctcgtatgaggagaacatcttcttctcccctgtcatgtggtttatgcacccgcttgtgattacccagcttgagcccnctgatgcataaacctac

SEQ ID NO: 18100 - DNA, 384 bp, Zea mays
gatgcatatgcgagtaggatacggatgtgtttcttgtctagcaaccggtgcaaaggtctctccaaaatctaagccttcaacttgagagaagccctttgcaataagtcttgccttgttcctcacaatcatgccttgatcatcttgtttgtttctgaacacccattttttccaatgatccttgcatcttgcggaggcttctccagtgtccaaacttggttacgggtgaagttggtagttattcatgcatggcgttcacccagtccggatcctgttgcgcctcatctatacatgtaggctcaacacaagataaaaaggagtgatgttcaataatagaagcatgtgtatgagatcgagtaataaccccttgtgaatgactcccaatga

SEQ ID NO: 18101 - DNA, 462 bp, Zea mays
  unsure (1)..(462): unsure at all n locations
agctagacattgctcccctggtggttaccattaccatccttaatgccagggcatcntccattgtaaagcatactacgagcaaattttaaattttcattctctagttcatgctcagcaattatggcagttaatttagctatgtgatcattctctttcttaatcatggcaaggcgaccatctatagcatcaacattaatatctctacatctagtacaaatggtaacatgatcaacattagatgtagaaggtttgctagcattcnaattttctatcttagcagtcaatttaacattctcatctctaagacaggaaatagaatcattgcaaacattcaattcattaatcttagcatttaaactagcattctcatttctaagacatgatattgaatcattgcatatgctaaaggccttagacatgttntcattcttctctacttctagggcataagcacttttcaat

SEQ ID NO: 18102 - DNA, 307 bp, Zea mays
tgacaatgatgaaatggcgctcgtcatcaagatctttcgtttatgctaaacaaaggagagggagagacttcaagttccgctccaagatagtttgcttcaagtgtggttatcacggtcattttattgctaaatgtactatatctagtgacagtgaccgacgcgacgacaagaatggaagaagaaaggagaataataggtactacaagaagaatggcggcgatgcccatgtttgtcgggagtgggactccgaccaaagctcaagctactacttcgacgacgaggacgccgacaacatcgccgtcaccaa

SEQ ID NO: 18103 - DNA, 465 bp, Zea mays
  unsure (1)..(465): unsure at all n locations
agcttgcttacttggtaagatgaccaatgcttctctttcatgggtttaccagagaggacgttagatttattggaactcatacatactgatgtttgcggaccaatgagtacgatagctaggggaggattccaatacttcataaccttcactgatgattntagtagatatgggtatgtctacttaatgaaacacaagtctgaatccttagaaaagttcaaagagtttcagaatgaagtagaaaatcagcgtggcaagaaaattaaagcactgcgatcagatcgtggtggtgaatatttgagtcatgagtttagcaatcatctaaagaattgtggaattgttccacagcttacgccgccttgaacgcctcataggaatggcgtgtcttgaccacgtaatcagactttattggatatggttcgatcaatgatgagccagtctgacctaccttntgtcgtttggggatac

SEQ ID NO: 18104 - DNA, 412 bp, Zea mays
tcacgtaaagcatcactgataaaactaacctaactgatcttttatcaggccaatcactaaaagaaaaaacctcatacggcatccattacagcgacagcttccacgactgggacaaaattttgcatccacggcttccaggatcaaagcagttttttcgatgtaatttaacagtattcagaccaaacagaaaagaaagggtattttccacttcaaatcactccaatgtcgctgcaattttcctcaaccgagtgctgttcccgtaaccaattcttcattgagtccagaatatcttccaacatcgcttgatcctttgtcttgagtagcacgctccagctctgcaagaaagacatgatctcatatatgatcgttgtcgaactggtatggaaatttttcgtaatcgccatcttatttc

SEQ ID NO: 18105 - DNA, 426 bp, Zea mays
  unsure (1)..(426): unsure at all n locations
agcttgcttacttggtaagatgacctaagctctcttcacaggtttaccggagaggacgttagatttattggaactcatacatactgatgtgtgcggaccaatgagtacgacagctaggggaggattccaatacttcataaccttcactgatgatnttagtagatatgagtatgtctacttaatgaaacacaagtctgaatccttagaatagttcatagagtttcagaatgaagtagaaaatcagcgtggcaagaaaattaaagcattgcgatcggatcgtggaggtgaatatttgagtcatgagtttagcaatcatctaaagagttgtggaattgttccacaacttacgccacctggaacgcctcaaatgaatggcgtgtctgtgcgacgtaatcggactttattggatattggttgatcaatgat

SEQ ID NO: 18106 - DNA, 406 bp, Zea mays
  unsure (1)..(406): unsure at all n locations
tatggcgcataattataccctntatatcttcctgtgtgttcaggncattngtcacataaaatcattctgtcatccagtcgccaggccatttcttccgaaaggttggcacgggacagcttgacccggaccgatagacgaaactgtagcagccgaaattattgtgatactgctccttacccccagggtgttgtttcgtatgataattcatgtatgttgcagaaacttttcgcatccggttccagaccttggcttctcacggcccacacgaagatattcagccttatgattgcttcgggggtaagttggtgaagatagacttcaaatattttcagcacctctacgacaaagctgctcaagggaaatcgtagtccagctttcaaaaagcttcggtacactacgacttcat

SEQ ID NO: 18107 - DNA, 361 bp, Zea mays
tgctctatctccttttactgagctctcatcagtcaggcttgtcgatcccgtcccaatgccaccaccgacaggctcttgcacaaggtccaaatcgacagcagcatctgcgctgctgtcagatgatgaaaagacaagcatcctcagcgtcattgtggtgctgcagactcaacttctcagaaatagcagcggcctcggtgaccggatctatctccatctccatggccgggcgcctgctggaccaccaattcctctgcggctacgggtcctcaacaacgaacgcggcaccaacctaataggacggcgaccctaccacataacaagagaagattatccaccgccgaccaattaatggattatacag

SEQ ID NO: 18108 - DNA, 468 bp, Zea mays
tacacaagattatgattcaacacaattgtgagttctaagctttttaatgctcaccctaaatatgtgcttatatgataatcttaactttggcctcatatgccaaatatcacatacttatgctaagtgctaggcattactagaacttagcatccgtggggtgcaaagtgtcaagaatcatactgtgatgcgcatgacacacatatgcacaaaatcagagttaaacaacaatttatattgatatactacaagcatatgaacctaccactattcatcatcatgataccaatttaaagcaccattaatacaagaaacacatgattatctatcacaagatatacaacaagcaagatagataccaattgattgatctacacaccaaacaactaaagatgatgctgcataagatgatatcaaaactaaagcatctattatcaacggaagcaccatatatacaagattaacaacact

SEQ ID NO: 18109 - DNA, 449 bp, Zea mays
  unsure (1)..(449): unsure at all n locations
agcttagttccaattctgagggacatagtttattctatttttttcttataaagatgtgaatcttgatggcttgacactatggttntaagacaattatttaatcctaacctttatcatgacttgatgtgtaatgtgcaggcaagaggaggtctataatcacttcttaagtaggctacatcactgagacatcgcagcccataatagaagaggtacatgatctcgatgttatactcattatctaaatttgatttgcaggggcattaatagttgtacattacttacaaaatggacattctgcataattttgatggtttgtacaatacaccttatttacggttgttcttctgtntgttntttgttcaaattgtaggtgtatgaggttcaactgctaatggacctgtgattttgcatttctgccatcatcattatcaatattcctggtcaataca

SEQ ID NO: 18110 - DNA, 439 bp, Zea mays
ggactcatgtatctacacattaatccttaattcctctttcccgtctcatggtaaaggcatcctccctggatccaagtccatatactaacatagatcccgttatcaagatgaatacaatcaattcctgacctcgcgcgagtgctagaaaaatcactcgatttctaccgagatcctgattagcaagcagctactcgacctagcatactagtattcattatttttgcaatggggttttggtggttacaagtccactgaatttttattatcaattttgggtctggttttgtaattctaataattgatttctagttggaataatgctaaacaacacatttcactttaaaactgatctggactagaggtccctcctattttcttaggttctctattacttaagcaaactgggaagaaataattcactcactgttcattaatttct

SEQ ID NO: 18111 - DNA, 353 bp, Zea mays
  unsure (1)..(353): unsure at all n locations
agctngccaagccctcggacccggtcggatcttaccggaagcccgagatcgacctcaccggacttcggtcttccgccgccgcacgtggaccgagctatccagtgagtccccgcccaattccttgcgctcatatcttctctggcatcccgtggacctccctgacccatttgtttgaactatctcgccgtgaccaggccggtctcctcgccgccgacgagcatccccgcctgcgcgcgtggaccgaccgactccggccatctccgacggcgtcccacacaccgttgtgatcccccgagacctccccttcgtcctcgaccactttaccggagcaacctcgccgtcggtatgcccct

SEQ ID NO: 18112 - DNA, 348 bp, Zea mays
tcatccacaaccttcattcactaacgaatgtctgaaatctctatgacgtatattattcggccgcaccatgtattcatcggtgtaagttctgcattcactgaggaacatcttttgaactacttcgccttctatcacagcggtattcgcgttgacttttcacgcttcgccttatatatcggcggtatttggctctgcattccctaaggaacgactttggagcagaaaacttacactgcgctctcttgggaacgactttatgtatcttcggcaaacttacgctgcgctctataagaatgaccttttgcgggtttgatgagatgttcactgtgattactgactctgcttccc

SEQ ID NO: 18113 - DNA, 470 bp, Zea mays
  unsure (1)..(470): unsure at all n locations
cgacccgagatcctctgagtcacctgctgcatgcaagcttctaaagggagaacacgtgataggtctaactaatgtgcatttcgaanaagatagaccttgtgcagcttgtcaagcaggcaaacaggtgggaagctctcatcacaccaaanatgtgatgaccacatcaagacctttggagatgcttcacatggacctcttcggacccatcgcctatctaagtataggaggaagtaagtatggtcttgttatagttgatgatttttcccgcttcacttgggtattctttntgcaggataaatctgaaacccaagggaccctcaagcgcttcctaaggagatctcataatgagtttgagctcaaggtgaagaagataaagagcgacaacgggtccgagttcaagaatcttcaagtggaggagttccttgaggaggaggggatcaagcacgagttctccgctcnctacacaccac

SEQ ID NO: 18114 - DNA, 362 bp, Zea mays
  unsure (1)..(362): unsure at all n locations
tcatgcaactgctgacaganatgagaggtgatctgcgttcctctgtctgacactatcttctttggcacaccatgataactaacgatccgagacatatacaactctgccaatgctgcactgctgtagttggtcttgacatgtatgaagtgggctgacttggtcaaacggtccactactacccacatggaatcgtatccggctcgagtgcgatgcaatccgactatgaagtccataccaatttcatcccatttccactgatggatctgcaacggttgcaacaatccatcacgtctatggtgctctgccttaattcttctgcaactatcgcacatagccacatgctctgcgatttccctcttcat

SEQ ID NO: 18115 - DNA, 354 bp, Zea mays
agcttgtgaagattcttcatcccaacatgtgttatttgtgttattctcagagccagcccatgttagtcttagcaattaagcaagtgtcgagttcagctctatcaaaatctaccacaggtagctgaccctctaacactcccttaaatgctattgaatcatcacttgttctatagacagtgacacctatatcagtgaaaagacagctgtagcccatttcgcataattgagatacaaaaagcatattgtaatctaatgaatctacaagagaaacgctggaaatagaatggtcaagagatataactattctaccaagaccttcgatcaaacctctgatttcatccccgaatgtgatag

SEQ ID NO: 18116 - DNA, 458 bp, Zea mays
  unsure (1)..(458): unsure at all n locations
agcttgcttcaagccttcttctntttctccatggcatgatccttacttggaatactaccccacttaaaaagaatgagggtaggacttttgaattttggggatttgaactccttgaagtaccacataacaagggtgttacgggtccttctgctgctgttgctgcttgaccaggctgcggagtgatgactggcacacggttgattcatggagaaccttcttcttatcttctcttcactatcttcttttctcttctcacttttcacttttcactgcctctttctttctctttgctcttcccactggaggattctatcaaagagtattaccatcatacagaggaggaaaccaaagatgttgaaccatatacaacagtcttcaacccaagaatcaccaagcattgtgatcttatgggcgaaggagtgggaaaatggagttgcttgcaacttggcagacgggat

SEQ ID NO: 18117 - DNA, 422 bp, Zea mays
atgcaagcttggaagcgtctattggttgtcgacttgttgtatactccttcttcttctcctccgctgccttgaatgcaacgggttgggcttcggatgagtcgccaagctcgttgattctcctcgagccttctatcatgcactcaaaacttacaaaatgcccgataacttcctcgggggtcattttagtatatctaggattaccacgaatcaattgaacttgagtgggattaagaaaaatgagagatcttaaaataacatttaccacttcgtgatcgtcccacttcttgctcccgaggttgcgcacttggttcaccaaagtcttgagccggttgtacatgtgttgtggctccttccctttgtgaagccggaatcgaccgagcttcccctcgatcggttcccgcttggtgatcttggagagctca

SEQ ID NO: 18118 - DNA, 461 bp, Zea mays
agtcacctgcggcatgcaagcttccttgatctcgtaaggtccaatgtaactaggttctaacttgcccttaatcccgaatctttggacacccttggtgggtgataccttataataaacatgatctcccacttcaaactgtagaggcttccgcctcttgtcatgatagcacttttgcctggcctgagcagcttctaagttctttgtaataaccctgaccttttcctctgcctcaagtaccaaatctggcccaaatatttccctttctcctgtttgagaccaattcagcggggtcctacaccttctcccatataaggcttcaaaaggtgccatctttagactggactggtagctgttattatacgataactctgccaaggaaagacacttgtcccaatcctttccgtagtgtagtacacatgcccttaacatgtcttccaaaatcttggttaccctttctgtct

SEQ ID NO: 18119 - DNA, 450 bp, Zea mays
ttcatgtgacactatgaatctcagctgtgaacttccaacccgcgctcctatccccaccggaatagtatccgcggctgataaaatggaggcgaggcttaccggcgactgtctatctccggcaaaggggtctcatagattggggaggtcctggcgaacccgtcgatggtcggatggtggtcggtggtggtcaaagtcgtcctaaccacgcgtgatggcggacgatctcgtcggtggcgatgagcttggcctacacactgtgatatatttcaattggacggatcggggaggttcaccacatgatgtataatctgtgcgcacaatgaatttgacaatggcgcagtggcttacccggttcacgtgctccggcgggtggagggattccggcgatgacgatccatcgtttccggtgatgtcacgctcgatcagaatgctcgggatgcttcacgggac

SEQ ID NO: 18120 - DNA, 382 bp, Zea mays
  unsure (1)..(382): unsure at all n locations
agcttgtgaaaggtcttcatccctacatgtgcttagcggcgatgccacagccagcccatgctagtcttagctattaagcatgcatctagaccggccttctcttttgcaaaatcaactaagtagagcttgccgtctaatacacccttaaaagctagtgaaccatcacttcttctaaagacagacacatctacatttgtaaatagacagttatatcccatatgacataattgactaacagatagcaagttatatccaagactctccactagaaacacattagagatagaatgctcattggagatngcaatnttacctagcccttttaccttgccttgattcccgtcaccgaatataattgaatcttgggaatccttattcttga

SEQ ID NO: 18121 - DNA, 394 bp, Zea mays
acatgtgctaagcggcgatgccacagccagcccatgctagtcttatctattaagcatgcatctagaccggcctcttcttttgcaaaatcgactaagtaaagtttgccgtctaatacacccttaaaagctagtgaaccatcacttcttctaaagacagacacatctacatttgtaaacatacagttataccccatgttgcataattgactaacagatagtaaattatatccaaggctttctactaagaacacattagagatagaatgctcatttgaaattgcaattttacctaacccttttaccttgccttgattcccatcaccgaatattattgaatcttgggaatctttattcttgacgtaggaggtgaacatcttcttctcccccgtcatat

SEQ ID NO: 18122 - DNA, 253 bp, Zea mays
  unsure (1)..(253): unsure at all n locations
agcttttgttgaatagggagaggatttgatctctctggtgtgtcttggattgaatgcctagctcttgtaagtggttgcaaagttgaaaacttggatgacttgaatgtggggtggttgggggtatttataaccccaaccaccaaactatccgtttggtggaggctgctgtcgcatggcgcaccngacatatctgttccccactggacactgttcggtgcgctatccacattaccaagccgttgggatcccaccg

SEQ ID NO: 18123 - DNA, 456 bp, Zea mays
  unsure (1)..(456): unsure at all n locations
tgaaatgtgttntcctccattcatttttgatatgctagtacacctaatcatacatctcgtggatcagataaaaatattatggccactatatttacatcatatgtttcagttggagcgataccagggagtattaaaaggttatgtgcgaaatcgcgctcacccagagggttcaatcatggagggatacactacagaagaagtgattgagagctgtatagattacatcagtgacggaacaatgatatgtgtgcctgtacctaaacatgagggtaaactatgtgggagagggagaatgggcaagaaaacttttcgcgttgaggattacaagctagtacattgtgctcatggtagtgtactacaacatctcacgatagccgagccttacatatatgaacacctgaatgagcttcgtaataatatcagaaccgcacagaggactggatcatgatggagcac

SEQ ID NO: 18124 - DNA, 448 bp, Zea mays
  unsure (1)..(448): unsure at all n locations
agcttggtggagaagtctggcaatcttgattatgataatgaagacatgagctgccaactgggcgaggtgaaagaaacaattgctaaaatgcatttggattcgcagggtatgtgatatcctgtcggcacgctggagctggaactaccaaatgcgaacacgtacggtgaaaaacttgaagatgatacacaggatggcgtggatcaggcacatcgttgttggttgaggcctatcatgatctatgcgcggaggcagcacccttcgataggtccatgcacccacttccttggctggctgtaagaggagctagcgagtcttccgtcggtaataacagagctgatgtcttatgcctcccttgtcacctgtgaaggcaccatgtcacacccgattttggcaaaaccgaatgtatagcatatatgtgccangaattttttcacacatatattgacat

SEQ ID NO: 18125 - DNA, 413 bp, Zea mays
  unsure (1)..(413): unsure at all n locations
tcggtgatggttaannaatttggcagganaacagtgcatatagcaatgattgctgtggtaacttcacacctactcgtctgtttatatagtgctgcaggtaagaaggcgaagcgccagagtttttacaccatgcgcacacccgcttgcgctcgctgcgcagtggaccgcatggacaaacagtaaactctgcaaggtgggaccgctacgtgctgagaaattaaatcgtttctcggcaacgagctcatggaaggtgttttttggaccttctactccccgaagcttaagagactttgttcacggatcaagctcgttacgaaaaacgatctatcaccacgaaaggtgctactgttgggtctatgcttcgtcgccgaaggtcttcaagggagaagctcataagatacaaatgttgacac

SEQ ID NO: 18126 - DNA, 449 bp, Zea mays
  unsure (1)..(449): unsure at all n locations
tgcaagcttggcatctcaaagacctgttctctttctcatggaagactttgctgacgtagtagactggcttctggatggttcggtcccctgcgggtggtcccgagccctcaaactcttgacctttcatcaccatcgtggtggtcggaccaccaccttctcctaggggaactttttgactcccctgtggatgttgtgctgtcctttcgacgaccagcaccatgctcaccacctctgtagccgctgcaatgtataagtacaacgactcccctggctctggagctaccagtattggtagggacacaaagtgttgcttcaactctngaaaggcgtcgtttgcctcctcagtccaagagaatgggccgaacttccgtaatatcttgaagaaaggtacgccctctctgccagtcttgagatgaagcagctaaaggcggtcagtgaccccgttagct

SEQ ID NO: 18127 - DNA, 393 bp, Zea mays
  unsure (1)..(393): unsure at all n locations
ngactactttcgccttgagacaccggaatgtcactntaatgtcgaagaggaggtcggaagccttccgtgtcttgactactatgtcatcgacgtatgcctcgactgtgcgtccgatgtgttcgccgaacacatggttcatgcaccgctggtacgtcgcgcctgcattcctcaagccgaacggcatggtgacatatcagtacatgccgaacgacgtgatgaaagaagtcgcgagctggtcggactctttcatccggatctggtgataccccgagtatgcatcgatgaatgacagggtttcgcacccagcagtggaatccacgatttggtcgatgcgaggtagagggtatggaaccttctgacatgctntgttgagaccagtgtagtctacacaca

SEQ ID NO: 18128 - DNA, 464 bp, Zea mays
  unsure (1)..(464): unsure at all n locations
agcttataatactcttacactttctctagtgtatcctgttccgaggccaatgttggatactctctactaatatcagccaccaagtcatccatcagatcctcctcatcatcatcaattctgtctgactttgtgatattctgctctgcttctccatgtgagcaccacactagatagttaggcataaacccgctcttacaaaggtgatgctctagttcttcggccattctcgcatacttaaaatttcgacacttggtacacagaaacttcaccacacgaggtccaccggagaatacgagatccatgaatttgtttgcaaccctaacccattcctctgagtgacctagagtcacactattgaatccatcatgtatcgcccttcttctatcgtcatccattttcaaaactaaataacccaatgtataanaatgtgtaaatacacatcattaaacatacacatgtatatc

SEQ ID NO: 18129 - DNA, 366 bp, Zea mays
  unsure (1)..(366): unsure at all n locations
ctacttcacatggttgtatttggtacctcaattatgtcagtgccggtggcaacctctactgtctagtgattgatgatgacttctcaagatacacttgggtgttctttctccatgacaaatctgaagttgcatctatattccagaagtttggcgagaaagcacaaaatgaatttgactgcaagactaagaatattagatgtgacaatggcgaataattcgacaacaccaacattcatgagtgctatgatgaaattgcgatcaagcatgaagtatctgccacatatacacctcaacaaaatggagttgttgaaaggaataatangaccttgatcacacttgcaagtcaatgattgatgagataacaca

SEQ ID NO: 18130 - DNA, 450 bp, Zea mays
agcttaatcccgaaaaatgtgttttcggtgtaccagcaagaaagttgctcgggtttatcgtcagccaccgaggaattgaggctaatccggataagattgaagctatcatgaaaatggaagcacctcgatcgcaaaataaggttcagcgacttactggatgtatggcagctttgagcagatttatatccaggctgggggaaaaaggtttaccattttacaagctactcaagaaggtggataagtttcagtggacttcagaagcacaggaagctctagatgcgctgaagaaattcttaacaacaccaccagtactgaagccaccccgacgagctacgtcagctcaaccagctgaagatctgctactatatatctcttgcacgactcacgtggtaagcaccgcgttggtagtcgagcgagtagaagaaggacacgcctatccagtgcaacatc

SEQ ID NO: 18131 - DNA, 429 bp, Zea mays
  unsure (1)..(429): unsure at all n locations
caagtcagtgtttgacatgtcattangatagaaatcatctatctgtcgcaccttgtgtgcatcaaaagaagcaaaggagttggaaggatctaatgctgacatacaagaaagcagctccatattatcctcactaaaccgactatcaagctctatgctaatttgatcaatgaccccaatatatacttctcttctgaagtggtcatcattggtttgtgtatgaacaaatcgtgatgatcttccataaggcttataatttgcatccatagcaggaacttcgatatcatgtttgttgcagaatgaagtgattctttgaagaaatngatcccaaccatcaagccttaactgttgcattcttctctttgcacattaacaagtgaaattgattaaatatatctttgctccttctttgaaacacactgatagatcatt

SEQ ID NO: 18132 - DNA, 447 bp, Zea mays
  unsure (1)..(447): unsure at all n locations
agctagagaagattcttcatcccaacatggtctagtcggcggagccagagccaacccatgttagtcttagcaattaagcaagtgtcgagttcagctctatcaaaatctaccaagtatagctgaccctctaacattcccttaaatgctattgaatcatcacttcttctaaagacagtgacacctacatcagtgaatagacagttgtagcccatttgacataattgggatacggaaagcaaattgtaatctaatgaatcaacaagaaaaacatttgaaatggaatgttcaggagatatagcaattttaccaagacctttgaccaaaccttgatttccatccccgaatgtgatagctcgttggggatcttggttnttctcatatgaggagaacatccttttctcccctgtcatgtggtttgtgcacccgctgtcgagtattcagcttgag

SEQ ID NO: 18133 - DNA, 394 bp, Zea mays
  unsure (1)..(394): unsure at all n locations
caaccggtgtgtgcaacggctgaagcatgtcttcatctcatttggagccagttctgaaaaatttgaaccttttgttgaagacctaccatgcaccttcgaacatattgatggcgaagttgatgcgctcgacgaagttatagctgggcacggtgactgttgtgccctgctaacttctcanggcacagctgttgctttcatgaagactggttgcacgcatgggaagatcgtgaacaggccaaacttcatcctgtcaccagcggatntaactaacatacacagtctagctcgaagcattggaaatagattcataactcacatctggacgaagggtgggcgagaactatctggtgacgaagctcgaagtcatctcaagcacggtatacacttgtaccta

SEQ ID NO: 18134 - DNA, 460 bp, Zea mays
agcttgtcaacactataagcacataagagataatgctgcttcggcagatcagccgaagcctatgctcctgtgtgaagatatagcagatcaaagggtactgttgggatctcagttatcttatgaacaagaaaagactctgctaagatttttgttcaacaacaaagatgtcttcgcttggacagctaatgatctctgtggtgttaacagagatgtcattgaacattcactcaatgtggatccatctttcatgccaaggaagcaaagacttcggaaaatgtctgaagataaagccaaaggtgctcggaatgaagtaaagggacttctcagtgctagtgttatcagggaagtaacatatctagagtgggtagccaacacttttatggtgaagaaagctaatgggaaatggagaatgtctatagatttcacagatctcaacaaggcatgttcgaaagacgagttc

SEQ ID NO: 18135 - DNA, 458 bp, Zea mays
gcttattgttctgtataatattgtgcattgttttagtaacgattatatattctttcatgttataatgtatcattccatggtatattttggattgttctagcattgagaccttattattcatcattatattttgttgtaccaatggtgatatttgttgttccatatcatatttgattgttccagctatgggaattattgtttcgtagtatattttcgctcaataagaaaaattttcggctccctcttattgtaacaggccacatgtttttgaaacatttaccatttataaagtagatcttgttactcgtgaagctggggctgtaatatttttacatatacaacgtgtgcacatgggccgactgttgggggcgtgttctgctggctgctaaccgacactgttgcagctgtttggattgctgcagctgcaatccatatagagataatactgtataatccgc

SEQ ID NO: 18136 - DNA, 427 bp, Zea mays
  unsure (1)..(427): unsure at all n locations
tgcaagcttcccgctcacatcttcagagtagtatcttcttttctattatttcngncttctcctactgtgataccgactcgagtccgaagatacctgttcacacattatactccagaaatgctgttaaatcctgtttttgaggaccttcgtaagccgaaggcccccaacattaattaagaccaataatggacccatagtttgaatgatggtgctatatggggtaccttgggtgtttngcttggagtggccgaattcgaggacgaattctttttgaggggggtagagtgtaatatcccaaaaaaatgtggaccaaaagtagatcttctgtgtgtggatgtgggccattggatgcaaaggtagaagtcatctggggcgtcagttctcttctcccacaataagctaagtggccaccccttatccctccacc

SEQ ID NO: 18137 - DNA, 361 bp, Zea mays
gactcggcttcttggacaatccgtatcgtttttacgaagcacactggctctggacagatgtggtgggacatcatttatgggctgctttcctcctctatcactcatgcgcttcttaatggcatttcatgacatattgagcatccgagaagactccgacaaggggatcctctctcccccatgctttctattcatgtaatggatgttacaggtctactgtattctagagctgaacacacaagtctgctcatggatctttcccccatacaacctctgcgtatggtatatacgtatgcagatgatgtggcactttacttacacccatccgctgcggatattactatgactctatatatcttacgta

SEQ ID NO: 18138 - DNA, 138 bp, Zea mays
cgggacgccggctttctatacgaaggttcactcttgggcaaggcctgacacgcccggtagactgttgcagcggagcgaccacggaaaggacggttgtcggcgaacctatccggtagttctgaggtaactatatctgtt

SEQ ID NO: 18139 - DNA, 426 bp, Zea mays
cagtctattcgctacgtacatcttttacaaacaagcacaaacagactaccatgtattcgtattagaacattacaccattcatgttaaacataattaaatacgcgtaatcaaatagagtgtgttactatggtcacacgaggactaagaaacgcgacggtcgatgctacagtcgatagactatggcggtcacactaaacgagtataatcataatatgtaattggaccttgcaaatataagtaatattcatatgttagttcgatgaatccgctatgctaacgaatggaagccaaattagtgatgttaacttaaacaagacaatgcaagcgagacgaaattacgacaagcgaaacatcacgacagcgtgcaaccgacacgcggacacgcgcgacacaccatgcttacgacacacgatacaatacgcgcga

SEQ ID NO: 18140 - DNA, 471 bp, Zea mays
  unsure (1)..(471): unsure at all n locations
agcttaagtagttcttaagttctactccctttcaaattataagatgtgttgggggggntttagagacataatnttttgctatgcatctagacatagtgtatatgtaagtgcatagcaaatactatatatatctaaaaaaaccacaacttataaattggaatagagggaatactctctaaacatcataattcacaaaattaacagatttaagacttaaaaataactcttagttactggtgtctatccttaattatcccctaatttaaggttccattaaggatacagagctacacaaatattngcaagacatacttagtttaaaattctcatcaagttatcaggacctcacagntcccgcaaaccaggtccaagaattacacaaatattagtgtccactccattgaatctncacataagtgtgttctttaattttctataccacgttacagtacatacaatggtgctgataac

SEQ ID NO: 18141 - DNA, 500 bp, Zea mays
  unsure (1)..(500): unsure at all n locations
tctcagcttgacatgatgagatggcgctcgtcatcaatagcttccgccaaatccttttcaaaggagggggaaagactacaagtcccgctccaagatagtttgctacaaatgtggtaagcccggtcattttattgctaaatgtcctatatctagtgacagtgaccgatgcgacgacaagaatgggagaagaaaggagaagaagaggtactacaagatgaatggcggcgatgcccatgtttgtcgggaatgggattccgacgagagctcaagcgactcctccgacgacgatgacgccgtcaacatcgccgtcaccaatggactcctctttccaaacgtcgggcacaagtgcctcatggcaaatgacggcgaatagaagttaaatctaaatcctccactanatatgaatcctctagtgatgacaatgctagtgatgaggaagaataattgcgttccctctgtgccaaccttaacgtagctcaaaaggaaaaattgaatgaatg

SEQ ID NO: 18142 - DNA, 466 bp, Zea mays
  unsure (1)..(466): unsure at all n locations
agcttagcanaagaaatttctagaatcaagattattgtgctcatgcctaagtctggtaaaagattgttcatcaagtggcttggtaaagatatcggctaatagatctttagtattaatgtaagaaatctcgatatcccccttttgttggtgatccctaagaaaatgataccgaatggctatgtgcttattgcggctatgctcgacgggattgtcggccattttaattgcactctcattatcacatagcaaagggactttggttaatttgtaaccgtagtcccgcagggtttgcctcatccaaagcaattgcgcgcaacaatgtcctgcggcaatgtactcggcttcggcggtggaaagagcgaccgaattttgcttctttgaagcccaagacaccaaagatcttcccaagaactggcaagtccccgatgtgctcttcctattaattntgcaccccgcccaatcggca

SEQ ID NO: 18143 - DNA, 350 bp, Zea mays
gtgtgccttctgtgtgccccgaggcatgctcctatgtgttatcgtctccgagcgaggcatcgaagccaaccctgagaatatcgcggccatcaccagcatgggacccatcaatgacttaaaatgggtacagagggtcatgggatgcctcgcggccctgagccgcttcatctcacgcctcggcgaatgatgtctgcctctgtaccgcctcttaatgaatgccgagtgtttcgcttggacccctgatgccgatgaagccctctgcaacctgaatgcgctccttacaaaggcgcctgtcttggtgcccccggctgacggagaatccctcttggtctacgtcgtcgcgaccactc

SEQ ID NO: 18144 - DNA, 462 bp, Zea mays
  unsure (1)..(462): unsure at all n locations
agctgagaaantattggatactattcgtttacttgaagcttccttcgaagggttttctgtcaagaatattccacgaggagaaaatgaacatgctgatctactagccaagtcagcggcacaggggctgccattaccttcggaagtattctttgaaacaataaaagcacctttggttgaccttcttgaaagagcagtgctcaatatatctcctgtttatagcaaagattggagaaccgagatcatgtcttttctttagggcaatttcctttcagatgacgaagcttatcataagagaatagcggcaagagcccatccatatgtaataatagaaggagagttatacaagcatggagtctgttctccatgactcanatgtttatgcagagctgaaggtatagagctgatgaaagaaatacatgcaggcctgtgtggatctcacatcggatctaggcctcttgtggg

SEQ ID NO: 18145 - DNA, 462 bp, Zea mays
  unsure (1)..(462): unsure at all n locations
agcttgaaagatatctagacatggttcgttgagtctaagcttccttcgaaagattntctgtcaaaaatatccctcgaggacaaaatgagcatgctgatttgctagctaagtcagcagcacaggggctgcccttaccttcggatgtgttcttcgaaacaataaaggcacctttagtggaactccttgaaagagcagtcctcaatatatctcctgtttatagcgaagattggagaactgagatcatctcttaccttcagggtaaattcctttcagatgacgaagcttataacagggggatagaggcaagagctcgtccatatgtcatgatagaaggggagttgtacaagcatggagtntgtgctccgctactcaagtgtttatctataaccgaaggtaagagttgatgaaagaaatacatgcangcctgtgtggatctcacattggatctatgccgttacttgg

SEQ ID NO: 18146 - DNA, 472 bp, Zea mays
  unsure (1)..(472): unsure at all n locations
tttgctggctttcattgcattngtttcatcaattgttacatatgagcgatatgcttgcaagctaaacagacaattgtagttacctgtgtatactctgccatcggtcaaagatacaataactttacctgtttgacattgttctttgaatatgccgtactaagacaatttgaattgatatgtaatctgcacgcagatttgcttaagatatttggtgaaaaacatgtgctttataattttgttggcgcattagcaatgggatgttcatatttacttgtaaacaaggagtatgcaaaagagatcctttctgaagcttctgaacagaagacttctgggaatacaaaactcatctcatcatgcatgaatcttctaacggtaagatgttgttcctgattcctgaatcactgttttcttttgtgaatgagttatgcatnntgtcatatntctggtatcaagaaaattcggaattacttct

SEQ ID NO: 18147 - DNA, 453 bp, Zea mays
  unsure (1)..(453): unsure at all n locations
agcttctaaagggagaacacgtgatatgtctatctaatgttcaattcgaaaaagatagaccttgtgcagctggtcaagcagggaaacaggtgggaggctctcatcacaccaaaaatgtgatgacgacatcaagacccttggagatgctgcatatggacctttttggacccgtcgcctatctgagcataggaggaagtaagtatggtttagttattgttgatgacttttcccgcttcacttgggtgttctttttgcaggaaaagtccgaaacccaagggactctcanacgcttcctcatgagagctcaaaatgagtttgagctcaaagtgaagaagataaggagcgacaacggatccgagttcaagaacctccaagtggaggagttcctcgaagaggaaaggatcaagcacgagttctccgctctctacacaccacaacaaaatggtgtggtag

SEQ ID NO: 18148 - DNA, 392 bp, Zea mays
tcggaataccgacactcttcgatagagtgccgattaccttctccccggtacgaacacgaacacatcccaaggcctcttcatcgattccactaaagagcatggcttctggctggtatccatatgaaatgccatattcctgtagctccttcttctcggcctcagatagttcttgtccgaccaggttccgaagatcgaaacctttttcttccgacgtatcttcgacaattcctttccccttgtcaagcactggggccatgacctgttctgcagccatagatgtttcttctttatgcatacccagtatcattttatcaatcccatataaggtagcctccaagttggcagcttctgtggcagctgcagcttcagccgatgtgtgtgcttctgtagtg

SEQ ID NO: 18149 - DNA, 464 bp, Zea mays
  unsure (1)..(464): unsure at all n locations
atccttaagtcacctgcagctgcaagctgactggaatggaagagatcatgattttttttatacgancacgaagctatgtgcagaatagcttcggcatgacagcagaaaaaggaaaccgacttatagaggaaaagccaaattagacctcgaagaattactatagagttattgataaatgtaaagggcattaatgtaattttacacgggctgcgtcccgtgcctataaatagatgaacagtactcccgtactgttcaggctgactgggcatttacttttgcgtcacgctcgtacccgtgctttccttcgagccgaaggtacatttgtaatttgttattattgatacacgatcgcaaataaaaatgagttaataataatgattaaagtgtttatattatttttcagttctcgtgtatgaatacttcttcatcattcattgtgtttatgaaaggntagtccttcataa

SEQ ID NO: 18150 - DNA, 343 bp, Zea mays
ctctgctgtaggtggcagtggtatttgctgatggataacctggttatggcgtgtacaactaatgtagtaccatcttctgattgtgatagctatgttcttgcatagcgcttgtggttcaggttcaattggcaaggaatgttgttgtcaattgcactgccctgcccctgaggtagaaacattttttgtgaagttgtaatgttctatttacaggattaccatatactttgatggctttgcttgtagttgtagtagtatctttatccccactctttgattgatatgcttgtaagtgtgcccaaaagtattgtctgtcttgatggttatgtacatccaactaataatc

SEQ ID NO: 18151 - DNA, 459 bp, Zea mays
  unsure (1)..(459): unsure at all n locations
agctttatcatatggacgtgaaaagtgctttcctcattggaccaatcaaggaggaggtctatgttgagcaacctcccggctntgaagatagtgagtatcctaaccacgtatataaactctctaaggcgctttatgggctcaagcaagccccgagagcatggtatgaatgcctaagagattttcttatcactaatggcttcaaagtcagaaaagtcgatcctactttatttactaaaacacttgcaaatgatttgtttgtatgccaaatttatgttgatgatattatatttgggtctactaacgaatctacatgtgaggaatttagtaggatcatgacacaaaaattcgagatgtccatgatgggggagttgaagtacttcttaggaattcaagtgaagcaactccaagagggcaccttcattatcgcaacgaagtatattcaagacattctaaacaagt

SEQ ID NO: 18152 - DNA, 414 bp, Zea mays
  unsure (1)..(414): unsure at all n locations
cttgggagagtttatgagaagctatgtntccccaaggtttgtttatgatttatatttatctatgtggttttattacttgttggatttatcttatcgcctattgttggttttcacataattaaaggttaaatcgatgcttaatgaacttgtagcttaaataacttgttaaagcattttacttgtcgatatttttacatctcacatcccttttttatctttctatgcgttcatgtggcttctgcttgaatggtgagaagtttatgtggcttttgcttgaatggtgagaaagtagcagtaaactcggcatgttcatttcatcttttatagagtctctatttattggtcaaccttaccctttggtttatggttgttgctgtaaagtccatctataacttgttgatgataacccgctca

SEQ ID NO: 18153 - DNA, 449 bp, Zea mays
  unsure (1)..(449): unsure at all n locations
agcttgnaaaatatntgcacacagttcgtttgttggaagcttctttcgaaggtttttctggaaaaaatattccaagaggggaaaatgagcatgcggatttgctagctaagtcagcagcacaggggctccctctaccttcggaagtattctttgagacaataaaagcaccttcggttgaacttttggagagagcagtgctcgcaatatcacatgtacatagtgaagattggaggactgaaattatatctttccttcaaggtaactgtctttcggatgacgaagtntataataaaacaatggaagcaaggacaagaccatatgtcataatagaaggggagttatacaaacatggagtctgctctccacttctcaagtgtttaaccagaaccaaaggtatagagctgatgaaggacatacatgcaagtntgtgtggatctgacattgagtct

SEQ ID NO: 18154 - DNA, 461 bp, Zea mays
agcttgcacatagtctctttgatgtatgtctctttatatagtccaagacttctaaagctattatcttttgtgaaaccgcattgaaaaagtaacacaagcgtgtgatgacaactttgacatgctctgttttgaaggctcttaccgcaattgggaggaacaccgtcatcatcacatgacagtcatgagagtggtagccaaatagagacaagaccttcatcctgactagtctgctgatattggatgagaaacctgtgggcactttgaccccacgcaaacatttgcaaatctttgttctctcctcaactgacaagttgtagctagctggggggaggtaaggcttccctttgccactatccactggatgaagttccggtctgatttgaagatctactagatcattgcgtgatttaagtgcgtcttttgtcttactcggcatgcccaacaaggttccaatgatgctg

SEQ ID NO: 18155 - DNA, 459 bp, Zea mays
  unsure (1)..(459): unsure at all n locations
tagcaagtgcgagttctagatcagtgaagtcctattcttatttcacattataaaccacgaaggattggctgtagatccgaacaaggtaatagctatcttggactataaagcaccaatgatgttcgaggaatcaagagtttcatcggaatggccggttactatcggcgtttcaatgaaggtttctccaagattgccagaccaatgacagccttgctggcaaagaaggttgaattcaagtggaccccagcatgtcagaagtcctttgagacagtgaaggagaagttgacaatggcactagtactgattctgccagacgttcacaagccattcttagtgtattgcgatgcttcgtacaccggactgtgatgtgtgttgatgcangaagggagagtagtggcatactcgtcccgacagttgaagattcatgagaagaaatatcctactcatgatcttgtatta

SEQ ID NO: 18156 - DNA, 409 bp, Zea mays
  unsure (1)..(409): unsure at all n locations
gcttctaaagggagaacatgtgataagtcttaccaatgttcatttcgaaaaagatagaacctgtgcagctggtcaagcatggaaacaggtgggaggagcgcatcacagcaagaatgtgatgaccacttcaagatccctggagctgctgcatatggacctcttcggacccgtcgcctatctgaacatanggggaagtaagtatggttcagttattggtgatgacttttcccgcttcacttgggtgttctttttgcaggataagtctgaaacccaagggaccctcaagcgcttcctcaagagagctcaaaatgagtttgagctcaacgtgaagaagataaagagcgacaacgggtccgagttcaaaaacctttaagtggaggagttccttgaagaagaaggatcaagcacg

SEQ ID NO: 18157 - DNA, 427 bp, Zea mays
  unsure (1)..(427): unsure at all n locations
aaatcaaaacacctttcctgaagaatattcatacttntgaagttactgttcccaaaatgaatttttttntgactaagataaaagatacttagataaactaaattatctttggattgaattatatagaagaattatgattaagctatttcttaaatatataatctacgatataaattatatgtctctaaaaaaattcataaggtgtgaacatttctctatttcaggattggaatcatgtataaaaaaactaaaataaaacaaataaataaaatatattttttcattcatgctggagattntgtgtacatgtagtttatattggagtcttaaaactaaattttatatagttggaatgtgtaaattaaatagaaatctggaaatagaattagcaaatagaatagaaatgagaagaaaacaaacgcacact

SEQ ID NO: 18158 - DNA, 459 bp, Zea mays
agctagactgcgcttgactgacttcagtagtcttcttttatcacccatgctgcattcggctctgcaaacaataaaaaattaatttcgatttacacggtaaacaatactgttttataaagtggaatttgacatacaagatgggataacgagacagcttgttcagcactcccatggccggtatgtaaagcaatgacgtacgactgggagtctctcccccggcgcaccctctttcttgtgctagataggcgaccccggctgacggacaaagggccgggagagccgctatccaacggctccatcggactgactaaaaccaaaagcagccatgcttgcatttgggatattgcgcttgcacaagaggacaacctaccacccgctaattgaataccaagagatttcttccttatgggtctcttctatttccttatctaccaccaacttcacgaatattgtaaccat

SEQ ID NO: 18159 - DNA, 388 bp, Zea mays
ctgacgcctttgccattcaatcacaaagctagtgttatcgataatatctttgtgatacttcttgcacagctattatgtctatcgataggctatatgacacttatttgggttgcatcagccttctccgataataccacaagttgtgctttcatttattaagactattcttgttgtgcctacgaagtgaaaggcccccaaagcttatatcatgtctattatgatcatatgtcaatattttattttaatcaacccactgaaaccgtcgagccccgaggacttctcatatataaactggagaatgataccatcaatctctttattttcaaaaggagcctcgatgccacatatttcatatttgttataacataggccctcccaattaaaactt

SEQ ID NO: 18160 - DNA, 472 bp, Zea mays
  unsure (1)..(472): unsure at all n locations
agcttaagaatgagctaaacatacttgattctcggatatttgattgaaacattgcacacatagctcaagtatatacctttgatcatatctctttcatttggtgccaatgcatatttcttattcttcttgtaccaaggctaagactaatgtgctttcaagtatatctctatgattagtcttagattgaaagggaaatggagtattcggcaaggacaaggcttccactccaactctgacggtatcacttaccctttgtcgttactcatgtcactctcaatggtatgacccttcactcgttgtcacacccggctttaaggaacaaagccaggtgcatctcatacatgcgccaagaagacaacatatataaaacagagtgtatagagataaatgtcaataacatcagagtacttattacatagcggaagacttattacanaataaaataataaatataaaacgaactaatgatcgg

SEQ ID NO: 18161 - DNA, 458 bp, Zea mays
catatccttgagagcctcttcttttatcgggttatacttgcgaaagtacactccgttctcatggttttcgaacccatgttgttgtatgtgaagaaacaacacacttttattgtttttgttttaaggcggtacccaatgacgagccccaccattgaagtcattcgcgggatgatgttctccttccacgttaaaaacaatatacttttgtgcgggagggtgttttgactacctggtctgtaataataatacttatgcactcataataccctggtattgaaataataatactctttatatatatattatgaatgtgaattaagttattgtaatctgctttcgcttattctatcctctgatatgatgtaatatctgcgtgacgggtgaaacgctcttggacgatatgatggagatacacttactgaaattgtcaagtgattatgtgcatcttcatgattgtt

SEQ ID NO: 18162 - DNA, 400 bp, Zea mays
  unsure (1)..(400): unsure at all n locations
agctngatggtcaagtcaaaatgcaggccccattatattttgtttccgaggtccttagtttatcaaagaataattatacagagttggagaagatactgtatgctgtcttgatggcctccaagaagcttcggcactatttccaagcttacaacataattgttccttcatcacaacctctgaaggatattatgaggaacagagaagcttctggaaggattggaaaatgggctgcagagctcaatgaattttgtattgaatatgttcatagatcttcaattcaatcgcaggcactggcagactttattgctgattggacaccaggggctcaggaggaggaaacaaataaagacaacgaagcctggatagtggtttgtgatggatcttggagaaccttccgagc

SEQ ID NO: 18163 - DNA, 401 bp, Zea mays
aagtcacctgcagctgcagcttcgcagaagaaaatgaacttttattttttcttatgaaaaagcttggccatagaggaacggctgttatgctttttgtgtacacagaaaggaagtgtttttcgtcttcgctaaaatactgattcgccacatcagaggactcttcgataggtaaaattattaaaggttagtcaaagttctagaaacagtaatgttttacaaacttgtcaaagtatcctgagcttttcctataacattctactgatcttcattaactcacttggcacagtttagcgacatacttagcatattttacctcgcatctcataatcaggatcgtgagttaaataagtgcaataaaagtatacaagatttttctactggtaagagattcggctcattca

SEQ ID NO: 18164 - DNA, 402 bp, Zea mays
actaagcttccagagagttagcatgattacatcaatgtgttccaaatatgactcatctctatctagcctagtaccccaatggtgcaaaagctaagctagctgcaaggagtccgactatccatcttctaagcctatcctgaacacctagtgagcgaacgaagcaacactctactcgggggaaggtggtcttcccgagccagcagtgtccacactggaggcatgctcatctcctccctcaatgtcgacgtcctcgtttgcctcttggtcctggatctcctggtgatgcatgtccaggtgctcgttagcctcagcaagctgctgctgagtgttaatgagctgatcctctataacctcgatggtgttctccctggtgcctaccagctcctccaactcctgaatatc

SEQ ID NO: 18165 - DNA, 444 bp, Zea mays
  unsure (1)..(444): unsure at all n locations
agcttctaaagggagaacacattttgtgacttacataatgttcatttgagaaagacagggtttgtagcgcatgtcaagcaaggaagcaagttggtgcccatcatccacacaaaaatatcatgacaacggacaggccgcttgagctactccacatggacctattcggcccaatagcttacataagcatcggcgggagtaagtactgtctagttattgtggatgattattctcgcttcacttgggtattctttntgcaggaaaaatctcaaacccaagagaccttgaaaggattcttgagacaggctcaaaatgagttcggcttgaggattaagaaaataagaagcgataatgggacggagttcaagaactctcaaattgaaggcttccttgaggaggagggcatcaagcatgagttctcttctccctacacgccacaacaaaatg

SEQ ID NO: 18166 - DNA, 403 bp, Zea mays
cttcatccacacatgtgctaagcggcgatgccacagccatcccatgctagtcttagctattaagcatgcatctagaccggcctcttcttttgcaaaatcaactaaataaagtttgccgtctaatacacccttaaaagctagtgaaccatcacttcttctaaagacagacacatctacatttgtaaatagacagttataccccatgttgcataattgactaacagatagcatattatatccaagagactctactaaaaacacattagagatagagtgctcattagaaattgcaatgttacctaacccttgtacctttgcttgattcccatcaccgaatataattgaatcttgggaatccttattctcgacgtaggaggtgaacatcttcttctccaccgtatat

SEQ ID NO: 18167 - DNA, 461 bp, Zea mays
agcttaaaggggagaagaaagatgttgatctcttcatgctaccttatcattataaattcaagaagtattttaaagtaccctgccaagaatggcttgatacaattgaaataatgagcaatgaaattcttgggaactactctaaaaaagaggaccaattgatgacagcggccttcggcactcggccgaaacgaaggctgaacagggtgcttgatgccataggatttgaatacgctgactacggtcgactgggcggagatgccggaggcccgaagcgaaaaaggattgccagcgctactgacgaagaggtcgtcaaggtagccaaaaagaaaaagaaagattctgaaaatcttagcgctgaagagttaaatcttgagccaaaggtggccacttcaagatagagaaaaggtacatccccggagccggaaacgccggtccgagaagaagatattcctgcttctcct

SEQ ID NO: 18168 - DNA, 438 bp, Zea mays
ttacggacacttaaaactaagcttgcaacaccatttgacatttcacataaaatttctgagatcaagaatatttagttcattcctcaacatgcaaaagcgggtcttatcaagtggcttagtgaaaatatccgctaattgatcttccgacctcactccttctaaaacaatatctcctttagcaacatgatctctaaggaaatgatgacggatatcaatgtgcttggtgcgagagtgttgtacaggattattaacaattttaacagcactctcattatcacacaacaaaggtactttttctagaactacgccatagtctagaagagtttgtttcatatataaaatatgtgtgcaacaagcacctgcggcaatgtattccgcttctgcagttgacaatgcaacactattttgctctttggatgtccatgaaactagtgatct

SEQ ID NO: 18169 - DNA, 448 bp, Zea mays
  unsure (1)..(448): unsure at all n locations
agcttctatggacgttaagcctgttctttgtcttttcttcacttgagcctagggagtaaccaagtgatacataaagcatgactgattntgctcgatgccatttgatttctaatttgcatgaccaggaatcacccacactcaatgtgggaacagatacaaccccaaatgaatactggatctttcttatgctatcagcctctttctttgactctttatcctcagacacagttgagacaccaagaagttcaacatgatgactttcagaatcttctgcttccctcggactcaacaacagaccaccacctctaacatcaatgaggttaattttcagttcaccagaatggactgcatgtccttttgactctatgatcactggtaaagtaaataactcttcaactaaagcagggccagcagaagttactacaaggtcaacttgagcatctggctc

SEQ ID NO: 18170 - DNA, 361 bp, Zea mays
actgcaccttgcctcaacatggtctgattggtgattggcgcgctgttttatcatgtctgctgacgcgcccggccgccagctgtcaatccgccttcagtcatgtcaactgccatatctgtccccgtggcccccactcctggtggtttcgtctggccacgcgcggggcgcctcattgccgctacattggatttaaaggtaaccctttgtcttccacagcggccccaatgcaatgcggcgcgctatcacatgcggcggttcgctctttccacacccgatatccagcgcacaacatgtataacttgtggacccgggcccctgtgtcagagactgggctgcttgggtcttatgtgcccgtcgagcg

SEQ ID NO: 18171 - DNA, 442 bp, Zea mays
  unsure (1)..(442): unsure at all n locations
gcttgagttatgttattacagactatactatatatgtttgcagagcagtaatattatacaagccatgggaggcacaaactcctcccgataatgttaataaacaaaagatcctaagtggaggaccgagtcctcccgcacttcagtcttctttttcctcattcggtaccaccttggagcataaacaacaaaagtttgtcgctttctcacctataaacaacaaacggataaaccctgagtatggaatactcagcaagtcttacccgactaaagaaaagactctcaaggagatgctggataaataggagtcaaggagaggctttatcaaatatcaacttgtanctttgcagaagtagcttactaaagtgagtgcttactttcaatcttttaacgccatgtgaagtattaatagactccatttgcatctagtctaatntcacatcac

SEQ ID NO: 18172 - DNA, 358 bp, Zea mays
caactccatctatgttatggatggcttttgagtcaatccattttcccttgtcccttctggcagcttcctgacttacatgaatagcaatgggtccttgatccgatagtatcttcatgcataggtaagcatgatgataaattgcttccaaagcattgagggtgccacgaccaataattgcattgtaagggtattccatgtcaacaatgtcaaacacaactcgctcggttctggtgtttgtgatgaagccgaaagtcactggcatggtgatcttgcctaatgctacaatctgttttcctccgaagccacagagaaggtgcgtagcatcatgaatcttgtcttctggctctcgcatctgtct

SEQ ID NO: 18173 - DNA, 367 bp, Zea mays
  unsure (1)..(367): unsure at all n locations
agctagtggaggttcttcatccctacatgtgctaatcggcgatgccacaaccagcccatgcaagtcttagccattaagcatgcatctagaccggcctcttcttttgcaaaatcaaccatataaagtttgccatctagtacacccttaatagctagtgaaccatcacatcttctaaagacagacacatctatanttgtaaatagacaattatatcccattttgcataattgactaacagatagcaaattgtatccaagcgactcaactaaaaatacattataaatagagtgctcagatgaaatagcaattttacctaacccctttaccttggcttgggtcccatcaccgaaaataattgaatcttggg

SEQ ID NO: 18174 - DNA, 398 bp, Zea mays
  unsure (1)..(398): unsure at all n locations
ctaccaaatggacgtgaagagtgccttcctcaacggaccattcaatgaggaggtctacgttgagcaacctcccggctttgaagatagtgagtaccctaaccatgtctatatgctctctaatgcgctttatgggctcaagcaagccccaagagcatggtatgaatgccttatagatttccttattgctaatggcttcaaagtcggcaaggccgatcctactttattcactaaaactcttgacaatgatttgtttgtatgccaaatttatgttgatgatatcatatttgggtctactaacgaatctacatgtgaagaatttagtaggatcatgacacagaaattcgagatgtctatgatgggggagttgaagtattntctatgattccaagtcaagcaac

SEQ ID NO: 18175 - DNA, 452 bp, Zea mays
  unsure (1)..(452): unsure at all n locations
agcttaacaacagggttaatagcctcatgtgttntgcaagataaaagttcattntcaacaagaagattgtcatgatcaagtttaatttgagtatagtcttccttgatctttactagtctattttgcaactccctattagcttcatttaatttgtcatatttttccttagcatcttttaaggagtttgtgagctcatttacagttgatgacatagttttattttcttcttttatttcatcactagcctttataactatgtcatacttggcatttaaagattcattttcatttttcaacctatcacatttagctnttgactttctaatgatttgagtatattctttaagtaagtcagctaactcatcatatgaaggtgaagcaaattcttcatcactatcactatcactatcatcatcaatattaatatcattntgtacctttcgttcacccct

SEQ ID NO: 18176 - DNA, 313 bp, Zea mays
tgtggaggaccagatcatcaaagcatataagtttttggatgataagcggtcacccaagttccattgatgatgcaccagaagaccaatcaaggaaggaatccatgtgggagctcccgagataaatgttgcatgttggcatcgttgcttcttcataagctatctgccgagcgaatgctagaagcctgaagatgatctttgattatcccgaatcagcgtttgtaatctgctactggatgctcctgaaaggcacgattttgtgaagttccatctactcgaacagtggctaaatgaagatattgtactgatgtaaagc

SEQ ID NO: 18177 - DNA, 425 bp, Zea mays
  unsure (1)..(425): unsure at all n locations
agcttatcgatcatatggaactaaataagttatgttgacgtcaacccttcaccagtactagtatggatagacccggcaggggcgacgaagattcctattcctgcctggctggtaataggcagcgccaagccgccaacaaccttcaaggcatcttgactatccaatagatagtttgaatatagtttgcgctataggtgtacattcgggtcgcccggcccggctcgatccaaacccgaaaaaacccgtattatttgaatttcgagctagctcgatctgtttgaatntcggactgtaccgggccagcccacgggcctagcccacggctcggtccgtaattgcttaaacgtgtcatgctcatttcgggcggcccgaaattcacatcagggcccanaattcanaacatnattaataaaacatataaaaga

SEQ ID NO: 18178 - DNA, 418 bp, Zea mays
  unsure (1)..(418): unsure at all n locations
taaacatttatgatggatcgtcctactcatatcatcgcacacaagaatatatatgcaacatgaacaagtagaacattaagaatggcattcacacaacagttgtgattcgatatggctggctgtcacatggtgatccccatatccaataatatatccatcacgatgatctccatctccacgatataggtatgtcatctttcaggtgataagtccttcaagacctatctaacatatgctggtaaacaaattacatatatgctttggatcatcacatgttgacacacaggtcattgcattaaatttggataatacatatggctctagccgtattgccttggtcatgacacgcangtcatgaataattcattaatatgcatcatatacacacaacagccataccgatcacaagatatcctac

SEQ ID NO: 18179 - DNA, 462 bp, Zea mays
  unsure (1)..(462): unsure at all n locations
nnagcttggtgaagaggcaagttcttaagtctgcatcttctgaagtgaaatccactaagtagaggttgttgtatctaaatcccttgaataccattgattcatcatccattnttgttacaataacctctgatggagtaaataagcattgaagtccaagatcacagagttgtcccactgataataaattgaagctcaaaggtgcaactaagagaacatttgatattgataaatcatttgagattgccaccttgccaagtccttgcacttttccttttgaattgtctccaaatgtgattttatcttgaccatcaacattctcatctagtgaggtgaacatccgtgggttgcctgtcatatgttgtgtgcatccactgtcaataacccaatggctcccaccgatcttgtatttcacctacattcacagacaattcaagcttgatgtttgagggccctatatttgat

SEQ ID NO: 18180 - DNA, 476 bp, Zea mays
  unsure (1)..(476): unsure at all n locations
cgccaatacttgtcgaagcatcatcacatgccatcacaacatctacagaccataccatttacctggcctttcgcgtgctggggactggatatgattggacctttcaagaaagctcaagggggatatactcatgtattggtggcgattgacaaattcactaaatggatagagttcaagcccattgcctctttaacctctgctaatgccgtggaattcatacaagacgtaatattcagattcgggataccaaacagtatcatcactgacttatgatccaacttcaccagttcggaattcttcgacttctgcgagcaaaagagcattcagatcaagtacgcatctgtatcacatccaatagccaacgggcatgttgagcgagccaacagaatgatattggaggcactcanganaagggtcttcgataagaatgaanaattcgcacgaaagtggataagagaatngccttatgttgtttg

SEQ ID NO: 18181 - DNA, 468 bp, Zea mays
gacccaagcgacgcagctcaagctatcacgcgggggactgattcgttcttcaacacggatgagacctcctgtaagcacctttgatcacgcgttgtctagcgaccaacgacttaggatttagcgctcttttatgttgtgaattgcttgtcagagcgtcggaccaccaccctggtcatgcgccttcgagagccataggctctgctggaccatcgcgtatgatacctcactgaatcgaatcaccgtgttgcgggccacgtgtagcagactttaattcgagtttggcacggtggtgagccgtattgtccgtacgccggtgatgctacgtctgggggcgcaagcgcaccgtcgctcgaccaccgtcgggttaggtgatgaacacaagtcgtcagattcagatctaacgacatgagttatatctgcataccactattggatagagcgccactcgaccgttgatcactcgtgcta

SEQ ID NO: 18182 - DNA, 413 bp, Zea mays
atgcgtatgtatgacacactggaatacagattggtacatggtagcatgacagcaaccagcaagcccataagagaactgttccatatttctcttatttccagttaagaattaaggtcgcaaaaatttgcgtaaaaattaatactgagtttgctcagttaccccaaacccaaacctggtcagaaacgaaatacctgaagattgtacaaggatttgccgaacaaaatggtgaactaaacctacgagaggagcaaatgttttgacaggactagttacctattccaagagataaaaaaaaagttgtattaaagacacggttggtttctaacccaatttggcaatgaccgcatctgtgacttcctgtgtggtgctggtgccgaccaaatctttggttctgtacttgccttctgcaatga

SEQ ID NO: 18183 - DNA, 383 bp, Zea mays
accctctgtgtgtgtctcgggtactgcccggaccacaaaggctaccgctgctttgacctctcctctcgccgggtcctcatctctcgccatgtggtgtttgatgagaccgtatttccctactccaccaccacaccacactcctccgaccctgaccttgacctcttcactctcctttctactgacgcggtggtcgagccacctatccttcctctctctgcaagtactcgctcaccacctgtcggtcctactctcggcctattgccttgcccgggtccattggtgtcgcctacggtggtgtcgcctctctgctggtcccatctctgatcgcccccatgtcgagcatgggtggtaagactgcaccgactgcatggccgtcggtaccg

SEQ ID NO: 18184 - DNA, 461 bp, Zea mays
  unsure (1)..(461): unsure at all n locations
agcttgtgaagattcttcacccaacatgggctagtctgtgatgccagaggcagtccatgttagtcttagcaattaagcaagtgtctagttcagcttgattatcattaaaatcaactaagtatagctgaccatctaacactcccttaaaagctattgaatcatcacttcttctaaagatagtaacacctacgtcagtaaatagacagttgtaccacattttgcataattgagaaagagaaagcaaattgtagtctaaagaatctacaagaaaaacattggaaatagaatggtcaggtgatatagcaattttacccaaacctctgaccaaacctttatttccatccccgaatgtgatagctcgttggggatcttcattnttctcataggaggagaacattctcttctcctttgtcatgtggttggtgcaccctctatcgnatatccaacttgaaccaccggat

SEQ ID NO: 18185 - DNA, 436 bp, Zea mays
  unsure (1)..(436): unsure at all n locations
tactcaagcttcctttggtatttgcctcacttcggtctatggaagtacttgtaccactgtctgcctgtgatggctggagggcatcaccatcttgtgggggtgcgagtntggagatgcgccgtgggaggaataccaactacctctacatcccactcaatgacaacatcaaaggatggcacctgtagtggtttattgtggagaaccacgggaattccctcctcccacggtcatgcagacagccagatgttcgtactccgagctggaccgagtcccccacagacctgtatgtggccgaggcatggactctacttgctgaggttggattattgaaagagaagggtctgactgtagaagttgtggtcgccgatttcatttgtaataacattcagcctttgaatgacagagcatacccggcttatctttatcgatgcctcgc

SEQ ID NO: 18186 - DNA, 395 bp, Zea mays
agcttgagcacatctttgatatcaccgacattgaatctgatctcctgatcccaagtcgggttgaggttcatcttgatcaccttggtcttgaatcgctgcttcccgagctgcagcttcacgtacaggtcgctgaagccgttggagtccatggcccgcatgttgcgggcctcgatcacacaaacagacaacctcatctctgctccttaactgaacccaaaccaatcatgaaagtctcctcggcagaaatccccaagttgagatgaagatgaatcgccaacagaagcgtataaatctatcaaagatcacttctttccctacagaagcctataaatctatagatcactcctttccctatcctgagcgaaactccgcatcagaaattcacaagaacagta

SEQ ID NO: 18187 - DNA, 422 bp, Zea mays
tcaggttcattcatcatcttcacttgagattaatccaactcttgccctccacatcacgtgattaattaacgtacctaatggaatgtgaaatgcatatgaataagaatagacataaatgacacaggatatgttaactacactgaagatggcaaaacacttctggcaaagcgctacaattcctatgagcaaacactatttaactttgactctacaacactcacacacttggagttacttattctcagctcaaccatcaagcacaataactcaacacaaacattcagcttagacgtaacctcgatagattgcaatacttatggcaagacaaaatgtaaacatttaaaagcaagcatatactaggtatctataaattactaagtataagaatcagacttttcttatgtagccggagcaaacatcac

SEQ ID NO: 18188 - DNA, 404 bp, Zea mays
  unsure (1)..(404): unsure at all n locations
tggatgtccttacgaagcatggatatnttcacaaagcatggatctttttctttatgaagcatgaagagaacggaaggtgttgtttcgccgaacgctcataaacaatatgtatataaaagtttcatgcatcgcatagaagtgaattacaaataatttacatattagattcaaagatatacacattgaatattacagtcttgttacaacatagctacattgaccatctaatatttttttacaataagtactagtcctcttttacgatcttctccgcaacttcatttagcaatttgttaatgacttcgtcaacaataaattcggccatattaatgatctctatcgcttccttcgtttctggatacgccaggggatcgaacgatacggtggcggagataattcagcta

SEQ ID NO: 18189 - DNA, 457 bp, Zea mays
ggaccttaagtcaccgcagctgcaactttaaaggaaaccgtattgtttctttgtcaattcaaaaagaagaccttgtgcgcttgtcagcagggaaacaggtgggaggctctcatcacaccaaaaatgtgatgaccacatcaagacccttggagatgcttcatatggacctcttcggacccgtcgcctatctaagtataggaggaagtaagtatggtcttgttatagttgatgatttttcccgcttcacttgggtattctttctgcaggataaatccgaaacccaggggaccctcaagcgcttcctaaggagagctcaaaacgagtttgagctcaaggtgaaaaagataaggagcgacaatgggtctgagttcaagaaccttcaagtggaggagtaccttgaggaggaagggatcaagcacgagttctccgctccctacacaccacaacataatggtgt

SEQ ID NO: 18190 - DNA, 435 bp, Zea mays
  unsure (1)..(435): unsure at all n locations
ngaagccatggtaagtagcatatgccaataatatacgaattgactcaagcctatctacgggtgcatatgtttcaccgaaatccataccttcaacttatgagtatcccttggccataagtcgtgctttgttccttgtcaccacaccatgctcatcttgcttgttgcggaaaacccacttggttcctacaacattttggttatgacatggaactaaatgccatacctcattcctagtgaagttgttgagctcctcttgcatcgccactacccaatccgaatcttgaagtgcttcctctaccctgtgtggctcaatagaggaaacaaaagagtaatgctcaaaaaaatgtgcaacacgagatctagtagttacccacttatgaatgtcgacgaggatggtgtcgacggggtgatctcgttggattgcttggtggactc

SEQ ID NO: 18191 - DNA, 402 bp, Zea mays
  unsure (1)..(402): unsure at all n locations
agcttggcgcgtggaggcaactctagacgtactgccacctcattgatgagctcggngacgcggtacgacccaaagaagcggggctgaagcttgctcttcggcgcctgagaaatggaagccactggccgctgacggagtctgaggagcacccagtccccaacggcatatgagacgtggcggtgagctttgtcgtagtatcgcttctggatcgcctgggcctgctctatgcggtgacggacgtcggccaagaattcttcgcgttcggccattgtttgggccacagcagccacgcgcgtgtcccctgcttcatatgatctggtggtgggcgggtcgcggccgtataccacccgaaatggtgtctcctgtagagaagactggtacgcggtgttgtatgtatattct

SEQ ID NO: 18192 - DNA, 356 bp, Zea mays
accttaagtcaccgcagctgcagcttaaaatatgaaaaattattattattcttattaatatgagaccaattgtcctagccttcttattttccctagaattcaataaaaatagttatatgattcttagaagaaacaaagaattttaaagcattttaagcagtccaaagaaatagttctggatttttagataacaaataataatcccaaaattgcccaaactttttatgtgagctctatacatcatttagaagccttgggtagagtttgggttgtattggaccttgtttgattcttaaaaccccataacccccacccctgctctatgaactcctttactgactccagaaaccctattt

SEQ ID NO: 18193 - DNA, 397 bp, Zea mays
taatcccgaataatgtgtcttcggggtaccagcaggatagtttctctggtttatagtcagtcaccgcggaattgaagctcatccataacagatcaaagctatcatgaggatggaggcaccgcgatcacagaagaaagctcaaagacttaccggatgtatggcagccctgagcagattcatattccagctgggagaaataagcttaccattttataagtgactcaagaaggtggacaagtttcagtggactttataggcacatgaagccctatacgcatcgaaaaagttcttgacaacaccaccagtgctaaaaccaccacgtcgagccacgccaactcaactagctgaagagctgctgctatatatctcttgcacgactcacgtggtgagcaccatg

SEQ ID NO: 18194 - DNA, 444 bp, Zea mays
agcttctaaagggagaacacgtgatatgtttgactaacgtgcatcttcgaaaagatagaccttgtgcagcttgtcaagcaggtaaacaagtgggaggagcacatcacagcaagaacgtgatgaccacttcaagacccctggagctgctgcatatggacctcttcggacctgtcgcctatctgagcataagaggaagtaagtatggtttagttattgttgatgactcttcccgcttcacttgggtgttctttttgcaggaaaaatccgaaacccaagggactctcaaacgcttcctcaggagagctcaaaatgaagttgagctcaaagtgaaaaagataagaagcgacaacgggtccgaattcaagaaccttcaagtggaggagttccttgaagaagaagggatcaagcacgagttctccgctccctacacaccacagcaaaatg

SEQ ID NO: 18195 - DNA, 412 bp, Zea mays
  unsure (1)..(412): unsure at all n locations
tggtttgatcaaactgctgagtattggaaacaagctatatcgcttactccaggatattatattgaagcacagaactggttaaagattacgaagcgctttgaatttgaataagaccactctccattttcataaaaagggtggtttggttgaaaatcaaatcaagaatttcattatatccctttcttctaccttcaatgttatatcatatttcataaggataaacaatagggataggctctggaacagaagtaataaagtacataaaaatcggcaatctaaatattcctacctaatatatcaggacggtcttattaataattctaatgagttatcttggaattttgaatcgaatcaaanaatctatattatgctcactcaaggaaagtagatgtagataggggcttataccctc

SEQ ID NO: 18196 - DNA, 406 bp, Zea mays
agcttatggaggagcagtggcagatatgtttgtcgaatcacacaaccaaaacgcgaaggtcatggagggagtggtgccaaaagagcaaattggactatggaggtgcacgtcgccgtagtaagaagacgattaaagaggtaggtggtggtgtggaggctctctaccaagtagctagcaagaacgatatgaaatagcagggaacacatgatgttgttagtggtgcaaatcatgtgattagccttgccattttgatgggaagtgtagcgacaggacatccgaagctatattccatgggaggaaaaggaccgagaggagttatgaaactcacgaccattgtcacactggacgacattgatggtgcaatcaaattgattggaacccaagtatagtgataagattcacaaat

SEQ ID NO: 18197 - DNA, 387 bp, Zea mays
tgaagccatggtaagtagcatatgcttataatatgcgaattgtctcgagcctagctacgggtgcatatgtttcaccaaaatccaagcctttgacttgtgatataccccttggccacgagtcgagctttgttccttgtcaccacaccatgctcgtcttgcttgttgcggaagacccacttggttcctacaacattttgattatgacgtggaactaagtgccatacctcgttccttgtgaaattgttgagctcctcttgcatcgccatcacccaatccgcatcttggagtgcttcctctaccctgtgtggctcaatagaggaaacaaaagagtaatgttcacataaatgtgcaacccgagatcgagtagttactcccttatgaatgtcg

SEQ ID NO: 18198 - DNA, 451 bp, Zea mays
  unsure (1)..(451): unsure at all n locations
agcttattcgaatgaattagcaaagatgttattaaaactgaaagcgtttggtatggatttgagaaaataatttgatatccaatccttaacttgcacgtctctacactcagtccatagttctttcgatatttatcccgctcacgtgaattctttggatagaagtgatttgccaggttttttcttcttttctattttcaattatctttttttactcctaagcacacacaatgaaacaaaatatcttaggggaccacaacactatatcattggtaggaggacacgtgtcataaatcgataagaagctacagggaaatttttctacaaccgactatatatagagaatattnttcctgaagatggccacaatgcatgcaaaacaaatttttcctgaagatggccatgctgcatgcacacaacgacatctatgcacccatggagatcatggtggtca

SEQ ID NO: 18199 - DNA, 128 bp, Zea mays
catgaacttggcacccgcgaaaaaagggtgaccttgttgttatctatggcacagaagaacgtagaagcgacacgctggtagctggccatacaatcagcgtatctctgtgatgatccccttacgaccga

SEQ ID NO: 18200 - DNA, 112 bp, Zea mays
ctcagcttatgaaattttattcaacatggctagtggcgatgtcttaattccaatttatcttacaacttacgagcgtaagtgtacataatccaaccttgcttgtgattccctg

SEQ ID NO: 18201 - DNA, 450 bp, Zea mays
catgcaagcttccctgtacaagtgatgatgagctcatcgcacttcttatcacgagcgtactgcctgccaacggaatggacaggcacgccgtctgtgggaccgcttggtcgtctcctaccagtggagtgggcacgacacattatatgccgaggcggcacatccctgccagcagaatggacagggctcattatatgctgaggtggcacatcgtctgtcagcgggacggacaggctgtgcgcctcccccgtaataaatgcaggggtcgcgtaacccggaggccttacgtcaagctccgcttgccggcttacgtgacgtgcagtaagccacgtggcagcatcgggtgttcagccgagcagtgagcattggtgcacgtggacaagtccgcaccagactatgaccatacacgtgtcattactggacccctgcctgggtcttcccaaagccctgtgc

SEQ ID NO: 18202 - DNA, 348 bp, Zea mays
cgccggctatttctatggcacgtacgtgcgccccgggaattcctgggacctccgaagctgccgacagcagccgggagagtctctccgggactacattcggcgattctcgaagcagcgcaccgagctgcccaacatcaccgactcggatgtcatcagcgcgttcctcgctggcaccacctaccgcgacctggtgagcaagctgggtcgcaagacccccaccatggcgagcgagctgatggacatcgccaccaagttcgcctccggccaagatgcggtcgaggctatcttccgaaaggacaagcagccccatggccgcccatcagaagatactcccgaggcgtcaactca

SEQ ID NO: 18203 - DNA, 320 bp, Zea mays
  unsure (1)..(320): unsure at all n locations
cgtgcagaacggngccgacaatggcatcgaccaagcatatcacctttgtctaattatgccagcctgattcaaccaagacgtagattgccacttctgatgcaactaatactactgtataattattttggtggggtgggcccacccccattgctgattactgatgggcaatgacgaatgtatgatgtcctatctacttgggacggtccgcgacattccaccttctccgtatccagcggtctagaaggagaaccgccgcataaagagcgtgcataacgtactgctgttattcgcccttccatcttcaccgataccaacggtca

SEQ ID NO: 18204 - DNA, 449 bp, Zea mays
  unsure (1)..(449): unsure at all n locations
agtcacctgctgcatgcaagcttaccanatntgaagcatgagcgcttcccctttgtcttggtcttgcttggctgccccttgcgaccctctatcgtcgtcttgaatcttttgatgatgagggccatctcctcatcattaagtccggccgcctcaatttgtgccaccttgctaggtagcgcctccttgcttcttgttgccttgagagcaaggagttgaggctcgttgattggaccattcaatgcgtcgtgcacgtatcttgcctccttgatcatcattcgcccgcttacgaattttccaaggacttcttcgggcgacaatttggtgtacctgggattctcatgaatattattcaccacatgaggatcaagaacgggtaaggaccttatcatcaatcggacgacgtcgtgggccgtccatcgcgtgcttccgtagctccttatntttgtgat

SEQ ID NO: 18205 - DNA, 331 bp, Zea mays
atttatgcatgattagaatttgtttctaatctataacttatatgacactcttcgttctactcctctatagtaaaaatgtagcacataaatatgtaggacatcttgctaataatagtatacaaatatatttcatataaaagtgaattagcttaattgatatatgtctaaattactattattagaatggaattcaattccagtgatccaaacggggcgttatagaagtttgaaatagtggatgaaatagaagatgtaataggggatctgctagagataccttataaactttgggtttaaatatgttgggcaggtactaaaagtgttcgatccg

SEQ ID NO: 18206 - DNA, 414 bp, Zea mays
  unsure (1)..(414): unsure at all n locations
agctttacttaaaaatacaagaactctcatgtatcacaagcctaccattggtcttcaagtggtccgccattgattntcaattggtatctntgagactacattggccatcatttacatgtcttctccaatatttggttagactatattttatatcttatacttcccatgttgctatactgcataaatgagttaatcatattccgttacctatgcataaaggaagttaatctaatcaaatcatgtcttgtacttctatttttcacatgctttttcctaactagaagatctttgttagtgggagtatttctttgtctctaaagggggagaaaactctttctaaaagaaaacactcatttaggggagtaataatgttgagtgcctcaattgataaatcttttatgaagacaagtctta

SEQ ID NO: 18207 - DNA, 414 bp, Zea mays
cgtcagaatatcctctgatgagacatatgtacaagatgtgccgtaacagactatgagcccttcttcgtcttttgctgctgaggtcttggagattttgaaggtaatgattgaacctttcccatttgcactgctaagtcctctgaggttgaatctgactagcctcttgcagtcaatggaaatcgcttctgctgccaagggaaaaaacggaggacagaagaagtggaatatgatgaatataatggaagctattgaacaaaccctgccctcatcttctgtggacaaagctactatacccaccaatgccgaagctaccgccgcatccgaagcccataatctcgcaaccaccctattggaaatcgatagacttatatcggacgtggttgtggagaaagatgtatccgcagtggcctctga

SEQ ID NO: 18208 - DNA, 465 bp, Zea mays
  unsure (1)..(465): unsure at all n locations
tgcaagctttgtatttgaatcataaccaagcaaaaacccttaaatagctttgggagcanaatttgagtgcatatctctcttaaccataatataaaattttctcccaaatactcaaaaataagaaacattgggtttgttacgggttaagagctcgtatgtcgtcttcttgaggaggcggtgaagatagagctagtttatggcatggcaagtcgtgttcacgacttctaaccaaaaccgctctggcatcttgtattatccaaacaatgttctcgtcgtgttgatgagcatcctgttcatcctgtccactacaccatttttctatggagtgtagggggtggagaactcatgcttgatgccttccttttcaaggtactcctccacctgtaggttcttgaactcggaatcatttgtaaggaaaatggaccttggtccatttgaactaaatggtttggtgtttgatgatca

SEQ ID NO: 18209 - DNA, 452 bp, Zea mays
cccctttaacctctatttatggttaagttccttaaccagggttccatttgcaaaaacattaaaacaatacaacttgtttgaaatatttgcctaataaatgcactctatgtgtgtcatacatatgcaatgccaatgcttatgatgccatgctcaagttttagttacagtaacaccatgggtgttacatccttccccccataaaagaatctcgtcccgagattcaaaatcctagagtaagtaatggtaaaggaaacacatcacatttttatttcctaagttttggtacaaagcaagggtgatgtgggggtcacttctctattacacagttatacaggctttacaatttacaagatgctaaaaagcctgtgaaattcttattcaagaagtcttgagtctaccaagtagcttcatctttagaatgttggctccactatatctgataatacttgaaa

SEQ ID NO: 18210 - DNA, 438 bp, Zea mays
  unsure (1)..(438): unsure at all n locations
agcttctccctgtttttntctctacactcgatggtgcatgctcagattttacatttacatatcttgagggaatttgctctcgtagagctgaataaaaaaggagaaattacaaactatggccccattaaaaacctttctccccctttggaaaggaaaagggtgccataagaaaaatgaaaaatattacatcaatttatacataatatcaccgaagctcatccgcattccaagatctaggaatgttgttgtcatccatgtcctttaatctgtaagaaccgggtcttgacgaagatactaccaaaaagggtccttcccacttcagctgaagcttgcctactgtgtcagggttggctactctccgaagcaccaaatgtccaggcttaatatttttcaaccgaactnttctgtcacgccattttatttgttcagctngatatt

SEQ ID NO: 18211 - DNA, 453 bp, Zea mays
tcatcttgagttggtggagatgctcgattggaagatggcggttgatcttgtgcttgtgtgggctcttccaattccttatgacacacatccctaatggacatgttccttatcgcgacgcatggagcctcttcatcatctagctcatcaagatcaacttgctccacttgggagccattaatctcatcaaacacaatgtcacaagaaacttcaactaatccagtggatttgttgaagactctatatgccattgtgtttgagtcatagctaagtaaaaagccttctacagccttatgagcaaatttagatttttcttcctcttttaacaagaataaaacatttgctaccaaagactctaaattatgaaacatttcgctgtgtatcggtaaggagttcgtaatacgtcttcttgaggattctgtgaaggtacagtcggttgatggagatcaagcaatg

SEQ ID NO: 18212 - DNA, 404 bp, Zea mays
  unsure (1)..(404): unsure at all n locations
agcttgatccatagtatatgtatcctacttatggcttgtntcgttagatcagaacggatcttctggaattgttccacctggaatgttaactctatttatattaaaactgatcacttggaatacttctaggtcttaatcctaactaaccgaacgggcacttagcgtggctccaaatctgatgcaagagttgagaaaccaaaccaatcacgctgtatttctcacgggtcccgatcgcctccgttcactatcgtccgtgttcgatccgatggccttcggggcgacgagggttttgcctcatgcagtacaaatagcgcgcctcatccgcgccgaccacgcgctgtttctcgctgttgacgccgccgtcgccgggagccgtacccctagagagcaccccagcccttatc

SEQ ID NO: 18213 - DNA, 415 bp, Zea mays
ctgtccatcgtatggtgcctaacggtccgattgatggtcgtacagtccatattcttgtgcggatggtctatccgtgctcaaagttgatcgtttagcgaagatggcagtgacaatcgtcctagatatgagtccatcgacataccaaaatatggctggggaaacccattcgttgtcgatgtgtttggcgcaattgttttagtgtccaatttatgtgataaattaagcatgtgagtttctcctaatgcatgtgtcatcttctctatatcccccatgatacttttaattcaattatctaaatgaaatttaatagattgaatatcatcgtctgacctggcatcacatatcgttgggaacttgtgatcatggctgacaataatcgacgttatttctctctcttctcttcgacgaccttcta

SEQ ID NO: 18214 - DNA, 453 bp, Zea mays
  unsure (1)..(453): unsure at all n locations
agcttcngcatggcagcagagaaagggaaccgtcttttatatgaaaaggcaaattagacctcgaaaaatactatagagttattgataaatgtaaagggcatgaatgtaattctacatgggttgcgtcccttgcctataaatagatgaacagtactagtactcccgtactgttcacgctgacttggcattcgttttttgcatcacgcctgtacctttactttccgtcaaaccgaaggtacatttataatttgttattctggatatggtaatgcaaataaaaataaagtgatgataatgtttatattatttttcgtatttcatatatgaattcttccttatcatttattgggcttacgaaggttttttccttcacagccttcgtccgaaattcattatatccgaagggacataatgtcttgaaagaacgaagtaattaatatctaacacttttat

SEQ ID NO: 18215 - DNA, 340 bp, Zea mays
  unsure (1)..(340): unsure at all n locations
gaacacattntatgactaacaaatgttcattttgagaaagacangatctgtagcgcatgccaagcatgaaagctatgtggcacacatcatccacataagaacataatgacgaccgacaggccactggagctcctacacatggatctatttggcccgatcgcttacataagcatcggcgggagtaagtactgtctagttattgtggatgattattctcgcttcacttgggtattctttctacaggaaaaatctcatacccaagagaccttaaagggattcttgagacgggctcaaaatgaagtcgccttatggatcaagaaaattagaagcgacaacggga

SEQ ID NO: 18216 - DNA, 444 bp, Zea mays
  unsure (1)..(444): unsure at all n locations
agcttctagtaagataactcctatgtagaccctaagtcttgcccatgtacaagtgcgtctccgatatggacactcagaaatccctctatgttgtctttgctatcgagattgtgcctaaactgatgtgagccatgtttccactagtatatgatggcgatcacaccacaaatatggttggtgcatctcataaggctacaagcccctctgagtataaaagttatgcttgcaagcactgagtgagaaataaagaggcatgcaaacctctcaaaatactaggtctaaacctagaacaagcataagtggtgatctaactagtccaagcacctcacagagtattaattntaatcatctattcttttcttaagcacatatggtggctacaacttgaggcattgttcacactccttattcaacacactccaaccatcacaaaatgtcacaccc

SEQ ID NO: 18217 - DNA, 419 bp, Zea mays
  unsure (1)..(419): unsure at all n locations
ctttaaactcagcttatgcaactgctgccagaaatgagatgtgatctgcgttcctctgtctgacactatcatctttggcacaccatgaagacaaacgatccgagacatatacaattctgccaatactgcactgctgtagttggtcttgacaggtatgaagtgggctgacttggtcaagcggtccactactacccagatggaatcgtagccggctcaagtgcgatgcaatccgactatgaaatccataccaatttcatcccatttccactgagggatctgcaacggttgcaccaatacggccggtctctggtgctctgccttaattcttcggcaactatcgcacatatccacatgctccacgatntccctcttcattccgtaccaccagaaattcttcttcagattctgatacatcttct

SEQ ID NO: 18218 - DNA, 399 bp, Zea mays
  unsure (1)..(399): unsure at all n locations
aaccttgggtgaagtttgacttganttgtacgatgtttgatacctaaaccccaaaaccctaatcttctaagtagtgtgtgtgacaccccaggtgtcagtttcgtgttacgtcgggagatttatcctaatctcggatgctcagtgaaaatttctattttctcactcgtgtatgtgtctgattatccaaatttctcatttcacatctcaccaaattcgaagttaatcagtctcacagaaggccaaatntggagcctgttaaaacttttgtttctcggcacgaatgcgaactcggtaatcattctcaatttagcgaactcgtctgaagctcatttaatcacacgctcgacagctgctagtcgagctgtgcctcgactcgatttctcgatgctcgatctatgt

SEQ ID NO: 18219 - DNA, 457 bp, Zea mays
tcccgcattagtgaccttaatctcagcttaagactccaagtcgttcccatgggatgcatagtctgtgtgtggcttcatgtgcgttcgggtcatacatttgcatattacattacatcattcattgcattcatacaaacatacattagacatttataggatcatcatcatcatgacatgaagcacgaacagaaacagtatagtttcggtgacaaagtgcttcattgaatgcaaataagcttcgtttcaaatatgaatacaggcattttatacaagataatgctttgatgtgtacgataagaacggaaggtgtttttcgccttctgctcaaaagacatgaatttcgtccacaacaaagcaattcgttcatgggtggaaaggtaaaattgtattacaaggtatggacaaatatacaccgcatcgagttcaactctcgattacattgtttgaaaaataatac

SEQ ID NO: 18220 - DNA, 404 bp, Zea mays
  unsure (1)..(404): unsure at all n locations
agcttcctggcagcagcctccgcctccaccaccgttgcaacaaggccagcagccagaaaggagccaatatgctccacaccaaagggacttcagagaacagtccgaagctcgcacagtcaacagcactgtgccagagtcaaagcacatctattgacaaatatcctaccttaatagcagtatttttcatttcagttntattttctgtaacaaaggacattgtttaggtttcatgtaaatagtttcgttgattcccacaaggaaaatatattttcttcacaggcttaagttgttgaagtttaaagatttgtgataacaaagaggaccttcgaattatcggaaattcttcgaaacaacaaaaagtcgttctaaagaacgcagagtaagtntgccgaagtcacaaaaag

SEQ ID NO: 18221 - DNA, 325 bp, Zea mays
taacatacgttcattttgtgaaatacaagacttgagcgcatgtctatcatgtaagctagcttgctccccccattcacacaataacttaatgacaacacacaggccactggaactactacacatggatgctattatgcccgatagcttacataagcatcatcgggagtaaatattggcttataattgtggatgattattctcccttgacttgggtattctttgtgtatgagaaatcacaaaccccatagaccttttaaagattcttgagaccggctcaaaatgacgtatggattaatgatcaagaaaattagaagcgaccacagga

SEQ ID NO: 18222 - DNA, 251 bp, Zea mays
  unsure (1)..(251): unsure at all n locations
ctctntatatgctatgactaatgatgtttcatagttatctcaaaccaagtcataggtatattgaaagggaattggagtcttcggcgaagacaaangcttccactccgtaactcatacttcgtcaacactccgagcaactctctcttctttgggggagaaatgagcatcaaagaaaaggacttcatccctcgggaagagagaaaagctcaaaagcttcgctttttggtataatcttaactcatttattttat

SEQ ID NO: 18223 - DNA, 281 bp, Zea mays
  unsure (1)..(281): unsure at all n locations
ttaagcaccgngctgcagctgtaaattctatccacatggctagtcgcatgcattctcttcatgtagtctacaataacaaggcgagtactctataaactatagatactgaccttacactcattaatgctattgatcatacttctttaaaacaggacactcatcgtaaaaacagtgtaccatttacatattgaaactgaagcagtatatctaagacttacagaaaacattggaatgggtgtcaatgatatacatttcccaatctttgacaaactgtttcatcc

SEQ ID NO: 18224 - DNA, 319 bp, Zea mays
  unsure (1)..(319): unsure at all n locations
cttcgtcatgatcatgctcctcattngtgtacgctttatcatgaatccgaagatacctgtccatataccatactnggagagcattgntaaattatgtttttgagaacctttggaggacgaaggcccncaacagtagcccctcatagtattaatntgtttaagataacgaattcagactacgacatggacgaaggccttaagccgaaggtccaataaaacacctttccttngctagaatagcaatagtcaatgacagacgggacccttcaatttggagcgcgtcgatcgtataaataagaactcaccctgaccacatttg

SEQ ID NO: 18225 - DNA, 278 bp, Zea mays
  unsure (1)..(278): unsure at all n locations
tgacttgactgttctatatatcgganaaagatggtggatgagattgatctcaatgatatacacgatgactctgtatcacanaatgttagaagatattcttaataatattagataacaagctagnggntgtttattatattctacactttatcttataaataattcttataaggtaaatattcgataatatcatgataattatctatatttgtgttcaatacgatatgtataattatatatatatatatgtgaatggagccttcatatcgaatttcaca

SEQ ID NO: 18226 - DNA, 368 bp, Zea mays
ctgcagctgacttcgatcgacaagctcactaagcctgcttctagaaattatcttcgaagaaaagtattatatcccaccattcagaataaatggcagaggcgtctaccgtaggtgatgtgaggggcgaactgaagctggaactgtccattcaacatgacatcgatgactcgaaatccctgtgacacacatgcgacaaaaaactgaaatgtccaatattgatgctgcaaccacctgctcgagcatgtcactgttcgagagcgcttagaaaaactttctgggaactcccaccaagagatttttaactttagtgtgatcctaggttgcaatatgtgatctattgctcactttgtagtatggctcacacggcg

SEQ ID NO: 18227 - DNA, 237 bp, Zea mays
  unsure (1)..(237): unsure at all n locations
gcatgtcaagcanggaaagcaagtggtgttcatcatncacacaagaacatcatgacgactgacaggtcactcgagcttctacacatggatcttttcggcccgattgctacataagcatcggcgggagtaagtactggctagttattatggatgactattctcgcttcacttgggtgttctttttgcaggannaatctcatacncaagaaaccttanagagattcttgagacgggctc

SEQ ID NO: 18228 - DNA, 398 bp, Zea mays
  unsure (1)..(398): unsure at all n locations
ctaagcttggtgctctatgctacgtaccgccactcntncncggccggngccctgtggatgtgccgaagcctcatcgcaccgcagctcgggattagcgataagctggattatgctacgtggctcgctcttgtaaataaagcctcgcgcttttgtcgattaattctgcagtagtccaaacaatcgactctatgcatgtgtagtccctaattctccaaacacaagaactaatagagggactaaaccagtttagtctctatgtccttcaagagctcttaaacgggactaaacaacaaaattntctctcatgcnctncagctgcatttggaatatttgaatatatttgtggctgttcttanttgatactcatttagaatatttgaaactcattngctcatttg

SEQ ID NO: 18229 - DNA, 198 bp, Zea mays
tgagcgttttttttttgaacctcttttctctgctaagcatgtgactcagggagctgcactcttattttgagcctatatcttcaactacaatccagactctcgggataagaatctgataccaatataatgggggtagaaaaacctaaatactacactctgctcccttactcagtgcatgtacagctgacgtgctttggt

SEQ ID NO: 18230 - DNA, 452 bp, Zea mays
  unsure (1)..(452): unsure at all n locations
gcagcttatgggtacagcttcgtcactgcttttgagaggatctntcgtatgtgtctctttntatnggatcttcggcgacgaagcatacccncaacagtatatatatagggcatgtataacgggagccctangcttnnncatagtaaaggaagcccaggccgaccaccctgcaacgtgtgtcaacccaacgcgccgactcaaccaggctgtcnggtgcgccactcgccccatgcgcgcanaaaggaatgcatgcatgagtcanacacgttcccttgcatgcgcgtaaattangaaagatatgtgtgacgaattctatctctaaatgtnttatttcctncatannattangatcgctgcaacagcagccatgcaactagaactcgtanggaccatttatgacatatactgatactanatatgccanactatagataantcatgcaatcggatac

SEQ ID NO: 18231 - DNA, 338 bp, Zea mays
  unsure (1)..(338): unsure at all n locations
caccaaaacgggattaatcttggcctttaaccccattgcctcaccacagtcttcaattaagaacaaatggcaataagatgtcatgagatgaacttggaataagttaccctctcatctgagtgcagtggaagtctttcatggtccaagtccaccttttcctttcaatccactttcgagactaaatcaagcatactcaagcaaatgggtagtctcacagggtcaagttgtaacacatctnnccctaaacatgtgcatcactttgcaacggacttgtgaggtcagggagtggttggcaacttgagcaccacatatagcaacaaatgccaatgagcctgatc

SEQ ID NO: 18232 - DNA, 196 bp, Zea mays
  unsure (1)..(196): unsure at all n locations
agtaccctaaccatgtgtataaactctcaaaggcgctntatgggctcacagcagccccaagaacatggtatgaatgcctaagagatttccttatcactaatggcttcaaagtcagcaaagccgatcctacactctntactaaaacaattgccaatgagttgtntgtatgtcaaattatattgatgatatcatattt

SEQ ID NO: 18233 - DNA, 143 bp, Zea mays
accagcttaactgaaatcaaatacacacctcttatccaggatttttttttatatttaaacagcgctattgtgaaaaggggtgaactacccaaatgaaatttgccatcacatccaacttagaagggtttaagatacttgatacg

SEQ ID NO: 18234 - DNA, 137 bp, Zea mays
  unsure (1)..(137): unsure at all n locations
caacggtgacatataatatcattatgaattatatacaaatgtgnggtttattggtatagtactacgttcgtgctgtgcacataatcatatttgatactcataaaaaatatatgttctatacacatttggatcttcta

SEQ ID NO: 18235 - DNA, 328 bp, Zea mays
  unsure (1)..(328): unsure at all n locations
ttaagtgatgaaggccccttgcacttgtatttgacagctcttttatttccctcattctaacaacttatgaccatggcacatgatttacgatttggaaagtaaccctgtgagtcaacccctaaatatataaaataaaaggaatgacggaactggtactaccaccacaaaccttttaattgcatgaaatgaagaaatacaatcctatctatccctacaaactcaacctagtgatagcgtcaccaccagagccaatagacaagnaccctangtactactaactagtttcttactacatatgtacccatctgatatatggatgatgtctatc

SEQ ID NO: 18236 - DNA, 229 bp, Zea mays
  unsure (1)..(229): unsure at all n locations
ctatctatgtatacttgtngcgtncangaagatgcgccactattcttatgcacacatggtcgcggtggtgacctcctttccgttaaggccattctgcacaactctaacgccacagacaacatcgctaagcggcccacatagcttgctgagtccaagtggacttcagcctcgcatgctgcaagagccngtctggctacttatcgggaatggaccttcctgacgctctggg

SEQ ID NO: 18237 - DNA, 267 bp, Zea mays
ccggactcaagcaccgagctcagctgaccgctatcatctaaaacatcccctgtttgtattgcaagtgcctacctctgcacgacgctaaggggtgtcttggtgccgactgtatcaggagatctggataaactcagtacagactattcggtaaatctactagaacatcgaccgttaccgcatgaactactcactcaccatcagaggacctatgtaaatgtgtgatgataatgataataactaatcaacgagctataatttatctgcgta

SEQ ID NO: 18238 - DNA, 181 bp, Zea mays
  unsure (1)..(181): unsure at all n locations
gctattntaaatactttcaaaattcctatttaccctataaatcatagaactatttttattaaatactatgataaataaggaatctatgaaaattggtttgacatttctaggatttttctacaatttatgacagatttccatagcttgctagataaagaaaagggaaataatgaacagtctc

SEQ ID NO: 18239 - DNA, 222 bp, Zea mays
tgtctcttttgtttgcccgaggcctttccacatacaaatgatcttggctgatagggcctccagggaagatcttccaatgtgcaaaccactcaaagtgagtttgttgtacaagctctcaaagaacttttggtgcatgcaatattgtgtactaagctactgagacaatcaacttcagtcaggagccaacactgcaacaaaaagcaactatcctgactcaagcca

SEQ ID NO: 18240 - DNA, 378 bp, Zea mays
  unsure (1)..(378): unsure at all n locations
caataggatatgtcaatctctacttatctcgatgaagaacgcagtctagaagatcacgatggaaaggtatacacaccatacanactttactctgcaaatctcgtggaaccatgttatataactcttatttaacaaggaagatgatgtccatacaacgataggacctacttactactataaaangtagggganngctgacctcttgttctgctttctatctcgacaatgcctcacactttggcaaaccatcaccctgtctctctactctttccgttcttgctcatccccagcgctcgatgcacgacttagcacctctgcctcagctgctccacgcaatatggcgcaccccatgccgcccaactgctcgagcacctctcg

SEQ ID NO: 18241 - DNA, 234 bp, Zea mays
ccatatttgggcatagtatggagacaacttatatcatactattcatatggtgcagtgtgtcattaaataaatgtgatgctcatgacataagatgcactcatcaactttctacatcttatattgtgcttatgaatcccgcctctggtaatatttcttccctcttcaaaataaagatatgcttaatgccaaatttcttccgctttgtcataatctcccaaaggattcaatatataa

SEQ ID NO: 18242 - DNA, 180 bp, Zea mays
  unsure (1)..(180): unsure at all n locations
tactactctctggtttatacaagtccaccccaattttcttaaggttatcattgcattcattggtactgcaatggcttgagcactanngaagcttatcctaattcctttcaaacaaaatgtntaactcgtttgtgatcgatctttntgcagctcctacaagatcactggaatagatagttc

SEQ ID NO: 18243 - DNA, 287 bp, Zea mays
agctgcttaacgctctttgaaacgataatgattgcgctatcaccttaagctatgacatctttttaaacgaccattcttggataacatattcctatacatattgctacgtacaatattcagcactcctaatctaaaaaggctttgatgactgcacctactctgtcaacattaactggactttgcagaaaccttcccgtggtgctcgtgatacataccggcactagatagtggtgcacaggctaggcatctgacagtatctgtgcattcctttctaagaggtagttatg

SEQ ID NO: 18244 - DNA, 236 bp, Zea mays
  unsure (1)..(236): unsure at all n locations
gtctgttatgctcaactcgcttttagctcaatatgtcttttacacgtgagattataaataaactctgaggtgaatggtggactagattgatgatgctaactcatcgctacttgaactatgtatgcccagctagaaaaacagaaatgccattgcagattgcatgactgngaactcgacagacactgtggtgtccacttcaagtaaactgtatcacaatctgattagtgacaatacat

SEQ ID NO: 18245 - DNA, 311 bp, Zea mays
  unsure (1)..(311): unsure at all n locations
acaatcactcacaacaatctactgccagtatacattccagagaacacacatgaggagataggttaatcacaattacatattatactactttaatgacattggntacttagtagtattagcagaaagcccaagataccattattcatttttggttccctaatatattactgcacttgctaactgttgattaagctaagctacttattagaccttagccaatntatttcactaacttagtgagatgtgactacttacttatatataacccgattatattatgcactattattattactcanntgtcagcaaac

SEQ ID NO: 18246 - DNA, 278 bp, Zea mays
agcacctgcagctgcagcttgtgcatcggccatttgagacacttatctgtgattagagttctgctaataggaatggtggtacatttatattaataatactgatacatatatattgtaactaagaagaatcccctaaatatacatctattaatatgtggactcactataatatatcgtatatttcgtcagccgtacattgcactcaaacaatcccgatacgctgctggcgtgtgctttactgcggctgctgataaagattgaaacatctatattcaagt

SEQ ID NO: 18247 - DNA, 114 bp, Zea mays
gactctatcatggaagtcatattttcccactatataagcttgacagaaccctaatgataaacataagttctgtagacactttactactaacatcagaatagtggttaatgactc

SEQ ID NO: 18248 - DNA, 103 bp, Zea mays
gcagaaaggggacttatatccaaatggatgacacatcagaccctaagtactatatgactttcgaccgcgctattaaatagagaaaagatggcttgttaatgag

SEQ ID NO: 18249 - DNA, 117 bp, Zea mays
tatagacagtctataatgttatagctagaacgaatatatagatgaacctacaaggtacaaatcaggactataccaagcactcaatcagaccacctctttagagaaaaacagggatag

SEQ ID NO: 18250 - DNA, 160 bp, Zea mays
  unsure (1)..(160): unsure at all n locations
gttctgtgaaccagcctctatgcggacttccacttaacatgctctacaattaatttatctctatctcatgctatatttagcgnagtgactattgacatttgtgttaataatcagggactgatactcacatatgcttacttagacaatgcactgtcacata

SEQ ID NO: 18251 - DNA, 340 bp, Zea mays
  unsure (1)..(340): unsure at all n locations
gctatcaatcttcaatgatctatatatccaagaatgacccaatgttgttctgaattattatgtcntacactcatatcatctctgtgaagatattgatgttgtangaaataataaattatcctgtgcggaataatcaggcctacaacatggaggatagccaaacgatggcaacatttattgctttaagtgcacgtatcttaacttatcatttcatgtgtcttgtgtagtcacatagaanacggaagcacttccatatgtttatattatgtaccattctttgagacgattctctcatatgtnatngcatattatcattctatatatgacntctacatcttta

SEQ ID NO: 18252 - DNA, 174 bp, Zea mays
  unsure (1)..(174): unsure at all n locations
ggagtccatcatccacacaagaacattatgacaaccgacaggccgcttgagctactccacatggatctattcngcccgattgctacataagcatcggcgggagtaagtattgtcttgtaatagtggatgattattctcgcttcacttgggtattctttttacagganaaatctc

SEQ ID NO: 18253 - DNA, 345 bp, Zea mays
  unsure (1)..(345): unsure at all n locations
ctattaagcatgcatctagaccggcctcttctttngcanaatcaactaaataaagtttgccgtctaatacacccttataagctagtgaaccatcacttcttctaaagacagacacatctacatcttgtaatagacagttataccccatgttgataattgactaacagatagcaaattataaccaagagactntactataaacacattagaaatngagtgctcatttgaaattgcaatttacctataccctttaccttgcctttgattccatcaccgaatataattgaatcttgngaatgcttattcttgacgtacgaggtgaacatcttcttctcccccgcatat

SEQ ID NO: 18254 - DNA, 338 bp, Zea mays
  unsure (1)..(338): unsure at all n locations
cgtaccttcatctcaaagtcgaaggttgctgtaacagtatattatacttggaaaacatgttagtcgtatctttgagtaccttccgaagacgaaggcccccaacactatagatcttatgatccacacatttntatgggtatatatggacatatgttgcgcctctggtaaaaattcacgatgtttaggctatttatgtattattaaattcttggtcgagaaaatcatcaaaatacaattaaatccattaaatattgtagcgtcgaccgaaaatggcaaataagttaccaatactaatatagagtctatantaagataaccttaagntctcacatggagat

SEQ ID NO: 18255 - DNA, 348 bp, Zea mays
tacttcataaccttcactgatgattttagtagatatgggtatgtctacttaatgaaacacaagtctgaattcttagaatagttcaaagagtttcacaatgaagtataaaatcagcgctgccagaaaattatagcactgcgatcagatcgtggtggtgatatctgagcatgagttagcatcatctaagagttgtgaatgttcacactacgccgctgaacgcctagaggaagggtgttaacgacgaatcgacttatggattggtcgacaatgataccagccgactaccttgtcgttgggatacctttaacacagcttacctaataggacgctagtcgtagtaaacatata

SEQ ID NO: 18256 - DNA, 384 bp, Zea mays
  unsure (1)..(384): unsure at all n locations
gcgccgcacttactacagagtgcgaagctgccacatacaatatcagaggagcccctggcgtgggtnnggagtagcgtgntagatctattatgtattgcttcagctcttcgaaggctgtctgctgagctgatccccattgaaagacttcgaccgacttcagcacttcaaagaatggtaaatntctctctactgatctagatatgaatcgattcanagatgccagtcttcctgtcagccattgagcccncttctttgtgcttggcggctacatccgaagaatagcttcgattttgntcggattagcttcgatccctttcgttgaaactagacaaccaaggaagtttcccttctttactccgaagacacattnttctggatttaatt

SEQ ID NO: 18257 - DNA, 355 bp, Zea mays
ctcagctgctgtaaataccatcatatatatctgctaaaatgatttatcaacctatctaaccaagtggtaataatatgatatttctatatcacgtaataaaataccatcatactatgttgtgtgagtaattgctatccatgttgtgatgtacactacacagtacagtactgaagcagtgtcctgaattaagttagcagtggcctggcatctttaccactgtctatatatatactgtatttatgaccacagtacctgtgattcttgcctgttacatgatttggagactgtatgttatgggctggatgaatccatatatatcacttatatactgtatacatctgaaacatatgtatag

SEQ ID NO: 18258 - DNA, 350 bp, Zea mays
  unsure (1)..(350): unsure at all n locations
ctgcagcttactctccagacttcccgctttctacctgttatcttttcgttggaatcatgctattaccttattgtctcttgatggggattgttggttctaattaatggtgatgatgatgctgatnctaagacatccgtgaagcccagactccagaaaccctgacacagtcgttgtgagcagtgtcttgactatcttgctatcttcttatcactccgttccatttccatgtacacttgttctgctgtacattggtgaatatgtactttcttgtacttacagactgaaattttgcatgttctttattagttctggcttaggtcacgttatcttcgagctgttgtacgcgaatt

SEQ ID NO: 18259 - DNA, 350 bp, Zea mays
  unsure (1)..(350): unsure at all n locations
ctcagctcgatatacgacttatttcttcggagtcagcaagctctcttcttatatctctcacaaagacaagcccgaaatatctgccctctattgcaagatgaantctttatactccattaccaacactgcatggttggcgcacggtcatctcggaacttacaccatatcactcgaactttactgcgcagatcatagatacccccaaactcctgaatctcttgtctagcttgacatgttcaaaaagccagtcatctctcaaaagttacttgagcccacacttctatttaactttccaatgtgcaacgcactcaacaactaaattaaacaacagtctgtgcccagcaaagtgg

SEQ ID NO: 18260 - DNA, 81 bp, Zea mays
ctacacatttggtttgacgtgaacttaatgcatacctcgttctaggaagttgtgagctctcttgcatgcaccaccaatctg

SEQ ID NO: 18261 - DNA, 175 bp, Zea mays
gcgtctgaaattcgcaggttatgccaagcattgagccaaatgtcaaggcatgtgcaaatgtcaaaatacactttctacacgtatccctctgcatgaagtggcttgttgtgccgtcacgccagactgatgtgagactggaattttatgatggcaccttacgtatcgtcgaaaattt

SEQ ID NO: 18262 - DNA, 276 bp, Zea mays
  unsure (1)..(276): unsure at all n locations
ctgagttgtccattntgatgaccacatcatctacatagggcttcacacancttgcccagtgatcggctaagcatgtntgaatgactctctgantagtcgctccagcgttnttgaggccgaacggcatggatgtatagcagaaagcaccgaacggagtgatgaaccgctgtttttcctcgtcttcttttgccagctaatctgatgatatccggagtagcaatccaggagagacagcacagaacatccagcggtggaatctaccacctgatctatcct

SEQ ID NO: 18263 - DNA, 213 bp, Zea mays
  unsure (1)..(213): unsure at all n locations
ctctatacttcattccaagacacatacatagagatcanatcgtctcccaagtctggaatctctccanacanattagtgactagagagagagagactntngtgttcttttgagctcttgcgcttggatcactnttcttcttcctctattcttngttccaactcacttgtaatcaaagcaagagacaccaagttgtggtggtccttgtagtggac

SEQ ID NO: 18264 - DNA, 218 bp, Zea mays
taactagctaattcgactgaaggcttaggtatcagtaatggtgcgtttcttaagctaagatgagcagttgattaaacaatgttttgtttacgactgcctgctgaggctatcttacagcctaaccaaagattgattaaggtccaggttgacactcgtaaggatgatagacaagctgaaaacaaatattttgtacaaaaaaaaacggtatcagtaactgg

SEQ ID NO: 18265 - DNA, 261 bp, Zea mays
  unsure (1)..(261): unsure at all n locations
ccggatctaagcactgagctgcgctgngtgctatgaggacactactaatgctggctctgcccttcagcggaacgctgcactgatttgaatggcaaccaacccttgcgcgccggccgtcacaatttatgttgacagtatatcgattctgcattctcgctatatactattagcgacaccagcgttaaggcccataactgctaaaaaataccccccctgcactatcgatctgtgaatcatagcatttgcgactgagcctacaac

SEQ ID NO: 18266 - DNA, 244 bp, Zea mays
  unsure (1)..(244): unsure at all n locations
tttagtagatgacgtnctagtgctgctgaangggaaatgacanntaaccatttctctaatngattctggtgctcgatggccattacaatcttatggactaactagttngtctagtctttgattcataggtgcataagtccacttcaactcagtntaagtaagaaacacctcataaccaaccacatangtggtaaacttggaanatatagagaacacctgatntaacacttttggatagtacata

SEQ ID NO: 18267 - DNA, 226 bp, Zea mays
  unsure (1)..(226): unsure at all n locations
tgaaaactatatcaaacaccaaacaccaccaatntataaaacaccaccaatttaaaattttatatctacaaatggcttntcaaagtggtntggttatttggtccaaaaataggaagtaagtgaattatggagntagggggaagcttaagtccataatatcaaattgtggggacaatcatgcatcttatcaagtagattgcatattntcactcaaatacttgtatta

SEQ ID NO: 18268 - DNA, 393 bp, Zea mays
  unsure (1)..(393): unsure at all n locations
tccggatcttagcacgcgctgcactcgatcaacactaaaatgcttatctatgtcacgtgtgaattataggccgtgatctacagtggctggcataatatgacaatatcttatgtcaccttctgtatgcatcgatactcggatcaatcttgcaagcagngtattatgatctaatatcaatcataagtgaatataanaatgagtgtattatattattgcttgatctcatattcgataatttattgacataagtcatacaagtaacttcatgatcgcttacctgtcgagtatatctaagatatgctagacaagctaatacatatggctgttatataatgaacatccacaccctcttgaatcatgataacatgtataactacatatggtgatccaaga

SEQ ID NO: 18269 - DNA, 262 bp, Zea mays
atgtttatccacacaacactagacactaccagtctatgtatctggcaaactcacagtctgcatttttgatgtgcagagctctacaaagcatgtgacatatcacatattgagccagaaccacattctttcagcattcagaatttcacttacagaatcgattaaaactattataaacacctactactatagatcaacatttatgctagatgattgtccagtcatcgcatgcagcgagctaaagccgagggattgtggggaactg

SEQ ID NO: 18270 - DNA, 156 bp, Zea mays
gggtgcattatttgattaagaagatcaacatggctaacgtcgtgaccttggtgactcgtttcttgtttgatgactgacacgtgatgctgttactaacacaagttctgtattcactcgcacctggctcttgatggcgagattgttgccacataaatg

SEQ ID NO: 18271 - DNA, 154 bp, Zea mays
ttgttgcagtagggtcggcacacagcctgccttatgcagccaccaaccagaggttcatcgaccccgccgcatccctcatgagcacatacctgtttgtctgcataccctgtgaacttctattgatacctccatgcccaaactgcaggggatacgt

SEQ ID NO: 18272 - DNA, 285 bp, Zea mays
acgagctgcactagtagaggatgggctgacctgctttttttctttatctggggacccggtacagcaaccgtggtggcctgcgaattgtccgatgaaaactctcgtaaacgtaaagaagtgaaaaccgttgcctacggggtgtgagacacaataaaaacggtgttatgtcatattgccttttaatgtaattaccaccgtggtgctaataaataatcctacccttgattatgacaacggtatagcacgtatagcgaacccagagaggcgaacctaaccgagtttgat

SEQ ID NO: 18273 - DNA, 218 bp, Zea mays
  unsure (1)..(218): unsure at all n locations
gcaagaacatagaatgatgtcnagggacagcagtgtattgagcacgtataacgtactaacaataatcccctttactcattaaacatatgcaccacaagcattggatgaaaattaagatacatacacgccgaagatcaatacttgcttttgtaccttntncctggtgtggagtcttttcatcttgaggggtaatctctcatgagcttcttcacacttat

SEQ ID NO: 18274 - DNA, 51 bp, Zea mays
taacacggctgcactgcatttctgcgcacctcaaaaactattttctgctta

SEQ ID NO: 18275 - DNA, 191 bp, Zea mays
  unsure (1)..(191): unsure at all n locations
ctactctactctccctgaacgaacttgtttcctgngctgaccaaaatggttctggcagctactggactgtgtcgccgaaacaactctgcgcgatggaacaggtcagagtaggacttgtactactaatgtcagaataaacaccctgctttgtactagactgtgcacttctgtgtgtgcagtatgtgaacgct

SEQ ID NO: 18276 - DNA, 384 bp, Zea mays
  unsure (1)..(384): unsure at all n locations
attatagagcatgctacgagcanagttaagattttcattttcgagctcatgctcggcaactttagcatntaatngagctatgtgatcnatttgtttcttattcatgacaagatgatcatcaatagctncaacattaacatctctacatctagtgcanatggaagtatgctcgacagtatatgtagagggtttgcaagtatttaattcctctatcttagcatntagaataacattctcatctctaagacaagaaatagaatcatngcacacattcaatnnttcaatcttagagagtacactagcattctcagttctaagacttgacatagaatcatgacanatgctaagctccttagttaagtnntcacatgtatctacttcctg

SEQ ID NO: 18277 - DNA, 77 bp, Zea mays
cttatgcccctgcgcaactattcacccgagtctctgaccattcaaaaaaacccctaacttcttctttccttctcccg

SEQ ID NO: 18278 - DNA, 410 bp, Zea mays
  unsure (1)..(410): unsure at all n locations
ccggatcttaagcacctgggctgcagcttcggcacacaagctcttcgcgcactcagagttagtcctagcttcgagaagaatgggatcaccagaaattatgctantgtgcgaaataggcccctacagatgtgcaatacctcaaacaaagaacgaaagcgacccgcaagcaccaacagtctgacctgttctgtactacctactacaaaatgtggtacatctgactttgtgttcgtagcagccagctctggcacagtcactcgcgcatcactactatacagcgtgcaaggacctcaatataccacaactaggagatcaactcgcgcacagtctgccagacaaccatatgaaaatcacttgactttactctgcttctttagagacacatgataagctttgcttaatctgaactc

SEQ ID NO: 18279 - DNA, 143 bp, Zea mays
  unsure (1)..(143): unsure at all n locations
tttgtaaaaatacaattataacccatatgacataactggcttgcagaaagcanattgtaaccaagcgaatctaccaacaagacattatagatggaatgctcggtagtaatctctatcttatctaacccctttaccttgcattg

SEQ ID NO: 18280 - DNA, 266 bp, Zea mays
ccttgttcatgccggagaagtatatcaattactatggttacatacgcttctacaacaggctatgtgtatgatgtaaaacaaattattggaagagtccccatgattcctgtgggcgtttcttacatggacatcgacctacacaaacccggctacttctggttaacttgacgatgtctaggatgatggaaaatgtgttctctgaagacatttaccgttcaaatttgctactcttaacaagtttaagaatagtgtgtgaattaaagtgt

SEQ ID NO: 18281 - DNA, 422 bp, Zea mays
actagctctgaagtctcaactgtaaagttggtgtttcatagtccttttcaatgctggcttaccatttttctttccaaatatgtcgaggcaaactgattgtgggacttgttcaggcatagtaaaacaagcacataaaatgtaatcgtaaagccttctcctccgacatatttccttagattaatggttgcggacaacgtatgaagaatacctcatgattcttgataatgacaacgataatataaaatgtacgatataaaatacatgacaatattttatataacataacaaactcgtgatacaggtccttatcgatggatacaacacgtaccaaaggatgcagcactgacagcggatcttactttttaccgaccagcatcaaatctttgccttcatatatatttttacttcaggcaagcttcttt

SEQ ID NO: 18282 - DNA, 234 bp, Zea mays
  unsure (1)..(234): unsure at all n locations
gatatgacccatctagagtctgattgacctgtagagtcatgaataagctaccanagttagttaaacagcagttaccttattcaaatcaaacctgacccgtacagtctttgagatttttcttataccgaatattgcaacatcattcaggtatcaacatctaggatacaatgcttgaatttgctccagcaatagaaattgtattccgaaaataggtatctaatgacatgtgatcat

SEQ ID NO: 18283 - DNA, 326 bp, Zea mays
gttcatttccttgtccgacggatcgtgtaggatcaagcatgcgcaaacttgtaattttttttcgcacgaggtgaacagattgcttgtttggaccccagaactgcctgagttaatactagcatctattgatataactattcaactgaaggattagcgacaatacttctgatatgatgtctcgattcagcttgagcgccactgagttggtcaaaaaatttggcataaagaacggcgagcttgacctcgaatatattatctcgctgagcgacgacatggacaagatctaattctgctaaatctataaactctctcactcagcacttcga

SEQ ID NO: 18284 - DNA, 249 bp, Zea mays
  unsure (1)..(249): unsure at all n locations
cccggcttgtatagttgggtgagacttctttcttacaaaagntctaggtggttgagtacagagcaaagatgccagaacagatcacactaagaactaaaactggatcatcttaaacaagagccgaaaataggaaaatcatataggtgtagcaccctgggggcacgaattgtgtcgtgagacggcagtaccaagagcgcaactcctcttgttgaacgactgcgtggaccgatgcgggcacagaacgacgcg

SEQ ID NO: 18285 - DNA, 86 bp, Zea mays
gttttttcatttccgggcggtacttgtaaatttcagatactgcctctacctcctaagcatgatatactttttagaaggacctaatt

SEQ ID NO: 18286 - DNA, 131 bp, Zea mays
cctttaccgtaagtagctacgcgcaaaatcctctcaaaatgtcgagacaactgcgaccctcgggtcacctgaattgccgccacgaccacgagatcctaaggagcgacgctggccctgcgtagcttgctgta

SEQ ID NO: 18287 - DNA, 263 bp, Zea mays
  unsure (1)..(263): unsure at all n locations
ctaagctatgccccagaactgctatttgttaaggaggctccaggctattttatatgggatatnnataccgggggatccggccagattgagatcatgctacgacccttgtttcctctgctttatgttaaaggagtttactttagctctcccatttaaagcctanagaattctgtgatcaagaacccagtctttaacctgatgctctatgttaacacaatcagcaagagtgcaatatgtgtggcaacacacggctccaaattgtg

SEQ ID NO: 18288 - DNA, 412 bp, Zea mays
  unsure (1)..(412): unsure at all n locations
agtcctacacgaatcaacacgatcagcgcgaattcttgtgccgaggtcaccggtggcgaagtgggcagaacctgagatctttctgcgtactgtaccatgggattcttatatatagtacgtgactaagcgcttgctaggcttgatctctgatntttataacaactcgtaatcacctgaacaacgtgtggtcttagtncactttatcttgtatacaaccttgtcattacttactcatcgacttgaatcggctaagtcataaactactgagatcattcagtttactgtgatgcagccgacttaacatttactcattctggcaactaggttatcctatcaatcgtctctacttcttcaattatgggacctagaatcctgaattaaattaactcaagcgctttactcagagcatggc

SEQ ID NO: 18289 - DNA, 255 bp, Zea mays
taaatttctattgctatggttcaagcggaaggccatctacctcttactaaactctgaaatgactgttgatccaattatgtgagaattatattggctctacagctactggaaagttagagatataccaaaatcagagttatgatggagtgagattctagatccagtaacactcaaaggcctcttaccaacaagcactaacattacagttgataagatcaccatagacccatgacatggcattactaacgaggagcg

SEQ ID NO: 18290 - DNA, 247 bp, Zea mays
  unsure (1)..(247): unsure at all n locations
atacacccttaatagctagtgaaccatcacttcttctaaagacagacacatctacattggtaaatagacagntataccccatggtgcataattgactaacagataacacattatatccgagagactctactataaacacattatatatggagtgctcattagaaaattgcaatttaccttacccttttacctttgcttgattccatcaccgaatataattgaatcttgggaatcctattcttgacat

SEQ ID NO: 18291 - DNA, 220 bp, Zea mays
accgattttcgaccactgttaacaagctgcaaaattcattgtttgtatgtgccaccgcaccggcacattgaagggccgctggtggatgttactaaaatgaagaggaattagagctatctccttgcccttgctcgagtgagtgattaattgaaactgaaagctcgcttattgcaaattatagacctattagttgcgttgagtggagcagactatatctgag

SEQ ID NO: 18292 - DNA, 162 bp, Zea mays
ctctacgttaataaacactttgctcttttatttgggacgaagtatactctacggaagaagtcttggctttatattggatatcaaccatgtaatgaaaatccagataacaagaaacagtagatgttagcttcatgttggctattttgtaggtaacaaaaaaga

SEQ ID NO: 18293 - DNA, 380 bp, Zea mays
ggatcttagcaccgagctgcagctctctctggaggcgtgaagactaagggggattgctactaattcaagtatccctcaccggtacgtaaattatgatccagaaggcaacaatcaacataaaggacccattgtacagtcgttcaacttcctagagcaagcggtttaacctctttaacgcctgacatactttttaatacgacaatctgagtaccccatgtgttgccgtcaggattgctaaaaaaagagaaacatcaccaactaaaaccacaatatctctactaacttggatgaagatacctggggctgatgagcacttgaagtgagtaactgtgtatgggtgtggtaaactccactctcttgtttcttttatcatacttttt

SEQ ID NO: 18294 - DNA, 162 bp, Zea mays
  unsure (1)..(162): unsure at all n locations
caagttggtgcccatcatccacacaagaacatcatgatgaccgacatgccgcttgagctacttcacatggatctattcngcccgattgcttacataagcatcgacgggagtaagtattggcttgtaataatggatgaatactctcgcttcacttgagtattc

SEQ ID NO: 18295 - DNA, 325 bp, Zea mays
  unsure (1)..(325): unsure at all n locations
acacaagaacatatgacaccgacggccgttgactactcacatggtctatttgacctgatgttacatagcatcggtggagaagtattgctgtatagtggtgatattctccttacttggtgtctttgcagaaatctaaccagaacctaaaggtctgaacgctanatagtcgctaagacaanataaacatacgacgatcaacttaatgactcttgggagatactgattttctccccacatggttgagaatcattcgctgagatgctgacaataacgttgtagcgaaccgtcctacgtttccgctgactttatcacgaagcatttttag

SEQ ID NO: 18296 - DNA, 404 bp, Zea mays
  unsure (1)..(404): unsure at all n locations
tgaatgggagaaaataaatagccaaaaagaaccaaaagatttggcatgtacggttgaggaatatgagaaacttcataaaagttcaacgcttgtccaanatgagagatgttagtgaagatgaatttcagcctgaacaagagccaaccaatgaggaaaacattcactttgagtctgaccaggagaatgctgccncaatttaaccaatgaggaagacattgactttgagtataccggccccattactgcacatgcatgnngtgcttatttattttgctntcgcttatgacttagaactacattatctttgtgcctctactgccagccagttngtaacttttgtgtgtgggtagtcccatgagtagtcggcctgacttgtgngctgttgtatcacagtgacattattc

SEQ ID NO: 18297 - DNA, 172 bp, Zea mays
  unsure (1)..(172): unsure at all n locations
tgcagctggtgctactgtctgcttcagggctctngacgagttctctgcccgaggtcccaagaaccatgaaaactgtcaactcacgtttgttatttttttctgaacctgggtcatagcgagaagctgtacgctggactgatgagacttgccatagcatagcaatcataagctc

SEQ ID NO: 18298 - DNA, 334 bp, Zea mays
  unsure (1)..(334): unsure at all n locations
tcattatattccgctaacatagacctatccatatcaatgagaggnctattctgtccttcaacaataccattttgctccggagtatatttggaagagaattcatgtgtaatacccttgccatcacaatattcatcaattctttgcattttgaattccgaaccattatcacttctaactttcttgatatcaaaatcaaattgattttgagccaatataacagatgacttgaatgttacgaacacattagatntatctcgatgaanattaacccacgtgaatctagaataataatccacaatcacaagacaatatgaataccaccaatactcacaaa

SEQ ID NO: 18299 - DNA, 159 bp, Zea mays
  unsure (1)..(159): unsure at all n locations
tctggcagcttcctgaactccatgaatagcaatagggtccctgatccgaaggtatcttcatgcanagatatgctggatgaagaattgcttcgaaagcattgagtggtccgcggccaatgatagcattgtaaggatactccatgtcgacaatgtcaaaca

SEQ ID NO: 18300 - DNA, 272 bp, Zea mays
  unsure (1)..(272): unsure at all n locations
tgaacaactgaagacactatngaccactgctncggtattagctcaaccggacatcactaaacctttngacgtatattgtgatgcatcnggcagngggctctgctgtgtactgatgcaagagggccgagtgattgcgtatgcttcaatgcagttgcgccggcatgaggagcactatccaactcatgatctggagctagccgctgtggttcatgccctatagatttggcgtcactatctgctgggaaatatctgtcatatatatacagatcata

SEQ ID NO: 18301 - DNA, 393 bp, Zea mays
  unsure (1)..(393): unsure at all n locations
tgcagctatgagatcttatcccacatgggctagtcagcggtgccagagccaacctatgttagtcttagcaattaagcatgtgtcgagctcagctctatcaaaatctactaagtatagctgaccttctaacacacnccttaatggctattgatcatcacttcttctaaagacagtgacacctatatcagtgaagagacanngtgtacccattntgcataattgagatacagaaagcanattggtatctaatgaatctacaagaaaaacatttggaatagaatggcaggagattagcaatttaccaagacctttgacaagcctgattccatccccgaatgtgatactcgtggagatcctggtttctcatngaggagaacatctttctccctgcat

SEQ ID NO: 18302 - DNA, 70 bp, Zea mays
ggaagcactcatcacagcaagaatatgatgaccacatcaagaccactggagcttcttcatatggatcttt

SEQ ID NO: 18303 - DNA, 287 bp, Zea mays
  unsure (1)..(287): unsure at all n locations
agtgatgatgactgcatatgctatgcctcgcgtactgtcttatgaacgaggctagacagagctatcgcttcaggatggcgtcgcgaaatggaatgccagaactaagagcgcaagtgctatagtgaatcctttaattgaataatcgtgaccaatatgactgtaaacatgaattagtggactgtgngttatcaggcgaacctgatgcacagctcgagccaaaagaagctacgattgagcacgtgctccgcttgttcatcagcgaaaaaccacctgaaagactcactgtc

SEQ ID NO: 18304 - DNA, 226 bp, Zea mays
tatgctactaagaaagccttgtgatgcacaggactcaagatagaaaatgaattatattgaagcttggaaagaaataaagatatgagctgctttgaaaaaagatttgtcttcaacatggaggtcattgcagatctatactgaattgcagagaacaggactctctgaataaaactcacaaaaagaaatttgtcaactgaccgagcaaagtcattgaaatctgagacta

SEQ ID NO: 18305 - DNA, 477 bp, Zea mays
  unsure (1)..(477): unsure at all n locations
taaatccctatattcccataccagcaaccaaatggcactggaaagctgattatctaatcattctacataataataccttaaccacagagaacacagagcagaacacccttcanatcataaaatcaggagatcatttacttatactgacattctcttatagaatttccactcaatcatcctacataataataaattaacaacagagaacacagagcggaacacccttcaaagtcataaatcaggagaatcattacttatactgacatgttcttataagaaatntccagtcaccttgctatgaccttatgaagtctgcttgcaacatcctagcacaagagtacccgctgcaacactataacanactgcttattgatccaaaagtaaacaaagtcacaataaaatggtctcatattganaaatggacaagttagtcccatacaaanaaatgatgattgatgtggacaaacaattaaattg

SEQ ID NO: 18306 - DNA, 306 bp, Zea mays
  unsure (1)..(306): unsure at all n locations
agctntccatggtgtgctngaacattccaatccgagcccgcatctgaccgtggtgaccgtcacaagntggtgttcttctgcagtccgaatccagcatgttcaaatacttttccctttcggtcttcttcctgattcctaagcaaaacaagagtgcacgggtctccatggtctaaatatgatggacatgaactcaagagtgtaatcacctgatgggtgagttgacgagcacgagcgcgagtaatgggaccagaaattggtacttgtattggtatacatgcatcagtaggggggatgtcttcatcattc

SEQ ID NO: 18307 - DNA, 463 bp, Zea mays
  unsure (1)..(463): unsure at all n locations
tctacctacctnccggcagacagatatctctntattatcccggagacagtacaaaaaatcttcttccccactgccattgaacactaatgcctccttcgggtatttcaatttttgggcataatgttgagcttctcgttcttcttcctgagaaagtccctttctcgaagcatgacagatgatgtaatcaatgctctcttttaaagctttgggagcaggagtggcaaccttttcaaacgaaaattgctctctggccttttcttctgttgcattntcttcaaattccgcaggcttcgtctcagcaggcactganggccccacctcggttntagcctatgttggtgtagcttcaacatctatttgcttagtatcagctctgggttgcattttatcagcttcggcaactttccctttgggagcgagacttatggagtcggntgtttcagcacatctaataccattacca

SEQ ID NO: 18308 - DNA, 380 bp, Zea mays
atgaactgtacctgtgtcttgaatagttgattctgagtcatggctcttcctttgtgtctagactactgtgtaagaatcaagagtcactgagtctttcgcctgagcgagaagatgtttagtgggaatgaatagtttgttggacacaaaaagtgactgaatgcaggggaatcactgtgcccatatttcctacattgtggaaagtgcgaaaatagtgttgtattccttctgatgtgagtgcattcgtattggttctgtttcttgcaactactacgcacatatccagggtctcggaaaggatgccagcggtatcaaggaaccagtcctggcaaaatccgtcgacgccagggctggactgggaagtcagcagcggaagcctgatc

SEQ ID NO: 18309 - DNA, 417 bp, Zea mays
  unsure (1)..(417): unsure at all n locations
ctaagcttcatactatctctggagcttcgntcttctactctgcagctgcagcttctgcttggtcaatctgtacgaaagtattataagccaaattcaaaaatttaaaggaaaaggtaagcctaaggtatgatttttgtaccaacttgaggtggcttcgagcttcgtcaccaactttgctcccaccaccctttgtccatactaactttataaatctaatttgcatactccgagccagattgggaatattatctatgtcttgctgtgatacgcttgaagtgggtctattaacaatctttgtcgtgtcacagccagacttcaaaaagcaactagtgtgccccgagaagctgccagngcacagaagtcgctatgcccagctataacttcgtcaagatcattaatttcacctttcatgtgctc

SEQ ID NO: 18310 - DNA, 318 bp, Zea mays
agcttaacaagcgtacaccaatctgtccgcgcaaagaccggctacatgcgtacccgactaacacaacaaatacaccagacaacgtacataacgccttcgtgagcatagccgaatgtgcgaaggcacacaacctcatcatacaagccattacatatgtacaagcgagggcatcacaccttacatcggctcaaccttcggaataattcccatctccctatagttaaacaacattatcctcagctcctcacccgcaaaaagacttcgcagctccccctcacctgaactcacagcggccggcaaggacaacagttcttgcct

SEQ ID NO: 18311 - DNA, 473 bp, Zea mays
  unsure (1)..(473): unsure at all n locations
agcttcctaagcttcagttagaaagacacattnttgtcatctctagaggaaaaaatgtctcaagacaagaagattgttgctgagacgaagctaactgaagaatgtataagggatagggtacttagggttaagagggaacttatggtttgagaatctttttcatgagtgagaatgtataagggctagggtacctctcttattatgatcaatacttagcttagccatgattccaaagcttttagtgccttccctttccaatttgacatattggataatagaccataggtgtgttcattangccagggtcttgggtaacacgtggggtgttacagttagtgtcgtcgaagtgtggtggcctatgggtatccatcccttcctctaaaaatcgtcgactcttttagcagtgaagctaaagtgtttcanatgagccaaatcaggctctaataccaatngaaagaaatatgtgacaccta

SEQ ID NO: 18312 - DNA, 487 bp, Zea mays
  unsure (1)..(487): unsure at all n locations
ngaagccatggtaagtagcataggcaagtaatatacgaatggactcatgcctagctacgggtgcataggtttcaccgaaatccaaaccttcgacttgtgaataacccgtggccacaagtcaggctttgttccttgtcaccacaccatgctcatcttgcttgttgcggaagacccacttggttcctacaacgttttggttaggacgtggaactaaatgccatacctcattccttgtgaagttgttgagttcctcttgcattgccaacacccaatctgaatctcttaatgcatcttccaccctgtatggctcaatagaagacacaaaggagtaatgttcacaaaaatgagcaacacgagaatgagtggttacccncttttgaatatcgccaaggatggtgttcacggngtgaatctcgtgtattgcttggtggactctngngtgtggtggtctggaccctcgtcatcttccttggcttgatcattggca

SEQ ID NO: 18313 - DNA, 419 bp, Zea mays
  unsure (1)..(419): unsure at all n locations
agcttgtaggcaacaagaaagtgaaacaaatcatgggagagatgggtaactcacaactcttagactgggttgaaagaaaggggaggcttttaaaggataagttcaacgtaagcatttatgtaaagatacagatattacaagggttaaaggcaataacagacaagggtgtaagggaagaggtgaaagtacaggggaaccaacggtatgagtataataaataatgaagctaaggccaggctggcgcgtggcaaatatgaggttacgagaaaaaggcgggataagtagaataccactcccgaaacgagatgggaagttggagattttagataacagacataatgtcatcacaaggtangatagagtgatgagaannggtaaggagatgaccaacaaaacacaacaaaggatagagtttaaac

SEQ ID NO: 18314 - DNA, 512 bp, Zea mays
  unsure (1)..(512): unsure at all n locations
cgaagccatggtaagtagcatacgcaagtaatatatgaattgacttaagcctagctacgggtgcataggtttcaccgaaatccacaccttcaacttgtgaatagcccttggccacaagtcaggctntgttccttatcaccacaccatgctcatcttgcttgttgcggaaaacccacttggttcctacaacattttagttatgacatggaaccaaatgccatacctcattccttgagaaagttgtgagtttcttttgcattgccaatacccaatccgaatctcttaatgcatcttccaccctgtatggctcaatagaagacacaaaagagtaatgttcacaaaaatgagcgactcgagatcgagttgttacccnncttatgaatgtcgcgatgatggagttcacggtgtgatctctttgaatcgcttgatggactcttacgtgtggcggactttggcccctgaccncttgatcatcttccttggcatgattaatggcatctcccccttcatca

SEQ ID NO: 18315 - DNA, 225 bp, Zea mays
  unsure (1)..(225): unsure at all n locations
agcttcgcccgactgcacccttaggcgacttctgcacggatagtcttcgcggaagactacgatntgtcgcaattggtgtgctagtccggctgcacccttatgcgacttttgcacggatagtcctcgcgtaagacttcgattttacgcacttgttgtgctagtccggctgcacccttatgcgacttttgacggatagtcttcgcggaagacttcngattttcgcac

SEQ ID NO: 18316 - DNA, 459 bp, Zea mays
  unsure (1)..(459): unsure at all n locations
tcggagttatacatatctgaagatgaaaggtcgaaccgacttatagatagaatgaccttntagcctgtatgggtctgagtcattgttgtaaacttttatgaagggcatgattgtaattcctcacaggctgtgtcctgtgcctataaatagtgaacattattcctttactatacacgcattcctgtaattgcaagagcatcacccgggaattattgcttgtcaaggcgaaggtataagcataccttgaacattgtatccaaacattntagatttagataataaatatgtgaatggtgccatttatctccaacatatttatctttaacattctacatttcgcatcattntatattatttntattaccttcgtaatgttatggttctaaccttcgtccgaagttcattaaaccctcgaggagataatgcttcagcggacgaaaggtattaatatttaacatc

SEQ ID NO: 18317 - DNA, 166 bp, Zea mays
tgtgatgataacaagctagagagcacagtgtgtgcttatgtatctctattaacgaccttagaacacatgcgttagtgcacaaacgatagttaactgattagcaacctctagtatatgtatgacgctaatggttctattagaacgcaacctcatgatatggactaaa

SEQ ID NO: 18318 - DNA, 506 bp, Zea mays
  unsure (1)..(506): unsure at all n locations
agcttcaagccttcgaactgtatccaaatatttctcaagcttcggatctcttgctntacaactcttgtcaatgtggccagaaataacttgggaatcagttttgagaaccgcccttcttatccccattgccttcaacttccgaagtcccaaaagcaaagcttcgtattcaacaatattatttgtgcagcttatatcaagtttcactgcataacatgttctaactttggaaggtgcaattaaaacagcagctgcacctgccccgaaggttcctcaggaaccatcgcagaacactgtccaagcttcggtatctttacttgcttcttcctgctgagaccctggcgtccagtcagcgatgaagtctgctaacgcctgtgactgaatcgaagatctatgcacataatctatgctgaactcgttgagtttcgcagaccactttccaatccttccagtagcttctctcgttctcataatatccttcaaaggctgtgatgaaagaccaatatatt

SEQ ID NO: 18319 - DNA, 433 bp, Zea mays
  unsure (1)..(433): unsure at all n locations
tcgtcagatgtggccccagtggacttagctngataagcaaggattcagtcattacctttagaatttcttccacgtcggcagcagaatgtgttgaaggagtctcttcttctatatcagtcgccttcttctttggagccgcaactttccttttattcggagcaactgccttcggcttaaggctcaattntctcttcttcagaatttcttcatcttctttaaccattctagcagcttgtctgcccacaacactaacaattctttntctttnttgcccttcggcgcccttgttcaatcgctcatagtcaggatattcaaaattcagggcatccattacccggntcaatcttcgcttcggacgggcgccgaaggctgcagtcatcaactgatcttcttttttcgtataatggcccaggatctcattgcacataacttc

SEQ ID NO: 18320 - DNA, 298 bp, Zea mays
tggtcttcaattgggttggaattgactttcaattggtatcttcgatactacatttgtaacacccctggtgttaatggcactaaaacttgagcacaacatcatatgcattgatatttcatgttgcttgttacacctagaatgcattcactaagtaaaaatttcaaacaagttgtgatgatgtggcttgaagagtgcttaacctaaagtagggtacttagccctgagtttgggcttatggagaaaagtgaagccgaaacagataaagatcttaagaatcattagaaacatgtaccagata

SEQ ID NO: 18321 - DNA, 499 bp, Zea mays
  unsure (1)..(499): unsure at all n locations
tccattggcactcnccatactgaatctggatcatcgccacttttgcatagaggtggcgttgtaccatgtgctcgtctcttgtaacaatcattgttcaagggtttcacccaaataacagtttggtttcttttctctgcaattttccagcacatcctttctacaagggcactcatttctttccagattcggagatcttcctcatcttgtgcatatgcttcangagaggagtaagcaaaataacctccaggccgtagcaatctgtctagttcgagcagaagaatcccatctctntgaagccagtcgatcctacaacgtgaacaatgggctagttcagatgatctactcgggtatggaagcctttttgtcccaaacaccaagatatcagggattccttttcagtgcaactgaattgatctgatgcacgtcgtgggccaagacatgtatacatagagaaagaagatcctcgaactacactcacaccacataagactgacaacat

SEQ ID NO: 18322 - DNA, 305 bp, Zea mays
  unsure (1)..(305): unsure at all n locations
agagagagtgatttgttgtgttcatttgagctcttgcgcttggattgcttctttatttctccattcttgtgatcaaactcaattgtaaccaaggcaagagacaccaattgtgtggtggtccttgcggngactntatgtcccgttttgattgagaagaagaagctcactcggtctaagtgaccggttgagagagggaaagggttgaaagagacccggtcttcgtgaccacctcaacggggagtaggtttgcaagaaccgaacctcggtaaaacaaatcatcatgtctcgctctttattcgctcatg

SEQ ID NO: 18323 - DNA, 459 bp, Zea mays
  unsure (1)..(459): unsure at all n locations
ctcagctgaaaaatctggatatggtcgagagtgaagcttccttcgaatgattntctgtcaaaaatatccctcgaggacaaaatgagcatgctgatttgctagctaagtcagcagcacaggggctgcctttaccttcggatgtgttcttcgaaacaataaaagcaccttcggtggaacttcttgaaagagcagtcctcaatatatctcctgtttatagcgaagattggagaaccgagatcatctcttaccttcagggaaaattcctttcagatgacgaagcttataacaagaggatagaggcaagagctcgtccatatgtcatgatagaaggggagttgtacaagcatggagttggtgctccgctactcaagtgtttatccagagccgaaggtatagaagtgatgaaagaaatacatgcangtctgtgtggatctcacattggatctanngtcgtacttg

SEQ ID NO: 18324 - DNA, 378 bp, Zea mays
agcttcagtcttagcgttagtctcagtcttagtcagttttagttagacagggtagtttgctatatcctatgcatttatgcttgtcatgatgaactatgattggtttggatctttgtaatgactgtcacaagagtgtgggtaccccctgcattttggtttgcctattatgttaatgaagttagttatatagttgggaaaccccttttattccactttcctttctatctgagaagctgtgtggtctgtgttggagatcagtgaagatgctcatctgttcagtgctgttgaagaattctattctcttttcttatgctgcaagatctgccagttcagttctgatatgtggttgcattctgcagatgtcagagaacaggcgta

SEQ ID NO: 18325 - DNA, 439 bp, Zea mays
  unsure (1)..(439): unsure at all n locations
tgcaacctataggttgacaaccataatgacggtcaacgacctcccaagttccattagacataatagattccatctcactccttactgcttccttccataagtcagcatcaggagaggaatatgcctcactaatgttagttggtgtgtcttccacaaggtacactataaagtaattaccaaaggattntgcaaccctatgtctcttgctctttcgagtgactatagtgtcatcctcctcagtgatgtgcacgtgagaatcctcagcatgatctatangaatcgacagttcgtgctcatggnngaatatagtctcatgacttgtatcactangtgtattcttcatgggaaactcattctcaaaaaatggtgcatctcttgattccatgatagtatcaacatacatatcaggcacatcagaatntataattaagaacctata

SEQ ID NO: 18326 - DNA, 229 bp, Zea mays
catgctagtcttagcaattaagcatgcatctagaccggcctcctcttttgcaaaatcaactaagtaaaagttgccgtctaatacacccttaaaagctagtgaaccatcacttcttctaaagacagacacatctacatttgtaaatagacagttataccccatgttgcataattgactgacagatagcaaattataaccaagagactctactaaaaacacattagatata

SEQ ID NO: 18327 - DNA, 383 bp, Zea mays
  unsure (1)..(383): unsure at all n locations
cactcagcttctaagggagaacacgtgataggttngactaacgtgcatttcgaataagattgaccttgtgcagcttgtcaagcatgtcaacaagtgggaggagcgcatcacagcaagaacgtgatgaccacttcaagacccctggagctgctgcatatggacctcttccgacctgtcgcctatctgagcatatgagggagtaagaatggcttagatattgttgatgattattctcgctacacttgagtgttctttntgcaggataagtctgaaacccaagggacccttaagcgcttcctcaggagagctcaaaatgagtttgagctcaaggtgaagaagataaggagcgacaacgggtccgaattcaagaaccttcaagtgga

SEQ ID NO: 18328 - DNA, 444 bp, Zea mays
  unsure (1)..(444): unsure at all n locations
accgccacttaatgcggtgactatcaagaacaagaatcctttgcctcatattaatgttcttttttatcagntggtcagagccaaagtgtttttcaagatagaccttcgcttcggctaccatcagatcaagatacgagcaagcgatattccgaaggctgctttctcaaccagatatgggctatatgaattcttggtgatgtcttttgggctaactaatgcaccagcatattntatgtatctgatgagttctattttcatgcctgaattggacaaatccgtagtgggtttcattgatgatatcttggtgtactcgaagaacgaagaagaacatgccgtgcatttgcatgtagtgcttcaatgtctgtgagagcaccgtctttatgccaaattgtcaaaatgtgattnttggtaanagagatcanattcttgggtcacactatctct

SEQ ID NO: 18329 - DNA, 386 bp, Zea mays
  unsure (1)..(386): unsure at all n locations
ctctcacgagacctttcctcatttctttctaaccaaggtaaattcattatcgtatgaaatattctatgcatatttactttatttgttcccttggatggtgtactggttggttcctaatttgaatggatggatgtatgtatgcttgcaatcgcatagagaacgatccaattgaagagcccgaggaacccgtaggagaagcccctgagcagcagtcggttggtggaggcaagtgtcctttgacctatctctgtcctattcattatttaattcacctttccgctgtggggaccttcgacatccgaaggtcctcanaaacaggatttaatagtgtttctggagtataatgtgtgaacaggtatcttcggactcaagtcangtattacagt

SEQ ID NO: 18330 - DNA, 445 bp, Zea mays
  unsure (1)..(445): unsure at all n locations
tcgcatctctgaactaactcggctgcatcgttcttcgccgtcggccaatagaattctgacctgtaaaccttctcgactagtgttctggatgctgcatgtactccacattgccctgcatggactctctncanaagttgcttcccggtggacgggagaacgcacttcatgaggacgcctgacagcgcccctcctgtataataccatcccaatgagtgtatagtgagccgattgtctggcaatacgctctgncgagttctcgtcatctgggtcttcttcattctttatatacttaataatcggccgtctccagtcatcagagtctgactcgggttgatctatgacgttgcactcttctgcttgatccattgagatactcngctgcangaattcttgcacgaagaactcgggtggggacctgagtcgaccgatccgagcttgacagtac

SEQ ID NO: 18331 - DNA, 404 bp, Zea mays
cttcattcccacatgtgctaagcggcgatgccacagccagcccatgctagtcttagcaattaagcatgcatctagaccggtctcttcttttgcaaattcaactaagtaaagcttgccatctaatacacccttaaaagctagtgaaccatcacttcttctaaagacagacacatctatgtttgtgaataaacagttatatcccatattgcataattgactaacagatagtaaattatatcccagagactcaactaaaaacacattagaaatagagtgctcatttgagattgcaattttacctaacccttttaccttgccttggttcccatcaccgaatattattgaatcttgggaatccttattcttgacgtaggaggtgaacatcttcttctcccccgtcatat

SEQ ID NO: 18332 - DNA, 366 bp, Zea mays
  unsure (1)..(366): unsure at all n locations
tctanagggagaagcacatttgngactaacaaatgttncatttgagaaagacaggatttgtagcgcatgccaagccgggaagcaagttggcacacatcatccacacaagaacattatgacaagtgatatgccactggagctccttcacatggatctattcggcccaatcgcttacataagcatcgacgggagtaagtactgtctaattattgtggatgattattctcgcttcacttgggtgttctttttgcaggaaaagtctcatacccaagaaaccttaaagggattcttgagacgggctcaaaatgagttcagcttaaggatcaagaaaaatagaagcgacaatgggacgaagttcaagaactc

SEQ ID NO: 18333 - DNA, 481 bp, Zea mays
  unsure (1)..(481): unsure at all n locations
agcttatgaagattcttcatcccaacatgggctagtcggcggtgccagagccaacccatgttagtcttagcaattaagcaagtgtctagttcagctctatcaaaatctaccaagtatagctgaccctctaacactcccttaaatgctattgaatcgtcacttcttctaaagacagtgacacctacatcagtgaatagacagttgtagcccatttgacataattgggatacggaaagcaaattgtaatctaatgaatcaacaagaanaacatttgaaatggaatggtcaggagatatagcaatgttaccaagacctttgaccaaaccttgatttccatccccgaatgtgatagctcgttggggatcttggttnttctcatatgaggagaacatccttntctcccctgtcatgtggttggtgcacccgccgtcgagtatccaacttgagcccncggatgcataaacctacnaaaacaagttag

SEQ ID NO: 18334 - DNA, 450 bp, Zea mays
  unsure (1)..(450): unsure at all n locations
tacatagacgaacaacgagaacagttacaacgtatcgtaggggatatacaaaataatcataaaaggctagtgcgtgtgcttgataagtctactatggcaaatcttccttcgcacgatgttgaattgagggaatacacacataattcatcggctacaggttgtcacgaccagtcacaacccctttatgggatgccgatggacatgtaccctatgcaacgacagcctnccacgcacatcggcgatagaattgccgatctgcgcatgtccggaccgtccgcatgtatgcgtggaccgtccgggccagcgacgggcgatcccatttttagaagcgaattaccgagacctgcacccaagccgccacatgtcgtgcaaaccctagatagcccattcggaccgtctgcgtatggcgccagacagtccgaatataatgtccgatagtccggccacatg

SEQ ID NO: 18335 - DNA, 367 bp, Zea mays
  unsure (1)..(367): unsure at all n locations
gtagcatttacatcagttgattgacgggtatgttatctatatgagtatatgttatatcttatgatttccattngtatgtacatgtaatcagggagtccgaggagcatgattggcacaatacagcactgtctcagtacatcatctcaacctatggagatccgtctctttctcaagtacttgatgactntgtaagttcacaatctcatgggagaatagctatcttgtcacaagctggtcactgtgcacaatcagttatctcttaatagatcaaataatggtctgaacatcagcattggtcgatcaaagttgcaatcaaaaggcccaggaagctgatggcgtgaaactatcttattttctggaagtacat

SEQ ID NO: 18336 - DNA, 340 bp, Zea mays
ctgaagccatggtaagcagcatatgctaataatatgcgaattgactctagcctagctacgggcgcgtaggattcagccgaatgcataccattgacttgggagtatcccttggccacagatcgagctatgtttctagtcaccacaccatgctcgtcttgttggttgcggaagacccacttggttcctacaacattttggttaggacgtggaactaaatgccatacctcattcctcgtgaagttgtagagctcctctagcatggccatcaaccaatccgaatcttgaagtagcttctctatcctgtgtggctcaatagaggaaacataagagtaatgctcac

SEQ ID NO: 18337 - DNA, 451 bp, Zea mays
  unsure (1)..(451): unsure at all n locations
agcttctaaagggagaacacantttgngactaacaaatgttcattntgagaaagacaggatttgtagcgcatgtcaagcaggaaagcaagttggaacccatcatccacacaagaacatcatgacgaccgacaggccgcttgagctactccacatggatctattcggcccgattgcttacataagcatcggcgggagtaagtattgtcttgtaatagtggatgattattctcgcttcacttgggtattcttcttacaagaaaaatctcaaacccaagagaccttatagggattcttgagacgggctcaaaatgagttcggcttaaggatcaagaagattagaagcgacaacggaacggagttcaagaactctcanatcgaaggcttccttgaggaggaaggcatcaagcatgagttctcttctccctacacgccgcaacaaaatggtgtagt

SEQ ID NO: 18338 - DNA, 386 bp, Zea mays
  unsure (1)..(386): unsure at all n locations
tgcaagcttgtgaagaatcttcattccaacatgggctagtcggcggtgccaaagccaacccaagttagtcttagcaactaagcaagtgtcgagttcagctctttcaaaatctaccaagtatagctgaccctctaacactcccttaaaagctattggatcgtcacttcttctaaagacacgaacaccaatatcagtaaaaagacaggtgtagcccattctacattattgggatacggaanagcaattgttacctaaagaatccacgagaaaaacattggaaatagaatgggcaggagatatagcaattttacccaatcctttgaccaaaccttgatttccatccacgaatgtgatagcatcgtggggatcttggattttctcatatg

SEQ ID NO: 18339 - DNA, 355 bp, Zea mays
  unsure (1)..(355): unsure at all n locations
tctccaaattttctaaccttagtcaaatagtgcaaccattttttattctattatttagctnttggtcaaaacaataattaaattagaaccctaaagttttctgtagtacataggggttttatatttttcctaagtagttcacattatttaaagtctaacaaaattggtttgactaaatttggatgaataaaacagaagttatgaattattcaagttctgttcaaaatttaaatcagatttaataaaggtttcctggaaaactactttgcgccgaggaccctgngtttaatccaaatcaatccactcaaatctacccctgcgccactattcatttgagtcactgacacctcacaaa

SEQ ID NO: 18340 - DNA, 464 bp, Zea mays
  unsure (1)..(464): unsure at all n locations
agcttgtgttgacttggagtccacgatttattccttaccgtgacccgggtgagtgacctccatacgatggcccaaagtacgttgccgatccaagcagtcgttggaccaagcgtggatccaggaagaggacgagacacggtatggttatggatcagatagctggtagaagtaggaggagaagaggaacaccatttcttaccgacccccgaacaatatgagtgtggcaagtgcgttagacttagtcacaattcacgcacttgttgttggcagattagtgaggtttggcttggttaatatttttatattacctatntttatttaataagtacatattactttctaacccttctactaaaaatatttatagacacgtacctccaatagttatctaataaatacatattactttctaaccctcctacttggtaaatattaaatntaagaagtaaaccagaaaatgtttc

SEQ ID NO: 18341 - DNA, 249 bp, Zea mays
  unsure (1)..(249): unsure at all n locations
ctcagctttctgccatagcttcgngatcgcttcattcttcgtcatgatcgtcttttcatttagtcaagcttcgtcttgaccatggtcttgtatacccgcaacctgatttcgaagatacctgctcgcatacttggaaaacattgtccaaatatgtttttgaggaccttcggaagtcgaaggcccccaacagtgtcccatctggggatggcatgcggcgtgtgtgcactgtaatggagacataatcatgat

SEQ ID NO: 18342 - DNA, 414 bp, Zea mays
  unsure (1)..(414): unsure at all n locations
agcttcgatactatctntggagcttcgttcttctactctacagctttagcttcagcttggtcaatctgcacgaaggtattataagctaaattcaaaaattcaaaggaaaaggtaagcataaggtatgattttgttaccagcttgaggtggctccgagcttcgtcaccagctttgcttcgaccacctttgtccatactaactttataaatttgtttgcaatacttcgagccagatttggaacatcatctaagtctgccggtgacaggctgaagttgggtctattaacaatcttgccgtgttcacagccagacttcaaaaaagcaacagttgtgccccgagaagctgatagggcacanaagtcgctatgcccagctataacttcgtcaagatcattaatntcaccttcaatatgct

SEQ ID NO: 18343 - DNA, 510 bp, Zea mays
  unsure (1)..(510): unsure at all n locations
tctcctggacaagtgctgcacttaccgctgagtgcgaagctgccacatataataacaaaggagcccctggcattggtggagttaatgttgttagatctatcaaatattgcttcagttcttcgaaggctctctgctggactggtccccattgaaaaacttcngctgacttcagcacttcgaaaaatggtaaatttctctctgctgatctagatatgaatctgttgagagatgccagccttcctgtcaatctttgagcccncttctttgtacttggtggttccattcgaagtatagcttcgattntgcttggattagcctcaattccctttgttgaaactaggcaaccaagaaaattccccttctttactccgaagacacanttttctggattcagctntanacaagcttgtctaannatagcgaaggtctcttgcagatcagcaatgtgaatatcttgcttcgtgcttttacaatgatatcatcaacatangttagcacattcctgcctat

SEQ ID NO: 18344 - DNA, 396 bp, Zea mays
  unsure (1)..(396): unsure at all n locations
agcttgctatcaatgtggacatgaaggtcattatttccgtaattgtcctgagaagaggtcactacatatcacctccgagatgaagctatctcagtcttcagacatggaatatgaacaaaaatgcacagaaacttctaccaacaacgtagagacaactccaccatgtaacttatcaagtcgtgcttgctttggctggggtgataccggccatctttttaacggctgtcctaagaaagatgtgaagatcaataagggccaaaagaaaagacaacaccctcaaactcatgcatcaacaaataataaacaacggaaaaangtcatatgaaggataagttatgcagtgataggaaccattccatacgataatgcagtgatttttggacattggcattacac

SEQ ID NO: 18345 - DNA, 498 bp, Zea mays
  unsure (1)..(498): unsure at all n locations
tcttcaccatgtgatcacgactatcttgagaatgttgagcaatgcacttccctcttagttgcgtcaagctcatttgtagcctctcattatcttctctgagcatttgatatgtatcatcgtttgttcctgcaaattctagctcanaggaagatttgcttctcgacggacaacaagcattaacacatggtaatgtagtttcaatttgaatacatgtccatgagtgagggtgttgggatgttaagttttctatcacaacctcatgagcaatatttaatatgatatgatcatccataagattntcatgagaacatatgagcatatcatatttttcttgaacagctagattgtcatcttttagcgtttctacttggtccttanagcaggcattcccatttactattcgagcgatacaatgtanagcgttatcttgctcaattgaaatagnttcatacctttggaccaaatcaacatgagagtactttagctcctcatgttctt

SEQ ID NO: 18346 - DNA, 481 bp, Zea mays
  unsure (1)..(481): unsure at all n locations
agctntaatgcacaaattctctgcatctattgtccacatgactatctatttcagaatgaacacaatagatgccaatcaattcatagcgacggaagcactagtccatatgatgcaacacatataatactgcaggaagcatatgaataacacactagcaaagctcaaactaacacatcaccccttaggataagctttcctctaatgttgagataagctttaatgcacaaattctccccctttgacatcaaccaccaaaaccatattcaagcaagaacatangatgatgtcaagggacagcagggtgttaaggaggagatacacatgatcaatactcccccttacttattgagcatatgcactactaacatttaagcaagatacaaatatgcaaaaagaatactacttccttntgtacctttaccatgttgtagtgtgcttcccatcttgaaagatntaatctcttgagagcttctccacactt

SEQ ID NO: 18347 - DNA, 316 bp, Zea mays
  unsure (1)..(316): unsure at all n locations
tcanggtcctgatcacctcanatgatacaacaacaattgccagtttgtgtgtcgacaaaaacgagagccaggacaaaccccataatagtggagactgctcacctcgagggcctgctcgtagcgacgttcgctaaacttggtatggaaagaaggtacatcagccctataatgtatatgcaggatattgttgtttgtcaaactataagctacccttccattaaaatgccacatctacaagcataagccaaaatgagcattcagtgtcatgaacagaccatgaaatagacatcgaggattagtacaaagtcatttacaa

SEQ ID NO: 18348 - DNA, 395 bp, Zea mays
  unsure (1)..(395): unsure at all n locations
agcttaaaagattggcgcggaggtgcagtcctggggtcatagtgcgggtggaaatgtcaattctcagctgggactggctcgtggggtgctgcacaggttggagatggcgcangacagcaggccgttatcctcagatgagcgatggttgctgcagaaattgaaacagcactgccttgttcttgcttctttagaaaggacagttgcacgcttgcgttcccgggtgcactacttgagagatggagatgccaacacaaaattttttcatctacaggctcgcttccgcaaaaagagaaattttatttcccatttggagaatgatgggaggactgtcaccagccatgaacaaatgcaggaggttctggacgactttttctccattctttagggttctaata

SEQ ID NO: 18349 - DNA, 334 bp, Zea mays
  unsure (1)..(334): unsure at all n locations
gcttgtttacgcacgtngaacctagttacctcgctatatgcaggattgtgattaaaatagcacgccatacctggctacttcactgtgtggaaaagggggaaatgagcgcgcgaatgtgaagaaattgacgtcaactgcgtttagagagttcctatcgaggtgccaaatgtggagagcagatagagttagatagcacgtgattaagtttagcaaatatattcgaaaaactattggagaagtatttttctgttcacttctcanatttaagatttatagagtcgtttagagaactattaaagttgctctagagtttggtttcagagtatggggatat

SEQ ID NO: 18350 - DNA, 460 bp, Zea mays
  unsure (1)..(460): unsure at all n locations
ttcccacatgagcaagtcggtgatgccagagccagcccatattagtcttagcaattaagcaaatggctagtttaacattggtgtcattgaaatcaactaaatatagctggccatctaacacacccttaaaggctattgaatcatcacttcttctaaagacggtaacaccaacatcaataaaaagacaattgtaacccattttgcataattgagaaacagaaagcaagttgcaatctaaagaatctataagaanaacattggaaatggaatggtcaggagatatagcaatnttacccaaccctttgaccaaaccttggtttccatcctcgaatgtgatcgctctntagagatcanntcgtttctcatgtgaggagaacatncttttctcccctgtcatgtggttggtgcacccgctatcgattatcaactngtcccgccagatgcataaacctacataaac

SEQ ID NO: 18351 - DNA, 341 bp, Zea mays
  unsure (1)..(341): unsure at all n locations
atctatattggggattggctttgaatcagtccaatttctcatcggtctttctggcagcttcctgactcccatgaatagcaataggtccctgatccgaaggtatcttcatgcaaagatatgctggatgaagaattgcttccaaagcattgagtggtccgcgaccgatgatagcattgttaggatactccatgtcgacaatgtccaacacaacttgctcagtcctttgatttgtgatgaatccgaaggtcactggcatggtaatcttactgagcgctacaatatgtcttcctccgaaccacanagagggtgcgtagcatcatgaatcttgtcttcgggctctt

SEQ ID NO: 18352 - DNA, 379 bp, Zea mays
catcacgtttttcccttttttcgtaccattttttgagggtccaattttggaagtccaggccggttggtctggaccggtgatacttttgatgctgggggttcttggtgggtgggttattgcttgtgggttgagaagcttttacgggttcattttttaatgaaacaattgtgtgggccggaattgagcacgtggtcctcctgtgcctgtcatgcgttctgggtttagatttagaggtagcacagctagcgatgtggtcctgtttgtttgtttctgcagcgtcgcttgaacaaaaggcaacgtggggccgggacaagcagcgcagtcatgtatagattcccagcatagtgccagcatatgctttgttgtccgatgtcaacgt

SEQ ID NO: 18353 - DNA, 485 bp, Zea mays
  unsure (1)..(485): unsure at all n locations
ctaagctgatctcgattctgagctcgaaatggatcgcagtctattctccacacgcaacgaatacaaacaggcacaagagaacatatacttgctaagaacatacaccatacaagataaaatattataaaagcaagcaatatanaatagagagcgcctctacangtacggaggaaaataaccgtgatagtcgaaactacggtcgaggggttagcgtgtntacactaagcacatatttaatagaatanttaatttgatgtttctcanatataaataatatctaatactcagtnttggctaacttactggtttaatagcgaacaattgaaccaataattaattaactgacctgangcgatacgtgcgaatggattaatctcgcacgcggataacgcgcgaatggcgcgcggctaggcgtgcgacacacacgaacggcgtgcacgaacaacgcgcgaccacacgaatgatgcgtgacgacacgcgatcct

SEQ ID NO: 18354 - DNA, 498 bp, Zea mays
  unsure (1)..(498): unsure at all n locations
gagtggaaccgacttaaagataaaaaggctattcagacctcggtagactactatagaattattatcaaatggtaagggcatgaatgtaattntgtaagggctgtgtcccgtgcctataaataagtgaacagtgtccctgtactgttcacgctgacttggcattcgctttttgcgtcacacttgtattgtcatttccttccgattgaaggtacacttgtgattcaataatatttttatttatgctcaataataaatgattggtcatgttttcttttatattatattntatcaccttcgtcattgtctgatgagtttatgaaggtatgtccttcataaccttcgtccgcaagtcattacatcctaagggaaataatgtttcggaggacgaaggacattgacgaataacattntctatngtgccttgtcttaactcttgaagtgctngagaacaagtccccaacaagtccatagagcgccttagagagcttacacacgtgg

SEQ ID NO: 18355 - DNA, 237 bp, Zea mays
  unsure (1)..(237): unsure at all n locations
aaagtaagcanattcttatagagaagattttcttcacgaagcatgaaaagaagggaaggtgttttttcgccgaaggctcaaaagatggtatgtatgcaaagnttcatgcatcgtaaagaattaaactataaatagaatgtatatcacatttaaagctacaatatattacacatttttacatctcanatatttctacaatggcattcaatcctctttaagcactatttctacagcttc

SEQ ID NO: 18356 - DNA, 440 bp, Zea mays
  unsure (1)..(440): unsure at all n locations
agcttctccttgtcgtcatcaatcttgacatagaaccactctgacttccagcctgctgcccatttgcttcggtagctgattacaggaaactttgtggttttccggtaagcaaaattatagcaacacaaattgtcatgcagtccatcttttctagccttcgtctgatagtgcagttcgtgaactcgacaaaagctgtccgcaaacggctccaccgcttggcttcggagggcccagatataaacgctaagcctaaaaatagcgttaggagtcagctgatgaaagtagataccaaacctcttcagtacctctgcaataatcccatgtagggggaatcttaatccagcctttagaaagctcttganaatgacaatttcatccttctctggctntagggtagtttcttctcccncgaagcgtaatatcttcttctgattctcatt

SEQ ID NO: 18357 - DNA, 474 bp, Zea mays
  unsure (1)..(474): unsure at all n locations
tctanagggagaacacgtgatagggttaactaacgtgcaattcgaaatagatagatcttgtgcagctggtcaagcaggtaaacaagtgggaggagcgcatcacagcaagaatgtgatgaccacttcaagacccctggaactgctgcatatggacctcttcggacccgtcgcctatctgagcatangaggaagtatggtctagttatcgttgatgacttttcccgcttcacttgggtgttctttntgcaggataagtctganacccaagggaccctcaagcgcttcctcaggagagctcanaatgagtttgagctcaaggtgaagaagataaggagcgacaacgggtccgagttcaagaaccttcaagtagaggaagtccttgaggaggaanggatcaagcgcgagttctncgctccctacacaccacagcanaatggtgtggtagagaggaagaacagcgacgctatcgatatg

SEQ ID NO: 18358 - DNA, 433 bp, Zea mays
  unsure (1)..(433): unsure at all n locations
ctcgtacccgcgatcctctgagtcacctgcggcatcaagctngccagacttgtaaagcaacaacatctaccagcacaacaactgcagaccataccagtaacttggccattcgcatgctggggactggatatgattggacccttcaagaaagctcaaggaggatacactcatgtactggtagcaatcgacaaattcactaaatggatagagtttaaacccattgcttctttaacctcagctaaggctatggaattcatacaagacataatattcaggttcggaataccgaacagtatcataaccgacctgngatccaacttcacaagttcagagttcttcgatttctacgagcaaaaaagcattcagatcaagtatgattcggtagcacaccctagagccaacgggcaagcggaacgagctaacgggatgatat

SEQ ID NO: 18359 - DNA, 355 bp, Zea mays
  unsure (1)..(355): unsure at all n locations
gactaataccataataagataacacgcattgttagtggatagatggcgagagtagcgtgtaccctccatggcaagaggctggacggcggtgtatctatgctctcggntggtgtgaacctgatctggtcttaagaaccccggtggcgagttgacatatgcaagggttaagtgctacatatgtcgtgtgattggagatcctcagctgagtattaattgattcagatcgccgttacttctcggacatgaagacttggtcactgacctacacgtaacattctagtgaataagaaaaggtgataagaaattggctagtataggtcaagttcttgaactatggtagaaagaactctagata

SEQ ID NO: 18360 - DNA, 404 bp, Zea mays
  unsure (1)..(404): unsure at all n locations
agcttatcananaagtttagtgagttttggagttattaatcaatttctaaaattccaggagtataggttntggctattntaaatactccataattccttatttggactaaaaatcataaaactatttttattaaatactatagaaatttagaagcctagcaaaactggtctcatattttatcattntttctacaattttctagaaattctctaatcctggaagaaaaagaanagggaaaagcatgaatagtattggactgaaactggcccaatacaacccatgcccaggcgaaacacgagcgccctcgttcgcgccggcggatntgcaccgaggccctcagcggtttgaataactagtgaagaaccccgcacactatttgttngggtcactaacaaatgcagat

SEQ ID NO: 18361 - DNA, 513 bp, Zea mays
  unsure (1)..(513): unsure at all n locations
tgtcgtggacatgcactatgaggcccgcattcaggccatcatcatctaccttggctcncgccttggggagaaggtgaccaaacctcaagcccgaaccatgtcgttgaccanggagcaatacctgcatgtaaagtcatgcatgtttggtaccagtactccatgcatgaatnttattntatcttctgatatgcactttatgtgtttactttgtagatgattccacattggtgcgccgcacatactctgtgctgggagcagatggtggataggtggtgttcggcttagtgggacgaggcgcacactgctagccgggaacgaacgttgatgatgcaaggtccctcccaccaccaatgcagacggagcctgagccaatatgccgaagcatgggtacgccaccttttttatctagatatatagcactaagttagatattatntctaactatctcngtggtcttcgtgcagtcagcgtcacatggtggcaggcctttgctcacttctcngactatgctat

SEQ ID NO: 18362 - DNA, 502 bp, Zea mays
  unsure (1)..(502): unsure at all n locations
agcttagccagaagcatcggaaacagattcatgacccatatctgggtaagtggcgggcggaaaatggcaggcgacaaagctcgaagccatcttaagccggtaagaaacttatgtttgttacttttaccttctcatatgaaatttgtatctttcttactgtgttgnttgatatatacaggatgacgaagctaaagattgacaatgctgaagtttggcaaaactgaagacaaagccttagctgaagcttanaattgcttatactgtgctcacctgcaaaaattcttggagaaactntngtaatatagatatagaataacttgtgtaaatntgtacataccttgtaatatattctgtctcctttaaccgcatctagtctgctntgctgtggacgaaacttctctttngagccgaagggcgaaaacaccttcccttcttttcgtacacaacgaagcataagaaaaattttccttcgaatctttcttttttttctgaagtacctatc

SEQ ID NO: 18363 - DNA, 478 bp, Zea mays
  unsure (1)..(478): unsure at all n locations
cttaagcctctntgaaatccttaagggaaaatgcttaagacacttataacacgctttcataagtgtataaactgtcatgagcatcacacttatactaggacacaatgcacttcacaatctgtatggtatagatatgttctcattaacctcattatgtgcaattggcatttcaaggccaaaatatgtattcctatcaaggcacatatttagggggagcaatctatattatatagaactatgatcatgcttaatngacacatcttttgatcatatctctntcattttggtacanatgcatatatcttattattctcgtaccatgactacgaactaatatgttccaagtatatttctatactaagtcgtagattgaaagggaaatggagtcttcggcgaagacaanggcttcactncactctatcnngtaccattatcccttcgcatcactccacactagctgctcacatttgtataatct

SEQ ID NO: 18364 - DNA, 493 bp, Zea mays
  unsure (1)..(493): unsure at all n locations
agcttcatcttgtgccacaatactataacttgctctaagctggtgttntaacaacaagaaaaggttaggataaaggattatgcacaagtgtggagaagctcccgagaggttaaaccttcaagatggaaagtacaccacaatatggtaaaggtacaaaaggaagtgttgatattctgcgtatttgtacctaaatattcctccaatacttgggttgcatatgtctactgagtaagggggagcaatatttgtgtgttgtattttacctgcttaataacctgctgtcccttgacatcatcctatgctcttgcttgaatgtggttttggtgcttgatgtcaaagggggagaaatttatgcattaaagcttaggtttctttgagttcctttgatcttaangaaggatgntgttagttgagttcctttgatcttaacgaaggatgtgttagtttgtgttgtcgatattcttatcatatgaatctgtgtgtcgtatatatg

SEQ ID NO: 18365 - DNA, 56 bp, Zea mays
  unsure (1)..(56): unsure at all n locations
gacacaagaaactcagcttacccaaaagaanaaagagagagaaacttgagagagag

SEQ ID NO: 18366 - DNA, 418 bp, Zea mays
  unsure (1)..(418): unsure at all n locations
agcttgagcggggaccggattcgttngaaaccctttgaatctggtgatcagcatatccttcagcttttgccatgatgtgattggtcctggacgaanggaggagtaccaggtttgtgcaacattattgacggccatgacgaaagacttcgccatgactgcagtattgccaccataggaagatatcgttgcttcgtagctcatcagaaactgctttggatctgaatgtccgtcgtacatggggagttggggtggcttgtaggacggaggccaaggtgtagcctgcagttctgctgacagaggagaagcatcatcaaaagcaaaatttccatgacaaaaatcctcatactagtcatcctcgttgaanaagcactcttgatgaagctctctatgctganggccttcggtctactcatctttg

SEQ ID NO: 18367 - DNA, 341 bp, Zea mays
  unsure (1)..(341): unsure at all n locations
tcagctccatctatgttatggattgcttatgaatcagnccatttttcttcggtccttctggcagcttcctgacttccatgaatagcgatgggtccttgatccgaaggtatcttcatgcaaagataggcagggtgaagaattgcttcaaaagcattgagggtgccacgaccaataattgcattgtaagggtattccatgtcaacaatgtcaaacacaacttgctcagttctagtggtgntgatgaacccgaaggtcactgacatggtgatctttgccagtgctacaatctgtcttcctccgaagccacagagaggatgtgtagcatcatgaatcttatcttc

SEQ ID NO: 18368 - DNA, 159 bp, Zea mays
agcttctaaagggagaacacgtgatatgtttaactaacgtgcaattcgaaaaagatagaccttgtgcagcttgtccagcaggttaacaagtgggaggagcacatcacagcaagaatgtgatgaccacttcaagacctctggagctgctggatatggacc

SEQ ID NO: 18369 - DNA, 412 bp, Zea mays
  unsure (1)..(412): unsure at all n locations
ggtgaaggatcttcatccgcacatgtgctaagcggcgatgccactttcagcccatgctagtcttagcaattaagcatgcatctagaccggccttctcttttgcaaaatcaactaaataaagtttgccggctaatacacccttaatagctagtgaaccatcacttcttctaaagacagacacatctacatttgtaaatagacaattatatcccatgttgcataattgactaacagataacagattatatccaagcgactcaactaanaacacattagaaatagagtgctcagatgaaataagcaatttacctaacccttttaccttgccttggntcccatcaccgaatattatggaatcttgngaatccttggtcttgatgtangaagagaacatcctcttttcccccgtcat

SEQ ID NO: 18370 - DNA, 367 bp, Zea mays
agcttcttaaccacctcaacattcaccaagttgttgcagctaccaccatcaatgatggtatgtacaccgcagtccttgatgatgaggaacttattgaagagggtgtggtgctgtctgttgtcgtcgtcactagccgtggcactcaaagctcgttgcacaatcaaggccttataggtctcggtcgctgttgtaccaagaacctcttcatcaccatcataagtatctgcaatgatagctccaatagtatcttcatcttcatcattagaagcactaacatacccaccatcaccagtataaatgtatgcccgtttgctggggcaatctcgctgaatatggccaagtccctggcagcggtggcacttgatgt

SEQ ID NO: 18371 - DNA, 511 bp, Zea mays
  unsure (1)..(511): unsure at all n locations
ngaggatagccggagaccgttgtggtgctcccattattgaaatatatgcttccctggtgcggattggcgctagagtccgacgggaattcctcatcgaagaagttgtggccgttgtggacgtgactcaccgtggatgaggctcatcacaacggaatccccggtaagaacatcatgcccagaatcgccttcatacccgtatcatgtggaccgatttaattgagatttagtgtgcgtaattcggaggttagcctatcggcgtgagacctcaccgtggcggcggtagtgccgtgacctggtctgcccgtggagaagatgtgcctccgccgtccgattntcttcgaatggccaggattagaagatagacaccccttcgcccatttgaagcttagtcgttggatcacgggtgtgggggttagatcgagctaggacgtggctgtcccttaaccgtgatatcngatctgatggtcagggcggggtttgcacgtgtactggngcgtgttctaatctcgtc

SEQ ID NO: 18372 - DNA, 429 bp, Zea mays
agcttgtaagggagaacatgcgctcagagtcaccgatgtctggtctgagaaaacataccttgtgttacatgccaggcaagagaacaggtgggaactactcatcaaaaccaagatgtgatgaccatctcacgaccactggaactcctacatatggatctcttctggctcgacggttatcttaacattgggggaaacacagatagtcttgtattgctgatgatttatcccgcttcacttgtgtgatctttatgcacgataaaactaacacctcaggaactatggagcatttactaaggtgagctcaacatgagtttgagcttaacgtgcataaaataaggagagataatggatctgagttcatgaaccttctagtataagaagatatcgaggaggaatgcatcgagcatgagttctgcactccctacacac

SEQ ID NO: 18373 - DNA, 122 bp, Zea mays
  unsure (1)..(122): unsure at all n locations
ctcctataattggtcttcaactttgatgtggggacctanggcaaaaaccctatactttgtgaggtacaaagcctccaaggtgagcccattcactgattttcagacttagagccaaactcaaa

SEQ ID NO: 18374 - DNA, 469 bp, Zea mays
  unsure (1)..(469): unsure at all n locations
gctcgctcgctcgctgtgtgtggtcattgggtgcgtgcgaagtggacaggacgacgaccacgacgctactatctatctggagtggacacatgcatctcgtccggtccatcgtcatcgtctcatccgtctcaccacacatcacatggacgacgcttcgcctagatcgagccagaaaggcccacggcatgcctgcatgcatgcattagttacattgctcgctcgcgcagcatggcgccaagctcaaaaagccaacaatggaggaggtcanggaggagctgccgatcgatcccacccncaccccaccaccgaaaagcccaacccgattggtggcagtggtctggcgaagtcgtttggccgatgatttgctgtgggaatgcangtcgtcggtatattnaatatctgggtgctgcatttatatggtgatnntgtgttaacagcagcatccgacgggtggacaagatatgacatg

SEQ ID NO: 18375 - DNA, 482 bp, Zea mays
  unsure (1)..(482): unsure at all n locations
agcttattatgcttgctaggcctggaagctntgtgaccccgatgccgaaagtgtatttaaagctttgaggaaagctggcgttaaaactgcagtcgtctccaatttcgatacccgtctacggccactcctgcangccttgaaatgtgaccactggtttgatgcagttgcagtctctgcagaggtttggttacttgtcctgtcgtttcttctattcatgttaaaaccagatggcttagttgccagaaatcctgtacttctttgcaattccatgttgtcatgtttgtagtatctactattaccttctgccactatgacctagtgatgtaatggttctttntgtatacaaaaatgttgatattcagttcattaatttattntcgtatctcatnaataccattgttccaagcaatgttccgtgttgaaaagttcttggttctgtanactctcaggttgcagcagagaagccgaatccaataatattc

SEQ ID NO: 18376 - DNA, 437 bp, Zea mays
  unsure (1)..(437): unsure at all n locations
tcatcgggagtccttcacaagggggtattttctctaccacatagacatgcttcttttattggacatcacttctttggttcttgtggtgagcctaccttgatagatgaggcgcttcaggatccggactgggtgaatgccatgcctgaagaacttaacaacttcacccgtaacgaagtttgaccctggagaacccccacaagggcaagaatcattgaacanagtgggtgtcagaaacaacaagatgncaaggtgtgattgtaggaacaaggcaagactttgtgcanagggattctctcaagtngaaggcttatgatttggagagaccttngcaccttgtgcttgaatggaagccatctgtatcctacttgcatatgcatcatgctatgatataaaacttatcanatggatgtaaaaagtgcatttttaaatggcttcat

SEQ ID NO: 18377 - DNA, 498 bp, Zea mays
  unsure (1)..(498): unsure at all n locations
agctntgaaccagctaacaagaagcagaagaaggaagctcaaaataaggtacaacatgtcggagtacaaggactctatatcaagtctaaatggtctcatgtgccgatcacattttctcaagaggaccttcagctcaaggattatccccacaatgatgccatgatcatatcctatgtcataaaagggtttttggtccataatgttctggtggatacatgcagttcatcagatattatctttgcaaaagctttcagacaaatgcaaaagcaagggacaagatacacgatgcaacacaccctctgtgtggcttcagaggaaagaagatagtggcacttggaaagataacaatgtcaatcacctttggctacatgcacaacaccagaactgaacaagttgtgtctgacacttggaaagataacaatgcanatcattggaagaggaacattgaatgccttcgaagcaatacttcacccagcgtacttgtgtatgaaaatacca

SEQ ID NO: 18378 - DNA, 412 bp, Zea mays
  unsure (1)..(412): unsure at all n locations
agttcaagtggaccccagcgtgccaagatatattngagatgttgaagcagaagttgacaacggcgccagtactgattctgccagatgttcacaagacattctcagtttattgcaatgatgcgtacaccggactangatgtgtgttgatgcaggaaggcagagtaatggcatactcgtcccgacagtttaagattcatgaagaagaatatcctactcatgatctggaattagcagtcgtggttcatgcattaaagacctggaggcattatctttatgggcagaagtgtgatatctacacggaccacaagagtctcaaatacatattcactcagtcagaagtaaacatgagacatcgaagatggctagaattgatcanagattatgaactggagaaatcatatcaccccgacaa

SEQ ID NO: 18379 - DNA, 469 bp, Zea mays
  unsure (1)..(469): unsure at all n locations
agctngagctcgggctgtccataatgtccaaggaccatctggcagactgcttggcatacaatagtgtgaaggtttgtgcttactctttccatcaatattttgataatcatnttgggtatattatttgcttaatttaataaaaaattcttttattattaggatcttattttaagtaaaagctttggaagcacaaaaagaatgcgatgatgagagcactaaaatagcctttgggaatctgcgctcggaggttataacacttcagaatgaggctcttgagaaagataagattctgctttctttagtcgaaagactaaagacgagggaagctaatttggccagattctctgaagtggatcaaaagatgtcaaaacttgagaaggaaaaagttgcggacacaaaacatataactgacctagaatatgctttatctatccaagtaaaattgcacaattctgaagtgacagaactg

SEQ ID NO: 18380 - DNA, 496 bp, Zea mays
  unsure (1)..(496): unsure at all n locations
actcagcttcgctgttcgcagaaagggaaccgacttanagatngaaaggccatttagacctctatagtatgctatggaattatcaccaaatgtaaagggcatgtatgtaattntgtatgggttgtatcccgtgcctataaataggtgaacagtacccccgtactgttcacgctgacttggcatttgctnttgcgtcacgcttgtactttntatcttctctcgggaccgaaggtacatttgtaatttgaaatcatttctatttttccatgttaataaaatagaaatgattctatgatgatgcttatattatatttcatactttatatgaatccttcgtcattacttgttatgttcacgaaggtatgtctcttatgaccttcgtccgaagctcattatttcccgaaggggcataatgcttcgaaggacgaaggactntaacacttaacactttttatgttgccttgtcttaactcttagcattgagacaagtccccac

SEQ ID NO: 18381 - DNA, 467 bp, Zea mays
  unsure (1)..(467): unsure at all n locations
agcttcgtgaagatattttccgaagctacacttccgaagatcaatagtgtatctccttgtgacttagcatgattttcccctttttcaaaacattcttctgaagatcgatattgtgtccccttcttgtgccatatgcagcatgatgtatgatgcttatgccatgcgaaatgatgtgatgatgttatgctatgtaaaatggtatttattccgaagatacacgcacatccctgtaataaaacacataatttttttaaatcagcgttgacttttcgctgtaagcctcccttaggagcttcttcgccttttacttcagcggaatcagcgtttatttttcgctgtaagcctcccttaggagcttcttcgccttttactttcagcggtaatcgcgttgacttttcgcgcttcgccttttacttangcggtatcagcgttttattttcgctgtaagctctgcattccctttggaa

SEQ ID NO: 18382 - DNA, 335 bp, Zea mays
  unsure (1)..(335): unsure at all n locations
ccggacttctaccgctcaccggcgactctagtccgggtaagtcaatgcgccattgtgcaattcctcgcgtagactacctctgtgtcacttggtaaagctttccgagccaaccgattgaaccatcccgccgtgagcaggccggctcactcaccgccgacgaactcccccccctgcgcacgaggactgaccaactcctgcgatctccgacaccggcccgtacctcgacatgatcgccgtaacctccccgacatccctggacacctcaccggagctatctcgccgtcggtaagccccaccacccttntctccgccgagggtactattccaataagggt

SEQ ID NO: 18383 - DNA, 506 bp, Zea mays
  unsure (1)..(506): unsure at all n locations
gcttctaagggagaacacattntatgactaaccaatggttattntgagaaagacagggtttgtagcgcatgccaagcaagaaagcaagttggtgctcatcatccacacaagaacatcatgacgaccgacaggccacttgagctcctacacatggacctattcggcccgatcgcttacataagcatcggcgggagtaagtattggcttgtaatagtggatgattattctcgcttcacttgggtattctttntgcaggaaaaatctcaaacccaagagaccttaaagggattcttgagacgggctcanaatgagttcggcttaaggatcaagaaaattagaagcgacaacgggacggagttcaagaactctcanatngaagggcttccttgaggagganggcatcaagcatgagttctcctcttcctacacgccacaacanaatggtgtagtggagaggaagaatagaactctattagacatggcangaaccatgcttgatgagtaca

SEQ ID NO: 18384 - DNA, 277 bp, Zea mays
  unsure (1)..(277): unsure at all n locations
atgctctttgagttcatcgtctccgagcanggcatcgaagccaacccggagaagatcgcggccatcaccagcatggggcccatcaaggacttgaagggcgtacagagagtcacgagatgtcttgcggctctgagccacttcatctcgcgcctcggcgaaagaggtctgcctctgtaccgcctcttaaggaagcccgagtgcttcacttggacccctgaggccgaggaagccctcgggaacctgaaggcgctcctcacgaacgcgcnncatctgatgc

SEQ ID NO: 18385 - DNA, 495 bp, Zea mays
  unsure (1)..(495): unsure at all n locations
agcctgtgaagattcttatcccacatgtgctattcggcgatgccagagccagcccatgttagtcttagcaattaagcaagtgtcgagttcagctctatcaaaatctaccaagtatagctgaccctctaacactcccttaaatgctattgaatcatcacttcttctaaagacagtgacacctacatcagtgaaaagacagttgtagcccattntgcatatttgagatacagaagacaaattgtaatctaatgaatctacaagaaaaacattggaaatagaatggtcaggagatatagctattttaccaagacctttgaccaaaccttgatttccatccncgaatgtgatagctcgttggggatcttggttnttctcgtaggaggagaacatcttattctcccctgtcatgtggtttgtgcacccgctgtcgagtatccaacttgagcccccggatgataaacctacaaacaatttagttctgacttatgtcacaac

SEQ ID NO: 18386 - DNA, 382 bp, Zea mays
  unsure (1)..(382): unsure at all n locations
ctaagcttatcnatagacgtgaaagttccttcctcaatggaccattctttgaggaggtctatattgagcaacctcccagctttgaagatagtgagtaccctaaccatgtctataaactctctaaggcgctttatgggctcaagcaatccccaagagcatggtatgaatgcctaagagattttcttatcgctaatggcttcaaagtcggcaaagccgatcctactctctntactaaaacaattgtaaatgatttgtttgtatgccaaatntacgttgatgatatcatatntgggtctactaacaaatctacttgtgaagaagttagtaggatcatgattcanaaattcgagatgtctatgatggnnggagttgaactatttct

SEQ ID NO: 18387 - DNA, 451 bp, Zea mays
  unsure (1)..(451): unsure at all n locations
agctntcagataattntgtgatcaaattggcacgaanatccattntgcatcagttcgacatccggagtcaaatggacttgtcgaacgagctaacgggatcataatgacaggaataatgaagtcaatcttcaatcagcccaggggaaagtggccagacgagttaattaaagtggtgtggagccataacacaaccatgtcaagatcaacaggttttacacctttcaaactattgtttggggatgaagcaataaccccggaagaggccaaagcaggattaataagaacggtaacttccgcagaaggtgaagacgaagctgattgctctgtggaaaaagatgctatagaagggatcagacttcatgctgtggaaaacatcaataaatatcaagccgaaacaataaaatggcgtgacagaaaggttaagctgaagaacattgaaccaggacatctg

SEQ ID NO: 18388 - DNA, 466 bp, Zea mays
  unsure (1)..(466): unsure at all n locations
tcggctatggntaaaatttnggcagcaaaacagtgcaatatctatgaatgctgtggtaacttcacacctacctgtctgtttatatagtgctgcacgtaagaaggtgaatcgtcaggatttttacacaggcaaacagttgctcgcacccgctgcatggtgggaccgctacgcgctcganaactgtatcgtttctcgacaacgagctcagggaaggtgtttntcggatcttcggcttcctgaagcctaagagactnttttcacggatcaagctcgttacgaaaaacgatctagcaccgcgaaggggctactgttgggaccatgcttcgtcgccgaaggtcctgcggaaagaaaatagcttcgactgaagctgtttgaacgtaataccgaaggtaccattcataaagcttcggtattatagcatgtccgaagatgaaggatcgaaccgacttnatatagaatgaccttt

SEQ ID NO: 18389 - DNA, 387 bp, Zea mays
agcttggtggtgcaccagaccgtaccacagaggctcaatggtcgacaacgattagttttaacgggtgtctaacgtgacaggcaccggaccagtccgatatgcaccggacctccggcatggcacatagaatcatttagagcaacaaaggtagctgacgtggaagcacaccagaccaggttcggtgtacacatatggtgtatcgaactggtttagtgtgatgtagaaaagttgccaaccttccaacgactcttttaggcttgtggctctatatatacccacccaaccgaccatttgtaagagttgagaaacattgctagtgtgttgagacaccaatccaaggctccatacacccaagtgcttaataggatcactcggtgagatattagt

SEQ ID NO: 18390 - DNA, 383 bp, Zea mays
  unsure (1)..(383): unsure at all n locations
ngaagccatggtaagtagcataggccaataatatacgaaatgactcaagcctatctacgggtgcataggtttcaccgaaatccaaaccttcaacttaggagtatcccttggccataagtcgtgctttgttccttgtcaccacaccatgctcatcttgcttgttgcggaaaacccacttggttcctacaacattttggttaggacatggaactaaatgccatacctcattcctagtgaagttgttgagctcctcttgcatcgccactacccaatccgaatcttgaagtgcttcctctaccctgtgtggctcaatagaggaaacanaagagtaatgctcanaanaatgtgcaacacgagatctagtagttacccccttatgaatg

SEQ ID NO: 18391 - DNA, 442 bp, Zea mays
  unsure (1)..(442): unsure at all n locations
agcttctaagggagaacacgtgatatggctaaccaatgttcatttcgaaaaagatagaccttgtgcagcttgtcaagcacggaaacaagtgggaggctctcatcacaccaaaaatgtgatgacaacatcaagacccctggagctgctacatatggacctcttcggacccgtcgcctatctgagcataagaggaagtaagtatgggctaattatacgtgatgacttttcccgcttcacttgggtgttctttntgcaggataagtctgaggcccaaggaaccctcaagcgcttcctaaggagagctcanaatgagtttgagctcaaagtgaagaagatcaggagcgacaacgggtccgagttcaagaaccttcaagtggaggagtttcttgaggaggaggngatcaagcacgagttcttcgctccctacacaccacagcaaaat

SEQ ID NO: 18392 - DNA, 416 bp, Zea mays
  unsure (1)..(416): unsure at all n locations
agcttggcacaatggccagagcgtcnggcagaggcacatgcgtcgcgggcgcagcctctcgtagcgcagccatgcagagggcggcgagggaggcgagcgcaaccgatgcaccgatgccggtgaaggggaggaggtcgttgcgcacgctaccgagggccgcggagagagtggagtcactgctctatggaagggtggcgccggccactgctgcgacaaggtccgaggcggtgagggttatgccgccagacccgacaacgacagtgggcggaggcgctggatccacgacaaacgcgaccgacggcagcggtggcacagagacgcctggtggcggctgcggagcagagaacccgagcggcaatgtgttcatggtggagacacatctagcaatggtcgtctatgacgggatcaacatggga

SEQ ID NO: 18393 - DNA, 431 bp, Zea mays
  unsure (1)..(431): unsure at all n locations
ctttcttgaagatctcattgcagcctataggttgacaaccataatgacggtcaatgacctcccaagttccattagacataatagatntcatctcactccttactgcttccttccataagtcaacatcangagaggaatatacctcactaatggtagttggtgtgtcttccacaaggtacactataaagtcattaccaaaggaatttgcaaccctctgtctcttgctctttcgagtgactatagtgtcatcctcctcagggatgtgcacgtgaagatcctcagcctgatctatangaatagacagttcgtgctcatggngaattatagtctcatgacttgtatcactangtgtattcttcatgggagactcattctcaaaaaatgttgcgtctcttgattccatgatagtatcatcatgcatatcangcaca

SEQ ID NO: 18394 - DNA, 472 bp, Zea mays
tgcagcttaagaaacaaatttcaggtgaatcttaaaacaaaccaatggggggaagactttctcagctgctcggcgtggaacagagaacccaccgtgggtactcgtatcacttgcagtcaacgtcttgcagaagtaattaattggctggttgctaccagcacccaattcaattggaagaaaaggttccttttgctcttcctgtacacggaatcaattgatgaatgtttagactttgtaataccttttaaagggatttttcatgagaatacaggttaaaagcatagagctaagtggcgattggtaaataccgggctcaatggttgcagtgtcatctgggcataaacctctccagtctctgcatcagcctgcattaacaaagaattatttcataattcttcttaaaagattagataatggtcaactaagttcaaactcacatgcattgtgacattatgaagctggcagaataatt

SEQ ID NO: 18395 - DNA, 199 bp, Zea mays
  unsure (1)..(199): unsure at all n locations
gcggatgggcttcataagaactttggctgtacaacttcgcatatcgaaaagatacgaatggccccgatattggctatcgcactaagtgacctaccggntggacgagtgaatggttctgcataaaagcggatgagaagacannggagaaatngaatactatgaccatgagtccaatganattaagcttcnggatgacaag

SEQ ID NO: 18396 - DNA, 377 bp, Zea mays
  unsure (1)..(377): unsure at all n locations
gctatgaggattcttcatcccaacatgagctagtcggcgatgccagagccaacccatgttagtcttagcaattaaccaagtgtctagttcagcttgattaatatcaactaagtatagctgaccctctaacactctcttaaaagctattgaatcatcatttcttctaaagacagtaacacctatatcaagtaaaagacaagtgtagcccattttgcataattgagaaattgaaagcgagttgtaatctaaagaatctacnagaaaaacattggaaatagaatggtcaggggatatagcaattttacccaaacctttgaccaaatcttgatttgcatcccttaatgtngatagctcgtggggatcatcgtttttctcat

SEQ ID NO: 18397 - DNA, 453 bp, Zea mays
  unsure (1)..(453): unsure at all n locations
agctntatcanatggacgtgaagagtgccttcctcaatggccctatcaaggaagaggtctatgttgagcaacctcccaactttgaggatagtgagtaccctaaccatgtgtataagctctcaaaggcgctntatgggctcaagcaagccccacgagcatggtatgaatgcctacgagattttcttatcactaatggcttcaaagttggtaaagctgatcctactctcttcactaaaactattgcaaaggacttgtttatatgccaaatttatgttgatgatattatatttgggtctactaacaagtcatcttgtgaagagtttagtaggatcatgatttagaaattcgagatgtcaatgatggnggagttgaagtatttcctaggaattcanatcaagcaactccaagatggcgccttcatcagccaaactaagtacattcaagacatactta

SEQ ID NO: 18398 - DNA, 324 bp, Zea mays
  unsure (1)..(324): unsure at all n locations
tgatagagagggttacattntatatcctaagaactatcctgagcacaaaattatgaaaatacatgctagaaaacctcatactggttctcatcatgcctatttggataagaatgaggcatctagctctatgcattccactcatatcaaaatgcctaaaaagaatattcctaatgcatcaaatgagcatgacatttcatttaaaacatttaatgcatcttatgtgcttactaacaaatcangcaaaatangtgctaaatatgttgngggcaaacacaagagtcctaagacttgtgttgggtacccaaggtgcttgtttctaatgtc

SEQ ID NO: 18399 - DNA, 483 bp, Zea mays
agcttcacacctctgaactaactcggctgcatcattcttcgcttgtggccaatagaatcctgacctgaagaccttcccaactagtgttctggaggctgcatgtattccacattgcccagcatggacctcctccagaagttgcttcccagtggacgagagaacgcacttcatgaggacgcccgatgcaccccttctgtataatgtctccccaatgagtgtatagtgagccgactgcctggcaattcgctctgccgagttcttgtcgtctggttcttcttcattctttatatacttaatgatcggccttctccagtcatcagagtctgactcgggttgacctatgatgttgcactcttctgtttgatccattgagatactcggctgcagaatttcttgcacgaagactccgggtgggacctgagttcgactggatccgagcttggacagtacatcagctgctgtgttacgatctctttccacatg

SEQ ID NO: 18400 - DNA, 318 bp, Zea mays
  unsure (1)..(318): unsure at all n locations
tagaaacagtttttagcgcttccgaagatgtctgaatctgcttataatgctgctgctgagatgaagctgagtcttgatgaagagaagaacctatggtttcttatagcgatgtcgaagtccaacacagaatagattaccaaggaaattctggaggggctgtctgaagatactggtgacagtgaaagttatgatatggacagcggtggcgaagactccgaagatcgcccctggcgaccaagccattcagtttatggtaagtcaactatcanagaagaatcatcttgtaatatgagaggaanggtatttccggatctgtct

SEQ ID NO: 18401 - DNA, 489 bp, Zea mays
  unsure (1)..(489): unsure at all n locations
agctngactcaggtatccacacattaatccttaatttctttntcccgtctcatggacaaggcatcctccctggatccaaatccatagactaacatctatcccgttatcaagatgagtacaatcaattcctgacctcgcgcaagtgctataaaaatcactcgacttctaccgagatcctgattagcaagcagctactcgacctagcatactagtattcatctcaaaaatggaatcctaagttcatgcaactagaggtttcaagcaactcctacacttaagtgcacattgcaatcctacaagcattaagtgtagtaaagtagcatataataatacggttatgcatataaatcggggcttgccttcaattgctggggctgcggngagatcctcaatagcagtctctgaagcctgctcctggtcctnctcttggacaggtccttgctcggggatgagcacgtactcttcgtcggcagattacaatctaataat

SEQ ID NO: 18402 - DNA, 338 bp, Zea mays
  unsure (1)..(338): unsure at all n locations
ctaagcttacatctcaggactaactcggctgggtcacccttagctcttggccaatttaaaccagacctgaagaccttctccaccagagttctgtacgctacatgtattccacactgaccgacgtggatctcatctaatagctacttgcccagaaccgaggaaatgcacttcatgaggactcctgtcgcaccccttctatacagtgcgtcccctatgaaggtgtagtgggccgactgtctcgtgatgcgttctgctgcagccttatcatccggntcttcctcattctttatatacctaatgataggctctcgctagtcattagagtctgactctagctg

SEQ ID NO: 18403 - DNA, 388 bp, Zea mays
  unsure (1)..(388): unsure at all n locations
tatgttggccattatttctctattgacatttatctctttattggctagagacaatataagagtcttcttcgtcatttccaccatataccaaggaccctcggnggtattttagatccttggcataatgttgcacttcgacaatctgctcttctgatagttgcttttccgaagcatgtcgaacaatatagtccaaatcatcctgngaagatgttttgggagcaagcgtcgagggtttctctggaaagctctctttcgtaagattntctggtacaacttctgaaggcctcgcctcgtcatgggcagaggtgctggtagtaatcatctctagaacatctttgtgtttactcccaanagcttcagcagaagaaggaggcagcattttcacata

SEQ ID NO: 18404 - DNA, 483 bp, Zea mays
  unsure (1)..(483): unsure at all n locations
agcttatgaagattcttcatcncaacatgggctagtcggcggtgctctatccaacccatgttagtcttagcaattaagcaagtgtcgagttcagctctatcaaaatctaccaagtatagctgaccctctaatactcccttaaatgctattgaatcatcacttcttctaaagacagtgacacctacatcagtgaatagacagttgtagcccaatttgcataattgagatacagaaagcacattgtaatataaagaatctacaagaaaaacattggaaatggaatggtcaggggatatagcaattttacccaatccttcgaccaaaccttggtttccatccccgaatgtgatagctcgttggggatcttggntnttctcgtaggaggagaacatcttcttctcccctgtcatgtggnttgtgcacccgctgtcgataatccaacttgagcctcgatgataaacctacaaacatgttagttcttga

SEQ ID NO: 18405 - DNA, 474 bp, Zea mays
  unsure (1)..(474): unsure at all n locations
ccctttgacatcaaacaccaaaaaccatactcgagccagaacacaggatgatgtcaagggacagcacggtgtctaaggagccaaaaaacgactatcaaaactcccccttacttaatgaacatatgcactatcacgtttaggtaagatacatatatgcaaaaagattaatacttccttttgtacctttaccatgttgtagtgcacttcccatcttgaaaagttttaatctctcgaaagcttctccacacttgtgcctgattctttaccctaaccttttcttggtgctaagacaccaaacttagaacaagttatagtatggggcacaagaagaaacntctattctaatgaatatcanaagatgtcaaatgaagcaaactatcacagctaccaantgaaagataccaantgcangttcatttattatcatagcttcatgaatattaagataagcatctattatcaccagatattata

SEQ ID NO: 18406 - DNA, 305 bp, Zea mays
  unsure (1)..(305): unsure at all n locations
atttangacaacaaaatcaattgataagtattggttgagagcatgccagcaggaacaagtagagtatcatcacacaaacatatgacaccgacatgccgtgaatactccaatggattattcggccgctcgcttacataagcatcgagggagaagtattgcttgtattgggatgatattctcgcttacttggtatttttttgcaagaaaatctcaacccaaagaacctaaagagattttaagacggctcaaatgagtcaattgggatcaaaagatataagcataatggacagagttaaaactctcaa

SEQ ID NO: 18407 - DNA, 460 bp, Zea mays
  unsure (1)..(460): unsure at all n locations
agctntatctgaagctggctctgttattttgaagagtggatgaattagggtaatattaatagctaaaaggggtgacaaacttattaaccaacttttagcaattcaatgtacctattctgctgtaaatctaggtttgcaccgaattaactaaatgaccattgccaattcactataagtctagttttgactttattgatgaatcaaatgaggcaatattgttgattattaatcaaacaagagtaacccanacctttgattntaatcgctaatgtcattatccttaatccatatcatcattctcatggttatcattggtcttactatgatgagatagctcaagtcaagtgctcactatccaggagtgatggcgattngaatcgattattgactagctggcggngtattcctaacacanaccacacccacagtacttcatgggatacagtcactaccatacgta

SEQ ID NO: 18408 - DNA, 415 bp, Zea mays
  unsure (1)..(415): unsure at all n locations
nttcttttttgacatgacgaaacatagaagaccgcttcttcctcttgccgaagctntttcttttttgtacataacggaacataaaagaccacttcttccttttgccgaagcaaccacttatgaacacaaatgctatgaatgaatgcttatgaatgcaaatgctatgatgtaatgtgcgaatgaatgtccaaagcatataaccgaagccacactcaaccattatttccttggaatcaaccacacatcagctctgcattcccttaggaacgactttggagcttcctcgtctnttacttagacgggataaactctgcattcccttaggaacgtctntggagtttcttcgccttttacttaggcggtataagctctgcattcccttaggaacgtctntgggagctcttcgtctttactt

SEQ ID NO: 18409 - DNA, 120 bp, Zea mays
  unsure (1)..(120): unsure at all n locations
agctttgatgattagggccatctcctcattgtcgagcttggaggcgncaatnnggtgtctacttggtgtagactccttcttcttctcctccggtgccttataggccacccggtgcgcctc

SEQ ID NO: 18410 - DNA, 333 bp, Zea mays
  unsure (1)..(333): unsure at all n locations
tcttcacctaaaagacagattacgaatgctcatatgctatgtatggaacacattgcttcaattggtagttgatcaatagtagttccttccaagtggcattctttcaattggtaataatatattctatggaaaggaatgtcaatatgaaggttaaattccttttggattaaatttgtaaattggtgcatattgttaattcactcatccatgtgcgttaacttaaaaggaatttaatttatgcctttatgcctcataaatgatgatntatttgccattcatatacaaatatcatcattcattanatacttcattgtactactaatacctcttttc

SEQ ID NO: 18411 - DNA, 395 bp, Zea mays
agcttccatacgaatattccaatatggaaaatcgtcaccataaaaaacgggaggagatccatccccactagacatcgttactctagcggttaagctaatctaagagcaacaaggttctgataccaattgaaaggatcatgatgcccaagaggggggtgaattgggcttttctaaaaatcaataataattaaaacataagcaagagcccaacttcaccgcgacaactagcaataagagaataatactagaaacacaacaatgctaagacaatacttcaaatacttgctaaacaaatacacaatgtaaaatgtttgaattaagtgcggaatgtaaagcaaggtttagaagactcctccaatttttcccgaggtatcgaagagtcgacactctcccct

SEQ ID NO: 18412 - DNA, 421 bp, Zea mays
  unsure (1)..(421): unsure at all n locations
tcttccttccctccggccgccaacgcatcgcggtcaaantgagagccacctctctcggagtctataaattgagccccccctcggcttcgctatgtatnttactagctatcgcacccgctcccacacccgattgtccaccagctcgcctgaattntgcactctccccaaatcggttctccgccgccgtagaagtgaactcaccgtcgccagcccaactccggtcagtgcccgcccttttcttcctcgtttgagcattctcatgcctctgtgatgctccccgacccctttaattgaactagaccggcgcccatcgtcnggaacacgatcatgtntgccgtgtgcttacgggcaccgtggccggagcttcctagtccaccgatagtgtaatttagtgggggaaacgttcataggaactcgaatt

SEQ ID NO: 18413 - DNA, 444 bp, Zea mays
  unsure (1)..(444): unsure at all n locations
aatctgattggcaagtgtatctgttgagggtatttctgtaaaatacataagttctattttcttcatttaaataattcttagaacatgttttacttggaacctcctgtagttttgagcattatagagactaagatggtgctatggtattttttcagaagttgagttattgtcctctctgcaattcggtgaagaagatgggtggctatcagcattctattcatgtttggtcacgaaggtacttgaattaatatctgaactnttacacatgcaaaagccgaaagtataatgggtacttgcttccttttgctgattgtttctcttttgcctttaagcatganaaagaatatttagttgaagcanaattcaaggaacttgagcaagaagcttgtagtatttcgtcctcgagttctggtgaaacaatgaaaaataacattgatgttttgt

SEQ ID NO: 18414 - DNA, 411 bp, Zea mays
  unsure (1)..(411): unsure at all n locations
agcttcccttttaccccgaaacgtgatacacccttcattggtgaaactttcaagtagacataatctccaactagaaagtacaagggttgtcatcgtttgtctgcataactcttctgacgagcttgagcttctttcaaattatgaattattcgttaaacattctcttctgtttcctttaccatatcaggcctgaagaaatctatttcaccgggttcagaccagtttaacggagtacgacaccgtcgtccatacagggctccaaagggtgacattntgatgctcttttgatagctattattgtatgagaactctgctaatggtaaacaatcatcccatttctgtgggaattccaaaacacatgctcacaacatatcttcaagtatctgatttaccctctcagtctgtctacta

SEQ ID NO: 18415 - DNA, 394 bp, Zea mays
  unsure (1)..(394): unsure at all n locations
tcacatctctggactaactcggctgcgtcactctttgtcattggtcagtagaaaccagacctgaagaccttcccaactagagtcctagatgttgcgtgtatcccgcattgcccagcgtggacctcatctagcagttgcttcccagtggccgaaagaatgcatttcgtgaggactcctgttgcgccccttctgtatagtgtttccccaatgagagtgaagtgagctgactgccttgcaatgcgctctggtngcattttgtcatccggctcctcctcattctttatgtatctgatgattggctccctcgagtcatcagaatctgactctggttggctcanaatattgcactcttctgctcgatctagtgaaatgcttcggcgcagtacttcttgga

SEQ ID NO: 18416 - DNA, 130 bp, Zea mays
tgcggtcttagtggcaccttcaaaagtcaaaacatgttttgaagtcaaactggatttcaattgcacaaataatattgctgagtaccaagcacttcttttggggcttccgaaattaagggccatgggaata

SEQ ID NO: 18417 - DNA, 339 bp, Zea mays
  unsure (1)..(339): unsure at all n locations
taaccacttttattaattcatctggccacttccctttcggctgattgaagattgacttcatttttcctggtattatgattccatttgccctttctaccaacccatttgactctgggtgcctcactgatgcaaggtgtattttcgtgccaatttggctacaaaaagttttcaaaagttcagcattgaattgagttccgttatcaacggtgatagccttcggtacgccaaagcgacaaactatgttctgncagaagaatttttgcaatgtggccgaagttattgtagccaaaggcttcacttcaatccacttagaagtgtatttcacttgcaccacacata

SEQ ID NO: 18418 - DNA, 426 bp, Zea mays
  unsure (1)..(426): unsure at all n locations
cctttatactaagctcgaatgaaatgccaaataatggctaagggtgattctcatgtttgttatggttcaacttccaatcatagagatgataatggtgatttacttgctaggaatgatgaattgaacatttctcttgctagccttaaagtgaaaatgagaaatgttgcttaggctaagggtttgatgcttgcaatattactatttctaaccttagaagtgaaaatgacatattacatgctaanggtatagacgtaagatcttgcaaaccctctacatctagtggtgagcatgantctatttgtgctagatgtagagatgttgatattaatgctagtcattatcacatggctttaattaaacaacacaatgatcatatagcaaaagtagatgctaanatggccgagcatactagagaatgaacaatta

SEQ ID NO: 18419 - DNA, 442 bp, Zea mays
  unsure (1)..(442): unsure at all n locations
agcttctaaagggagaacacantttgngactaaccaatgttncatttgagaaagacagggtttgcagcgcatgtcaagcaagaaaacaagttggtacccaccatccacacaagaacatcatgatgaccgacaggccgcttgagctactccacatggattcattcagcccgattgcttacataagcatcggcgggagtaagtattatcttgtaattgtggatgattattctcgcttcactttggtattctttntgcaggaaaaatatcaaacccaagagactntgaagggattcttgagacaggctcaaaatgagttcggattaagaatcaagaaaataagaagcaataatggaacggagttcaagaactctcanattgaaggctntcttgaggatgagggcatcaagcatgagttctcnttctcctacacacctcaacaaaa

SEQ ID NO: 18420 - DNA, 488 bp, Zea mays
  unsure (1)..(488): unsure at all n locations
agcttatgaagattcttcattccaacatgggctagtcgacggtgccagagccaacccatgttagtcttagcaattaagcaagtgtcgagttcagctctatcaaaatctaccaagtatagctgaccctctaacactcctttaaatgctattgaatcatcacttcttctaaagacagtgacacctacatcagtgaatagacagttgtagcccatttaacataattgggaaacagaaagcaagttgtaatctaatgaatcaacaagaaaaacattggaaatggaatggtcaggagatatagctattttacccaaacctttgaccaaaccttggtttccatccccgaatgtgatagctcgttggggatcttggttnttctcgtaggaggagaacatcttcttctcccctatcatgtggtttgtgcacccgctatcaatgatccaacttgtgcccncggatgcataaacctacnnaaacaagttagttcttga

SEQ ID NO: 18421 - DNA, 352 bp, Zea mays
  unsure (1)..(352): unsure at all n locations
caccattcaccagcaccctagtcgaggatgagcatattatcttggatataagattgcaccaaactggaccgaaaccaagatgcccaagaacttccagcataaatggccaagaaacagaatcaaatgccttgccaatattcagtttgagaagcacattggggattgtgtgtttcgggattgctctggctgtatggtgcaccataactaagatgtcttgtatgcttctcccttntacaaaagcactcttggttggggatatcagctcangaagcgtgggagcaagccggtttgccattaacttggtaacaatgttatgcaaactatgaataggctgataggcctaaatctttta

SEQ ID NO: 18422 - DNA, 418 bp, Zea mays
agctcgtgaagggtcttcatacctacatgtgctaagcggcgatgccacagccagcccatgctagtcttagcgattaagcatgcatctataccggcctactcttttgcaaaatcaactaaataaaggttgccgtctagtacacccttaagagctagtgaaccatcacatcttctaaagacagacacatctacatttgtaaatagacaattatatcccatattacataattgactgatagatagtaaattatatccaagagactcaactaagaacacattagatatagagtgctcattggatattgcaatcttgcctaaacctttcaccttgccttggttcccatcaccgaatatgattgaatctcgggaatccttattcttgacgtaggaggtgaacatcttcttctctcccgtcatat

SEQ ID NO: 18423 - DNA, 434 bp, Zea mays
  unsure (1)..(434): unsure at all n locations
gcttctanagggagaacacgtgataggtctaaccaatggtcatttcgaataagatagaccttgtgcagcttggcaagcagggaaacaggtgggaggctctcatcacacccaaaatgtgatgacaacatcaagacccctggagctgctacatatggacctcttcggacccgtcgcctatctgagcataggaggaagtaagtatgggttaggtattggtgatgatttttcccgcttcacttgggtgttctttttgcaggataagtctgaaacccaagggaccctcaagcgcttcctcaggagagctcaaaatgagtttgagctcaaggtgaagaagataaggagcgacaacgggtccgagttcaagaactttcatgtggaggaagttcttgaggaggaagggatcaagcacgagttcttcgctctctacacaccac

SEQ ID NO: 18424 - DNA, 524 bp, Zea mays
  unsure (1)..(524): unsure at all n locations
tctcgaccngatccttaagcacctgangctgcagcttctaagggagaacacgtgataggtctaaccaatgttcatttcgaaaaagatagaccttgtgcagcttgtcaagcaggtaaacaagtgggaggagcacatcacagcaagaatgtgatgaccacgtcaagacctctggagctgctgcatatggacctcttcggacccgtcgcctatctgagcataggaggaagtaagtattggctagttattgttgatgactnttcccgcttcacttgngtgttctttntgcaggataagtctgaaacccaagggaccctcaagcgcttccttaggagagctcanaatgagtttgagctcaaggtaaagaagataaggagcgacaacgggtccgaattcaagaatcttcaagtggaggagttccttgaggaggaggngatcaagcacgagttctccgctccctacacacctcancanaatggtgtggtagagaggaagaacaggacgctcatagatatggcgaggactat

SEQ ID NO: 18425 - DNA, 380 bp, Zea mays
  unsure (1)..(380): unsure at all n locations
ggatactccagaccgtggtggtgtcattagtatgaataggccacttaaggccatcacactggtaacaccaccaatatcatatgatctagtcaagaaatcactgcagaataaaaaaaagtatacatatgacaatatctatgtcagtgaaatatgaaatgatgtgcaaataatacagaaatcgtacagcctaccataagatggaagggtttgacattgaaggaatgacattttgatgaattgaagcaaggacctgcaagataccccacaaaatcaaggcatgaaaccatagccaacaatgaagcacctaactactacanaataaagtgagtagatgagggaaaacagacaatgaatattntcatcttcattagtacttatat

SEQ ID NO: 18426 - DNA, 408 bp, Zea mays
  unsure (1)..(408): unsure at all n locations
tctcgaccggatcttaagacacctgaagctgaagctttcacagcacttgagagacggaacgagaaaagaagaatgcgatccacgcgacacgagccacagaagaacacaaatgatcctctcacgagcccttaatcactagcgttgattntgggaactttgagaggattgattgttttcatcatgtcttggagtgttgcacttcgctcttgcaatgaatgagaaactcagaatgcttggatggctttgaatgaggtggttaggggggtatttatagcccccaaccacttcctagccgttggtgaagtctgatggcgatgggcgcaccggacagtccggtggcgcaccggacagtctctgntcactgtccggtgcgagccacgtcagcgcacccgttatggttttggagta

SEQ ID NO: 18427 - DNA, 431 bp, Zea mays
  unsure (1)..(431): unsure at all n locations
cgtgaatggctngctgaagcaacataagctgtaggttggttgcttacatattcnggtatgtaaggagagtgacacgaagcagtgtgtaaaacctgcttcggctgattctgccgagcttctgcttcggcaatctccttttgctttagaatagtgatttggcacgttcttgtagtgtggcccttgtctcttaccacagaataagcaataaatttcctgggctgatccccatatcttcctccgaagcccctgccgcctctgccccttgaagctggtggcctgaaggagccttgttgctgtcccanagactatgaggtgtgctatggcctctgaagctggcttcctttgtcatcattctgactggagctgtggattgatctgacatgcctagggtggattcttcctccaaagcccctagtcatctcagagaatct

SEQ ID NO: 18428 - DNA, 480 bp, Zea mays
  unsure (1)..(480): unsure at all n locations
taagctttaatgtgctngcattggtagacatcgacatangtcaccatttggaaatgtgaacaattttacccgttcgttaatctgctgcattctcctgtttctgttcagtggaccttgcgtgtcgtacatgcttcgcaaaaaggctctctacnatgacatgtcaaggtactgcacaccattttatgttttgatatggttatcactggaacattttataataccccgttacatagccctgccgctcttctttgtggtgtagatatgtctgttgcgctggctacatgccatgcagtggaaagtgtggcgagagccggtgcccaaagttctgtcttgcaactgatgtacaaggacaaggctcactcaagttggatattaccctggtgtctatatgcactgtacttagtgtatgcctatgtgcttgaattccatgtatagcatgtctaatagttcatatgcacactcgacaactgatggttccta

SEQ ID NO: 18429 - DNA, 450 bp, Zea mays
  unsure (1)..(450): unsure at all n locations
gcgacacaagatactcagctngtcatgaatgtgacatggcttaaaaattgtgactnntgtactttgttcaaattcgaccgtgccctctatggagaaatgatctaatggtgcataatatcttcaaaaagtatcataaaaaaataaaggtctacaaacattcacctgaagctatagaaaactatattggaattaacataacctattcattcaaaggttttgtagaaacccatgaaaatattaattaattatatagtaaaacatatcgctaagaaaatttcatgaacataaatactcaaatacatgtataaggctctagggaacatgtctcaaggtccatgcactacaacccatctcgcccncaaatcgaacgcangtgtggctcgcccgaaccctacatcgacaaccaccatcgagacgaagcttcctcgtgttgcatctgtcgtcgttctt

SEQ ID NO: 18430 - DNA, 342 bp, Zea mays
  unsure (1)..(342): unsure at all n locations
agcttgactcacgtatncacacattaatccttaattcatttttcccgtctcatggacaaggcatgctncctggatccaagtccatagaccaacataaatcccgttatcaagatgaatacaatcaaatcctgacctcgcgcgagtgttagaaaaatcactcgacttctaccgagatcctgattagcaagcagctactcgacctagcattctagtattcatctcaaaaaggaatcctaagttcatgcaactagaggtttcaagcaactcctacacttaagtgcacattacaatcctacaagcattaagtgtagtaaagtagcatataataacatggttatgcat

SEQ ID NO: 18431 - DNA, 436 bp, Zea mays
  unsure (1)..(436): unsure at all n locations
tccacgtgttcgacgcgagctggcatccgggggcgcgctcagagtacgcttgtgcgcgaacccccgtgcgcccgcggncgcccgtgaccacgctcgcgccacgggtataaagcctgccccagtgcttggctgccttccccgttacctcctccgtacctcgccggacttgcccaagccagccattaactccggcgacctccccgcgacccgccagtgccgcccgagagcaaccaccgtggccagcccctctcccgtcctcctccgttcgatccaagccctcagttagcttcctggtgaagccgtgagactngctcaagcttgaaccggnggccctcgtcaccggagtagcccaatcgcgctcacaggagttcaagaacccgccggcgcacgtggaccgggtaagccccntgcaccgtttccaattccttgacgcatg

SEQ ID NO: 18432 - DNA, 473 bp, Zea mays
  unsure (1)..(473): unsure at all n locations
agcttgtccagatgctntaactgggatagatacagggatagataacctgacttctttntgtccatgacttagctgaacagtcctttgattggcattgataatagctntattntgggctaaccaattcaaacccagaatcacatctacgtctgcctctttataactatcatattggtggggaaatcatatccggctaaagtcacgggtacatggaagactacttgcttcgtaaaaatttgacccccaggtgattgaataacaagactcttctntgattcgacactaggtatgcaatgcttctcaacaaaagtcttgctcgtgaaagtatgtgatgcaccacaatcgaaaagaatgacngcgggatgattggaatgganaantacccatcatacaggctctcctttaggtggagagatagaaactcattagtntcctttacctttgctgctgatgcttgcacatttcttgcttga

SEQ ID NO: 18433 - DNA, 407 bp, Zea mays
  unsure (1)..(407): unsure at all n locations
ngagtncaatcatttgcanaggataattgatgctcataatgattatctgggtatgaaacacatacgagagaagataagggctggagtagccaaatgtttcaaggaagacgatcaaggtgtgatatggtttaaaaaccgcatagtagtgccaaagaacgaagagctccgccagcaaattcttgatgaagcacatcttagtcgttattctattcatcccggaagcactaagatgtaccaagatttaaagcaacattactggtggacaaagatgaagatcgaaattgcacgttatgtggctagatgtgacacttgcagacatgtcaaggccatacacatganaactgctggtccattacaatctntgccaatcccaacatggaaatgggaagacatcagtatggacttta

SEQ ID NO: 18434 - DNA, 418 bp, Zea mays
  unsure (1)..(418): unsure at all n locations
agctggtggaggttcttcatccncacatgtgctaagcggcgatgccacaaccagcccaagcaagtcttagctattaagcatgcatctagaccggcctcttcttttgcaaaatcaactaagtaaagtttgtcgtctagtacacccttaaaagctagtgaaccatcacatcttctaaagacagacacatctacatttgtgaataaacaattatatcccatattacataattgactaacagatattaaattatatccaagactctcaactaaaaatacattagagatagagtgctcattagatattgcaatcttgcctaaacctttcaccttgccttggttcccatcaccgaatattattgaatcatgggaatcctcattnttgacgtaggaagtgaacatcttcttctcccccgtcatat

SEQ ID NO: 18435 - DNA, 502 bp, Zea mays
  unsure (1)..(502): unsure at all n locations
ngagctgctgccatgcaaccagaatgcacaggagttgatcctacttgaacatccatggaagtgtgagagggagaaccaactcggacaccctcgggggctgggtcatagctcgcgctacccatccgagccggatcatccncggtgacaccctcggnggctaggtaagcgctagcgccatccttgagggccgagctctctgtaacagccacctctaaggctgaaggaccttcatccacttccatgggagtagaacaatccagaccagcctcctgacccttaagaccgcgctccaaggtcgatgaggcacgggacgccgctcaggataactccaacctgacatcaggcacatcagcacaaatatccatcatcccaccatctgtcggctccgacaacagatcctctgggaccatatcttcaagagtctgatncaaaattgccagagacaactcttgcagaccaacganggcggacannagtggagaaaggacaccactactttccc

SEQ ID NO: 18436 - DNA, 446 bp, Zea mays
  unsure (1)..(446): unsure at all n locations
gaattctaagatatttgaaggatactcccaatattggtctatggtatcccaaaggggctcactttgaattaattggatattccgattccgactatgccgggtgcgaaggttgtagaaaaagcacctccggttggttgcaatttcttggtagatctcttggttcatggtcttctaagaaacaaaattcgggtgctctatctaccgccgaggcggaatatatatcgaccggaaattgttgtgctcaactattatggatgaaacaaaccttattggattatgngaattatttcaagaatgtgcctctcatgtgtgataatgagaagtgcggtaaattggctaccaatccggtccaacactcaagaactaagcgtattgatatacggcatcacttcttaagggatcatgttggcaagggagatatctctatttattccattgacatggat

SEQ ID NO: 18437 - DNA, 297 bp, Zea mays
  unsure (1)..(297): unsure at all n locations
gttaacctaggtatgaaccagggttaatccatggacatgctttctcttctcttatatacagagatatgcaagagaagtgtatacaaaaggaagatataggcacaagtttaaatgaaaggagatagtntaacctttgtgcacctttacatagagacgctctcttcattgcgctgtgcccttagtcttagatgcttaagacctatactcaagacagtgtgtgaaaatatttcgcacacgagagagttctacaactagagactcctttctaagccatgttattatatcccaagtagatca

SEQ ID NO: 18438 - DNA, 466 bp, Zea mays
  unsure (1)..(466): unsure at all n locations
tatacgaattgactcaagcctagctacgggtgcataagtttcatcgaaatccaaaccttcgacttgtgaatatacctttgccacaaatcgggctttggtccttggcaccacaccatgctcatcttgcttggtgcggaatacccacttggtaccaacatcattttgattaagacgtggaactaaatgccatacctctttccttgtgaagttggtgagctcttattgcattaccaccacccaatccggatctcttagtgcatcctctatcctgtatggctcaatagaggacacaaaagagtaatgttcaaaaaaatgtgcaactcgagatctagtggttacctncttatgaatgtcaccaagaatagaagtgacggggtgatctctntgaattgcttggtggactcttgggtgtggcggctttgatcccaaattcttgtcatcttccttgcttcatttgcatctccct

SEQ ID NO: 18439 - DNA, 465 bp, Zea mays
  unsure (1)..(465): unsure at all n locations
tgtgaagattcttcatcccacatgggctagtcggcgatgctagagtccacccatattagtcttagcaattaagcaagtgtcgagtttagctctattgaaatcaactaagtatagctgaccctctaacaactccttaaatgctatggaatcatcacttcttttaaagacagtaacacctagatcaagtaatagacagttgtagcccatattgcataattgagaaatagaaagcanatggaatctaaagaatctacaagaaaaacaatggaaatagaatggtcaggtgatatagcaatttaccaagtcctttgccaaaccttgatttccatcccgaatggatagctctttgggatcttggttttctatacaggagaaacctttctccctgcatgggttgggccccgtatcaatatcaactgaccccgatgctaactacaaacattaggcttgtctaggaccaacagc

SEQ ID NO: 18440 - DNA, 505 bp, Zea mays
  unsure (1)..(505): unsure at all n locations
agctntaccttgattcccaaatacagcatatccttgagagtctnttcctttatcgagtaagacttgcgaaagaacactccgtactcagggttttcgaacccatgttgttgtaggtgatgaaacagccgagttttgttgtttctgctctaaggtggtgccaaaggaggaggaaaatcagtaaacttgttggcgggacgatgttttgcctcccagttatgtaatattaagtgctgcactcgaacacccgttatgtaataaatactctctatatattttatatgaatgtaaattatgttattgtaatccttttctgcttattctttactccaattatttgtgtaatgtctgggttatgggtgaagcgctcttaggcgatatgaggaagatacaaataaccaaaattgtcgagtgattatgcgcacctacatgattgtctgaggtccttannngacaggacatctgtagtgggcctaataccttgggaggttccgtgacagctagtatc

SEQ ID NO: 18441 - DNA, 455 bp, Zea mays
  unsure (1)..(455): unsure at all n locations
ttctgagatcaagtatatttatttcattcctcaacatgcaaaagcgggtcttatcaagaggcttagtgaaaatatccgctaattgatctttcgacctcactccttctaaaatgatatctcctttagccacatgatctctaaggaagtgatgacggatatcaatgtgcttggtgcgagagtgntgtacatgaatattagcaattttaacagcactctcattatcacacaacaaaggtaccttttctagaactacgccatagtctagaagagtttgttcatataccaaaattgtgtgcaacaagcacctgcggcaatgtattccgcttcggcagttgacaaggcaacactatgntgctnnttggatatncatgatactagtgatctaccangcagatggcatccccagaagtactttttctatcaattntgcacccgggcatatccgaatcggaata

SEQ ID NO: 18442 - DNA, 507 bp, Zea mays
  unsure (1)..(507): unsure at all n locations
agcttctaaagggagaacacattntaggactaaccaatgttcattntgagaaagacagggtttgtagcgcatgccaagtaggaaagcaagttggcgctcatcgcccacacaagaacataatgatgactgacaggccgctcgagctactccacatggatttgttcggcccgattgcttacataagcatcgacgggagtaagtattggcttgttattgtggatgactnttctcgcttcacttgggtgttctttntgcaggaaaaatcacaaacccaagatacattaaagggattcttgagacaggctcaaaatgagttcggattaaggatcaaaaggataagaagcgataatcggatggagttcaagaactctcanatcgaaggctttcttgaggagtaaggcatcaagcatgagttntattctccctacacacctcaacanaatggtgtagtggaaaggaaaaatagaactctactggacatgacaagaaccatgcttgatgagtaca

SEQ ID NO: 18443 - DNA, 296 bp, Zea mays
  unsure (1)..(296): unsure at all n locations
aactcaagctggatatatgtgcatgtgttatacgactctttctctagntaattgttatgttgtattgnggtgcggaaacatccgaaatgtttgtcgtctttttagtggagtaatggtgtgcgctcgacgatatgtatctagctaacgctaatgggtgtggttgcttgtgatgtctcgctacttactgtgtgaatcgctagcgtggacttaacggatcctgggctattctattatattcatacatatgcatcttgcacctcatataggaccgagagatgatgatcgaaccagcgatg

SEQ ID NO: 18444 - DNA, 454 bp, Zea mays
  unsure (1)..(454): unsure at all n locations
agcttctanagggagagcacattntaggactaaccaatgttcattntgagaaagacagggattgtagcgcatgccaagtagggaagcaagttggcactcatcatccacacaagaacataatgacgactgacaggccactggagctcctacacatggatctattcggcccgatcgcttacataagcatcggcgggagtaagtactgtctagttattgtggatgattattctcgcttcacttgngtattctttntacaggaaaaatctcaaacccaagagactntanaaggattcttgagacgggctcaaaatgagttcggcttaaggatcaagaaaataagaagcgacaatgggacggagttcaagaactctcanattgaaagcttccttgaggaggagggcatcaagcatgagttctcttctccctacacgccacaacanaatggtgtagtgga

SEQ ID NO: 18445 - DNA, 357 bp, Zea mays
  unsure (1)..(357): unsure at all n locations
ctaagcttcgacctccgactaactcggctgatcactnttcggtggtggtcaatataatcccgacctaaagactctcctgactagtgtcttggacgctgcgtgtattccacattgtgcagcatggacctcgtctagaagtcgctttccagtagatgagagaatgcacttcatgaagatgcctgatgcgccccttctatatagtgtctccccaatgagtgtgtagtgagctgactagctagcgatgcgctcggctgcattnttatcgtccggcgcctcttcattctttatatatctgataatcggccttctccagtcatcagagcctgactctggttgattcacgatattacactcgtc

SEQ ID NO: 18446 - DNA, 445 bp, Zea mays
  unsure (1)..(445): unsure at all n locations
agcttctanggtgggttctcttggtcatctgggtttttggttttgaagggtctccaaacttcaatgtctntgttgtttttagcatgggaggggagcaggggtaaaggcgaaacaaacaggtccatttgatagttgagttgggtccaacatagctaaaagttgggaactaactggaatggtggtttgcacatgaagtttgttgctggttgtgtacctgcttactgcccttgttgggaactccagcccctctgccaaggacttgtctgccattctagactaagtaatttctcactcttgttactattccctctnttctaaattataattnttggttatttaaacggagagtaaagntaagtccctcatgtttcattntntaaacatgtttgaagagttcagttgacccccattnnttgtgcatgtatgtacctaantttcttgagtt

SEQ ID NO: 18447 - DNA, 370 bp, Zea mays
  unsure (1)..(370): unsure at all n locations
tggaggcgtcgatagggtgtctactcggtgtagactccttcttcttttcttccgtcgccttgaatgcgacggggtgagcttcngatgtagatggatcatcaagctcgttgatctttctcgagccttcgatcatgcactcaaaacttacagaatgcccgattacttcctcgggggtcattttagtatatctaggattaccacgaattaattgaacttgagtgggggtaaggaaaatgagagatcttanaataaccttaaccatttcgtggtcgtcccacttgacgctcccgaggtgcgcacttggtcaccaagggctgaccggttgacatgtgtgtggtcttccctttgcaagccgaaccgacgagctccc

SEQ ID NO: 18448 - DNA, 509 bp, Zea mays
  unsure (1)..(509): unsure at all n locations
gctntaccatatgttatcttgtacccatcaaacacattctccacgatcctcatgaatgtcctaaccttcatatttggttccgactgcagtattcccataagtcgcttcccgatgagggttgatgtcaattggcgatgtttcatcgttaactcatgttcagcacatgtgtgtggccccactacttttggtatcttccactttgcggtgatactttgtatcctagcacaaaccctccatgaacagttatccttgtcgcatacaaccgtgtaacgacgtttctcgtacgaatgaagtactctatacggcctcttacgtaagactgcataatgctgcaaccacctcttcaaggcagttaggtccttgaagaccctaccctttncaatcatcatgctaggaccggcctcaggagcgtcaagcagctcatcatccctgccctctngcattgctgatgagaaagactaagatcgctgaactcatgcactctangatcccgaccgtctggaaaacac

SEQ ID NO: 18449 - DNA, 413 bp, Zea mays
  unsure (1)..(413): unsure at all n locations
gggtatctntccttacctttccaggaacgtctcacccgtcttgtatacattacagaacatcggagataaagaaatgcggaagcgattacataacatacatttattaaaaagtaagatcatgttgtttattacagaccaggaatatataacgagtgcagtgtaatattattacacataccaagggaggcaaaaactcctcccgatagttattacacaagaagtcttaatggaggatcctttcctcccgcacttcactcttgcttttcttcattaggaaccaccttggtacagaagcaacataactctgctgcttcctcacctaataacaacaaggggataaaccctgagtatggaattactcaacaagtcttacccgactaaggaaaaagctctcaagggtatgctggataaat

SEQ ID NO: 18450 - DNA, 485 bp, Zea mays
  unsure (1)..(485): unsure at all n locations
agctntgagagtggattgctggataagaatgaatatgatcataccattaaggatttattgcaaggaacacaaagaanataaaattgttcaagtaaaatttatataaccaaaagttaaataggtataattttcataaactccatttctatgtaatacattacggtatttatgtttttataattnttatattttagtgattttatgataagggcctctattcaataattttgtacatggtctcagtttttagcggcactaccctgaaaaagactctcaacactcactaacgctcaaaaagtagcagccgctcgctgcaaggacatgacctctntgatgagacaggcaattgtcgatgccggcttctcaaaattatgaaanattcctttatntccaaatctnccacacaagacagatagtgagaccatcaaaacttctacgttcgggcttcaccatctatagcttaaccctttttcaccatttataca

SEQ ID NO: 18451 - DNA, 308 bp, Zea mays
  unsure (1)..(308): unsure at all n locations
tagcgcatgccaagccgggaagcatagtggcactcatcatccacacaagaacatcatgacaagtgacaggccactagagcctcttcacatggacctattncggccgatcgcttacataagcattggcgggagtaagtactggctagttatagtggatgattattctcgcttcacttgggtgttctttgtgtaagaaaaatctcatacccaagagaccttatagggattcttaagatgggcttaacatgagttcagcttaaggatcaagataataagaagcgactacgggacggagttcaagaactctc

SEQ ID NO: 18452 - DNA, 492 bp, Zea mays
  unsure (1)..(492): unsure at all n locations
agcttctaaagggagaacacgtgatagggttaactaacgtgcatttcgaanaagatagaccttgtgcagcttgtcaagcaggtaaacaagtgggaggagcgcatcatagcaaaaatgtgatgaccacatcaagacccctggagctgctacatatggacctcttcggacccgtcgcctatctgagcataggaggaagtaagtatggtctagttattgttgatgacttttcccgcttcacttgggtattctttttgcaggataaatctgaaacccaagggaccctcaagcgcttcctaaggagagctcaaaacgagtttgatctcaaggtgaagaagatacggagcgacaatgggtccgagttcaagaaccttcaagtggaggagtaccttgaggaggaagggatcaagcacgagttctccgctccctacacaccacaacanaatggtgtggtagagaggaagaacacgacgctaatcgatatggcgaggacaa

SEQ ID NO: 18453 - DNA, 497 bp, Zea mays
  unsure (1)..(497): unsure at all n locations
ctcaagcttcgcgtgtctcgcgggtcagccaagctcggactcgaccccttcgtccatatatgggtcgccaggaacccctgtgccgagtaagacaccatagcgagcagagatggaaagccgcaggagaaagctctggcatgtccgcctaccgtgaatctgcggagcgggctgatggaccgaacctangggaatttctcatcggagctcaccaccgccgcggatccgccatcgactgtggacgtggcgaacagctacacgaatcacggtggtgattgctcaccggaaccgcggagccatctgtaccgngagcagggcactgcgcagcgtataaactggtatggagccctcatctaattccctatgtttatctgcgctatcttacctcgatcagagttcggccccgatcggagatggcgtctgcatggcccgcgtgtggctgtgagcgcccgtggcttcggtcctctgctgatgaaaagctcctgcgttattgaacgact

SEQ ID NO: 18454 - DNA, 483 bp, Zea mays
  unsure (1)..(483): unsure at all n locations
agcttaaagggtaataagtcaaagtctatgtataccactagaagccccgcataactaagaaaaccctaagttacttcttggcttagtctctttttgcataatgttattaaatcatgcataatcatgacatacatgttcattgcattcgctagactgtaatcttgctgacggagagtacatcctcgtgccggagcaaggagctgctcaggaggtagccccagatccagcaccagagccagcaccagaggacctgcctgccactgctttggaaggcaagccccggttntatgcataacctgttatttatgctattttcctccacttaatgattgtaggattgattgtgcacttaagtgtangaatttcttganaccctagttgcatgatctcaggaatcctattgagctgaatactagtatgctaagacgagtagctgcttcataaagtangatctcngtagaagtcgagtgaattttctagcac

SEQ ID NO: 18455 - DNA, 414 bp, Zea mays
  unsure (1)..(414): unsure at all n locations
ggtgaaggttcttcatccncacatgtgctaagcggcgatgccacattcagcccatgctagtcttagctattaagcatgcatctagaccggcctcttcttttgcaaaatcaactaaataaagtttgccgtctaatacacccttaaaagctagtgaaccatcacttcttctaaagacagacacatctacatttgtaaatagacagttatatcccatattgcataattgacttacagatagtaaattatatcccagagactcaactaanaacacattagaaattgagtgctcatttgagaatgcaattttacctaacccttttaccttgccttgattcccatcaccgaatataattgaatcttgggaatccttattcttgacgtaggaggtgaacatcttcttctcccccgtcatat

SEQ ID NO: 18456 - DNA, 498 bp, Zea mays
  unsure (1)..(498): unsure at all n locations
agctntagactaggatcaaaaggtgttggagaatctttggagtcagaatccccaaagcgggttagaatgttctccataaaatgagattgtttcagaataatcccattctcacccttaatcagttttatgtttaatataacatttgcctctcccaaatccttcatatcaaaattttgagataaaaatgatttcacatcatttatcacatcaatactagtcccaaagattagtatgtcatccacatacaagcacaatattactcccttaccaccagcaaaccgatagtacacacaagtgtcagcttcgtttaccacaaagcctgctaacgtcagagttctatcgaacttctcatgccatttctttggcgccttcttgaggccatataaggatttccttagtctacacaccatgttctcctatccatgcatcacanatctctctggctgcttcatatagatctcctcgtcaagctcaccattaaggaaagatgtcttcaca

SEQ ID NO: 18457 - DNA, 378 bp, Zea mays
  unsure (1)..(378): unsure at all n locations
ggtgaaggttcttcatccncacatgtgctaagcggcgatgccacttccagcccatgctagncttagctattaagcatgcatctagaccggcctcttcttttgcaaaatcaactaaataaagtttgccgtctaatacacccttaaaagctaatgaaccatcgcttcttctaaagacagacacatctatatttgtaaatagacaattatatcccatatgacataattgactcacagatagcagatggtatccaagactctctactaaaaatacattagagatagaatgctcattagaaatcgcaattntacctaaaccttntaccttgccttgattcccatcaccgaatacaatngaatcttgggaatctttattcttga

SEQ ID NO: 18458 - DNA, 446 bp, Zea mays
  unsure (1)..(446): unsure at all n locations
agctttgcctcgggcagactaataccagaaagaccaacacacaatgggagtggagagatggcgagagtagcgtgtaccctccatggaaagaggctggacggtggtgtatctgtgctctcggttggcatgagcccggtctggtcttaagaaccccagtggcgagttgacatatgcaagggttaagtgctacatatgtcgtgtgatcggagatccccagctgggtattaatcaatttggatcgcttgtacttctcggatataaagacttggtcactgacttacacatagcaatgcagtgaactgatggtatgataaaaagacggctagtataggccaagtgcttgaactatggtagaaagaactctggatgcaggtaacttcacttaacttgacangtaanaatggattttaagaatccattttagtaagcatttctgcaacagagtc

SEQ ID NO: 18459 - DNA, 486 bp, Zea mays
  unsure (1)..(486): unsure at all n locations
atgttgaatcatccncaggttcaacttctccatttcttggcataacgtcttgtcagaagtcttcatggtaagacaatggcataaagccttacgacttaacgcatctgccactacattagctntgcctgggtgatagtgaatctctaattcataatcctttatcagctcgagccatctcctttgtctcatattgagctctgactgggtaaagatatactttaaactcttatgatctatataaatatgacagacattccccagcagataatgacgccatattntgagggcatgaaccacctcagctaactccaggtcatgagttggataatgttcttcatgtcggcgtaactgccttgaagcataagctattactcggccttcttgcattanaacacagtcgagaccactggctgatgcgtcacaatacacatcanangggttttcaatatccggntgaaccgataccgggagcagtggtaataatac

SEQ ID NO: 18460 - DNA, 297 bp, Zea mays
  unsure (1)..(297): unsure at all n locations
tggaccccctctcttgaagcctttagttgagagaaagaatangccaatgcacatttcataatttaaaacttaaccaaaggttaagagtaccaaaatggttaccaaagacagccaaggaactttaccaaaagacccctataagacccctaaatcagcccccaagtagagaacactatggaatcacccccattccctctaagtccaaaatcagccctaatctagagatcaggggtgttcacctagctaattgcaccaaaaccccagggtctaaatagcaaaaaggagctaaattatcta

SEQ ID NO: 18461 - DNA, 404 bp, Zea mays
  unsure (1)..(404): unsure at all n locations
gtagcataggcaagtaatatacgaatggactcaagcctagctacgggtgcataggtttcactgaaatccaaaccttcgacttgtgagtatcccttggccacaagtcgggctttggtccttatcaccacaccatgctcatcttgcttggtgtggaagacccacttggttcctacaacattttgattaggatgtggaacaagatgccatacctcattcctcgtgaagtngttgagtttctcttgcattgccaacacccaatccgaacgtcttaatgcatcttccaccctgtatggctcaatagaagacacanaagagtaatgttcacaaaagtgagcgactcgagatcgagttgtacccncttatgaatatcgccgaggatgggagtcacgggggtgatctcgtga

SEQ ID NO: 18462 - DNA, 394 bp, Zea mays
  unsure (1)..(394): unsure at all n locations
acatgtgctaagcggcgatgccacagccagcccatgctagtcttagctattaagcatgcatctagaccggcctcttcttttgcaaaatcaactaaataaagtttgccgtctaatacacccttaaaagctagtgaaccatcacttcttctaaagacagacacatctacatttgtaaatagacagttataccccatgttgcataattgactaacagatagcaaattataaccaagagactctactaaaaacacattagatatagagtgctcattagaaattgcaattntacctagcccttttaccttgccttgattcccatcaccgaatataattgaatcttgggaatccttattcttgacgtaggaggtgaacatcttcttctcccccgtcatat

SEQ ID NO: 18463 - DNA, 409 bp, Zea mays
  unsure (1)..(409): unsure at all n locations
gagaaaagtgcggctaaagaagccgaatcccttactcccgaagcactctccgaagattntgattatatcattcgacatgctgcgggaaaaagattattccaagaagaaatttttgaagcccaacactatgcccgggaactgaagtatccgaagggggctttaagtgttaacggtacggacgaagatgatttcctgtacttgctgctggacnaacaaagaatatccgtcttgccggagatggccagaagtatgggttttccgaagctcgaagctggtctttgcgccatgacgaaggccgatcttgcagatagtcttgcatacaacagtctgaaggtacataaatngtgaattttgaagctatgaactctgaaatgaaagctttattctcatgtaaatcttttattctttc

SEQ ID NO: 18464 - DNA, 505 bp, Zea mays
  unsure (1)..(505): unsure at all n locations
agctngctcgacaaatgggatggtgagagggtttgggtgtactntgcgtacggtattcctaggtacacgacaacatccaactcatcttttgtaaatcttctagttcattttagtccctacaacatattgtaaaaatgatccatctacctagcatcatatacatatgattcactagaagtataagtctctcttcccttatttttcttgtatttcaagtacttcttgtcggttctagaccaatgcctaaggttgtcacaatagaagcatttatctttgggagaagggtcagacttacgctgtgtatttggctttgaaatctcatttttagcgttgtccttgcactttcccttcataaagtagntttgcttcttgctatncatttggatcatcatcacgtcattatagtttttataatgtttttcttagctgtcttaagcatccatgcaacttagccaaagtcttatccatactanttcatatgaatattaanatgaagagctcatat

SEQ ID NO: 18465 - DNA, 388 bp, Zea mays
  unsure (1)..(388): unsure at all n locations
actcagcttcatagaatgacagcgaaagtccttcattctcagataggcagatatgttcttactctatgtgacgatatcatagtaaaaagcacgaagcaagaacatcacattgctgatctgcaagagacattcgctaattntatgcaagctggcctgaagttgaatctagaacagtgtgtcttcggagtaaagaacgggaaattccttgngtgtctagtttcaacaaaagggatcgaagctaatccaaataaaatcgaagctattctttgaatggagccgccaagcacaaagaagggggctcaacggctgacaggaagactggcatctctgaatcggttatatctagatcagcagagagaaatttaccattctttgaagtattgaagtc

SEQ ID NO: 18466 - DNA, 441 bp, Zea mays
  unsure (1)..(441): unsure at all n locations
agctngaagctggcctctgcgccatgacgaaagacgatcttgcggatagccttgcatataacagtctgaaggtacaaaaattgtgtatttggaagcttatgaattntgaattattcttttggtggtatattaacccattcattcttttcatataggggttaatacttagcaacgtcttaagggcgcaaaagaatgtcgaagacgagagttgcactattgctctcaacaaccttcgaacagaggttatcaagctgaggaacgaagctntggaaaaagacaaaattctacttacattggtggacaaagtaaagggggatgaagctaacttcaaggctcaatctgaaatccaaaggaatgagattgaaaaccttcaaaaacaactggccgaagccaaattgaaatgcgctattgccgaagctgaccgagatgtcagtgagtact

SEQ ID NO: 18467 - DNA, 442 bp, Zea mays
  unsure (1)..(442): unsure at all n locations
tgagtggtcagctagcatctctccgagtactttgtgcgagaatcttttgttgcttgcactaagtcccactaatctttgcttagatccattgataagtttttgccttggttgaccagcaacattgntacacattntgaatacttattgagctttacatttgctaaattgtttgtgctaatccttgctctaaagtgcagccttcctacagctccacaaatatctacagtgtgcaggttgtgtcctctgacaatcgctctatccaagcttcgtggntgcaccgctagttgcaggtcacccctggtggttttgtaagaaaatgataagaccttgataacggntcttagtttgagcgccatngtctacaactcacttcgactagctgaggacatacnntatttgttcttggtctctagtctttgcactaactatggtangacacatg

SEQ ID NO: 18468 - DNA, 438 bp, Zea mays
  unsure (1)..(438): unsure at all n locations
agcttctaaagggagaacacgtgatatgttngactaatgtgcaattcgaaaaagatagaccttgtgcagcttgtcaagcaggtaaacaagtgggaggcgcacatcacagcaaaaatgtgatgaccacctcaagacctctggagctgctgcatatggacctcttcggaccagtcgcctatctgagtatagggggaagtaagtatggnctagttattgttgatgacttttcccgcttcacttgggtgttctttttgcaggataagtctgaaacccaagggaccctcaagcgcttcctcaagagagctcanaatgagtttgagctcaaggtgaagaagataaggagcgacaacgggtccgaattcaagaaccttcaagtggaggagttccttgaggaagaaggaatcaagcatgagttcttcgctccctacacaccacaac

SEQ ID NO: 18469 - DNA, 345 bp, Zea mays
  unsure (1)..(345): unsure at all n locations
tatctcagcttcgactgtcctgaatctcgctgctgggagtggctggctttctttggctgctggccttggggataagcgggttgcattggtggtggaggtggaggttgttgccaagatgcctgaggttggcttgccgaagcaacagagactgctgtcggtgttttgggtccgaccgcacacccggggttgcccctcaaggtgtttttaggagtangacggtgtcaacgactgtagcaaaatggttcgtgccggtcgcacgagggacagtggacaagatttgcaggttcgggccgcttagaagtgcgtaacaccctacgtcctggtgagtatatgaagtgtggtaca

SEQ ID NO: 18470 - DNA, 464 bp, Zea mays
  unsure (1)..(464): unsure at all n locations
agcttgccttcgcctcagtataccacccgcaatccaacggagttgtggaacgagcaaatggaaaaattttcacagttgtcaagaagatgctcctcgacgataaanagggcaagtgggccgatttgttacctgaagcggtctaggcattaaacacgactgagtgcagggtgactgggttcacccctttccgccttctatacggatcggaggccatgaccccgcaagaaataaaacacgggtccccacagacagtcccgtcagctgtccccgacgtggacgagcccacttcgaaggacctcatcgatggagaccgcgtcttcgccctacaggctctaaacaaataccaagcccaaacaaaagcatggcgtgaccacgcagtcatcccgagggaattcagcgaaggagacctcgtactcgtccggacagctcggacggagtcccggngcaagctggagcccaagtgg

SEQ ID NO: 18471 - DNA, 455 bp, Zea mays
  unsure (1)..(455): unsure at all n locations
tatacagaagaatagaagcaagagctcgaccatatgttattatataatgtgagttatacaagcgcggggtctgttccccattactcaagtgcttatccagatccgaaggtatagagttaatgaaggacatacatgcaggtctgtgtggatctcacattggatctaggcccttgcttggaaaagtctttcgccaaggattntattggccaaaggcagcttcngatgcagcggatttagttcanaagtgcgaaggttgtcagaaatgtgcaagagatcaaaaacaaccttcgttttaactcaataatacaacccacttggccattgcanagatggngtctggatntgctangtccattaccaccagcacaggggaacttaagatatgtggtggtggcagtggaatattttccaaatggatgaggcgaagccctagccacaataactcatttactatt

SEQ ID NO: 18472 - DNA, 510 bp, Zea mays
  unsure (1)..(510): unsure at all n locations
agctngtattccctactacaatctcatacccctctgttggaagtagggccttatcttgctcgaactatgataaagacttgtgtcatcttgcatcacccatctgggtcagggcacgtagcattgtttcactagttggtaagagccctatgtccagataccgataataaccaagtccctcacgtttaagtgagcaacgttggattcccaaaatgaaatccatattggctttcccaccatatgccttctccaaatcttgagttagagcttttactttacctacttacatttcattctcaacaataacttgatactcatcacaaacaacattatcattcatgagagacattntgcaattatcacaaggaatgttagtagtatgtggttcacttgtaggactatcaagtaaatcacaagtgactccaacatcttcggtgaccaccacgatgtcatgcacacaagaagggtttngagcttgctcaagcttctcacaactttccttgagaaatgtat

SEQ ID NO: 18473 - DNA, 458 bp, Zea mays
  unsure (1)..(458): unsure at all n locations
tacctgactccttcttctccaccggcacaatattggagactcactctgcgtatctgcaaggcctaataaaattagcttctagcagccggtggatttcgtccttgattcgtgggagaagatccggacgaaatgttctagctttctgcttaaaaggtctgaaaccggacttaatgggcagccgatgctctacgatctctcggcttagtcccggcatcttagtgtaattccaagcaaagcaatctgaatattccttcaatagaccgatcatctcacttatagaatcggtctccagggtcttaaattttaaaagtggccttagagttntaccatctnctatgtcgatctcctccaaaggatcagccgatgtanacccatgtcctagcttatcgngatctctgaattcctctatcatgtctcccacagaggaatcagtcgatctttgtgtgatagcggactct

SEQ ID NO: 18474 - DNA, 465 bp, Zea mays
  unsure (1)..(465): unsure at all n locations
agctngaatctggattaagcgccatgacgaaagaagatctcgcagacagtcttgcgtacaacagcctgaaggtataggaattaaacacttgaaaaacccccttatttttacgcaactcattccttttttcttatatgaattctttttcgtatagggcctgatcctaagcaacgcactaagagcccaaaagagcgccgaagatgaaagctatgaaattgcgtttaataatttacgctccgaagttatcagactgagaaacgaagctttggaaaaagataaaattctgcttacactggtagataaagtgaaaaaagacgaagctgcttcanaggcccaggccgaagctcanaaacgtgagattaaagatcttcagaaacagctggctagagctaaagaggagcgcgcgctngangaaacgaaacgagaactttagtgatttatggtcagcannatggaatcaagagt

SEQ ID NO: 18475 - DNA, 410 bp, Zea mays
  unsure (1)..(410): unsure at all n locations
ggtggatgtatgctcaagcgatctttcaacaaccgtctatccactcttaacagtgttcaagttgtgggaaggtatatgggtgctgtgctgtgcgcanggactgaactcacaccatatataagttaaagcaaacactattccgatccataccaaaatctccatgatttcactgaccacagtcacagagtagttatggtaactgctaactgagaaataaatgttagatgtcagctnttgttaagggaaagatagaanatactgtagctagtaaaaggatatatcatgtatcgaccaagaatgataacaaggtaaaagcatatgtgagacactggtatgcacgccctgatttagtaccacatcgtctagccaaaggggtgtcgtggtgcccttataagtgcggggtttctctc

SEQ ID NO: 18476 - DNA, 378 bp, Zea mays
  unsure (1)..(378): unsure at all n locations
agcttctaaagggagagcacatnttgggactaacatatgttcattttgagaaagacagggtttgtagcgcatgtcaagcacggaagcaagttggtgttcatcatccacacaagaacatcatgacgaccgacaggccgcttgagctactccacatggatctattcggcccgatcgcttacataagcatcggcgggagtaagtattggcttggtattggggatgattattctcgcttcacttgggtgttctttttgcaggaaaaatcacaaacccaagagacattgaaaggattcttgagacgggctcaaaatgagttcggcttaaggattaaaaagattagaagcgacaacgggacggagttcaagaattcacaaatag

SEQ ID NO: 18477 - DNA, 478 bp, Zea mays
  unsure (1)..(478): unsure at all n locations
gtaananatgggtcaataatacaagtcatcacgacacanagataatatggtggaattagcatatgctgtggaccttttcctatgacagcattacatactagacaagggtgaacctccacatgtgcaaaatcacaagctaacaaaaacatgagtagaaattntatgctggttattagtgattatcgtatcatggtctgtcaacggtgttggtgccattgcactntnttcctatcctnntttgttctgtgctttgcccttgcattntgttcaaattatataagactgagagcagaaacaaagaaccaactttcagaatggcattacttaccagtggcatatcanaagcaaagaaagtgccaacaggcttgctggaacanacaccatcttatatnggacaggtaaatgtgccttttgtttcacatgacctncaggagctctgattgataataacaagagaagcagcagcagtaggaaaata

SEQ ID NO: 18478 - DNA, 499 bp, Zea mays
  unsure (1)..(499): unsure at all n locations
nttgggaaattcccataaaataaccattagggatctntggctaatattcggcttatggncataatattatacctaggtaccagcaaaaataacccttaagataaaacccactcctagaagagagttgtagttcacagcaccccctctggcctaaattntaatatntttgtttagagaaaaccattctcattttaagcctcaatttttgagactgtgttatacaaaccagtgaggagccactgtaatttctacattaattttgaaaatttctaaatcagtgttgtagttcanagccactctaanagcccaagtaagaanagggaagaaggcttaacgaagtactaaatcagtcatanataacttagccaagaaccttagttaatcttcataatacattgaagaaatgttgagacaacctttagccacttctagactggcacactacttctatacanagataccctaaatctaatagtgacaagactgnctgtactgagac

SEQ ID NO: 18479 - DNA, 451 bp, Zea mays
  unsure (1)..(451): unsure at all n locations
agcttaacaaatcttagtgcacaagagctaataattgagtgagtgggagcaattggccagagagcgtatcaaatgagtttgcggtatggccgtatttatacgccaagtgcgttgaaaattgaaagaccccgcttgtcagtgaatgttgctattctagcaaagggaaggtgttttttcggaccttcggcgtaaagccttcgtccatgtcgcaatctaaatttattattntaaacaaattaatattgcgaggggctactgttggggaccttcggcatccgaaggtcctcanaaacaggatttaacagtatttctggagtataatgtgtgaacaggtatcttctgattcaagtcagcatcacagtagaccagagtaatacgaaggttgatacagagtcgaaggtgtgagcaggatagcttctgcgcagtagcaaatagtgagaccgacttatag

SEQ ID NO: 18480 - DNA, 325 bp, Zea mays
  unsure (1)..(325): unsure at all n locations
agcttcgtcagttgtggcccgagtggacttatcttgacaggcaaagattcaatcattacctttaagatttcctctacttcggtagcagagggtgttgcaccagattcttcttcctcattaattgctttctgctttggagttgtagcttttctcttcttcgaaacacctgttntcggctcaggctctaactttttcttcttttggtgtgcttcatcgtctttattcagagcaccagctactctnttcctcttttgaccttcgacatccttgtctagctgctcgtagtcggggtactcaaaatccagagcatccattacacgattta

SEQ ID NO: 18481 - DNA, 407 bp, Zea mays
  unsure (1)..(407): unsure at all n locations
ggtgaagattcttcatcccaacatgtgctagtcggcgatgccagagccaacccatgttagtcttagcaattaagcatgtgtcgagttcagctctatcaaaatctactaagtacagctgaccctctaacacacccttaaatgctattgaatcatcacttcttctaaagacagtgacacctatatcagtaaagagacagttgtagcccattntgcatagttgagatacagaaagcaaattgtaatctatagagtctacaagaaaaacattggaaatagaatggtcaggtgatatagcaattntacccaatcctttgaccaaaccttgatttccatccccgaatgtgatagctcgttgnggatctntgtttttctcatatgaggagaacatattcttctcccctgtcatg

SEQ ID NO: 18482 - DNA, 375 bp, Zea mays
ccctcggacccggccggacttcttctttgtgcgagatcgacctcaccggacatcggtcttccgccgccgcgcgtggagcgagctatccagtgagtctccgaccgattccttgcacccatatcttctctggcatcccgtgaacctctctgacccatccaattgctctatctcgccgtgaccaggccggactcctcgacgtcgacgagcattccctcctgcgcgcgtggaccgaccgactccggccatctccgacggcgacccgcacaccgttgtgatccccgagacactccctacatcctcgaccacttcaccggagcaatctcgccgctggtaagcccctccgccctttcttgcgtcgcgaatactgtttaagat

SEQ ID NO: 18483 - DNA, 395 bp, Zea mays
  unsure (1)..(395): unsure at all n locations
tctcctggacaagtgctgcacttaccgctgagtgcgaagctgccacatataataacaaaggagcccctggcgttggtggagtcaatgttgttaaatctatcagatattgcttcagttcctcgaaggctntttgttggcttggtccccattgaaaaacttcgactgacttcaacacttcgaagaatggtaaatttctttctgctgatctggatataaatctattaagagatgccaacctccctgttaatctttgggcccccttttttgtagttggtggctccattcgaagtatagcttcaattttacttggattagcttcaattccctttgttgaaaccaagcatccaagaaatttccccttctttactccgaagacacanttttctggattcaac

SEQ ID NO: 18484 - DNA, 503 bp, Zea mays
  unsure (1)..(503): unsure at all n locations
aggacctataaaactcagcttgtatgcgctatcaacaaagttggatgcttagcacatattatgttttgtgcanaaccatacctagcatctgccaccatatacatttgtctactaatggtatccacagaactgtcaagaccatctctagatcggcgtggctcttgatgtggacacatgcccataagaacattcctaatgcctcacatgactccacctcttgtgatgaccttaacccatgatatctcgctaaagtatcatgtaattctataaaagaatctggagtcatacgagaattgtcatgacacttcctgaaattgctcatattaagttccacccattggcgaccatgcacgtgcagcaatggagtacgaagattaatcatatgagcatgagtgtacgaatgagagacgaaagcagctagaaccggcgctacaccagctagctgcaatatgatggagctattatcacttggcgagacgtatggcaaagtctttgcactacta

SEQ ID NO: 18485 - DNA, 275 bp, Zea mays
gaccaaaacgtggtataactcatatctctaaaggaataaactaacaccagcaactgctcacatccgatgctaccaataactcaacaagccctaactaagtactactagtaaatgctcaatggtctatatgattgcgagaaaactaatctactattctttggctgtttctggactatatgagataagaaaacagcgaatgaaagtagatctctcaccgataaaccttgctctgataccaactgatgtgcacccgttgggtgattgcccgatctttc

SEQ ID NO: 18486 - DNA, 337 bp, Zea mays
  unsure (1)..(337): unsure at all n locations
tgacaacgaagctgaagatctcgtcgtagtccatttcggtgcgctgagtgatgaaataacaacttgtcggtgaccacgttggtaccagggggacacgtcaccaaatcactcgtcgaagtanggggactggtggactatgccgcacacgccattggtagacgtgcangatgggtgaaccgagtcgaagggggtcgaagaggcggggccacactgtgcgcggttggaggcgacgggccgcacgtggcacgatcaaaggcgagggagctacatanggcacgaaaaaggccatggaacgggtggtatgagagaggagggacatctatgagagagtcaagga

SEQ ID NO: 18487 - DNA, 445 bp, Zea mays
agcttctctagcatacagcagcactggagatcttctatcttccatatggatggtaacgaccagcagcaccactgccgccactgccaccatagcctgtcctatcaccatagagtccaccggtgccaaacccatcaccagtattagcccaggaagagtcataactacgaccatagctagaaccaccatagcccccagcatcacgctcatatgcaccagctaatccaccatcataactaacaccaccatacccaccaccaatgctgcctccataagtgctaccatagcgactagaataaagggaaggttcacggtatcctactaatgctccaccataagtagcatagccactaccataatcaccaggaccataagcactactgtagctgctatgcctagcgccaaaacttcgaggtgatctatatggaccaaaactaccaccataatt

SEQ ID NO: 18488 - DNA, 483 bp, Zea mays
  unsure (1)..(483): unsure at all n locations
ctaagcttacatgtctcgtatgattcaaaatcaaacgaagttaaaagcctatcagaatgaagcttcttcatgcgattctcacttatatgacccaaacgacagtgccacatgtaggtaggacttaaatcattaggccgaggccttttagcactaatattacagataggtgcatcatcaagatttaaaatgaataacccattcataatggatgcaaaagccacaaacatgccattcttagagatcacacaaccattgttttcactcgcaaatgaataaccatccttcatcaaacatgaaggagacataatgtttcgactcatactaggaactagataacaattatttaactccaaaataaatcctgatgggaggtggagttgcatcgtcccgacggtcaacgcagcaactcttgcattattgcctacccggaaatcaacttctnctcttttcacgcttctacttcttatcattccctgcatcgaa

SEQ ID NO: 18489 - DNA, 473 bp, Zea mays
cccagcgcttacatgctcacaacgccattcggcgatgacctggagcactcctggaacatcgacaaccttcgcaaattttttggttgacccatttatggctgatttcgcccttgtaattcgccgcaaacaatcttgtaccggcccgcactcttttcctcccggggggtgaggtttttaacgatgcggagccatgtaatatatgtgagaaaaatcccccgcaaaaacatgtgtcgaaaaaagaccgcgacaacggtcttcggcattcgaccaattcgaagtcaccgcgaggctaagcgctatccaccctcgcgtgcgacaagtccgcgcagaagtcgcctaatggtgcagccggacttatcacaacaagtgcgataaaattccgatgtctatcgcgaagactatccgcgcagaagtcgcctaatggtgcattcggacttatcacaacaagtgcgaataaatccgatgtctatcgc

SEQ ID NO: 18490 - DNA, 479 bp, Zea mays
  unsure (1)..(479): unsure at all n locations
actaagcttgcgagatatcctctgataatacgaagatggaagatgtgccgaagcagactatgagcccttcttcatcttctgctgctgaggtctcggggattntgaaggtaatgactgagcttttcccatttgcactgctaagtcctctgaggttggaactgactagcctcttgcagacaagggaaatctcttcggctaccaagggaaaaaacggngggcagaagaagcgacgtatgatgaatatactagaagccattgaatagaccccgccctcagcttcggcagacaaagctactatatccgttgatgccgaagctaccgccgcagccgaagacgaaaatctcacaaccaccctgtcagaaatcgacagacttatatcaaacgtggttgcgcagaaagaggtagccgcattagtttctgataaggcaaagaanattgaagaaacctcttcggaaagtgtgaatntcaacctacgtcac

SEQ ID NO: 18491 - DNA, 484 bp, Zea mays
  unsure (1)..(484): unsure at all n locations
agcttatacataaacctagctagtcctnctcttatctggaaatgctctccaacctcacggacacattgagtactcctcatcacctacaacaacatgggttcggaaaccctgagtacggagtgtactttcgcaagtcttacccgactaaggaaaaatgactctcaaggatatgttggttaagtatgaatcaacgaaaacgctttatcaagaatcaacttatatactcttgcagaaatagcttactaaagcgagtccttactttcaatattgtaacgccagattaaatattaatagactctggttgcatctaatctaatttcaccatctcatcaatacaacatcacttttattcataatgttcacatcctgacttatgttgcatggcagcgatcaagtctgcactctctgtggatataacggcgatccgaatcgattactctgctgtgatctcaaccacacgaatatgtncactaacccttgatat

SEQ ID NO: 18492 - DNA, 430 bp, Zea mays
  unsure (1)..(430): unsure at all n locations
tctaaagggagaacacgtgatacgtttgactaacgtgcatttcgaanaagatagaccttgtgcagcttgtcaagcatgtaaacaggtgggaggagcgcatcacagcaagaatgtgatgaccacttcaagacccctggagctgctacatatggacctcttcggacccgtcgcctatctgagcatatggggaagtaagtatggtctaggtattgatgatgacttttcccgcttcacttgngtgttctttttgcaggacaagtctgaaactcaagggaccctcaagcgcttcctaaggagagctcanaatgagtttgagctcaacgtgaagaagataaggagcgacagcgggtccgagttctagaatcttcaagtggaggagttccttgaggaggaagggatcaagcatgagatctccgctccctacacacca

SEQ ID NO: 18493 - DNA, 401 bp, Zea mays
  unsure (1)..(401): unsure at all n locations
atcctcttagtcacctgctgctgcagcttctaagggagaacacgtgataggtttgactaacgttcaattcgaaaaagatagaccttgtgcagcttgtcaagcatgtaaacaagtgggaggagcacatcacagcaagaatgtgatgaccacttcaagacccctggagctgctgcatatggacctcttcggacccgtcgcctatctgagcataggaggaagtaagtatggtctagttattgtagatgattnttcccgcttcacttgggtgttctttntgcaggataagtctgaaacccaagggaccctcaagcgcttcctcatgagggctcaaaatgagtttgagctcaaggtgaagaagataaggagcgacaacgggtccgagttcaagaaccttcaagtgg

SEQ ID NO: 18494 - DNA, 486 bp, Zea mays
  unsure (1)..(486): unsure at all n locations
ntgcttaataacatactctgtacagaagcaaccttcgttaganaacaccttcgttgttaaaaacaatgcagagtcgaagaaaagtttttaccttgaagttagaatagaataaactaccgacgatatgctgtcgtcggtagcggctaatatcggtctcaagcttcgggaagccaatgctcttcgacagagtaccgacgaccttcgctccagtctggtctcggagagaacctaagctttcatcatcgataccgccgaagagtagcgctcctggctgatacccacaggagatggcatagtctctcaattcttctttctcagcctttgttaattcttgtccaatcaagttttgaaaattgaaattntcttcttccgaagcatcttcggctatttccttctctttctcaggcactgtggccatggtttcttcggcggttgcagcagcttcttctgcgggcatgtccagaagtantttatcaatattagaaa

SEQ ID NO: 18495 - DNA, 418 bp, Zea mays
  unsure (1)..(418): unsure at all n locations
agcttgtgaaggttcttcatccacacatgtgcttatcggcgatgccacagccagcccatgctagtcttatcaattaagcatgcatctagaccgacctcctcttttgcaaaatcaactaaataaagtttgtcgtctagtacacccttaaaagctagtgaaccatcacatcttctaaagacagacacatctacatttgtaaatagacaattatatcccatattacataattgactaacagatagtaaattatatccaagagactctactaaaaacacattagaaatagagtgttcatttgatattgcaatcttgtctaaacctttcaccttgccttggttcccatcaccgaatatgattgaatcttgggaatccttattcttgacgtaggaggtgaacatcttcnttctccccgtcatat

SEQ ID NO: 18496 - DNA, 454 bp, Zea mays
  unsure (1)..(454): unsure at all n locations
tcgtcatctgaaaggaatataccctgaaggtaagagatgatctcagttctccaatcttcgctaaagacaggagatatgttaaggactgctctttcaagaagttccaccgaaggtgcttttattgtttcgaagaacacatccgaaggtagaggcagcccctgtgctgctgacttagctaacaaatcagcatgctcattttgtcctcgagggatatttttgacagaaaacccttcgaaggaagcttcgactcttcgaaccatatccagatatttttcaagcttcggatccttagccttgcaactcttgtcaatatgacccgaaacaacctgtgaatcagttttaagtatggcccttctgattcccattgcttttaacttccgaagacctagaatcaatgcttcgtactcagcaatgttatntgtgcaattaagatcaagctatgccgcataacaag

SEQ ID NO: 18497 - DNA, 459 bp, Zea mays
  unsure (1)..(459): unsure at all n locations
agctntacattgtgctcatcaggtctacccacttgcacattgttntgttctatgttgggcctaaatggtaaaccatatatatatatatantatatatcgaatgaaatgtctctagccttttttatggctatagttttttttattctatcgtctaataaaatccatggaaagcttttgccgtcgtttctaaaaaaaagcctctagccttagttntctttgcactgtgcacatcgtaggagtagaaattttggtatttttttcttataaaaataatttacagttaaacttctggattntcacaagctgtttctttgttgactgcacttttgactgcagcgtgcatggtcttgttcgtggagaaaacatggaactaggtcgtgattctgatacaggtggccaggtaaacatcattggtcagttacttgtgagaagttccttatgccgagtcaatgttttcat

SEQ ID NO: 18498 - DNA, 447 bp, Zea mays
  unsure (1)..(447): unsure at all n locations
ntagggtaaaagtcataaaatgaccccaagaataaacttgaatcacttttatacccctgngatattaaaaaccctaattggaaccctggaaaaccctaaaaccaaaccctaggggcctatgtgcaaaattagtccacttttggactaaagtgccaaaaaccaagttaaataggtatctttagtcatttgggtcacatatatgtgaatttgcaagttaaaccctaagttttgggcttaattgcaaaaatcacctcttaagcactatagagcctaagtctgaaattcagtttagttggttcaactttggagccctgtatcttttaaaatatagggattttgcccaaagtgaaccacaacaagttgtagcccaattataggagaacaactttgtttaagagcacaagccatgttcttgtaagagaatgggagataatcatgcccaaactt

SEQ ID NO: 18499 - DNA, 387 bp, Zea mays
  unsure (1)..(387): unsure at all n locations
agcttgatgtagcaacctcatgtgatgatttgattcaagaagagcaaactagtctacatgctgaattgactgaaaaagttgaagtcctgactttatacaaccaaaaattgaagaattacttgactgatgcaactactagaggaaaagttgctattgagaacaatgatttcaacaatgagttggcagtggataatcaaaggcttaagaatgaggtcaagaaactaaaaagtgaatatgaacatcttgcaacaagtgtgcaaaagttcaacaagggtcaataccttcaaaatgagctgcttatgaacactgntatgaaaaataacaagagtggtattggatacaatgcttgtgtgcaaaagatagctatcactcaatacattccaaagc

SEQ ID NO: 18500 - DNA, 433 bp, Zea mays
agcttatgaagattcttcatcccaacatgtgttagtcggcgatgccagagccagcccatgttagtcttagcaattaagcaagtgtcgagttcagctctatcaaaattcactaagtatagctgaccctctaacactcccttaaatgctattgaatcatcacttcttctaaagacagtgatacctacatcagtgaataaacagttgtagcccattttgcataattgagaaacggaaagcaaattgtaatctaatgagtctacaagaaaaacattggaaatagaatggtcaggagatatagcaattgtacccaatcctttgaccaaactgttggggcgaaggcaaagacgccacccttcgctcgaggccttcgctgcagtcgttggtccaacggagataaaacgggcatggacacccttcgccccgtacgacatca

SEQ ID NO: 18501 - DNA, 465 bp, Zea mays
  unsure (1)..(465): unsure at all n locations
tctaaagggagagcacattntgggactaacaaatgttcattttgagaaagacaggatttgtagcgcatgccaagcagggaagcaagttggtgttcatcatccacacaagaacatcatgacgactgataggccactcgagcttctccacatggacatattcggcccgatagcttacataagcatcggcgggagtaagtactgtctagttattgtggatgattattctcgcttcacttgggtattctttttacaggaaaaatctcaaacccaagatactttgaaaggattcttgagacgggctcaaaatgagttcggcttgaggatcaaganaataagaagcgacaatggaacatagttcaagaattctcaaattgaaggttttcttgaggaagagggcatcaagcatgagtatctcttctcctacacgccacaacaaaatggtatagtggagaggaagaatagaac

SEQ ID NO: 18502 - DNA, 406 bp, Zea mays
  unsure (1)..(406): unsure at all n locations
tattcttcacgaagcatgaaaagaatggatatgtgtttttcgccagactcataaacggtacgtgtgtaaagtttcatgcatcgtaaagaaatgagtagcaaaaatagatatattacattcggtgttacaaagtgttacattatattacatttccgaggttttttacaaaaatgtttaatcctctctcaaaacgacttctgcagcttcattcagaagccgattgacgacttcgtccataatatcttcggccatctttttaatttcgtcgtcccccttcggctgatggcccgaatgcgctntattatgatctgaatcatgacacgactacattactattacaaatcgcanacagatcttataagcctaaagattacaacacggtaaatactattatntagtacctaat

SEQ ID NO: 18503 - DNA, 493 bp, Zea mays
  unsure (1)..(493): unsure at all n locations
ctcagctttctgcaatagagtctttngaatttgaggagctntaccttgattcccaaaagccagcatattcttgagagtctttntttcctttgacgggtaagacttgcgaaagtatactttgtacttagggttttcgaaaccatgttgttgtaggtgatgaaacgacggagttctgatgtttctgttctaaggtggtgccgaagcaggaagaagaacactaaacctgtttggggaggatgttttgtctcctagtaatgtaataataagtttcgcactcgaacacccggttatgcaataagtactctttctatatttttatgaatgtgaattatgttattgtaatcctttccgctcattctctactctgattatgtgtaatgtctgcgtgatgggttaagcgctctcggacgatatgatgaagatatagataaccgaacttgtcgagtcattatgcgcacctgcatgnactgttgaggtcctanggacatggaca

SEQ ID NO: 18504 - DNA, 419 bp, Zea mays
  unsure (1)..(419): unsure at all n locations
cctccacatgaatgaacgaaccatattgtttattgaatataactgatggaacttgctctctgcggcaaggggatccaacggcgggagtggtgatgtaaacagggttctcacgctagatggcaatagctctgttaatctaccctctcacgggcactgtgcggnggtatttataggtatctgagcgcccatcgtcttgtgttaatgacgcatgtgccctcagacacctatgttatccacagaatattcccataaagcaaggttacagactgtaattacagggatgcctttacaaattatgcccgtaacgcgcagcgtgcacgcatggcccgttacaatgggccggatcacacgtgggccttcgtactggacaacgccgcatggtgggatgacctcgtatcaagcgttaactgatgtcgtat

SEQ ID NO: 18505 - DNA, 481 bp, Zea mays
  unsure (1)..(481): unsure at all n locations
tcgcacctctgaactaactcggctgcatcgttcttcgctgttggccaatagaatcctgacctgaagaccttcccgactagtgttctggaggctgcatgtattccacattgcccagcatggacctcctccagaagttgcttcccagtggacgggagaatgcacttcatgaggacgcctgatgcaccccttctgtataatgtctccccaatgagtgtatagtgagccgactatctggcaatgcgctctgccgagttcttgtcgtctggttcttcttcattctttatatacttaatgatcggccttctccagtcatcagagtctgactcgggttgatctatgatgttgcactcttctgtttgatccattgagatactcggctgtagaatttcttgcacaaagactccnggtgggacctgagttcgactggatcctagcttggacagtacatcngcttgctgtgtctgatctctttctacatgat

SEQ ID NO: 18506 - DNA, 413 bp, Zea mays
atactgccaatacttatcaaacagcagatttatctctcattaactgcagaccatacccggaacatggtcagtttgatgctaaggactggacacgatttggacctttcaagatagctcaaggaggatacactcacgtcctgttgccattgacaaattcactaaatagatatagtacaaacccattgcttctctgacctctgctaaagcagtggaattcatacaaagatatatatattcagggtttggaagtgctaagaactggtgggcaccgatatccacccgggttcaactagaatgctatgaagacactcgtgaataggctttgggcaccgatattatcgcaaggccattcccttcgtgggcctatggaggaacgtctggcatagtggatcggcgcacgatcggatcaactc

SEQ ID NO: 18507 - DNA, 447 bp, Zea mays
  unsure (1)..(447): unsure at all n locations
tttgcaatatacatgaattattatacgaaacgaagccctgtggttaagagcaatatcataacaactntggttgctacagcttcggtgctcgctctggatcaagctgtcccgtgccaacctttcggaagagatggcccggagaatggatgaaagaatggttctatgtaaaaaatgatttgaaggctcgagaagatattaaggatgtcatcatgtgccccatctggcagcgcttcagactccggaaaccgaaggtagaaatggatgaagtagccgaagaatgccaacgggccttcggtgtagtctgctcttttattgggacaagggatttaatacaagaccatattgccttcagagtgtggcctcttgcagataattgggaaatgccgaaagaaactgttaaagaaactgacgaaggtgggctagtcaggctgaagtatacattcaagt

SEQ ID NO: 18508 - DNA, 456 bp, Zea mays
  unsure (1)..(456): unsure at all n locations
cttctcctggacaagtgctgcacttaccgctgatttctatactgccacatataataacaaatgagcccctggcgttggtggagttagtgtctgtagatctatcaaatattgcttcagttcttcgaaggctctctactgaactggtccccattgaaaaacttcggctgacttcagcacttcaaaaaatggtaaatntctctctgctgatctagatatgaatctgttgagagatgccagccttcctgtcaatctttgagcccccttctttgtacttggtggttccattcgaagtatagcttcgattgtgcttggattagcctcaatttcctttgttgaaactaggcaaccaagaaatttccccttgttcactccaaagacacatgtttctggattcagctttaaaccagcctgtctaaaattagcaaaggtctcctgcagatcagcaatgtgattatc

SEQ ID NO: 18509 - DNA, 415 bp, Zea mays
  unsure (1)..(415): unsure at all n locations
tgagtcaatcattntgcaaaggataattgatgctcaaaaggataatctgggtatgaagcacatacgagagaaggtaagggctggagtagccaaatgtttcaaggaagacgatcaaggtgtgatatggtttaaaaaccgcatagtagtgccaaagaacgaagaactccgccagcaaattcttgatgacgcacatcttagtcgttattctattcatcccggaagcactaagatgtaccaagatttaaagcaacattactggtggacaaagatgaagattgaggttgcacgctatgtggctaagtgtgacacttgcagacgtgtcaaggccatacacatgaaaactgctggtccattacaatctttgccaatcccaacatggaaatgggaagacatcagtatggactttattgtggga

SEQ ID NO: 18510 - DNA, 437 bp, Zea mays
  unsure (1)..(437): unsure at all n locations
agcttctaagggagacacatttgggacaactatggtattttgagaaagaaggatntgtagcgcatgtcaagcanggaagcaagttggtgttcatcatccacataagaacatcatgatgactaacatgccgcttgagctactccacatggacctatttggcccgattgcttacaaaagcatcggcgggagtaagtactgtctagttattgtggatgattattctcgcttcacttgggtgttctttntgcaggataaatctcaaacccaagagactttaaagggattcttgagacaggctcaaaatgagtttggcttaaggatcaaaaagattagaagtgacaacgggacggagttcaagaactcttatatagaaggctttcttaaagacaanggcatcaagcatgagttctcttctccctacacacaacaacaaaatg

SEQ ID NO: 18511 - DNA, 469 bp, Zea mays
  unsure (1)..(469): unsure at all n locations
nttgccgatgtactgttcgtcgagccctctntgctgagtgtaacactcggcaaagcctgtgccgagtttttttcaggctttgccgagtgcttcaggtattcggcaaagcagccgattccggtagtgtgagcttcccgctagacaacctctctctagatcgatctagggtttgaggggggttgtaggcgtacgatatcagggggcgaggtcaaaggcccagttggttggctaactagtggagattaattctaacatcagcttcttgagcataagtccctccgctgtgtatatttttgttttgtaatttgtgttactttatatttgtatgttcatcattattgccactatgtagtgattaatcttagtttacacatgtatatatantgtacgcggtgaatntactattattttctaaattacatttgaatataaaatgcccanatctctagcatacacacccatcagcgtg

SEQ ID NO: 18512 - DNA, 453 bp, Zea mays
  unsure (1)..(453): unsure at all n locations
atcaaatggacgtgagaagtgcctttctattggaccaatcaaggaagaagtctatgttgagcaacctcccggctttgaagacagtgagtatcctaaccatgtttataggctctctaaggcgctttatgggctcaagcaagccccaagagcatggtatgaatgccttagagatttccttattgcaaatggcttcaaagtcggcaaggccgatcctactttgttcactaaaactcttgacaatgatttgttcgtatgccatatttatgttgatgatattatatttgggtctactaacgaatctacatgtgaagaatttagtaggatcatgacaaagaaattcgagatgtctatgatggnggagttgaagtatttcttaggattccaagtaaagcaactccaagatggcaccttcattagccaaacgaagtacactcaagacatcctaagcaagtt

SEQ ID NO: 18513 - DNA, 405 bp, Zea mays
  unsure (1)..(405): unsure at all n locations
tatctcggacggcttgtctgtcagccatcagatgttatgcttatattcnacggctggcaaacaagcggtcggagataagtaattntaaggaaacggcgttgaaacgtgtgcctgtctgtctgtctctcgcatcacttgtccgacagcgccactgctgctccacaccagcggccgtgcccggcctccctagcgcctcgactcctcgctcgccggcgccgtgtctttcccgaccccttccgcctctacgcagctcgccatcggccaccatgaccccgccatccatcacgcctgccgcctacgcccagacccgcgtncgttgccatccgtgatcgtgcgcacgcacgcacgccacaatgtaagtattcttgatcttgtgatgtttgcttgtaggtaagttatgtagaa

SEQ ID NO: 18514 - DNA, 409 bp, Zea mays
  unsure (1)..(409): unsure at all n locations
agcttgactctcataatcagacgaagctccattttgaatcctacttcatcagaagaaaaagcttcggaagaaaaagcatttagttcccanaaaattcagagttaaatggccagagtgcgttctaccgctatggttgagcgtgatggaagcgaagctgaaggatcggagactgttcccatctccgaagcgatgcaacgatctggactggtaatctcggaagaaatccccaccgctgaaacgaaacatgcaactgccgaagcataagaaggagacattgaggaaactgattccgaggatgattatcgtattgccatgccaagtaagcccagccacttggacttcggaaagtcgactgtttcgaaggctgatctctccaagatggtgaagtcgggttatttcagtggaagtc

SEQ ID NO: 18515 - DNA, 432 bp, Zea mays
  unsure (1)..(432): unsure at all n locations
cactatacaaactaagcttgaagccatggtagtagcataggctaataatatgctaatggactcaagcctagctatgggtgcataggtttcaccaaaatccaaaccttcgacttgtgaataccccttggccacgagtcgagctttgttccttgtcaccacaccatgctcgtcttgcttgttgcggaagacccacttggttcctacaacattttgattacgacgtggaactaaatgccatacctcattcctagtgaagttgttgaggtcctcttgcatcgccatcacccaatccgaatcttgtaatgcttcctctactctgtgtggctcaatagaggaaacaaaagagtaatgctcacagaaatgtgcaacacgagatcgagtggttacccncttatgaatgtcgccgacgatggtgtcgatggggtgatctcg

SEQ ID NO: 18516 - DNA, 355 bp, Zea mays
aatggacgtgaagagtgccttcctcaatggaccaatcaatgaagaagtctatgttgagcaacctcccggctttgaagacagtgagtaccctaaccatgtttataggctctctaatgcgctttatgggctcaagcaagccccaatagcatggtatgaatgcctaagagatttccttatagctaatggcttcaaagtcggcaaggccgatcctactttattcactaaaactcttgacaatgaatttgttgtatgccaaatttatgttgatgatattatatttgggtctactaacgaatctacatgtgaggaatttagtaggatcatgacacagaaattcgagatgtcgatgatgggg

SEQ ID NO: 18517 - DNA, 473 bp, Zea mays
  unsure (1)..(473): unsure at all n locations
ntaccaaatggacgtgaaaagtgccttcctcaatggacctatcaaggaagaaccttatgttgagcaacctcctggctttgaagatagcgagtaccctaactaaaggcgctttctgggctcaagcaagccccaagagcatggtatgaatgcctgagagattttcttatcgctaatggcttcaaagtcggtaaagccgatcctactctctttactaaaactgttgcaaaagacttgtttatatgccaaatttatgttgatgatataaggtctactaacaagtcaacttgtgaagagtttagtatgatcatgatacagaaatttgagatgtcaatgatgggggagttgaagtacttccttggatttcaaatcaagcaactccaagaaggcaccttcatcagccaaaccaaatatgttcaagacatacttaagaatnttgggatgaagaatggcaaacccatcaagacacccatggg

SEQ ID NO: 18518 - DNA, 468 bp, Zea mays
  unsure (1)..(468): unsure at all n locations
agcttgccatacccccttgccttgcggccggcgctgataatctcaccggcgatggctgcctgctgatcttgcgccgcgtgtccatgcactttaccacgtcgtgattaatcacgttaggggtatccggtgatcgccggatggagcgccacggtaaaaaccactaatcgcttgcgctagtgctcctctcctccgaccgccgcgcgtcgtcatccaaattcccggccaccactcttgcctcctataaattgagcgcgccgtcatgtccgtatgataatcacacacccagccacaaagtattgcctccaatcgtgtaccgagagctccaattntggatttcccccaaactgagtttccgccaccgtatcgacaccttcaccgcggncagcttattccatgttcgttcaagcgctctagtcgaattttctagcgtacttatgtactcctcaagctcactgacccctctgattg

SEQ ID NO: 18519 - DNA, 405 bp, Zea mays
  unsure (1)..(405): unsure at all n locations
tatctctgtgccgcatgagctcgtggaanaaaatcctgccgtctcccagctccttcttctccacgcgtgcctctcccttggccggcgccctgcccagtcccagtgtcgcggggccctctgcttttgtttctctctctcttctccatggtccagccgccggacgccatccgagccttctcgtcgtgggacttgccgcatcgtcgccctgcccggtacggcgttcttcccctgcaaccacgccatccgcgcgccctccctgctcctccatcctcagcgcctggccctctgtctcacccgcaccgtcgccttggttcctccgctggctcggccgaccgcgtgcatctcccatgggcgagggctcgaggtccctccatggctgcacgttcctccagcctgcaagctgtc

SEQ ID NO: 18520 - DNA, 435 bp, Zea mays
  unsure (1)..(435): unsure at all n locations
agcttctaaagggagaacacgtgataggtctatccaatgttcatttcgaaaaagatagaccttgtgtagcttgtcaagcaggtaaacaagtgggatgagcacatcacagcaagaatgtgatgaccacgtcaagacctctggagctgctgcatatggacctcttcggacccgtcgcctatctgagcataggaggaagtaagtatggtctatttattgttgatgactnttcccgcttcacttgggtgttctttgtgcaagataagtctgaaacccattggaccctcaagcgcttcctcaagagagctcaaaatgagtttgagcttaaggtaaagaagatatggagcgacaacnggtccgaattcaagaatcttcaagtggaggagttccttgacgaggacgggatcaagcacgagttcttcgctccatacacacctc

SEQ ID NO: 18521 - DNA, 439 bp, Zea mays
  unsure (1)..(439): unsure at all n locations
nttatgatctgtataaatatgacagatattccccagtagataatgacgccatattttcagggcatgaaccacagcagctaattccaggtcatgagttggataatgctccttgaaagtcgcctagagggggggtgaatagggcgaaactgaaatttacacaattaatcacaactacaagccgggttagcgttagaaatataatcgagtccgagagagggcgtaaaaacaaatcgcaagcaaatagagaagtgagacacaaggatttgttttaccgaggttcggttttcgcaaacctactccccgttgaggtggtcacaaagaccgggtctctttcaaccctttccttctctcaaacggtccctcgaaccgagtgagcttcttcttctcaatcaaacgggaatcaaacttcctcgcaaggaccaccacacaattagtgtct

SEQ ID NO: 18522 - DNA, 372 bp, Zea mays
  unsure (1)..(372): unsure at all n locations
agcttctaaagggagagcacattntatgattatctaacgttcattttgagaaagacaggatgtgtagcgcatgccatgcatggaagcaagttggagtccatcatccacacaagaacatcatgacgaccgacaggccgcttgagctactccacatggatctattcggcccgattgcttacataagcatcggcgggagtaagtattgtcttgtaatagtggatgattattctcgcttcacttgggtattctttgtacaggaaaaatgtcaaacccaagagactttaaaaggattcttgagacgggctcaaaatgagttcggcttaacgatcaagaaaataagaagcgacaatgggacgggagtcaagaactctc

SEQ ID NO: 18523 - DNA, 357 bp, Zea mays
  unsure (1)..(357): unsure at all n locations
tgcttacttggtaagatgaccaaggcgctcttcacgggtttaccggagaggacattagatttattggaactcatacatactgatgtgtgcggactaatgagtacgacagctaggggaggattccaatacttcataactttcactgatgattttagtagatatgggtatgtctacttaatgaaacacaagtctgaatccttagaaaagttcaaagagtttcagaatgaagtagaaaatcagcgtggcaagaaaattaaagcactgcgatcggatcgtggaggtgaatatttgagtcatgagtttagcaatcatctaaggagttgtggaattgttccactacttacngccgctggaacg

SEQ ID NO: 18524 - DNA, 445 bp, Zea mays
agcttgtgaagattcttcatcccaacatgggctattcggcggtgccagagccaacccatgttagtcttagcaattaagcaagtgtcgagttcagctctatcaaaatctaccaagtatagctgaccctccaacactcccttaaatgctattgaatcatcacttcttctaaagacagtgacacctatatcagtaaagagacagttgtagcccatttgacataattgagatacggaaagcaaattgtaatctaaagaatctacaagaaaaacattggaaatagaatggtcaggggatatagcaattgtacccaatcctttgaccaaatcttggtttccatccccgaatgtgataagctcgtggggatcttggtttttctcataggaggagaacatctttgtctcccctgtcatgtggtttgtgcacccgctgtcgatgatccatcttg

SEQ ID NO: 18525 - DNA, 346 bp, Zea mays
  unsure (1)..(346): unsure at all n locations
tgtatgtccncggcttcaaaattttggcgatgatgaacgacccttcccagggaggagtaagcttgtggcgccctcgggcgtcttgtcgtagccgaagcaccaagtctcccacttggaagcctcggggccgaatccttcgggcgtgatagcgttgcagagactgctgataccacgctgagtgtagtaaggctatgtcccgagcctcttccagctggtccaatgaatcctctcggctggtctggttgttttggtcgtcgtatgcctttgtcctcggggaaccgtattctaagtccgtgggtaggatggcctcggcctcgtagactaggaaaaacagcgagaaacccgt

SEQ ID NO: 18526 - DNA, 470 bp, Zea mays
  unsure (1)..(470): unsure at all n locations
tggcatataactggcaatctcgtaacctctgcattacttttctcaagtgctcttcatgctcttgctcattctgggaatatacaaggatatcatcaatgaacaccactacgaacttgttgaggtagtccatgaacacattgttcatcaagtacatgaaataagctggcgcattcgtcaaatcgaatgacatgaccgtgaactcttataacccatacttggtgataaaggttgtcttcagtatgtccgaaggccggattctgagctgatggtaacctgacctcgtatctatcttcaagaacaccccggctcctctcaactgatcgaataagtcttcaattctaggcatggngtacttattcttgatagtaacttcattcaaggatctgtagtcaatgcacatcctctttgntccatccttcttctccacaaatagcactgngctacccaaggcgaggtacttggtctgatgt

SEQ ID NO: 18527 - DNA, 436 bp, Zea mays
  unsure (1)..(436): unsure at all n locations
tctccttgtcgtcatcaaccttgacgtagaaccattccgatttccagcctgccggccacttgcttcgatagctgatgacaggaaactttgtggttttccgataggcaaaattatagcaaccaaagttatcatgcaatccatcttttctagccttcgtctgataatgcagctcatgaactcgacaaaagctgtcggcaaacggctccaccgcctggcttcggagggcccagatatagacgctaagcctaacgatagcgttaggagtcagctgatgaaagtagatcccaaacctcttcaatacatctgcaataatcccatgcagggggaatctcaacccagcctttagaaagctcttgaaaatgactatttcatccttctctggctttggggtaagttcttcccnccccccccccgaagcgtagtagcttcttctgac

SEQ ID NO: 18528 - DNA, 452 bp, Zea mays
  unsure (1)..(452): unsure at all n locations
agcttatgcaactgctgccaaaatgagaagtgatcttgttgcctctatctaatactatcttcttcggaacgccatgcaagcacataatccgatccctatatagttctgctaacaccgcactgttgtaagtggtcttgactggtataaaatgggccgcttttgtcaaacggtccactactacacagatggagtcataaccagtacgagtgcatggcataccgactataaagtccattccgatctcataccacttccactaatgaatctgcaacggttgcaacaaacctgcaggtctctgatgttctactttaatcctctgacaaatgtcacacacagccacatactctgttatctgccttntcataccgtaccaccagaatcttttcttcacgtctnggtacatattctcactaccagagtgtatatagtatgttgtctcatgagctttcttg

SEQ ID NO: 18529 - DNA, 476 bp, Zea mays
  unsure (1)..(476): unsure at all n locations
gacctatgatactcagcttcgcatctgaagggaaatgccctggagaaaagatatgatctttgntctcaaatcttcgctataaacaggagatatattgagcgctgctctttcaagaaggtcaaccgaaggtgcttttattgtttcaaagaaaacttctgaaggtaatggcagcccctgtgccgctgacttggctagtagatcagcatgttcattttctcctcgtggaatattcttaacagaaaacccatcgaaggaggcttcaagtcttcgaactgtatccaaatatttntcaagcttcggatctcttgctttgcaactnttgtcaacatggccagaaataacttgngaatcagttttgaggaccgcccttcttatccccattgctttcaacttccgaagacccaaaagcaaagcttcgtattcagcaatattatttgtacaactaanaccaagtttcactgcgtagcatgttctga

SEQ ID NO: 18530 - DNA, 269 bp, Zea mays
agcttgtgaagattcttcattccaacatgggcttgtctgctgagccagatccaacccatgttagtcctagcaattaagcaagtgtcgagttcagctctatcaaaatctaccaagtatagctgaccctgcaacactcccttaaatgctattgaatcatcacttattttaaagacagtgacacctatatcagtataaagaacagtgtaacccatttgacattattgagataccggaagcgcaatgtgatctaaagaatctacaaaaaaaca

SEQ ID NO: 18531 - DNA, 446 bp, Zea mays
  unsure (1)..(446): unsure at all n locations
tcggtgatggttaannaatttggcagcaaaacagtgcaaatagcatgtaaatgctgtggtaacttcacacctactcgtctgtttatatagtgctgcaggtaagaaggcgaagcggcagggtttttacaccaggcgggcagtaacttgtactcgctgtgcagtggaccgcaaagaccaaacagtgactctgcaaggtgggaccgacacgatctcgggaaatgaatcgtttctcggcaacgagctcagggaaggtgtttttcggaccttcggcttcccgaagcttgagaggatnttttcacggttcaagctcgttacgaaaaacgatctagcgccgcgaaaggggctactgttggggccatgcttcgttgcgccgaaggtcttgcgtgaagaagcagcttcggctgaaatcgtccccaggaaatggccgaaggttccttttatagagc

SEQ ID NO: 18532 - DNA, 462 bp, Zea mays
  unsure (1)..(462): unsure at all n locations
atcctcttagtcacctgctgcatgcaagcttgtgaacagtacanattcagaagggagaattcatcttctgcagatcagccgaagctcatgctcttatgtgatgacatatcagagcataatgtgctgttgggctcccaattatccgaagaacaagagaaaaccttgataaggtttttgttcaacaacaaagatgtttntgcatggtcagctaatgatctttgcggagttaacanggatgttattgaacattcgctcaatgttgatccatccttcagacccaganagcagaggcttcggataatgtctgatgacaaggccgaatgagctcggaatgaagtcaaaagactcctcagtgcaggagttatcagagatgtaaagtacccagaatggctagctaacactgttatggtaaaaaaggccaatggcaaatggcgaatgtgtatcgattttacagatctcaac

SEQ ID NO: 18533 - DNA, 384 bp, Zea mays
  unsure (1)..(384): unsure at all n locations
tgaagccactaccgtcactagactgtgtcctaggggctagtgttgagcgttgaggagtgaggacttgaggatgggggcgactgctagaatctggatactgtctggccgcctgacctgngcctggatgtagtcaccttgagggaggaagagtgaggtcgtgagggtacagccgtgttggcctgttaggctagtcaccgtcccatttgaatatttgataaagtcataacgttacacgtgggtgatgggccgattgcctgagctgatgatgatcggtttgttcgatatttcggttcggtacaatgctaaaaccgtttacgataccaaataccgaactacacagattcaaaaaccgaaaccgaaccgaattactcaaaaaccgacttt

SEQ ID NO: 18534 - DNA, 417 bp, Zea mays
  unsure (1)..(417): unsure at all n locations
atcctcttagtcacctgcatgctgcaagcttcggctccatctatgttgtggattgctttttaatctgtccagtttccttcatcctttctagcagcttcctgactgccatgaatagcaatgggtccttgttccggatgtatcttcatgcatagatatgctggatgaagtattgcttcgaaagcgttgagtgttccacgaccaatgattgcattgtangggtattccatgtcaacaatatcaaacacaacctgttcagtccttgtgttgtggacaaattcaaatgttactggcattgtgatcttgccaagtgctacgatctgtcttcctccgaaaccacaaagagggtgtgtagcatcatgaattttgtcctttggctcctgcatctgtctgaatgccctaacgaatatgatgtcagct

SEQ ID NO: 18535 - DNA, 317 bp, Zea mays
  unsure (1)..(317): unsure at all n locations
agcttaanattcaaaattgtgcttcagatcttattcttatgtaagctttaattgtgttgccatcaatcaccaaaaagggggagattgaaagctctcttgtgagttntggtgtttggatgacaactcaattaaaggactaacaagtgtactaagtgttgaacaggtgcttaagataaattctacaaggttcaacaaaagtgaacaaatgtgatggtccaagaactagattatggatacataatggacatcacaagtaagatggacattgcataaagtgagactcgggtgcgtagctcggagacaactgatcaagccaa

SEQ ID NO: 18536 - DNA, 458 bp, Zea mays
  unsure (1)..(458): unsure at all n locations
ntaagctctntgacaataaaattacttcacccagttttatcatagatgcaagaatgaatgtttgagaagttaaactaggtatgaagcagggttaatgcatgaacatgctttctcttccttttatacaagatatgcaagaaatgtatagaaaaggaagatttaggtacatgtaaaaatgagatgaagcagttttacccttttgtaccttcacatagagacgctctcttcattgtgctttgtccttagtcttaataacttaagacctatactcaagacagtgtatggaaatattttgcacaagagagagttctacaactagtgatccttttctaagtcatggttattatatatcaagtagatcacaaattgtgtaaatatatcatgaattctccttttaacttagtgcatatcaagagagatatccattgaaattatatgaggcactaagaaacataagt

SEQ ID NO: 18537 - DNA, 249 bp, Zea mays
agcttcaactccatctatattatggattgccttggaatcattccagcttccttcggcccttctggcagctttctgactcccatgaatagcaatatgcccttggtccgaaagtatcttcatgcagaaataaactgggtgaagaattgcttcaaaagcatttatggtaccacgaccaatgatggcgttgtaagggtattccatgtcaacaatatcaaacacaatttgctcagtccttgtgttattaacaaa

SEQ ID NO: 18538 - DNA, 434 bp, Zea mays
  unsure (1)..(434): unsure at all n locations
tctaaagggagaacacattntgngactaacaaatgttcattttgagaaagacagggtttgtagcgcatgtcaagcagggaagcaagttggtgttcatcatccgcacaagaacatcatgacgactgacaggctgcttgagctactccacatggacttattcggcccgatagcttacataagcatcggcgggagtaagtactgtctagttattgtggatgattattctcactttacttgggtgttctttttgcaggataaatctcaaacccaagagaccttaaagggattcttgagacgagctcaaaatgagttcgacttaaggataaaaaaagattagaagcgacaacggaacggagttcaagaactctcaaattgaagggtttcttgaggacgagggcatcaagcatgagttctcttctcctacacacctcaac

SEQ ID NO: 18539 - DNA, 465 bp, Zea mays
  unsure (1)..(465): unsure at all n locations
tattacggacctatgaaactaagcttntctaggtggatccgcaacacggtgcagagttccctcttcgtctgctatgcatgagatggttctgaaacaaaacatagttccagagcggagagcgatcttgcacttgaaggtgatggccattgagctagctctgatcaacgacacaccccctacctggcgcgccagctgtcggtgtttagtgtccgaccgcacacccagggttacccttgcggtgcttttgggtaggacggttttgttgattgtagctcaatgattcgttcttggagcacgagagagaggcgattttctacagatttgtgccgctttgagaggcgtaataccctacttcttggggaggatctgtatgtgtggtgtgttacaagtggcgtctnctgaatggagaaggcctaatgagatgaanatgatgngggttccactttccactaggccttatataca

SEQ ID NO: 18540 - DNA, 435 bp, Zea mays
  unsure (1)..(435): unsure at all n locations
catctctcgaccggatcttaagtcaccgcggctgcagctatagaatgtcgggagacaatgatgtggtgaatggtagttacgaaggtcgcagctaatcaacttcgtctgttgcccatcattcctcggctttcaatgctgttcctcaacaaggaaataactctgcatatgacgtggccaaagaatggtgtacgactcgtcactgatccatacataatggtccatccgtcggacggtgatgcgtggaatgcatttgacgagtttgatcccgaatttgcaaacgacctatgagtgtacggcttggtctatcgacggacggattcacacctttcaataccagtgcaagcccgtactcgtgttggcctatcttcattgtgccatataatcttcctcctgagttggtcaatanagaagagttcatgttccttgcactagtca

SEQ ID NO: 18541 - DNA, 403 bp, Zea mays
  unsure (1)..(403): unsure at all n locations
tntgcagagctagcaatcgcctgccattgtcctatttattctggtcgacatatgcatacacacgcttcaagctttntttttgttgagaagtatcctcgatccttattatacggaggagatgaagaggaagacttcctatattgtcttcctaacaataagaaaattgatgtcagccgtgaaatgatggatatataacatgagttacccgaagtttgaactcgggctatccttaatgctgaaggaccatctgacagacagcatggcatacaatagttagaagttttgtgcttgcgatttcgtttaatcttgtggtaattattttaagtatattatttgtttgtcttaataaacatttctttcattattcgagaatttgcgctcggaggttataactcttcgaatg

SEQ ID NO: 18542 - DNA, 350 bp, Zea mays
agcttctaattaaatcatgactgcgcctaagctgtgttattatgagagtgaaggtggatgtgctgctacttcccactttcctggatgagcaacgagcacctgcattgagtaatgcaagagtgagatgaaacatctctgcaagcgaatcgttttgacgagatatctaaaccacaaattgaattaatcaacatttttaaaggatcacaattaagatcagaaatacttgtagatatagaactcagtagtcccaatataaccaataccatcccattttctcgaacaaccacagtaggttctataacactttcctccatcaacaaaacctgcaaatatcacttcaatgtatgcat

SEQ ID NO: 18543 - DNA, 473 bp, Zea mays
  unsure (1)..(473): unsure at all n locations
ntattggacctagtgcctttaatttatcttcaattgaactctatgctcatactcatatcaaactagctagtccaaggtggtgtgttgagacttaatcaccaaaatatgtagaaatggatatctagcacatttccctttcaattacttgtggaggtttatttctaatcttgtcgggatcttatcgagaaggttgatgctttcactcctattctttggattaagaataatgtcaattttacttagaggtagaacaacaacatgcttttgatcttatcaaagattatttatctttgattctggtacttaacgcattgaagagtggatccccttttagattatatattgcaactaaggataaggccattgaagttattctaacccaagaagccgaagtaaaggagcacgctataacatatttgagtcagtgattagtggatgctgagacanggtatactnntcattgaaattatgtt

SEQ ID NO: 18544 - DNA, 358 bp, Zea mays
ctgcagcttgtctgacatgcttatcacagttatctggtgacaatgtggctttggcataacaaagagttagtacaacgaagcacgtttcatcaagtaagcttcgtgacgacgaaacaatgatacgatgcgaggagaaggtgttgctcaagttattaaatacaaatggtgatgttacccctgtgacattttgcaaactctgtatgtaatcgttgagggcataaatgtaatagtgtactaacctttacggttgcctataaattgatgaacagtacccctgtactgttcacgctggattgtaattgctctcacgtcattacctttcaacaagccgaagggatcaatgtaatataaattctga

SEQ ID NO: 18545 - DNA, 377 bp, Zea mays
tcgaattattgaccttcgacatcgtcatccagtacataacaaagcagtataaggtaaaaagtaatctcaggagaaggtaagcaacaggtacaagtttaataccggcttaagatgacttcgagcttcatcaccaactaagtcccgcccacccttcgtccaaatctgtgttataaatctatttccaatgcttcgggctaggctggggatatcagtcaagtccgttggtgataggctgaagttcggcctgtttacaatctttccgtgcgtgcaaccagccttcataaaagctaaagctgtaccgcgagaagctagcagggaacagaagtcaccatgcccagctataacttcgtcaagcgcctcaacttcgctctcaatat

SEQ ID NO: 18546 - DNA, 501 bp, Zea mays
  unsure (1)..(501): unsure at all n locations
atcctctaatcacctgcggcatgcaagcttgtgaagattcttcatcccaacatgggctattctgcggtgccatatccaacccatgttagtcttagcaattaagcatgtgtcgagttcagctctatcaaaatctactaagtatagctgaccctctaacacacccttaaatgctattgaatcatcacttcttctaaagacagtgacacctacatcagtaaagagacagttgtagcccatttgacataattgagaaacagatagcaagttgtaatctaatgaatcaacaagaaaaacgttggaaatagaatggtcaggagatatagcaattntaccaagacctttgaccaaaccttgatttccatccccgaatgtgatagctcgctggggatctttgggtttctcatatgaagagaacatacctttctccactgtcatgtggtttgtgcacccgctgtcgagatccaacttgacccncggatgataaacctacaaacaaattag

SEQ ID NO: 18547 - DNA, 475 bp, Zea mays
  unsure (1)..(475): unsure at all n locations
taactaaagtcatctaagagtcggctagctagaacaacgactccgnccgctagacagcatacacgtcggcttgcctattattatcacaattcgagacaccacatacactacaacatttttataaacattcatattcacaagtattttcgcacaccgaccaaatcatacgaatcgtagactactagtctccaactcacaatcaccatgcatttacttcccaatcatgaacacatacatgtttatcatacgaacagagcatttcaataattatcctaaaacaattaactccattacacaactcataccacaaacctacttgacttgattgaagtgtctactcgaatccgtgagcacaatcacacattatatgcgaagcataatttaacgaacacaaaatacgcatcgactcgattcgacttataaatattgagaaagcgatgactacttcggcatgtcaccacctctctaattaagc

SEQ ID NO: 18548 - DNA, 473 bp, Zea mays
tctggcgtcaggcttcagaccttggcttctcgcggcccatatgtatatatttagccttataattgcctcgggagtaagttgatgaagatagacttcgaagattttcaacacctccacgacgaagctgctcaaggggaatcgcaatccagctttcaaaaagcttcgatacaccacaacttcattttcttcagggtgtggacaagttttttccccttcgtccgccctcacaatggacagatcccggaaataccttcctctcatattaacaagatgattctctttgatagttgatttaccataaactgaatggcttggtcgccaggggcgatcttcggagtcttcgccaccgctgtccacatcataactttcactgtcaccagtatcttcagacagcccttccagaatttccctggtgatcttttctgtgttggtcttcgacattgctataagaaaccctaagttcttctcttcat

SEQ ID NO: 18549 - DNA, 403 bp, Zea mays
ggacattgcctccctggtggaagccaatgccatccttaatgtcatggcgtctacctctataaagcatgcttctagcaaatttggaatttgcgttttctaagtcatgctggcaattttagcatctaattttgctatatgatcattttgttgtttaattaaagccatgtgatcatgtatagcattgatgtcaacatctctacatctagtacaaatagaagtgtgttcaacggtagatgtggagggtttgcaagattttaattctacaaccttggcatgtaatatatcatttttacttctaaggtcggaaatggtagtattgcaaacatcaaaatctttagccttagcaagcaaatttttattttcatctctaaggctaacaagagaaatgttccattcttcaatc

SEQ ID NO: 18550 - DNA, 331 bp, Zea mays
agctgctctcacttacatgagggggaggttatctttttgagaggtcataatcactcctgacgatgtggtcatcctcttggagcaaaatgatttccggctctatggcacggcatatgattcctacaatggaaacactgcataatcaccaaccatttatgtcaccatagaaatttatacacattatacacattacttctaaggaataggaacacatggcacagatgatcgtacttacactatattaattgctactcggtcgactgataactatttactcggtatatattcgtgtagtaataaaaccctacaacctggctatgcattatcaacc

SEQ ID NO: 18551 - DNA, 458 bp, Zea mays
  unsure (1)..(458): unsure at all n locations
tcatcctctgttccattggggtgtctgtgggattacagtttgccatgttgcatttctccactatctttgatgcataggccttttgacagattgtaatctcattcacatcttgtctgacctccatgcccaagtagtaagtgaggagtcccagatcactcatacttaacgtctgcatcatttgttgtttaaaactgttaatattaataacaatcggtccacaattgatcaggtcatcaacatatactcccacgagcagcattgattctcctgctcctttcctatatacagcatggtccacaacacattttttgaaacctagtgagatcagctctgaatcaagtctgacgatgttccacgctctgggagcttgctntaaaccatacaatgctttcttcaattntagcacaaggctgcccttttctggtctctgaaaaccttganggtgagtgacatatact

SEQ ID NO: 18552 - DNA, 437 bp, Zea mays
cgacacagcccgctagacagcatacacgtcggctttgctattattatcaccattcgagacacaacatatataacaatcacttaacaaaatcaactcctgcctaacatgagttggctaatgacgtgactatttcccaattaccatcacacaccacctttcgtcatttgtggataaccggcacgacacacagctattgtaatacatctcaagttcattcaacccatcagtggagcactagcatatttcagaaaattgtcttgagactacgacgacaaggcatcgagcttatcctgcacataaaagcatcacaagcatttttactgaacgtatcagttaacctgatcgacacactatacatgttcttcacccttcattattatcgcacaacaaatcatcacacttgctatgacccaacatactactgatatgtattacat

SEQ ID NO: 18553 - DNA, 386 bp, Zea mays
  unsure (1)..(386): unsure at all n locations
tgtgaagattcttcatcccaacatgggctagtcggcgatgccagagccaacccatattagtcttagcaattaagcaagtatcgagttcagctttgttaaaatctactaagtatagctggccctctaatactcccttaaatgctactgaatcatcacttcttctaaagacagtgtcggggaccataattaggggtacaccaagactcctaaactcggctggtaatcaccatcagcacaagctgcaaaagcctgatgggcgcaattcaggtcaaggctccgtccactcaagggacacgatctcgcctcgcccgagcccagcctcgggcaggaacagtagacccaagcggattcacgcctcgcccganggcctnctcaagcaacgagcg

SEQ ID NO: 18554 - DNA, 390 bp, Zea mays
acctatgaaactcagcttgcggacgtcgccctcgtacctgagacgacggtgtatttattcctcgacgtgacttcatcgccgctcgtcgaccaaaaggtaccgatcgattcccatcctacgtcatttggattcagcctcaacccgcctagcgacctcgctttggcggacgctctcgtagaggcgagtccaaaccctctggggtttcgcatgcggtcgccttgggaccggttgacggacgtctcgacctacgggccctctgggtctgaggaagacgacgaccccagcatctgttgggatttctctggacttggcaaccccagtgccatgcgggacttcatgaccgcatgtgacttctgcctctccgactgttccgacggtagccgtagcctc

SEQ ID NO: 18555 - DNA, 453 bp, Zea mays
  unsure (1)..(453): unsure at all n locations
ttngaacgtactaagcacatgccgggaaaaatggtttcctgttaacctagtacctgagtgaagccgggcgcggactttatccctcatgcgacctgagactgggtctcccatgctagctatggtgggtacaagtgcggtcactgcacggcggcagccggggtcagtggagcattgtatgccaaggcggtgaggcctggacgcgaacggngaatcgatggggacggttgtcatgtgtagggtcggagtaccctgacatgtcgtgtgtttaggtttaccttgcaaggttttaaaactcgattcgaatcgtctgcttctcgcagctaatgagactgcttgattccttgtactgcatcgagtaagaagtgaaatgtggattacatgagataacttgttgatnngagctaatgcttgttaccatgtatgcttagaaggagcanatctagctaagttaat

SEQ ID NO: 18556 - DNA, 399 bp, Zea mays
agcttcacgacatgcctaccaaagatgtgtctgatcttgatagagtcttcacaagcaacttttggcagcaggtgttcactatgtcaggcaccaaactctgcatgagctccgctcaccacctgcctgcagtctgacagatagacggaacacgtcaatcaatccgccagaagacaatgtacaagctcagcctacagacaacattcaaggtgattgggaccaatggattgttaatgttcctcctgttcagcagcctcagcagccccatctggaccagccacctgacgagcaacaagtcagcaacccccattcgaacctatcctcagatagttcttctggtcacattcatggtgcctcgctgcagaatgtgcagattcagaatgggcagatcccggatgatct

SEQ ID NO: 18557 - DNA, 413 bp, Zea mays
  unsure (1)..(413): unsure at all n locations
tgtgaaggttcttcatccncacatgtgctaagcggtgatttcacaaccagcccatgctagtcttagcaattaagcatgcatctagaccggcctcctcttttgcaaaatcaactaaatagagtttgccgtctaatacacccttaaaagctaatgaaccatcacttcttctaaagacagacacatctacatttgtaaatagacaattatatcccatattacataattgactaacagatagtaaattatatccaagagactcaactaaaaacacattagagataaagtgttcatttgatattgcaatcttgcctaagcctttcaccttgccttggttcccatcaccgaatatgattgaatcttgggaatccttattcttgacgtaggaggtgaacaatttctttctccccgcatat

SEQ ID NO: 18558 - DNA, 245 bp, Zea mays
  unsure (1)..(245): unsure at all n locations
acacacaaaccagcnaacaaaggacacgaaagagccccacccaaggaccttataagtataggccacaggcagcgaccgtccggggctgagaaagcgagcaccctaaccatgtctacaaaccctctaaggcgctctatgggcttaagcaagccccaagagcacggaatgaatgcctcagagatcttcttatcactaatggctncaaagtcagcaaagcccaaactaccctctttacaaaaacaatt

SEQ ID NO: 18559 - DNA, 292 bp, Zea mays
cattctgagcgctgcgcaatcatcgtatagatttctggaccttctatattaacaagatctgtaaatctgatttaaaggggctggtagcaatatctttattgtttgggttgtcataatgaaaaaagggtttatgtccctgccaataaaacacatgaagaagaaaagaaagaatattacagaaaaaaaaaggaaaagaagaagaacgcggctgaatctctaaatctgttgtttctctttgtgctgtgctaattgttctttttcaatgactacctttgtgcctaagctcacgtct

SEQ ID NO: 18560 - DNA, 402 bp, Zea mays
cgaggctgtgtatagattaccgccctcttaatgcggtatttatcaagaacaagtatcctttgcctcgtattgatgttctctttgaccagttggtcggggccaaggtgttttccaagatagaccttcgctctggctaccatcagatcaaaatacgagcaagtgatatcccgaagacggcattctcaaccagatatgggcattatgaattcttggtgatgtcatttgggctgacaaatgcaccagcatatttcatgtatctgatgaattctgttttcatgccggaattggacaagttcgtggtggttttcatcgatgacattctggtgttctcaaagaacgaagaagaacatgccgggcatttgcatgtagtgcttcaacgtctgcgagagcaccacctttatg

SEQ ID NO: 18561 - DNA, 303 bp, Zea mays
  unsure (1)..(303): unsure at all n locations
agctnggacggtagtttgcaatgggtcctatggtaaccttggtgcangggcagctgctgtcctagtatcaccatccatagttagaacttgttatgcagtaaaattggatttcagctgcacaaataatattgcagagtacgaagccctcctcttggggctgtggaaacttaaggcaatgggtataagaagggcgattctcaagactgattcacaagttatatcatgtcatgtggacaaaagttgcaaggcaagagatccgaagcttgaaaaatatctatatgcaggctgaaggttggaagcctc

SEQ ID NO: 18562 - DNA, 441 bp, Zea mays
  unsure (1)..(441): unsure at all n locations
tagctactgcgcgcagggcgaccggtgccttaacgtccctaagctcggcgacggcggcaaggcgacgatgacngctgccacgtcggcattggggacggcagaccggttagcggtcaggtagcggtcctacaccgagccgcagctgttcaacaggagatggaagaaggccgtggcagaggactggtgctggaccgacccttacccgaacccggcgacgaccaccggctgaccgttggacggagcgaggcagcgcagggaagtacagtagttggtagctgtcagattgaccttgcctagaagatggtagtagatcatacacccgcattaatttacaggttcacaaagagctatacatatgaggcctagatgtgatcgacagtgagaaggcctatgggagaagatngctgcataaatggtgaaggcggcgatgagtggcaagct

SEQ ID NO: 18563 - DNA, 404 bp, Zea mays
atcctcttagtcacctgctgcatgcaagcttctaaaggagaacacattgtgggacttaccaatgttcattttgagaaagacagggtgtgtagcgcatgtcaagtatggaagcaagttggtactcatcatccacacaagaacatcatgacgaccgacagaccacttgagctactccacatggatctattctgcccgatcgcttacataagcatcgacgggagtaagtattgtcttgtaattgtggatgactattctcgcttcacttaggtattctttttgtaggaaaaatctcaaacccaagagaccttaaagggattcttgagatgggctcaaaatgagttcggattaaggatcaagaaaataagaagcgacaatgggacagagttcaagaactcacaaatcta

SEQ ID NO: 18564 - DNA, 436 bp, Zea mays
tgagaaatatttagacacggtccgattgattgacgctttctttgaagggttatctgtcaaaaatattcctcgaggagaaaatgaacatgctgatttgctagccaagttagcagcacaggggctgcccttaccttcggaagtatttttcgaaacaataaaagcaccttcggttgaacttcttgaaagagcagtcctcaatatatcccctgtttatagtgaagactggagaactgagatcatctctttccttcagggtaactttctttcagatgacgaagcttataacaggaaaatagagacaagagctcgaccatatgttataatagaacgggagttgtacaagcatggagtctgttctccattactcaagtgtttatccagagccgaaggtatagaattgatgaaggaatacacgcacgcctgggtggatctcaca

SEQ ID NO: 18565 - DNA, 441 bp, Zea mays
  unsure (1)..(441): unsure at all n locations
agctnggaaccagcttagcttcaacttcccagaacttattctctagtgctgctttccccttctcggtgttggcaatgtcatcttcaatagcctgcatctccctacgcaatctatccacatccttcacattcaccggctgagcatccacttgtttcaatagatcctgaatttcagcagcagcgcactgggtgtccgacacttttgcctccaactctttctccatatccccaacgattgttccctttcattgtccatgcaattacatttgtagtgggtgcaagggctgctccgaccgtactacttgacttanggctcgtttanttggtgcgctggcctggtgatgccagcagatatgtccatctatctatcatgtgtccgaaatggacggactngagaagctcacaacatactcattgtcacgcttcagcagtacatgctttt

SEQ ID NO: 18566 - DNA, 479 bp, Zea mays
  unsure (1)..(479): unsure at all n locations
gacactataaaactaagcttgcaggttagggcccctgacgcgaaagtagggaggtccgtctgttctggggccggctctagagaacgggaccctgttccatagggtggtccagagcctgtgtagtcactcagccaggtcccgtgccgtgggcctacatgctccgccaccccttgacggggactaagtatctagagttataattcctgcgggtccgacaaccttgggaccggagctagagaacggacattggtctcctggagtggtccggagcccgtgtagccgctcagccaagtcccgtaccgtgggcctgcacactccaccgtcctgcgacaagtgtcctagtatctagaaccgcgacccaagggggtctggacacgcaacttggccaccctgactaaaacctgcaagtcccgagtatgtatcanaggacgactaatgtcagatggagagccctatgaggtgtactactnaatgcttct

SEQ ID NO: 18567 - DNA, 428 bp, Zea mays
gctggatgcatagtaacatcaattcgttatgtcttttcatcaaaatcagtggcttggcagaacataataccctgtataattggctccacaatgacatgtaacacttgggatatgtctttcctgatggtcggggagaagcatattatatttccaagcgtataatgcatcgtcgtctggaccacgctttcataagttggatcatgctcgtgttcacgatccatctgattggatggttgatcgcatcaagccatgcgggcgcaagcctatgcacgccaattttcgcactatgcacggacgcaaccaaatagcctcaaaatagctgatgttgtatttaactataaaactcttgcaagggtgggcgcagatgagatcatgggtatgcaattgaataactatgaattagcaaatctctattattgttatcaata

SEQ ID NO: 18568 - DNA, 429 bp, Zea mays
  unsure (1)..(429): unsure at all n locations
ctatgatactcagctgacttcggctcgacaagctccgcttgattctttttttcagaagaaaaaacttcggaagtatttaatttccacaaattcagaattaaatggccagagtgcgatctaccgctagggttgagcgtgacgggggcgaagctgaaggttcggagactgttcccatctncgaagcgatgcaaagatccggactggtaactgcggaaaagattcccagtgatgatgcggaacaagcagaacaagcaattgccgaagcagaagaagaagatattgaggaaactgatcccgaagatgattatcgcattgccatgccaagcaagcccagccacttggacttcggaaagtctactgtttcgaaggctgatctctccaagatggtaaagtcaggctttnttaatgaanatcagaagaagctattac

SEQ ID NO: 18569 - DNA, 467 bp, Zea mays
  unsure (1)..(467): unsure at all n locations
tatgcaatntacaatattgtgttatgctgctttgttgatacttttatgcaatgtatggtcatgaactgaattgaattgacttgcgcttatctttnttttatcctttacgtattttatgtatatgtgttgtttcatttggcaggaacatcagtgatgaagaacgtagaccgaccaccttccaatccaaaacggatcataatccagtctactcaggagtgcttcagcgttgacataccccgtgctccggcggggactgttagacccgaaacaaggcatgctgctgatgaggatgatgactttacacacactattgtagatgatctagtacgattatatcctctgtctacttatactntgtcaaacactatacgtcatcaatatagagatatacacgtgagagtaacaagtcttganaaataaaaaataattttatatatacatacacttgtcanatgatcagatcaaca

SEQ ID NO: 18570 - DNA, 467 bp, Zea mays
  unsure (1)..(467): unsure at all n locations
tgcaagcttgcgaagagtattgtggacggagctgctggctctctttatcatcactntgagtagaattatgaatagacctaacgtgcctcgggtgaaatctctctccgaagaccctgatcatttcagagaacctgaatgcttcctcccttctttggctgaaatcatcgttagctcgaatatactcgtacatcttctggagcagcttctccaaatgttgtggtggcttcctggcaaagtattgcgctgaatgtcccggccgaagccccttaatcatggcctcaacgacaatttcattgggcactgttggcgcctgtgccctcagacgcagaaaccttcggacatacgcctgaaggtattcttcgtggtcctgtgtacactggaatagagcctgagcggtactggctntgtcaaaatccttgaagctggtataacatatcttcagctttgccacgggtgattgacctgcc

SEQ ID NO: 18571 - DNA, 440 bp, Zea mays
  unsure (1)..(440): unsure at all n locations
tcggcgtgaccccgtgaagcttcccaaccagatcacgtcctccaattgcagatgccagcaaggttctatggtggcggccgccacccgcccaccatgtacgcttcgcacacccggacgaggaaccccaactcctatggccaagggagggtgcgaccctgtgcctttatagtaccgccgtggagtccggccagagagggggagaggccacagacgattcggagttcgtttcggtgagctcacgcgagatgcggtcgagtttgttgcgcacttgccaaatttgttccgcggacatggggtagtccgattcgagcagggagagagagctgacgaagatggcccacacganagtggctgactgtgttagctaggctgcggcgtgggtccacacgaccggtgacatagtgcatccgcgtgtgggaggtggtggagaagagagtttt

SEQ ID NO: 18572 - DNA, 405 bp, Zea mays
  unsure (1)..(405): unsure at all n locations
tgtctgaaggactttgaactgcttgaagcattattgcaactctggagcagctagagtgatgtagttgtgggctcttgaacaatagttggagtgatatgaaacattagtgatgtagttgtgggcttttgaactgcttcaagctggaatgatgtcgttgtggtgcttttgtgactgatcatctctagtgcttttgtgaatgatctanctagctatctgtaaatgatctagttgtgaatgatattataattgtgatgcttttgtgaatatataattatggtgactttgtgtttatgtgatggatctatgactgtggtatactgattaactctgtatatctttatgattngtgtataaaaaattgtgatttgtggtgttaattaaatgtatattattattaataacaac

SEQ ID NO: 18573 - DNA, 495 bp, Zea mays
  unsure (1)..(495): unsure at all n locations
tataaatctaagcttgcgactcgcgtatagattaagagcatggttggatacatttgacaaatagctagtttactggctaattntagcactttggactccacacggactcactaatcagttagctaattattagttagagggctgacaaattgtttgccaattagccattagcccttgctaataggtgttaaaggaacataaaaagagaaaaagacatctattagttaagacttcaaatataccctggctaattgtttgcctagccatgaggatctaaagagagcctatgttttctattgagttaagatcatcctaatatttatgagtcaccacactagccaaaaaataactagcgattnttttttgagattgacataatgacataccatttttggaggatgtctgtcttgaaaaatatagcctatnttcccagatggacttcataagaggaccaccccataatataggaccgaagccccaccaacacatcacaaa

SEQ ID NO: 18574 - DNA, 396 bp, Zea mays
atcttaagtcactgtgctgcaactgatatatacgggattacgttttttttatacacatacagacatatgcactgtgttaatatctttttgataaacaaaaaacctaggtaacaaagaatattgcggcctgactcttgacttgaccatcaagcttgtcatggacaaggactggactcacgcgctgatcgcgaaaccgacacatataattataatggagcccctggcatagatggagtcaatgttgtcaaatctatcaaatgctcgatcagatcttcgaaagccttctgatgcattggtccacaatgatagacttatggtgacttcagcacttccaagaatggtgaacttctctctgctgatcgggatatgaatgatcgagaatgaccagtattctgc

SEQ ID NO: 18575 - DNA, 379 bp, Zea mays
  unsure (1)..(379): unsure at all n locations
ctatgaaactcagcttggtccatctcctatcagaagctggacgctcatanatttgtgagggaatgaatcacatccgtggtaacatcgaagctggtaactccaactgcttcataacagatgatcaacgagtcatatggtgtaacaaccgcctaaccatcctaagaatgatgagatccgcacacacattttggatgaagcacatcttgatcgctattctatacatcccgccagcactaatatgtatcgtgatttaagacggccttattcgtggacatagatgaatattgaaatagcactctatgctgtacgatgtgacacttgttagcgggtncaggccatacacgtgaacactactgtgccactacagaccgtacctatt

SEQ ID NO: 18576 - DNA, 446 bp, Zea mays
  unsure (1)..(446): unsure at all n locations
agcttgagagtgacttgctgaagcagcagaatccgtttgctgttgattgcctacgtattccggaatatatggagagtagcacgaagaagtatgcaaaacttgcttcgactgattatgtcgtgcctcggcttcagtaatttccttttgcttttagatcgtgacttggcacgtcctcgttgtatgtccgttgtactcgccacagaaaaggcagaacaattttctgggctgattaccgtaccttcctccaccatagcttctccccccctctgcctctcggggctggtggtctgtaagaagtctggtgcatgcccgaagactatgagctgtgctgactgttctgagcattattggccctatcaccgctagcgttgggattatggattgtactgacatgcctgngatggagtcttcctccgaaaccactagtcatctcaaaatatctatat

SEQ ID NO: 18577 - DNA, 473 bp, Zea mays
  unsure (1)..(473): unsure at all n locations
ntccactatgcaaagtgtgtgccataaaaatgtgtttatcacaagtaaccactagacctttagtcaccatcctacttacacttgggtcggttaagaccaccaaatgagagaaccagggtctaaaaccacttgtaggctcgagatagcggactagagggggttgaatagtcctttacaaaactaattatgttggataacacaaataaatgcggaattaatactatgttggtctagccaagactacacccctctaactataacaaacatctgacaaaagatcctaattgaagcaactaaggtgccaagatagtaaaaaagctcacccacataaatctagttagcaaggtcatacaaacttatgcaactattattctaagcacatagagagctcctaaacatactagtaagaaaagcacacaaagcacaactcactagttgcactacacaagcacaactagagagaaacaactact

SEQ ID NO: 18578 - DNA, 439 bp, Zea mays
agcttgtgctggcgccagtggccggagcttggtctcatgccggtgaatgtgacacactgtggggccgatgcggtgatccattgccgagactgatgacttgcagtttaaatctgaattatgcgaagaaatccaattaaacgaactaaatataacaagtgtagcaaacactttagtatttgtgccaaaattgaatatgtatatatattgtaggaacacattggaaaaaaattgggagaaaaaaaagcatgtaaacattgccgagtgtctgctggtgacactatgcaaaaaagtcactttgttgagtgtctccttgggatactcggcaaagttaacagacgtcagctaccgtcggcacctaacgacgttttgccgagagcgcatttttgccgagcactgagttcttggcaaagatgtctttgctgagagccttcttatgctg

SEQ ID NO: 18579 - DNA, 398 bp, Zea mays
  unsure (1)..(398): unsure at all n locations
acctataaaactcagcttcgacaaagctccttccgttgggtggctgaagtttatataagagaggtgtaacgagattgttgagaactatcttgtgagagaacatgaagatatgtcatccaccttcaagagccggggtaaactcaagataaacagagttatgaatgccatagggttcgaataccctgactatacaaatcctgcaaccggngtatgaaattacaagcatgcccacaaagtttacaattattatttacaaatattatgggggcacaatgtcttttctctatctttcttgttgcacaagtcttcaaccttttctccttcattgctntggcacacgaagccttcgccgcgccgaagctagtaacttcaattttcaccttcgccacacatgtgtg

SEQ ID NO: 18580 - DNA, 485 bp, Zea mays
  unsure (1)..(485): unsure at all n locations
tcttaatcacctctgctgcagcttgactctggattgaataacctttattcttactctgtactatttgaagaaggaatgtggtctaacctccttggactaataattgtatcacatttgcgtcccaaatgatcggggcacttcacattatgtccattgtccaatgattctgttattttatttattgttcatgtcaagatcattatttttaattggaacttggagcttaacttgagaaacacgtgccaccacaagggtggattgggacgcccttggctgactaactaagatagctagtggaggactaccttacccgataggggcaagggcagtatgggagtangcgtgtatggaggttatcgggttgattttgctgcgatggtggtcagacggngattcctgcgttgctcttcctataaactgtagcgggttgtttgaagctagtggaactntgtaaaggcctcgtagtggatccctagacattcacc

SEQ ID NO: 18581 - DNA, 464 bp, Zea mays
  unsure (1)..(464): unsure at all n locations
ntgaancaaatttggagcaccaatattggtggtctatatgtcaggttatggctggttgaaatgtgatgtttgaagctgtcaaaatctggacagcaatgcttgtttgtattaactgacttcgatacacattgaatcaccttgagatgattataaatgaactgtagacaattctattagctctctaaaaagtctaggatcacctgatttggatttctaaactccagttatgaattaatgaagtaagtagtcgaattctatccaaatctggacagaaattgcgtttagtactgtttgacatttctaaatgtcaaatcatggtgatgataatactaaaactttagaggactntataagctttccaaaagtcttagtctactatttttggatgaatattgtgtaagttattgaataaacaactagctctccaacttcatttaatcaagcgtgttcttgcttatcttgta

SEQ ID NO: 18582 - DNA, 488 bp, Zea mays
tctaagtcacctgtgctgcagctagaaaatctggatgaatctgcgatattacccagctagtccaagaaaactccggacttggtgaacagttgttgggggtttccactccagaatatctttgaccttgctaggatctaccgcaattcctttagccgataacacgtgccccataaattgaatttcttgcatccagaacgcgcacttactgaacttggcatatagctgatgttccctgagacgcatcaatacaatccgtagatgctgagcatggtcctcttcattcttagaatatatcaagatatcgtcgatgaagactaccacgaatttgccaactcgggcatgaacaccgagttcatcaagtaagtgaagtgggcatgagcatttgtgagcccgaaagaattaccaagtattcaacaatcataccggtagtaacgcggtttcggtatatctcggccgaatcggattgatgatacccgcctgaatcattt

SEQ ID NO: 18583 - DNA, 418 bp, Zea mays
  unsure (1)..(418): unsure at all n locations
tagctgatctctggacgtgaagcggtcaacttcattgaactcaaaggcatgtaaacaagtttgttatggggatatgttccctaattatcacacagccctccgggacgtctgtcaatcagagtatactgatatcaggcaggtaaacagtgttagaaatattaataggtcacggatgaggagggagaagtaactaccactcgttataggaagtttggctgatgaataatgggttagaccctctcttttgtagaactctatctggtagtcaattgatgtgttatcatattntccaccagccttgttggcctcagcttcctcgaaaacatcgaagcgtctgtaatgcctggaaatagcaaagctaacattcttcctcacaagaactgtaccataatgtaggagataaataaaacaaccgggc

SEQ ID NO: 18584 - DNA, 469 bp, Zea mays
  unsure (1)..(469): unsure at all n locations
ntggccncacctgcaggctcgcatcttctcttgaggtgggtccggnggccactgtcggtaccctgaaagtagggtaccccgtactactgtataaagacgcagtacccatgcggctatctttagtcgcgtggtaaaagagctgtatgtgggaccaggccatgactcgccccagcctcagggcgactactctgggccagcaatagtgcctgaccccaccacataggcgggtccggggccgccacgtgtctagagaaagtgatatactccaaggcatcaacagtgagtccggaccccgatgggagagtgccggacccgtgccggacctctgtatatacggtccaggcctccaagattggaccaggacctccacgtgtgcgaaccggacccctagaatgggatccggaccctccgtatggggtccgggccgtccacagtgtgggtccagggttccaggacagaacatacccga

SEQ ID NO: 18585 - DNA, 455 bp, Zea mays
  unsure (1)..(455): unsure at all n locations
agctngctagccagcctggtggcaagaatctttgttatcagcttgccgaaactgtgcacaaggcttattggtctaaaatccttcacatattcagccccctctttttgtgggatcaaggtaatgtaagcagaattcaacttgtcaaaattaacaaagttattattccagatagcttgaattgcagccatgatatcagatttgataacgatccagcaggacttataaaaaccgtcagttaatccatccggccccggagctttatcagaaggtaaaagcttaatggtttcccatatttccttttccgaacagggagcctcaagcacagccaaatcatgctgataaaggccaagggcctccaaatccactgctttgctctgtctccatcatgaaccaattaatattgaaatataccatccactgcttgcagcttgtccctatgactaagtaggatatca

SEQ ID NO: 18586 - DNA, 401 bp, Zea mays
tgacgaaccctccacgtccgaagcacaaccggtggcatttaatgcgacggaggagaaggaggaggagtctacaccgagtagacaaccaattgacacctccaagctcgacaatgaggagatggctttaatcatcaaaagctttcgtcaaatcctcaagcaacggaaggggaaggattacaaatcccgttccaagaaggtttgctacaagtgtggtaagcccgatcactttattgctaaatgtccattatcaagtgacagtgacagggataatgacaagaagggcaagaggagagaaaagaagaggtaccacaagaagaggggcggcgatgcccacgtgtgccgcgagtgggaactcgacgagagctccaccgacttcttcgacaacgaagacgccggcaaca

SEQ ID NO: 18587 - DNA, 448 bp, Zea mays
  unsure (1)..(448): unsure at all n locations
agctctcatccttcttcttcacaaacagtgctggacatccactatgcgaagtgcttgggcgaatgaataccttatccatcaactcttgcaactgcttcttcaactctgccaactcatcgggtggcattcggtanggcctcttggaaattggggccgttcccggttgcaactcgatggcgaattcaatatcccggtccggtggcattcccggcaattcatcaggaaagacatctgcatactcacagaccactgtgatcttcttcatgggtaactccgtcctatagaaagcacatgactgagaagaaccttgactatgcagaatcaaagtgaaattcccgcagaaaggagaattaacttacacggtacgactggctacatcaagcacaactnggtgcaaggtcatccaatttgctcctagaataatgtccacattttccaatcccaacac

SEQ ID NO: 18588 - DNA, 478 bp, Zea mays
  unsure (1)..(478): unsure at all n locations
tgaagccatggtaagtagcataggccaataatatacgaattgactcaagcctagctacgggtgcataggtttcaccgaaatccaaaccttcgacttgggagtatcccttggccacaagtcgggctttgttccttgtcaccacaccatgctcatcttgcttgttgcggaagacccatttggttcctacaacattntgattaggacatggaaccaaattccatacctcgttcctagtgaagttgttgagctcctcttgcatcgccaccacccaatccgaatcttgtagtgcttcctctatcctgtgtggctcaatagaggaaacaaaagagtaatgctcacaaaaatgtgcaacacgagatctagtggttaccccttatgtatgtcgccgaggatggtgtcgacggggtgatctcgttggattgcttggtggactcttgggtgtggcggccttggntcttcatcnctcctttgcttgata

SEQ ID NO: 18589 - DNA, 328 bp, Zea mays
tgagactgggtctcccatgctagctatggtgggtacaagtgcggtcactgcacggtggcagtcggggtcagtggagcattgtatgccaatgcagtgatgcctgtacgcgaacggtgaatcgatggggacggttgtctttgggggtcggagtaccctgacatgacgtgtgtataggtttaccttgcaagggtaaaactcgattcgaatcgtctgcttctcacagctaatgagactgcttgattccttgtactgcatcgagtaagaagtgaaatgtgggtatatgagataacttgttgatcgaactaattgattgttaccatgaatgctt

SEQ ID NO: 18590 - DNA, 377 bp, Zea mays
  unsure (1)..(377): unsure at all n locations
ggacttcgctaggttcgcaggctccagaccatatatggtagttacctgatccattttcctgcaagcttctcgctnttatcgaacaccttctttctgagtgcatcaagtatcatcccgttggctctttccacctgcccattaactgttgggtgtgccactaatgcgtacttgatctgaatgctcctctgctcgcagaagtcaaagaaatccgagctggtgaagttagaccctatgacagtgatgatgctattaagtattccaaacctgaatattatctcctgaatgaactccactgcctttgttgaggtcaacgaagtgattggcttgtattccatccacattgtaaatttgtcgatggaaaccagtatgtgagtata

SEQ ID NO: 18591 - DNA, 433 bp, Zea mays
  unsure (1)..(433): unsure at all n locations
tctaaagggagagcacattntgngactaaccaatgttcattttgagaaagacatggtttgtagcgcatgtcaagcanngaagcaagttggtgcccatcatccacacaagaacatcatgacgaccgacaagccgcttgaactactccacatggacctattcgacccgataacttacataagcatcggcaggagtaagtattgtcttgtaattgtggatgattattctcgcttcacttgggtattatttttacaggagaaatctcaaacccaatagactttaaagggattcttgagacgggctcaaaatgagtttggcttaaggatcaagaaaataagaagcgacaacgggacggagttcaagaactcacaaatcgaatgttttcttgaggaggagggcatcaagcatgagttctcttcttttacacgccacaac

SEQ ID NO: 18592 - DNA, 391 bp, Zea mays
  unsure (1)..(391): unsure at all n locations
acgagaagaggtcacccaagtgtcattgatgatagcccagacgaccaatcaatgaatgaatccatgtgggagttccgaagagaaatgttcgcgtgatggcttcgatgcttcttcaataatctagttgccatgcgaatgctagaagcctgaagatgatcttgagtatccagaatcagcgattgcaatcagcagccggatgctccgcaatggccagattttgttgagttccatctcctcgtatagatgcatagtgaaaatatgtaactgaagtaagctatcccatacccttcttaccgaactcgagacagattcctttagtggggtgattgtacatcccaaactaaatctgtnattctaacatgcttaatcaaatgattcaattattcatatg

SEQ ID NO: 18593 - DNA, 432 bp, Zea mays
  unsure (1)..(432): unsure at all n locations
tctaaagggagaacacgtgataggtctaaccaatgttcatttcgaanaagatagaccttgtgcagcttgtcaagcagggaaacaggtgggaggctctcatcacaccaaaaatgtgatgacaacatcaagacccctggagctgctacatatggacctcttcggacccgtcgcctatctgagcataggaggaagtaagtatggtctagttatcgttgatgacttttcccgcttcacttgggtgttctttttgcaggataagtctgaaacccaagggaccctcaagcgcttcctaaggagagctcaaaatgagtttgagctcaaggtgaagaagataaggagcgacaacgggtccgaattcaagaaccttcaagtggaggagtttcttgaggaggaggggatcaagcacgagttctccgctccctacacacctca

SEQ ID NO: 18594 - DNA, 405 bp, Zea mays
  unsure (1)..(405): unsure at all n locations
cacctgctgctgcaagcttaaaggtaataagtctatgtatatatatataccactagaagccccacataatcatgaaaccctaagttaattcttgacttagtttctttagcttaatgttcttaaatcttgcataatcatgacatacatgttcattgcatttcgatagactataatcttgctgacggagagtacatcctcgtgccggagcaaggatctgctcatgatgtagcccctgatccatctcccgatcctgcaccatatgacctgtctgccactgctattgaaagcaagccctgtttttatgcataacctgttatttatgctattntacttcacttaatgattgtaagattgattggcacttatgtgtaagaattgttgaaaccctagttgcatgatctcaag

SEQ ID NO: 18595 - DNA, 482 bp, Zea mays
  unsure (1)..(482): unsure at all n locations
tgttcttaggggcattaagtttgatgttgctttggtttccttattggaaaccaataccatccttaatgccagggcgtcttccattataaagcatactacgagcaaattttaatttttcatttactagttcatgctcggcaattttagcatttaatttagctatgtgatcattttgttctttaatcatagcaaggtgatcattcatagcatcaaattaacatctctatatctagtgcaaatagtgacatgctcaatagtagatgtagagggtttgcaagcattcaattcttcaatcttagcaattaaactaacattntcagttctaagacaagaaattaaatcattgcaaacattaagctctttagacaaattttcacaattttccacttcaagagcataagcatcttttagcttaacagacttttattttccttaacgagcaagtcctctttgtattccaagatatcatncttctcgtaatg

SEQ ID NO: 18596 - DNA, 358 bp, Zea mays
tcttatgatgccttctagaccgaactggttctttgttattagtactctgtcgaagagtatgggtttcccgaagcttgatgccgacatcaatcgctaccgacgacaacatatacgcggtagtttattctattctaatttcatgataaaaactttacttcgacttttcattgttgtaacgacgaatgtgttttttgacgaatgttgtttttgcgcatatcatgctattgagtaaagccttataaatgcgacaggaccttgaagataaaaatcatgaggttataattgaatgcttagagagcaaaatataagttcacgaagctgctcttgagaagaacgattgtgaacttcaatcgatgga

SEQ ID NO: 18597 - DNA, 354 bp, Zea mays
tgccaagccctcggacccggccggacttaccggattttttatatctacctcaccggacttcggtgttgcgtcgtcgcgcgtggaccgagctatccagtgagtctccgcccaattccttgcgctcatatcttctctggcaccccatggacctctctgacccatccaattgaactatctcgccgtgaccaggccggactcctcggcaccgacgagcatccccgcctgcgcgcgtggaccgaccgactccggccatcttcgacggcgacccgcacatcgttgtgatccccgagaccttccattcatcctcgaacacttcaccggagcattctcgccgacggaaagcccctccgccct

SEQ ID NO: 18598 - DNA, 415 bp, Zea mays
agcttgaagccatggtaagtagcataggctaattatatacgaattgactcaagcctatctacgggtgcatatgtttcaccgaaatccaaaccttcgacttgtgaatatcccttggccacaagtcgggctttgttccttgtcaccatgctcgtcttgcttgttgcggaagacccacttggttcctacaacattttgattaggacgtggaactaaatgtcataccttgttcctagtgaagttgttgagctcctcttgcatcgccaccacccaatccgaatcttgaagtgcttcctctaccctgtgtggctcaatagatgaaacagaagtgtaatgctcacaaatatgtgcaacacgagatctagttgttacccccttatggatgtcaccgatgatggtgtcgacggggtgatctcgt

SEQ ID NO: 18599 - DNA, 389 bp, Zea mays
  unsure (1)..(389): unsure at all n locations
ntacttagttgattntgcanaagaagaggccggtctagatgcatgcttaattgctaagactagcatgggctggctgtggcatcgccgcttagcacatgtggggatgaagaaccttcacaagcttctaaagggagaacacgtgataggtttaactaacgtacaattcgaaaaagatagaccttgtgcagcttgtcaggcaggtaaacaggtgggaggagcgcatcacaacaagaatgtgatgaccacatcaagacccctggagctgctacatatggacctcttcggacccgtcgcctatctaagcatangaggaagtaagtatggtttagttattgttgatgactnttcccgcttcacttgggtgttctttttgcacgataagtctgaaa

SEQ ID NO: 18600 - DNA, 412 bp, Zea mays
gatcttaatcacctgagctgcagcttggctggcgcggtactgctgatgtctttgcactcatggaggtggattctatggacgggcgcattcggacagtgtcgatcaccgatatgatggacgtgtctgatcgcaacctgaacaaatccaacatcgtgcaagtggctcaagggtttatatacgagacaatggatgggagtgttgcaccaaatccatggtcacatttggagccaaccgacgtggatggaaaggatgatactgcgatgagcaagattagagaggatgggcttgcactcttgaagaacctgtgttagctgtcaatgaagttctcgacgccagataaccctgatgatcatatgttgctgcgcggcaaggtgttgtcacttgaatttgttgaaatggttatccacaatgc

SEQ ID NO: 18601 - DNA, 462 bp, Zea mays
  unsure (1)..(462): unsure at all n locations
tatgacaaattacacatacgtttatgccagtttgcatgtatatttatgatactttctggaatttgtcaaatgaacacaggaatcacatttacacaaggaaatatttgtatcttatggtcttctactctctaccagatgaatcatcatctcctacatccaccgttcgttttttcgacgttgatgtctcattccattgcggggctgcagctatgattttgttccttgaaccaggaggccgtcctcgcttacgtccagataggttagccaatcgaaccctattatcctcgatagttaaacacgtacggctgttgtgaccatcagctatgccacatttctggcatttcctgctcatcttcttagctccctttcgcacccaatttacaacttgttgctcactactnttgattgttcttcccttaggcttgcgcttatctggtcttgctagtttacaccttccatatg

SEQ ID NO: 18602 - DNA, 273 bp, Zea mays
taactctatcaaaactactagatagctgacctctacactctctaaatgctctgatcatcattcttctaagacaagacacctgtatccgttaaagacagttgtacccattttacatattgcgaaactgaaagcaagttgaatctataaatctacaaaaaaaacatttgaatgaatggcaggtgtatacaattttaccaacctttgccaaccttgtttcatcccaatggatactcttgggactggtttttcgagagaaaatttctctcctgtatg

SEQ ID NO: 18603 - DNA, 367 bp, Zea mays
  unsure (1)..(367): unsure at all n locations
ccttctaaagggagagcacattntaggactaaccaatgttcattttgagaaagacagnggttgtagcgcatgccaagcangaaagaaggttggtgcccatcattcacacaagaacatcatgatgaccgacaggccgcttgagctactccacatggatctattcggcctgattgcttacataagcatcggcgggagtaagtattgtcttgtaatagtggatgattattctcgcttcacttgggtattctttttgcaggaaaaatctcaaacccaagaaaccttaaagggattcttgagacgggctcaaaattagttcggcttaaggatcaagaaaattagaagcgacaacgggatggagttcaagaac

SEQ ID NO: 18604 - DNA, 447 bp, Zea mays
  unsure (1)..(447): unsure at all n locations
agacttgtgactgtagggaaagttcactgttcaatctgttgatctcggcttgagcttctgccagtgaaccttccatcgtttgaagcacgaagtctatcttttctaaggcagcttcatgatctttaatcttcttctctaagccctcaattataacttcgtttttcttgtcctcgaagtcttgttgcatcctcaaggctttgcttagtagtaggctctagcaaaatagctttcatcagaaaacatcctcatatcataacaataaacacgtaagcgaagaaatgtaccttanagttagaataaaacaggctaccgacaatatgctgtcactgatatctgctgagatcggcttcgagcttcggaaaaccaacactgttcaataaagtgctgacaaccttcgccccaactcggtcctgaaggcatgctataccctcttcggcaacaccaccg

SEQ ID NO: 18605 - DNA, 407 bp, Zea mays
  unsure (1)..(407): unsure at all n locations
tataacaggagaatagaagcaagagctcgaccatatgttattatagaaggggagttatacaagcgtggggtctgttccccattgctcaagtgcttatccagatccgaaggtatagaattaatgaaggacatacatgcaggtctgtgtggatctcacattggatctaggcctttgcttggaaaggtttttcgccaaggattatattggccaaaggcagcttcggacgcagcggatttagtccaaaagtgcgaaggttgttagaaatatgcaagagatcaaaaacaaccttcgtctttaactcagttaatacaacccacttggncgttgcaaaggtggggtctggatttgctaggtccatgaccaccagcacaggggaacttaagatacgtggtggtagcagtggaata

SEQ ID NO: 18606 - DNA, 498 bp, Zea mays
  unsure (1)..(498): unsure at all n locations
ctcgtacacgggatcctcttagtcacctgctgcatgcaagcttgaggaggattatagtagtggcttattattcacaagttaagtaacacctgacgccctatctttttcgtagtgttgtctgcaagctcagaaacagcaagtttgaggaggagaaagtgacttacgtcgcgggtgaagttggtgctcgtgctcccaaatcacgttcgtctccgaaggggcgagtagcgtgccgcggcttgactactcgtcaagaccttcacattgcacatgcccgatgtgctgccagttgtctggcggacggtgctgggcgtatggagcatggatgcggacgatgctgggcgtatggagcaagagaaaagaagagaaaacggttgttatatatatatatattgtagtcctttgtaaaaaaattcacgtgaaaaacttaatgtncatttgaccttttgttggcgccatgggccgtggcgccgaggtaatatatctctgcaccacaacaca

SEQ ID NO: 18607 - DNA, 459 bp, Zea mays
  unsure (1)..(459): unsure at all n locations
taaaggagagaagaagaagaatgaactctgttggctgccctatcattntaagttcaagaaacacttcaaagaaccctgccaagaatggttggatacaattgaggttatgtgcaatgaaatcttgggcaattacacgaaaaaagaagatcaaccgatgacagtagccttcggcacccgaccgaaacgaaggttaaaccgagtaatggacgctntgaaatttgaatatccagactacgaaaggttaaacaaaggtgccgaagggccgaaacggaaaagggctgtcagtattatacaaagacaagctgccaggatgataaaagaagatgaaaatttggcaaanaagagaaaatccagtcatgagccgaaggtggctgtgccgaagaaaataaaggctccagctccgaagccgaaagctgatttagaagaagttctttcaacaccttctgctgttgacatgga

SEQ ID NO: 18608 - DNA, 334 bp, Zea mays
  unsure (1)..(334): unsure at all n locations
ngaattgtctgtgaatgtaggtgaactacaagaccggtgggagccattgngttattgacagtggatgcacacaacatatgacaggcaacccacggatgttcacctcattagatgagaatgttgatggtcaagataaaatcacatttggagacaactcaaaaggaaaagtgcaaggacttggcaaggtggcaatctcaaatgacttatcaatatcaaatgttctcttagttgcacctttgagcttcaatttattatcagtgggacaactctgtgatcttggacttcaatgcttattcactccatcagaggttatttgaacaaaaatggatgatga

SEQ ID NO: 18609 - DNA, 430 bp, Zea mays
  unsure (1)..(430): unsure at all n locations
agcttaacaagaacacacaagaacacgcgatatatcccgatgttcggcgaccaccacaaatgtgtcctactcctcgttgaggaacccacaaatggccgggtcttttccaaccctaatcctccacaagccgaccacaaaggtcaaggcaatctcttctcaaatctgctcaaggagcgggtgatacaaacttcttggggtcgtccacaaatttggagactcccaagcaacctctaaccgtcaaggaacacgatgttccaagagtaacaaatccgcacacggttaagtttgcaacgagctcaagaacaagagaatgggagaatcgagatgaaattgacagcgagttcgatcgagttcacctcacaccaanggtccttcaaatgattgaaggagatgcgattgcgggtgtgagaggtgaagtgaatgctcttgt

SEQ ID NO: 18610 - DNA, 379 bp, Zea mays
  unsure (1)..(379): unsure at all n locations
taatgcccctaagaaaatatctaattntgttaaaggcaaagctcccatggttcaggatagggaaggctacattntatatccttccaactatcctgagcacaaaattaggagaattcatgctaggaaacctcacactgtttcccatcatgcatttatgtataaaaatgaagcttctagctctaggcattccactcatgttaaaatgcctaaaaagaaaactcccattgcatcaaatgagcataacatttcatttaaaacttttgatgcttaatatgttttaactaacaaatcangcaaaatagttgccaaatatgttgggggcaaacacaagagtccaaagacttgtgtttgggtacccaaggtgcttgtttctaacgtc

SEQ ID NO: 18611 - DNA, 379 bp, Zea mays
aatatcctttgaaataacaatgtatacttaggtgttacccgccgttttctttctccactattataaaaatatcatagagaattattttgtataatatgtgtgttccatatcatatcaaaagctcgcgtgtttgttcgctaaaaatgatcttggcgatgtttacatccggaagaagaaaaaaactagcgcttttgcttttgaagttatttgggcgcggtctaatataaataaatatacatctatattaaagccatgtatatatatacctacaccttaaatattatgagaagagaaagaaattatgacgggagatacatatgaaaccctttgccactctcctgccgtcgaccattatcatgacggtgcgtctgctcatggc

SEQ ID NO: 18612 - DNA, 428 bp, Zea mays
  unsure (1)..(428): unsure at all n locations
tttcataattgtggttacactataactgttgntttttccctgatctacgtaattggtggcttctaagtaaaggaaaaaggcattatgggactctttggtggcttgcattagcctgtatctaggcttctacagtgtacttcgcctgtttggttgtggaaatctttatgcaggcttaaacaatgttcaaagtactagctagtacattgattaggcgatgtagatttacacaagctgatgaacaaaaaaagtggagaaattctcatctctttctaccagtactagaaacataagttctctactaaaacatggatgtgactgcatataacacaatgtaaggaaccaaacacaactgtatcagtgcacaatgattacataaatcaatntacaatatctctgagaacaacanatgaataattaaactaaatcta

SEQ ID NO: 18613 - DNA, 435 bp, Zea mays
  unsure (1)..(435): unsure at all n locations
nntgggtgcttgagaaagtcaattcaatttttattaacttatgctatcaatcttacaatgatctatatatccaagactggcccaaagttattttgaattattatatctgaaactcatatcatctcgggaaagatattgatgttgtaggaaataaagaaataccctgtgcgaaaaaacaaggcctacaacatggaggagagccaaaggatggtaacatttatgcttttaagtgcaagtatcttaacttatcatttcttatgtgtcttgtgtagacacatagaaaaaggaagcacttcgattgtttagaattatgtcatcatcctttgaagaaattcctctcatatggtagaatgcatattcatcatttctatactatggcaatctacatggtttaaattatagtaagaaccttatggcatgatctacattaatcat

SEQ ID NO: 18614 - DNA, 474 bp, Zea mays
agctagtggttgtggccgtgcagaggactgcatattttctgcgccaagctgggtgccaatgtatttgtaggatgtcttagattaaaacgaggattgatcgctattctagcattgcgcaggatatatgcagtccgaatgtctaatcctctgtccatgtcgattgctgctgcatcgcttaaattgattttaccatttatctctgagcaaatcatataccaccatgctatagttgtgtttctggatgatccttgaacctacgcacttacatttcggtcggaagcttgctacagtagcaggctaacagcgacttacagtatggcacctatcttcaacaacaacttattatatgaggtgctgttcagaatgaattaaaagtagctggcttttacccgtgtctcggatataactgcttttccaataagcagcacctatgctatacagtgctaaacatggcccatgactgatttctgatgt

SEQ ID NO: 18615 - DNA, 110 bp, Zea mays
ctgtgtggagttgggagaggatttgatctctctggtgtgtcttgaaatgaatgctatagctcttgtaaggtgtagaagtgtagaaacttggataccattgaatgtggggg

SEQ ID NO: 18616 - DNA, 505 bp, Zea mays
  unsure (1)..(505): unsure at all n locations
tatatatataactgccgcatgcaagcttcggaagcgatatgcacgagtgacgaatatatgtctgttgataataaagtcgaaggccgaatgaagcacagtctttctgaagagatgcatctgggttttcttcaatctatgtcgggttgtcttcaatctatgtcatagactattaccgagaagatcactaaagaaatgttggaaggtttatctgaagatattggtgatagcgacagctatgatgcggatagtggtggcgaagactccgaagatcgaccttggcgaccaagccatgcgggtttcggcaaatcaagtattaaagaaagtcatctcgccaatatgacgggaagatattccnggattgtctattgtaagtctgacgatggataaagactccccaactcctgtggaatatgaagtagagtatctcgaacttcttgaagctggatacattaccctgaccgtttgttgtgagggctgaaatattgaatccccttcacaattatcc

SEQ ID NO: 18617 - DNA, 469 bp, Zea mays
  unsure (1)..(469): unsure at all n locations
agcttcggctatggtcaaatttttggcagcaaatcatggcaatatcaataaatgttgtggtaacttcacacctacccgtctgtttatatagtggcgcaggtggggaggtgaatcgtcaagtcttccgcaccggacgaatagtcgcccgcactcactgatcggtgggccacataacccgagaatgtgaatcgccaggacacgcttacctgctgcatggtgggaccatctcgcgctcgaaattntgtgatcgtttctcggcaacgagctcagggaaggtgttttttcggatcttcggctctccgaagcctatgagactttntcacggatcaagctcgttacaaaatacgatctatcaccgcgaaggggctactgttggtggtatgcttcgtcgccgaagatcctgtaagaagaaacaccttcggcagatcctctcataagtagtgccgaagctattacccatatagcttcg

SEQ ID NO: 18618 - DNA, 475 bp, Zea mays
  unsure (1)..(475): unsure at all n locations
cctcgccaatacttgtcaaagcaacagcacatgccagcacagtaactacagaccataccagtaacctggcctttcgcatgctggggactggatatgattggacctttcaagaaagctcaagggggatacactcatgtattggtggcgattgacaaattcactaaatggatagagttcaagcccattgcttctttaacctctgctaaagccgtggaattcatacaagacataatattcagattcgggataccaaacagtattatcactgacttaggatccaacttcaccagttcagaattcttcgacttctgcgagcaaaagagcattcagatcaagtacgcatctgtagcacatccaagagccaacgggcaggttgagcgagccaacggaatgatattggaggcactcanganaagggtcttcgataagaaatgaaaattcgcaggaaagtggataagagaagtgccttatgttg

SEQ ID NO: 18619 - DNA, 479 bp, Zea mays
agcttcgactcatcttattatggattgctttttgaattgtccagtatccttcaacctttctggcagcttcctgacttccgtgaatagcaataggcccttgatccgaaggtatcttcatgcataaatatgctggatgaagaattgcttcgaaagcattgagtgtcccacgaccaatgattgcattgtaaggatacttcatgtcgacaatatcaaacacaacttgctcattccttgtattgttgacaaatccgaatgtcactggcatcgtgatcttgccaagtgctacgatctgccttcctccgaagccacaaagagggtgtgtagcatcatgaatcgtatcctctagctcttgcatctgtctgaatgcactggcaaatataatatccgctgcactgcctgtatcaaccataacattgtggaccataaatcctttgatgacacaagatatgaccatagcatcgttatgaaggtaatccttg

SEQ ID NO: 18620 - DNA, 444 bp, Zea mays
tagcaaatcacagtgcacaagagctaaaaattgagtgagcgggagtggttggccagaaagcgtgctaaatgagtttgcggtatggccgtatttataagctcggtgcgttgaaaattcaaagaccccgcttgtcagtgaatgttgctattctagcaaagggaaggtgttttttcggaccttcggcgtaaagccttcgtccaggtcgcaatctgaattcgttgttataaacaaattaatattgcgaggggctactgttggggaccttctgcatccgaaggtcctcagaaacaggatttaacagtatttctggagtacaatatgtgtacaggtatcctcggacaattcggcattgctgtagaccggaataatacgaacgttgatacagagccgaagggtgagcaagaagcttcggcgtgacagcaagagtggaaccgactaaagatg

SEQ ID NO: 18621 - DNA, 494 bp, Zea mays
  unsure (1)..(494): unsure at all n locations
gatcttaatcaccgctgctgcagcttatcttcttaccgtgaggattttttttgttccgtgtaattacaaagtacgcgtgtgcatttattacgcgtggagaaagatggaatgaaaagtggttacgcacatgagatgagtagcatgctttggtggtcattacatttccattcattattgcttcgtatgtntccttctctctctctcatcttctcccttggattacgcttcgaagaagaggtaatcaaaaggagaaggtcacaatcttcttgtggcggaaccgcccgaattatttcagcttaagtgcccaagtcgcacccttaatggcagcaacacacttaaacatgaataacccgtcagtcccttggatctagtccgataaagccacttaccatgatcgaataccactagctcacacgattgtgatgcacagagaaatacattaaaacataataccacatatgtaataagtatcattagtgattacattatcggag

SEQ ID NO: 18622 - DNA, 334 bp, Zea mays
  unsure (1)..(334): unsure at all n locations
ntatcanatggacgtgaaaagtgctgtcctcaactgacttatctaggaataggtctatcgtgagcaacctcccggctttgcagatagtaaataccctaaccatgtctataggctctctaaggcgctttatgggctcaagcaagccccaagagcatggtatgaatgccttagagaattccttattgctaatggcttcaagtcggcaaggccgatcctacactctgtactaaaactcttgaaaatgatttgtatgtatgccaaatttatgtcgatgatattatatttgggtctactaacgagtctacatgtgaagaggttagtacgatcatgacac

SEQ ID NO: 18623 - DNA, 323 bp, Zea mays
gcttatctcggcgtgctgaccgcattttgcttatggaaatatctgcatcactgtcgtcctgtgatggccggtgggcaacatcagttggtctgatgtgccagtttggatattgcgccgtggcggaagaccgaatatctcgagatacccctcatagacagcattaaatgttggcgtctggagtggtttataattgataattatggaaattctctcactacccgctcatgaagacagccagatgttcgtactctaagttggactgagtcccccactgatcaagaagtggccaaggcgggtgtgttgcttactgaaatcggattact

SEQ ID NO: 18624 - DNA, 398 bp, Zea mays
  unsure (1)..(398): unsure at all n locations
tgaanataatgccgaagctttctggatgccatcaaaacagcatataacaccttctctaattctgtgtagtttttctttgatatactgagaacttcagatacaaaatatattgggacctgtttcctggcttggccatcaagcttctcctggacaagtgctgcacttaccgctgagtgcgaagctgccacatataataataaaggagcccctggctcaggtggagttaatgctgttagatctattaaataccgcttcaggtcttcgaaggccttctgctggattggtccccattgaaagacttcggctgacttcagcacttctaagaatggtaagtttctctctgctgatctggatatgaatctattgagagatgccaaccttcctgtcaatctttgagc

SEQ ID NO: 18625 - DNA, 234 bp, Zea mays
tatctagacatgcaaagggacatatcctcgaaccatcgcatgaagaatccggtcaatccatatgtgaaagtcatgactcttcatacctaagactcacataatatataatatcacccccctagtcaagttagctgcatacccataatggaacatcaacatcttgatccactgaagtacttcctctgggccctgcttaagacgaaatcaggcttaagccttctccacgtatgtccg

SEQ ID NO: 18626 - DNA, 463 bp, Zea mays
taatgagtttcttacacttactcatggtaatcgcactgtgttgcagtacgctcaggccttcaatgacctatgtcagtatgccggatatcatgctgacattgatgagaagaagagggataggttcaggagggggctcaacactaagctccgcgaccatctcaacaccgtcagggccaatagttacaatgagttagtcaacatggccatttcccaggaggactgcatcacagcccgtcaggcagaaaagaagaggaagacccctgtggcaggatcatcagctctgcctcagcgcttcagaattgtgtctgacactcagaacaggggacctcaacagcagtaaagacgttgggtgatccgaccacagcagcagcagcagcagcaggcacccaaccgctctcagctctcagttcagaggaacaacaatcagccacagcagcagcagtaccgtcatgccaatgacaat

SEQ ID NO: 18627 - DNA, 452 bp, Zea mays
agacttatgttccaattaaaataatataatgatcttgacttgaacataaataacataacataataattggaacatggatataatgaaatattaacccaaaaccatataatgcaatagcataactacccaagtgaattatgggtaaacaaggtaaacaggataaacatactatggtgatctattgggtcccatcaaaattaaacctatgcattgaataatgataataaagaatactattgtgtaataaaagtggatcaagggcacaacttgcctatgacttgagattacaagtactatgatgatcttcaggtgactcgtgacctcacgctagtcgtagcaatacaaacaaatatgatacagatgaaattaacatcacaccaaacaaaagaataaactgcgtaataataatctacacatcgttatgagatcgtatgttcgagaaccactaaatg

SEQ ID NO: 18628 - DNA, 398 bp, Zea mays
  unsure (1)..(398): unsure at all n locations
ntattccagtgcacccaggatcacgaagaataccttcatgcgtatgtccgaaggttcttgcgtcggagggcacaggcaccaacggtgcccagtgaaattgtcattgaggccatgatcaaggggcttcggccaggacctacggcccaatacttcgccaggaaaccccctcagaccctggaaaagctgctccaaaagttgaatgaatacatccgcgctgataatgattttcgtcaaagaagagaggaagcttacaggttctccgaaatgaccaggggcttcggagggagaatccacccaagacatgtaagatcaatccattccactcaaaatgatgtcagaggaagtcagcaacagtggccacaatacttgtctcaggcttcggggcacaacagagctat

SEQ ID NO: 18629 - DNA, 368 bp, Zea mays
  unsure (1)..(368): unsure at all n locations
ttaccgcattngaagcatgagcgctttccctttggtttggtctagctnggctgtcccttgcgatcctttagcgccgtcttgaatcttttgatgatgatggccatctcttcatcattgagtccggctgcctcaatttgcgccaccttgctaggtaacgcctccttgctccttgttgccttgatagcaatgggttgaggctcatggattggaccattcaacgcgtcgtccacgtaacctcgctacttgatcatcattcgcccgcttacaaattttccaatgacttcttccggcgacattttggtgtacctgtgattctcacgaatattattcaccacatgaggatcaagaacggtaaaggaccttatcat

SEQ ID NO: 18630 - DNA, 469 bp, Zea mays
  unsure (1)..(469): unsure at all n locations
tgtgaagattcttcattccaacatgggctagtcggcggtgccagagccaacccaagttagtcttagcaaccaagcaagtgtcgagttcagctctatcaaaatctaccaagtatagctgaccctctaacactcccttaaatgctattgaatcatcacttcttctaaagacagtaacacctacatcagtaaatagacagttgtagcccatttgacataattgggatacagaaagcaaattgtaatctaatgaatcaacaagaaaaacatttgaaatggaatggtcaggagatatagcaattttacccaatcctttgaccaaaccttgatttccatccccgaatgtgatagctcgttggggatcttggtttttctcatatgaggagaacatcttcttctcccctgtcatgtggttggtgcacccgctgtcgagtatccaacttaagcccncggatgcatanaacctacaaac

SEQ ID NO: 18631 - DNA, 478 bp, Zea mays
  unsure (1)..(478): unsure at all n locations
tctaagggagaancacatttgggactaacaaatgttcattntgagaaagacagggtttgtagcgtatgtcaagcangaaagcaagttggtgctcaccatccacacaaaaacatcatgacaactgacaggccgctcgagctactccacatggatttattcggtccgatagcttacataagcatcagtgggagtaagtactgtctagttattatggatgattattatcgcttcacttgggtattctttttgcagaaaaaatcacaaacccaagagaccttaaagggattcttaagacgagctcaaaatgagttcggtttaaggattaagaagataagaagcgataatgggacgaagttcaagaactctcaaatcgaaggctttcttgaggatgagggcatcaagcatgagttctcttctccctacacacctcaacaaaatggtgtagtggagaggaagatagaactctactagacatggc

SEQ ID NO: 18632 - DNA, 310 bp, Zea mays
ctcgccagcaaaatgaatgagtttactctcagtttccctcttctaagaccatttgtacattccttgccatgtactctgccgcacggtagatttgcttaattcaatatggctcggtttcgatgggaccagagaaatataatattcttcaatctcatcatcaactccatcctcaactagagcgcgctcagcttatgcagtttcaccttctgcaatagctttttccgacacttctatacacgatcgcctcatcatttctgatattggcgctgtttctgtcatttcagcatcatctccctcatggaacacttca

SEQ ID NO: 18633 - DNA, 480 bp, Zea mays
  unsure (1)..(480): unsure at all n locations
tcggctaaatccaacatcaaatgcccttaagcaaataaatatttggtgtaactgtaatgtcattcctaatcaaattggtactcatcaaaacggattttggtgtttgaaattggaaagttgtggtctagaatcggtatgtccattacctaaatctcacaaaggaaaataggtttgaagaatcatgtgcgataaatatataagtaaatattagccttggatgagtgttcttaccacttcttttaacgtctgtgtcccccaaaaaatgtgcttgcctttttaggctcagctcgatttcacagcaaaaaaccttccgagtcatgtttgaaaaactaggagctggcggccagtatcccactccttcacacaaagaagtaaacaattatcatcatgaatgaatnntagaaagtgcaaacaaccaaagacactaatattattgccgtacgtatatttttaacattntccttcatcaacagagatcta

SEQ ID NO: 18634 - DNA, 380 bp, Zea mays
  unsure (1)..(380): unsure at all n locations
agcttgtgactgcattntagtgggcatcacgactacacatcatctccatatgaaggcgtcattcgacattttaccctgttatacctacaaaaactcagaaataactggttaaccaatgttttgatgaccttcggctgaagatgcccccaacaatagcaccttgcggaattagttcattgtctataacgagctcaaaccacgtaaatgacaaatgcctcaaggtagcgtgagagagagatgcatttcctcggctcccacgcccatcaacctatataaattgaatggctccatgcagttaccatgccatttactgctcttaccaacttgttgtcactgaattgtctgcgtccaaagcttttactgctcctcgagccctttct

SEQ ID NO: 18635 - DNA, 341 bp, Zea mays
  unsure (1)..(341): unsure at all n locations
tcggctttaagaacacattntcgccatttctgaagaaaagatgtctcaagacaaaaaagttgttgctgagacgaagctgagtgaagaggagaagctccttgaggagaaaactgctggatttgttgaatcaatagcaaagacaaatacagaaaagattactaaggagattctagaaggcttatctgaagatactgatgacagcgatagttatgatgcggaaagtggaggcgaagactctgaagatcggccctggcgaccaagtcatgcaatcttcgggaaatcgactatcaaacagagtcatcttaataatatgagaggaaggtattttcgagatatgtcta

SEQ ID NO: 18636 - DNA, 466 bp, Zea mays
  unsure (1)..(466): unsure at all n locations
agcttcacaactgtttctacaaaggttcaagaacttcaggatcaattggagtatgagaggcaaganaaagatgcactntgggaggaagtcgaaaccttaaaggctcatgcgcatgcctcaaaggagactatggacagtataaagagatcgatggaagaaaataatgttctcctccaccaactgttaagcttcaatcgaagccaagtgcctccatcttaagtctactacaattttataaatttgaaatatgtttgaagtttcatactttgaattgaagttttaggattttctttggattgaaaattacaggatctacagtcatacaattgtatgttatagaattatctcttggatgaattgtgtgaatgttgaactaattaatggcattgtttggttattagcatgtgaattcataatattacatgacgatatgaattcatcaagtcttatgatgannaaatcgtca

SEQ ID NO: 18637 - DNA, 462 bp, Zea mays
  unsure (1)..(462): unsure at all n locations
ttaggttntcttaacttgggttaagttttacccctttaaccactatttagggttaagtccattatccagggttttatttgcaaaacacttaaaacaatacaacttgtttgaaatttttgcctagtgaatgcactctaggtgtgtcaaacatatgcaatgtcaatgctcatgatgccatgctcaagttttagttatagtaacaccaggggtgttacaatttcgatcttcatcttcgtccaccaataatgttgttttagatcatgatacatcttagtgcttccatgatgaatataatagcgactaagatgtgcttcatctaaaatttgctggcggacttcatcattcttgggcacaactatgtggttgttaaaccatacaacgccttgatcatcttttctaaaacagtntgccttaccggcctctattntctcatgaatgtgttcataccctcatctcttcttt

SEQ ID NO: 18638 - DNA, 459 bp, Zea mays
  unsure (1)..(459): unsure at all n locations
agcttatganacgacacaacatacctgcacacttacatgacttanggtgattactataccatactaacggagcaatcgacttaagtcggagacgtcttaagtcggtgcaacatgctcacgcttacatgacttagggtgattaatataccctactaacggagcaatcggcttaagtcggagacgtcttaagttggtgcaacatgctcacgcttgcatgacttanggtgaatattataccctactaacggagcaaccgacttaagtcgaagacgtcttaagtcggtgcaacatgctcacatttacattacttagggtgattactataccctactaacggagtaatcgacttaagtcggagatgtcttaagtcggtgcaacatgctcacgcttacatgacttanggtgattactataccctactaacggagcaatcagcttaagtcggagatgtcttaagtc

SEQ ID NO: 18639 - DNA, 479 bp, Zea mays
  unsure (1)..(479): unsure at all n locations
tctaaagggagaacacgtgataggtttaactaatgtgcaattcgaaaaagatagaccttgtgcagcttgtcaagcaggtaaacaagtaggaggagcacatcacaccaaaaatgtgatgacaacatcaagacctttggagatgcttcacatggacctcttcggacccatcgcctatctaagtataggaggaagtaagtatggtcttgttatagttgatgacttttcccgcttcacttgggtattctttttgcaggaaaaatctgaaacccaagggaccctcaagcgcttcctaaggagagctcanaacgagtttgagctcaaagtgaagaagataaggagcgacaatgggttcgaattcaagaaccttcaagtggaggagtaccttgaggaggaagggatcaagcacgagttctccgcttcctacacaccacagcanaatggtgtggtagagaggaagaacaggacgcttatagacatgg

SEQ ID NO: 18640 - DNA, 405 bp, Zea mays
agcttaatgaagactagcagaagtgtgctttataataactcaggataattttgtaacaactcttgtaaatagaattaaactgttcttcaaggaactttgtacataccttgtaatatattcttacccttcgattgaggtgctttgatgtggacgaaatcagttttttgagccgaatgcgaataaacaccttcccttcttttcgtacacaacgaatcataaaatgccgcttcctctttttgccgaagcctttccttacataaccaaacataaaagactgctactcttatctgccgaagcttttatttacataacaaaacataaaagactgctactcttatacacaacgattcataaaaaaccacttcttcgaaacctttcttttacataacgaatcataacaaacca

SEQ ID NO: 18641 - DNA, 459 bp, Zea mays
  unsure (1)..(459): unsure at all n locations
tgctggagagcctgcgcacagcggtgccgacgaggtggctgtangtcggccagaaaggtcgttgagtggtgacacacttgtggggatttaaggtaaggcatcaactttttatttttctaatctgataatgctcttgtgtttgcttctcctagctaatgcgaggcagttccattttggtgtgtgctaggtaaatagtagcttgtgtttactgtttgcatgcttgtttggcagaacctgaggagacatcacgatcattttgtggttttcgacaggcacttgaatttgttaagcatctataattaatttatactatttcggctccaagaatgcaaaagctcagtaatcaggattttggacccaaagatctcatgcatctgactgacattgtgaaagtcgcctagaggggggtggataggcagaatctgannatacaaactgacacacactacaagccgggta

SEQ ID NO: 18642 - DNA, 322 bp, Zea mays
ttgctatcatttggtggaatgaacttgttaacacacgtgctgcatcacaaacatggaatgcggttaaataagagatgcgaactcgctttgttcccccttcttatagacgtgatcttcgaaaaatattgcaacgcttagatcatggagacatgtctgtacatgaatactaccaagaacttcataaaggtatgctacgatgtgtggtatttgatgatacagaggatcatatggttatgttttatggtggattgacgcgagagaattacgatattgttgattatacagaatatcattgtatacaacgcttgttcatctttctatg

SEQ ID NO: 18643 - DNA, 340 bp, Zea mays
  unsure (1)..(340): unsure at all n locations
ntgacatcggttntgtcgcggagtgtgcagtgagacaaattaaacttggtgccggtctatctcctaacctanggcgtattctcccttggaactcacatgaaataagtagctctaggtgcagggaagagatctttcacagtcgacatggcgagattcgtacgcttggccgctcagcagagcgaagaacactggcagaagcaacgcgccacgtgttcgacgcgttctgccgcgccagagcacgcccgcgcgcgccctcgcgagccccgcgccgtgcccgagccaaagccagcgccctggtccgcgtacgcgcctataaaagcctgccgagcgttgaccttac

SEQ ID NO: 18644 - DNA, 450 bp, Zea mays
agcttgtgaaggttcttcatcccaacatgggctattcggcgatgccagagccaacccatattagtcttagcaattaagcaagtatggagttcagctctattaaaatcaactaagtatagctgaccctccagcactcccttaaatgctactgaatcatcacttcttctaaagacagtaacacctatatccgtaaaaagacagttgtaacccattttgcataattgagatacagaaagcaagttgtaatctaaagaatctacaagaaaaacattggaaatggaatggtcagatgatatagcaattttaccaagtcctttgaccaaaccttgatttccatccctgaatgtgatagctctttgggggatcttcgtttttctcgtaggaagagaacattctcttctcccctgtcatgtggtttgtgcattcgctatcaataatccaacttgagcc

SEQ ID NO: 18645 - DNA, 245 bp, Zea mays
  unsure (1)..(245): unsure at all n locations
tcgtattattccgatctgctgcaatgtcgactntagtctgagggtacctgttcacacattgtactacagaaatactgttaaatcctgtttttgaggaccttctgacgccgaaggtccccaacagtcgcgcgatgaagcgcacgacgcaacacataaatagaatctgaaattagacaaatccgtcgcgcgacgaagcgcgcgacgcaacacgctaactaacagagagcacctagaggggggggggg

SEQ ID NO: 18646 - DNA, 418 bp, Zea mays
agcttgtggaggttcttcatccacacatgtgctaagcggcgatgccacagccagcccatgcaagtcttatccattaagcatgcatctagaccggcctcttcttttgcaaaatcaactaaataaagtttgccgtctaatacacccttaaaagctagtgaaccatcacttcttctaaagacagacacatctacatttgtaaataaacaattatatcccatttgacataattgactgacagatagcaaattatatccaagactctccactaagaatacatttgatatagaatgctcattagaaattgcaattttacctagcccttttaccttgccttgattcccatcaccgaatatgattgaatcttgggaatccttattcttgacgtaggaggtgaacatcttcttctcccccgtcatat

SEQ ID NO: 18647 - DNA, 356 bp, Zea mays
tactcctccctaggaagggcccttcatcatcgccaagattttgaagcccgggacatacaagctggccaacaatcaaggcgaggtctacagcaacgcttggaacatccaacagctatgtctcttttacccttaaaatgtttcaagtcgttcatgtatctcgctttctttacatgcataaataaagtctaaccatcaaggaaggatcagccttgcctcggcaaagcctgaccctccctcgggggctagaagaggggaaccccctctgcgtcaaaattttcctcggaaaagtcttttaccagaacgtctttcgcgcttttcgactgcatcgataacagaatcctaaagacgagcgagag

SEQ ID NO: 18648 - DNA, 473 bp, Zea mays
cacccgctgcatgcatgcttgatatctatataacatattctctttttttggattatgttcgaaccgaatcaaacaccatcacttctcatgttgaccatgattcacatggttcaaatatgcaatgtgtgctagctctacacgacttcttgtgtggttcgcaatctgacaacagcgggtataaagaccactcaatccacttttgtggatattctggtactcgtacgcgatctcactaattgctatcaaaatgtccacaagaacaaaacagactatgatgaatattgtgtgtcatgttctgatatatatgaatcttttgccgatgggaagtgcctcgacaatgtgttcatgcagcgcttcattcgatgtgttgatgatgatgccatatatcatcagccttccatgagttcgagcagattaattcttgaattaacattggtgtaactatctaacatcctatccatttcaatacacaa

SEQ ID NO: 18649 - DNA, 406 bp, Zea mays
  unsure (1)..(406): unsure at all n locations
tatgaagattcttcatcccaacatgggtcagtcggcggtgccagagccaacccatgttagtcttagcaattaagcaagtgtcgagttcagctctatcaaaatctaccaagtatagctgaccctctaacactcccttaaatgctactgaatcatcacttcttctaaagacagtgacacctacatcagtaaatagacagttgtagcccattttgcataattgagaaacggaaagcaaattttaatctaatgaatctacaagaaaaacattagaaatagaatggtcaggagatatagcaattntacccaattctttgaccaaaccttgatttccatctccgaatgtgatagctctgtggggatcttgngttttctcgtaggaggagaacatcttcttcttccctgtcat

SEQ ID NO: 18650 - DNA, 442 bp, Zea mays
  unsure (1)..(442): unsure at all n locations
ttgagtcacctgangcagcgagctgccttcgctcagtatatcacccaaattcattgttatatttcacgcccatcaagaggatgcgtctcgacgacaagaagggtaaatgggccgacctgctacctgaagcagtctgggcgctgaacacgaccgagtgccgggcgactgggttcactcctttccgcctgctatatggatcggaggccatgaccccgtatgaaatcatacatgggtcaccacggacaagcacttcagccgtcctcgacgtagacgaaccaacttccaaggatctcatcgacggagaccgtgtcttcgccctacaggccctcaacaaataccaagctcaaacaaaagcatggcgcgaccacacagtcatcccgagagaattcaacgaaggggacctcgtactcgtcggacagctccgacaaatcatgtgcaagct

SEQ ID NO: 18651 - DNA, 463 bp, Zea mays
  unsure (1)..(463): unsure at all n locations
tactcaagctctnctgtacaagcgccgcgctcactgcagagtgcgaagcttgtacattctatagcagaggagcccctggcgtgggtggagttagcgtcgntaggtctattaggtactgcttcagctctttgaatgctttctgctgagctgatccccattgaaagacttcggccgacttcagtaattcaaagaatggtaaatttctctctactgacctagatatgaatcgattcaaagatgccagtcttcctgtcagccgatgagcccctttctttgtgcttggcggctccatccgaaggatagcttcgattttattcggattagcttcgattccctttggtgaaactagacaaccaaggaattntcccttctttactccgaagacacanttttcttgattcaactttaggccagcttgcctatagttagcaaatgtttcctgcagatcagcaatgtgattttc

SEQ ID NO: 18652 - DNA, 85 bp, Zea mays
acttggtgctcgagaagctaaccaggcctacctttagaactaatgatatcaggaaatagcaccggccataacttagagatctagg

SEQ ID NO: 18653 - DNA, 408 bp, Zea mays
  unsure (1)..(408): unsure at all n locations
ccccattgtctcatggcaaagggagatgcttagggtaaaatcatcaccgatttaaatgatataaaagatgatgatgatatcgatgatgttgatgatgatggctattcatatgatgatctctgtagaatgttaggtgaggccgatgactacatgcacaaagaanaagaaatatttaagaccttgaaggaattgtataaaaacctccaagtgtcttttgaggagctcaagacctctcacaatgacctcaaagaanattgtgagaagcttgcggatgctcaaaaatcatctattgtgccatgaagtgaggtggtcactaaggatgttggagtcacttgtgacttacttgatagtcctacaagtgaaccactacctacttactctatttgtgataaatgcanaatctctctc

SEQ ID NO: 18654 - DNA, 447 bp, Zea mays
  unsure (1)..(447): unsure at all n locations
ctaagcttctaaagggagagcacattntatgattaacaaatgttcattttgagatatacaggatttgtagcgcatgccaagcaggaaagcaagttggtgctcaccatccacacaagaacaccatgacgaccgacaggccaccggagctcctacacatggacctattcggcccaatagcttacataagcatcggcgggagtaagtactgtctagttattgtggatgattattctcgcttcacttgggtgttctttttgcaggagaaatctcacacccaagagactttaaagggattcttgagacgggctcaaaacgagttcggattaaggatcaagaaaattagaagcgacaacgggacagagttcaagaaactcaaaaatgaatgctttcttgaggaggagggcatcaagcatgagttctcttctctctacaccccacaacaaaatg

SEQ ID NO: 18655 - DNA, 417 bp, Zea mays
agcttgagcaaggctcactgcctcaccaggaatctatctggtggcttgaatcgatcggatggggactggagaggggttggccacagcggaggctctcgggcggcactggcgggcaacggggaggtcgccggaggcaatggctggttcacgcgagtccggcgaggtacggaggaagcaatggggaaggcaaccgagcgctggggcgggttttatatgcacagacgcggccggcgcgcctgatcgactggttggcgcgacgcgggcacgcggggcgcgcgcgggcgtgccctggcgagctcaaagcgcgtcgaacacgtggcgcgttgcttctgcccatgttcttcgctctgctgagcggccacgcgtacgaatcttgccctaccgctgtgggagatctcttccctgcacctacaacta

SEQ ID NO: 18656 - DNA, 333 bp, Zea mays
actataaagaactaagcttcagcgccagggactgccgcactgcagccactggacccaaactttgagaccctttctcttcgaaggcccgaagccagaagaggaaggccgctagtccaacactccaggaggacgagttggaccgtgaaatcagaaacatggagataatccatcaacaagggcacaggaagaaggagaagatggcctgactggctgatcttgaacggcagatcgacgataccactggagaagtacgccatcttgtataagatgaacaagatccaaagccccaacataaggagcttcatcaagaacgcttggtaaatgaccatggat

SEQ ID NO: 18657 - DNA, 395 bp, Zea mays
  unsure (1)..(395): unsure at all n locations
cgagcgtttaaatgtccacattctaatatttttatctaacatgctcatgctcatggcaataattcaccattatttttctgctttatctccaatgtaaatacttatcagaaaaatattaaagatgcatgtgaatgttactgtgtataattaaaatgctctaaatatttgtgttgcgttgagctcccgactcacgtcgagcgattaaaatgtatagtggatactcggacgcaccgatgaggctttgntattaattggctgagtttggcattggctaagcattagctgcgccctggcaacacgacgcagtatttgtgtcatacgaacttggctgcgtcatgtgattgctatgtcgcattcttcgttaattagaccgctcccgttgagtccgactacca

SEQ ID NO: 18658 - DNA, 435 bp, Zea mays
  unsure (1)..(435): unsure at all n locations
gcttcttccaatactatcatctaatgcaagattnctcattttcttgcacgtgcactcaaccttngcaagatcaaccccaggtaaaaaatgcaataccttagtcttaagatcagcaggcaaagccatcaagcatggcgtggcaaacgcaaataattcagttggcacagtgataccattagtggcaggcaaatctcatccgtcggcgctctccacagatcatgaactcccttctcatgcacttcactcagataaagtaaaggctcaagcccgtgcacatactacccataaactatcacgaaatttggcctcaaggagtattcatcaccaccccttccgctcgattcacagaatgcctctagtaccggcacccctacccatgattatcatcgatactattcttcattgattgtcgctcattactgatgagcgaatata

SEQ ID NO: 18659 - DNA, 398 bp, Zea mays
  unsure (1)..(398): unsure at all n locations
agctngcttagctaagggatctcttgtatcattcaccgagaaagcagcttcngcctgtgccagggtgttgacatggtcacaacccgccttctctatgatggctgaaattcctctagcaccagagaacacgcagacatccccgcgatcacttagaatttattcaaaagctctgggctctccgcttatccactcgataacaccttcagggtcacctcgtatgaagatatcttcgttcgaatatgcgcccacgttagcaaagctagcctttatcttttccatgtagcctaatgatttttcacagcatctttctttggacgcgcgaagntcttcaactggttttctaaatagctcttccaatattcactaatatctcggttagcttcggcagaccatacttt

SEQ ID NO: 18660 - DNA, 458 bp, Zea mays
  unsure (1)..(458): unsure at all n locations
ntagcattttatggagagaatatcttctagcctttgacgagcttcgctttgctctctcgctctttttagaagtttgagcatgaccgccttatcttcttggcttatgcgagcgtagagttgcaagaagcttctttcctcctcctcatcctcatttgtgcttctgctatcattttcattagccacacaacatatgtaggaatcaaaatgggaagacaaaccttttggagaggtggattcatcgtttggtctccatcgttcattttcttcttcttccttcaaagagttagtttcacaaataccacaggaagtagaggcacaaaatgaactatcatgtttggactcatcanatttgctnttaattctagtctaaatatcatgcgcatcatgaatggattcattataatttgatatgaaggcatgataaatctcattgctaagagaattacttaagatgtcat

SEQ ID NO: 18661 - DNA, 411 bp, Zea mays
  unsure (1)..(411): unsure at all n locations
agcttgtcaagttcacttccacctaaaatgctctccctactgtgaaaaatggagtgagtgaggagcctatgagagcctctccacagaaacaagtgtgaactccaaaaccttaccatctcaggaacacacttgacacccttcacaacatttctagtggtccccttcctagagcctctcagccatcgaaaaggaaagccccctcccacaagcaaaatccacccaagagagaggtgaggttccattgtgagtattggaagagggatggacatcangcttctttttgctttatgaggaagagagatgagcggtgggtttctaagtcgagcaggaagaacatgaaccgcccttcgcatggtgttcatgctcagtctgtttagagacatcctgagtcgagcatggtggtaatcactt

SEQ ID NO: 18662 - DNA, 457 bp, Zea mays
  unsure (1)..(457): unsure at all n locations
tcgggtctcttgccttgctacttttgtccacatggccagatatgacttgagaatcagttttcaggatggctttntttattcccattgcccttaacttccgaagccccagctgtgacggaaccgcccgaattattccagcttaagtgcccaatcgcacccttaaggggagcaacacacttaaacaggaataacccgtcagtccctcggatctagtccgataaagccacttaccaggatcgaataccactagctcacacgaaggtgagacacagagaaatacaataaaacataataccacaaatttaataagtatcattagtgattacattatcggagtttcagaaataataatcataaattttaatgcagcggaaataactaacggagaaaaccgagtatcatggcgaagcctggccacgctactcctccttgtcctctcctacggaagcaataaccc

SEQ ID NO: 18663 - DNA, 485 bp, Zea mays
  unsure (1)..(485): unsure at all n locations
agcttatatcatacaattggtttcattaaacttatatgtgccaaagttcggattatagataatttgcccctcttgatatcaaatcaaagttcatgtctcctacaagtattcaaaacttgtatgcacaaatccagggggaggttactctataatctaagactttgagactaacaccgtttcaagtctatttttatgtgatagtctcattgtaaggaaaatgaagtccccggagaatgacaacaaacttccactgcataatctccaagaactttcatgtctcacaagcctgccattggttttcaattggcccgccattgactntcgattggtatatttgagactacattaagtatcatttacatgtcttctccaatatntgattagactatatttcatatcttatacttcccatgttgctataaatgcatatactatntaactcatatttgtacctatgcataanganggtagtcttttaaatcatg

SEQ ID NO: 18664 - DNA, 278 bp, Zea mays
tcacagcgtattcaacgtcataaacggcagaggcgacatcatcggtggaaaggacacgtgctgactacccttcgatcctccccaagtcatcgccgtgtgcatgcaatgcaacaacaaatcaaaaaacgtctcatctgaccttgatgtgctaatggtctacgtacgctctttgcacgcacgcacgcacgcatgcatgcaggcgcgatctgtgggcccgcgagcctggtgaacgctatgattgacctgcaagaaggggcgcttatgctgcttggcccacg

SEQ ID NO: 18665 - DNA, 428 bp, Zea mays
  unsure (1)..(428): unsure at all n locations
taccgcatttgaagcatgagcgcttccccttggtcttggtcttgcttggctgccccttgcgaccatntagcgccgtcttgaatctcttgatgatgagagccatctcttcatcgttgagtccggccgcctcaatttgtgccaccttgctaggtagcgcctccttgcttcgtgttgccttgagagcgagaggttgcggctcgttgatcggaccattcaaggcgtcgtccacatatctcgcctccttgatcatcattcgcccgctaacaaatttcccaagaacttcttcgggcgacatcttggtgtacctgggattttcacgtatattgttcaccaagtgaggatcaagaacggtaaatgaccttatcattaggcggacgacgtcgtgggccgtccatcgcgtgctccccgagcttcttatcttgttgatg

SEQ ID NO: 18666 - DNA, 367 bp, Zea mays
  unsure (1)..(367): unsure at all n locations
agcttgtgtgcgagcgctgtggatgggcgttcctgccatggccgccgtcgcgtggtgtgcgcgcgccccgcctgtgggtcggcccgggggagaagaagctcgcgagtcctcggatccgaactggagggctgggatttgatcgggtgcaagcgagatctgggccgcacgcgtttggatctacggtcgcgattagagtaaacataccccttcatcgcataaaaatctggccgtcaattttgaatctgtgggctgtgcgtgggcgcaagcgtggtcnaatcttggccgtggatctcggatccagtggctgctgcgcttaccgcttcaattattaagtcaatctaatctgagtcgcacgttctctatctga

SEQ ID NO: 18667 - DNA, 462 bp, Zea mays
  unsure (1)..(462): unsure at all n locations
attacggacactatgatactcagcttgcaacgataacgcgtggttggctccgtgagttgngttgtctttgtgtgttagtgaattgattggatttggtcatctagcctggtgtacttaggtttttgttggtgcacagtgttagtggtttttgttgtgtgttcgatcttcttctgattacgaattttgcaggtatcgaacaccccaagatggcaactttcgcctcaccactcctctgcaacttcatggccatagaacagaagaacgcgcctcagctgaccaacagcagaaagccgtccccgcgcctgagcttcccaacgacaaggagcatgccaacattgccgttgccgggcttcagagcgaggccagactggcgcgtcgccgccgtctacaaggtgaagctcattggccccgaaggacaggagagcgtgatccaagtgccagaggacagctacatcctggacg

SEQ ID NO: 18668 - DNA, 398 bp, Zea mays
  unsure (1)..(398): unsure at all n locations
catgcaagcttggtttgaagttgcagcgacaccctcatccatatcatgtccaatggttgaatgaatcaggagatatcaagagtggttataaggtgaaagttccgttcaagattggagagtatgttgacacagtggagtgcgatgttgtacccatgtctgtgtgtcacatgctgctaggaagaccttggcaatatgatcgatattctcaacattatggaagaacaaatcaatacacactagatctganagggagaaagtttgtactcaagcctatgacccctcaacaaatcatggctgaacacttacaaaagaaaaatgaaattagtacagcaagtagaggaggagaagagcaaaagaaattgagtgccatccacaattcggtgagtgagtgctacaag

SEQ ID NO: 18669 - DNA, 459 bp, Zea mays
gctttggccccgtagaccaggaagagcggggtctccctggcagctctatttgctgttgtcattggagtcggagtctccagtgaaaacatccttcaggaccccctcgggcgactgatacccgaggtcctgttctcctgcggccacctcgccgctatcgaccctttccttgccagaccggcgacggggtggggagccatccctggaggtctgctcacgccgctcgctgacgcgcttcgcgagttcgatgatctcgcgtcactccgtggcgctatggcgactgttggggtgtacagggcatgagccgctgttacccctctgcggccgagggtgcttgttgcgctcgttccagccctcagtcgcatcgacgacgaccggagcagcagactgcggcttctcgtggccgcgggtctctttcttcttcttttttcggcttgggagacagcacccgagccacccgtc

SEQ ID NO: 18670 - DNA, 396 bp, Zea mays
  unsure (1)..(396): unsure at all n locations
gctttagcacttanattcttacttttcatgtctttattggttcttgaaatatgcatgaggtactgcacttagggggagtattcaaaactcaaatcactcttganaacccctagtgcaagcacaaatgcaaatttcaccatttgcctatnttctctaaaaattatctagcctatggcaaaatattgtgaanagtatatgaaggtgccattacctatcccaacaagtgttattttgtgtgattataagttgggatttggtttggttaggagttagatagaaaaattcaaaattttccaaactcccctctgtctgggctcaccggacagtccggtgtgcaccggacactgcactgtgcaatggccggtgcaccggcagccgcgcgcataattcctcttt

SEQ ID NO: 18671 - DNA, 344 bp, Zea mays
  unsure (1)..(344): unsure at all n locations
atgcaactgctgtcagaaatgacacgtttacttcgtttctctggctgacactatcttggttggcacaccatgaagacaaacgatccgagacatatacaattctgccagtaccgcactggtatagatggtcttgacaggtattaaaggggctgaattggtcaaacgggccactactacccagatggaaatctaacctgctctagtgcgatgccatccgactatgaaatccataccaatntcatcccattttcactgagggatctgcaacggttgcaacaattcaacaagtctctggtgctcttgcttaattcttcgacaactatcgcacatatccacatgctctg

SEQ ID NO: 18672 - DNA, 381 bp, Zea mays
ggttttcactccaaaatatgcttggactttctaggatccaccgcaatcccggtggcagataatacatgtcctagaaattagatcttcttccgccagaacgcgcatttactgaatatagcatatagttgatgctcccttaagcgcgttaatacgatccgcaaatgccgagcatgctccctcttattcttagaatatatcaagatatcatcgatgaataccaccacgaatttatccaactcgagcatgaataccgaattcataagatatgtggagtgggcatgagcatttgttagtccgaatgaattaccaaatattcaaataattcataccgcgtaatgaatgccgtctttgcgtatatcttcgggtcggatacggatatga

SEQ ID NO: 18673 - DNA, 342 bp, Zea mays
  unsure (1)..(342): unsure at all n locations
accccccntgtcgtatggggaggaccttggancgtgttggaaaagactcantccgcgacggctgatgacgcaagtggngaaagtcgcctttaaaaggagggtgactcccttggatggcaaccatgtcttcacactcccttcatgcgtcgcgtccttccaccttccgagcccncagatggggagcactcgcgtcgctttcgtcatgctgtcgttggagaaacgcaacttcacggaagttggtacctttcagccatcgctcggcttcaaggattttcatcaggcagcccggctgcatcccatcgccggtggtcacccganatggtgacgagccagttgatggtg

SEQ ID NO: 18674 - DNA, 458 bp, Zea mays
  unsure (1)..(458): unsure at all n locations
agcttatgagactntnttcacggatcaagctcgtttctaaaaacgatctatcaccgcgaaaggagctactgttgggcctatgcttcgtcgccgaaggtcttataagaagaagcggtcttcggctgaagctgtttgtataagatggccgaaggttcctcttcgtggagcttccgtattacaaaccgacttagagatagaatgaccttttagtccataaaggtctgagtcaatggtgtaagcttttataaggggcatacttgtaattcctcacaggctgcgtcctgtgcctataaatagtgaacagtattcctatactgttcacgcattctggtaattgcaatcgcgtattctggattcaaccttttgcaacgcagaggtattattgtatcaattaatatatataattcgctatgattatttacccctttttgtacctttatttatgttgcttacaatgc

SEQ ID NO: 18675 - DNA, 385 bp, Zea mays
  unsure (1)..(385): unsure at all n locations
ggtaagtaccatangccaataatatacgaattgactcatgtttatctactggtgcataggtttcaccgaaatccaaaccttcgacttgggagtatcccttggccacaagtcgagctttgttccttgtcaccacaccatgctcatattgcttgatgcggaagacccatttggttcctacaacattatggttaagacgtggaactaaatgccatacctgattcctagtgaagttgttgagctcctcttgcattgccaccacccaatcggaatcgaggagtgcttcctatatcctgtgtggctcaatagaggaaacaaacgagatatgttcacaaaaatgagcaacaccagatcgagtattacctccttatgaatgtctgcgacgatg

SEQ ID NO: 18676 - DNA, 453 bp, Zea mays
  unsure (1)..(453): unsure at all n locations
tagaatacctcagcttaaggcgatgggaataagaagagcagtcatcaaatctgtctttatgtcatcacaatccatgttgataaaagcatcagagcaagagatccgaagctggagaaatatatggatacagtccgaagaatggaagcctctntcgaaggctttctagtgaagaatatgccaagaggagaaaatgagcatgcagatttattatctaaatcagcggcataggggctcccactccctttggaagtattttttgaaactataaaagcaccttcagtcgagctcatatagcgagcggtgctaacaatctcacaagtacatagcgaagattggaggactgagatcgtatctttcttgcaaggcaactatccttcggatgatgaagcttacataaaaagaatgcatgtcataacaaggccttatatgatcatacaagtacaattgtacaaa

SEQ ID NO: 18677 - DNA, 473 bp, Zea mays
  unsure (1)..(473): unsure at all n locations
agcttgacgaattttgttcccacatagactgttgcaagggccttcaaatgcttatccatgatgctagcagatattcaaataaaataatttccgtaagtgccaaaaggcggaacaatgtcttaagaagcaagaaagacaagctatggcatacttgcaacggtaaaattcacggtggtaaaaatggcatatgacttttttactgccagtaacctccccgaggaagtccccttcagttatctccctgtattcaccatgaccttgcctttntagcacttcacgcttctcaacttctttctgttgcatagagagctttcaggaatacaaagaacatgacacttgcatgaacttcttatgtgaaagatggaagtcggtactcggtaccttaagggcagcaattctcttcgcgtgcaacttctcaagttctggggtcctggtgaaaagnttcgtcaatttaacaacttacaatatgacac

SEQ ID NO: 18678 - DNA, 461 bp, Zea mays
  unsure (1)..(461): unsure at all n locations
tcaacctcaagtgtatgtaagtctntatgtatgccccttgtctcttgtcgtaagttctgtgnaagttgacaaaggtgtgggttgatttgcttcttccattagctaattacacaatcttccaaatgatgtaaattttgcttttagactcaaattgagtgaagaaaaactctactttttatcatttcaatgagttattcaaatatgtgatttggagaactcctaaaatgtaaaagtgttcttttgttttttcattgtatgcacattgagatgctcaaattgctcttttttccattgatgatacttatgctccaaatgcaagaattaaatagatgcaattattatggggctatctcaaattatgagaagtaagtggcatttctgcttcatcgcttggtgctacactagcaaggtttaaccttcaaccaccgctggcacatgcagagaatcatcaagatccaaca

SEQ ID NO: 18679 - DNA, 489 bp, Zea mays
cttaagtcacctgcggcatgcaagcttcatcaagtttgtgatcctgattattgtattataaaagtagcagctctaatgaacggtctgatggctgaaagaccaccatcagtctcttccaccagatatcttaattctgtggaatacaatgtgaaagcaagcgtatctataaagtagtaagtctggccacgttatacgtacgtgtatatatataatacaagttaggtacagaccacatacatgtggttcctaatatactgtctagaaccgatacatttttttagagagaatcaaaagaacagcctgtaatatatacgtttttaaaaacaagacactttattaaaaactaagcaatatattaaatattcccacgcatgtgtgcgttgctctaattttaattggcactctcgatcttcttctgcaggagctcacaccatcggccaagcacgctgcaccaacttcagagcgcacgtgtacaacgacaccaacatc

SEQ ID NO: 18680 - DNA, 468 bp, Zea mays
  unsure (1)..(468): unsure at all n locations
tctcagcttatcttttggtatggacgtcgcgcagttttatgctattgtcttggagttgnancgtcaccaaggtgccagtgtcaaaatgccttgtcccgaggtcaaactgcgccaaaaccgtgtcaaatgaatttggtttgagttcaaacttttccaggatgtgttcaanggaatttggcacaactttgatatttggatctcctggctttgagtttcgaaaaacggagaacacagatgatcattgggaagaggtctgaaattcagaaattcagaaatctgaatttctccaagggttcatagttcaagggctgatttggggatttatttgagttattttggctaagctttctcaatctttcttgttgctcatttaatatactttaatttttataattggctcangtcataattttaaacttttcatccgctgtgtcttattctcttgcattttgcttatanggctcactt

SEQ ID NO: 18681 - DNA, 449 bp, Zea mays
  unsure (1)..(449): unsure at all n locations
agcttcttcaccacgcgtccgtggatatcttgttgagggtgagcaatgcgtcttctccgtaggtgctgtgctttcttgttcctttcttttgatcctgcagcttgatgctcattcaaaaatttgctttctcttgagcaacaggggttagcacatggtgatatattatctaaatgtgcacatgtgcaagaatgaggttcacatgaatttaagtttgaaaatacaacttcatgagcaacattaagcatgatatgggcatcaactaattcattatgagaataaaatagcatatcatatttttcacttagagcaagtttttctaaatttatcatttctacttgactcttaagcatagaattctcagttctaagttgagcaacatcagataatacatcatgattatttctntgctcaaataaaatagattcatacccgtgggaccaattatcatg

SEQ ID NO: 18682 - DNA, 321 bp, Zea mays
  unsure (1)..(321): unsure at all n locations
ttttcctacacccatactcaatanncnattcaaataacattccttatcagagatttcttgagacactttcttcccttggaactacttatgganacacatggtatacttcctgagtgactatgatgaccacagctctccatgtgatttgagtatgaccgccggagtatgtagcggccaaccacccagtgtaaagaaggttaactggctcagcttgaccgccaggctgttcggctggttagtcgctcgtcgagagacaacgggcgaaaggctttacgcgtttgcgcgactagcattagccaacagcttgtagcacaacacgag

SEQ ID NO: 18683 - DNA, 389 bp, Zea mays
  unsure (1)..(389): unsure at all n locations
attgctaactgtcccgactatgatagtgatcaggatcaaggaaacaagagggagaataagaagaactattagaaggaaaaaggcgaggctcgtcttggcaaggagtgggattcggactgctcttcgtccgactccgacaatgaaggactcgccgccaccgccttcaacaagtcatccctcttccccaacgagcgtcacacttgcctcattgcaagggagaagaaagtaagcactcataatactagtacttatgcttcttcaagtgaggatgagtctagtgatagtgatgagatagattactcatgcttattcaagggattagatagaaccaaggtagacaaaattaatgaattaattgatgccttgaatgatangaatatacttttaga

SEQ ID NO: 18684 - DNA, 288 bp, Zea mays
ccccggaaaaacctccttggggcctatatttaaagctgtttgaataacttccccaaaacattttttggtgccttggaaatcaacgcgcacagtgatgacttccttatgtcccgacatcttcaatatcatgtatgggtaatggggaatgggcatgaacttctccaattctggccttccaatgatgtgctttgacccacagtccaaacacgccacctctaaccttatgaactctgttctgtaggtctctggggtcccaaaggtgacagacaggtagatatgtccgagtgg

SEQ ID NO: 18685 - DNA, 160 bp, Zea mays
agcttctacagcaatccaacgcacggtggagtatggtgttacgcttcggcggcccgaaccactctaaatccttgcgtgttcatgtgcttgatgttcgcttaataagacaggcaaaacacttaagccccttcctcatcttaagatatatggcgggtgcact

SEQ ID NO: 18686 - DNA, 458 bp, Zea mays
  unsure (1)..(458): unsure at all n locations
tcgtcatctgaaaggaatttaccctgaaggttagagatgatctcagttctccaatcttcgctataaacaggagatatattgaggactgctctttcaaggagttccactgaaggtgcctttattgtttcgaagaacacatccgaaggtaaaggcagcccctatgctgctgacttagctagtaaatcagcatgctcattttgtcctcgagggatatttttgacagaaaatccttcgaaggaagcttcgactcttcgaaccatgtctagatatctttcaagcttcggatctttagccttgcaacttttgtcgatatgacccgaaacaacctgngaatcagttntaagaatggcccttctgattcccattgcttttagcttccgaagacccaaaagcagggcttcgtactcagtaatattgtttgtacaactaaaatccagtcttgccgcataacaagtttt

SEQ ID NO: 18687 - DNA, 369 bp, Zea mays
  unsure (1)..(369): unsure at all n locations
agcttccactgcaaatcgttccgcaagtgggttcattctactatcggtatcatttatatgtcttctccagattttgactatactatatttcatatcctatgcttcccatgttgctataaatgcataggttgttaaaatatattgttgggggccttcggcttctgaaggtcctcaaaaatataatttgacaatgttttccaagtgaaatatgtgagtangtatcttcggaattgggccacgagtatacaggaatatggtcaagacgaagcttgaataggacggaaggcgatcataacgaaggataagatgatcacgaagctatgcgcagaanaagcttcngcatgacagcagaataggggaaccgactta

SEQ ID NO: 18688 - DNA, 435 bp, Zea mays
  unsure (1)..(435): unsure at all n locations
agcttatanctaccacttataaaatatancctgttatatcatatctctaattatgaatcnntctatgccagcccgcatactcagtaatcggctcagggcatancctacaattagttatctatgttangtcnacccaaatancctataatgtcttaatgtgtcagaccagtctatatatatacaatagaaatatataagcagaaagtatataatatatatatatatatatatatatatatatatattagttgtatttactttctctagcttagtattcaaatcatcatttaaattctttaaactagaaattgattcatgacaggaggacaattcagatgacaatatctcattgttcttaacttctacaacaagagattnttgaacactaatgaatctatcatgtgcctcatataaaatatcgttttgcttttctag

SEQ ID NO: 18689 - DNA, 394 bp, Zea mays
  unsure (1)..(394): unsure at all n locations
gctntagaaaatctggtatgaatctgcgataatatccagctagtccaagaaaactccggactgggtgaacagtggttgggggtttccactccagaatatctttgaccttgctaggatctaccacaattcctttagccgataacacgtgccccagaaattgaatttcctccagccagaacgcgcacttgctgaacttggcatacagctgatgttccctcaggcgcgtcaatacaatccgtagatgctgagcatggttctcttcattnttagaatatatcaagatatcgtcgatgaagaccaccacgaacttgtccaactcgggcatgaacaccgagttcatcaaataggtgaagtgggcaggagcatttgtgagctcgaaagacattaccaggta

SEQ ID NO: 18690 - DNA, 468 bp, Zea mays
  unsure (1)..(468): unsure at all n locations
gagttattntattacagactagaactaanagtgagtgcagagtagttatattatacaaaccaagggaggcacagactcctcccgataagttataagcaaaagatcctaagtggaggaccgagtcctcccgcacttcagtcttgtttttcttcttttggaaccaccttggcacagaagcagcaaaagtctgctacttcctcacctaaaaacaacgaagggataaaccctgagtatggaattactcagcaagtcttacccgactaaagaaaagactctcaagggtatgctggttatatgggagtcaaggtaaggctnttcaataatcaaagactctggtttgcataaaggcttactaangtggatccttaaaaatccaattttatttgtcaagttaagtagagttacctgtcactagagttctttctaccctatgtcaatcactggtcctgcactagccaatntctcaac

SEQ ID NO: 18691 - DNA, 323 bp, Zea mays
  unsure (1)..(323): unsure at all n locations
tgcaagcttggngccgatggagatacacaaatccttgtaatcttggttgtcgaactgcttgccgttgacgactggtagctcggacggtgctcccaagcggcaaacgatgttatgccagaagaatatttgggcaccctttgatgttattgtaaaaacaaccctcgcttcgatccatttggtgaagtattccacggctacaaaagcgaacttgaagttcccctgagcggtgggcaggggcccgacaatgttcangccccagcgctggagggccatgtatgggcaattagctttgtatactgcgaggggctgcctgaccgaggaga

SEQ ID NO: 18692 - DNA, 365 bp, Zea mays
  unsure (1)..(365): unsure at all n locations
accgcttcacagaagagcttccgaacgtaaagacttttccttgtcacggagtcactntatccgaacgcgagttacttatcgcacaagtgacgagtgaggtatccgtatcccggaggcgtangagtccctcggctcggtcagccatggctgcttacgtgtactccgtcgtttccaggatccgcttttcgaagtagtcaaaaagcacgaaagaaattctgctaaaaagagatcttttttcgaggataaattcgacgcagagggggttctccnccttttagcccccgagggagggtcgggctttgccgatgcgaggccgacccttccttgatgactaaacttttgcgtgggtgcgacgtatatgaaca

SEQ ID NO: 18693 - DNA, 301 bp, Zea mays
  unsure (1)..(301): unsure at all n locations
atgtcgatgaactggccatttgagtggaaaatgtctcttggcacgcgagcggtcccctacctggtgtgccaactgtcgcaatttcngaaaccaagggacaataagatttatgttcggagggaaagctagtgtggactcattccgaaaggtgagccaccgggactcaagcgatggatttgagacggtgggtttatactggttcangcttgcgccctagttntgtaatgttggttgtagtatttgtcggggaccataattatggggtaccctcaggctcctaattcttaactggtaaccccca

SEQ ID NO: 18694 - DNA, 315 bp, Zea mays
  unsure (1)..(315): unsure at all n locations
atgcacaagatttggaaataaaaacacgaagtataatttgtaatntagaaagcaagataaaagaccaatcagctgctcttgaaaagaaagaacttgagcttcagacaactgaagggttattggcaaaagctgaagctaaaatagcagagttaaatacgaagcttctctcccagtcagaaagcttcgaacaagaaaagcagaagctgaatgaagaatatgaggccgatgtccaaanaagttcagatttgaaaaaaatcattgaccagtcttcaaaacaaatgtctggagttcagtaatcgatgcattcaacggctg

SEQ ID NO: 18695 - DNA, 440 bp, Zea mays
  unsure (1)..(440): unsure at all n locations
cgcactggttaatntagttcatgccgttatggttgtcttcccattgctagcagattattaatgtcaaatatattttcttatcttgatagatatttatactttattgctttcgtgtttatgcaattttcaaaggagatgttgtcgaaattttatatacgagtgttagaggtgtaggttagtagcattctggggtgtttgtggatcccggggtgttacagttggtatcaaagcataggctttagattcttggcaatttgaagataaatttgacacacttgcacatataggaagggtatgggttcaaatatctntgatatatgttaatgtctttgaagtgcagatgaaataatttcaccctccctattcctttaccgtggtgtggaaagttgttatgacttaatgccctatataatcattctaaatttgatatgtttattatg

SEQ ID NO: 18696 - DNA, 446 bp, Zea mays
  unsure (1)..(446): unsure at all n locations
actaagctngggtgccccttcttcccacttaaacacatgtgataataggccatatgtacatatattgagctagggccttgggtaacacctgcggtgttacacaatttggagttcatatgcaaaagatatganataaacaagtcttggaattcaaaatacaaaattaggcctatttttgtgataaaataaaaggtcaggggcttctctgcaaaatttcaagggtttgcgcacaaaacacagggacaactggttgatatcagaaagccgagggggcttttaacaanttttccaaatgaacgggtatcgtgtgatctggatcgccctatcacaattcgactgctatgtcacacccgggctttaaatgacaaagccgggtgcatgaacacctctggtgttatattccgctcgacagcgatttggatttaacacgaaatatcatgatgaac

SEQ ID NO: 18697 - DNA, 250 bp, Zea mays
tgctattatgaagacggtctacagtgtggtcaagtgttctgttgccctacaggcactgtactttggtcctcttggaccttatcctttcttaatataatgacgtgcacgcctcctgcgcgttcgagaaaaaaacaatacatagtcagttggaggccacattcgaaaaggccagaagcttgctgatcttttgacgctactaagatttaacagctaaacgaactgggattgagtgttatcggctcaatcaaca

SEQ ID NO: 18698 - DNA, 384 bp, Zea mays
agcttctaaaaggagaacacgtgataggtctaattaatgtgcatttcgaaaaagatagaccttgtgcagctcgtcaagcaggcaaacaggtgggaagctctcatcacaccaaaaatgtgatgaccacatcaagacctttggagatgcttcacatggacctcttcggacccgtcgcctatctaagtataggaggaagtaagtatggtcttgttatagttgatgatttttgccgcttcacttgggtattctctttgcaagataagtctgaaacccaagggacactcaagagctttctaaggagagctcaaaatgagttcgaactcaacgtgaagaagataacgagcgacaaccggttcgagttcaaaacctttaggggaggagttc

SEQ ID NO: 18699 - DNA, 469 bp, Zea mays
  unsure (1)..(469): unsure at all n locations
tcataaatattactttcaacactaaaataataacactatactatgctcaacaggaataattggacttcaataagataatccacctaacccaagtactttgattaacctcacatacaacaatacctcctattattgcacttgaacaatntgcacctagtgatgtcataggatgacttcaaagtagtagacatacatgatctatcaaaccatcattcatataaaaaaaatctccatctgatgcaacaaccacatcattatagagatagaggactaacaaacataagcaacttccagttaaacattgactttgtttaagataaagcggtccaaataataattcaacaagcatgcatagagaactgatcatantaaaaaaactaccatatatcatcggcgattaaaaacaatataaaacgggttgtccatatcgtccacatgactagcctncaacaaataagaattatgcata

SEQ ID NO: 18700 - DNA, 333 bp, Zea mays
  unsure (1)..(333): unsure at all n locations
agcttgatggttagaatgacatcagcctcttttatatctttcatctcngaaatgctcgagagagagattttaacttcctcaatcacattgagaattgatccanagatcaaaatgtcatcaacataaaggcacagcataacagactcacccccaccataccgatagtatacacacgtgtcagattcatttacaacaaagccagctgctgtaagagtattatcaaacttttcatgccattgcttaggtgcttgttttaggccatacaatgattttatcaacctgcacaccttggtctcttgaccatccgcaatgaacccttctggctgatccatg

SEQ ID NO: 18701 - DNA, 397 bp, Zea mays
  unsure (1)..(397): unsure at all n locations
actcagcttcctcataccgcttaactgtgaaacanctttattctttatgaagtttccgaatctctgtttgattaccacatatctatgaggcctcccacgctgccccaggataactaagcacgtttaatggctctctgaaagtcgctccagcgctttttgggccgaacgcatggaggataacagaaagcaccaacggagtgatgaacgctgtttttcctcgcttctttcgcaaacaatctgaggtatctggatagcatccagaaagaagccagacatcagcgggaagtcaccactgatctatcttggagcccaaggatcttcggacaggttgtgagatcagatagccacgccatgcccaatcacttattattgagacagaacaggtggtaacactcgg

SEQ ID NO: 18702 - DNA, 366 bp, Zea mays
agcttgaatatgagtattgacatcactcttgtattttaacagatgagcacttttaaagcgcgcgcatctgatgcaagatgtaatcatacacaatccaaaaatgagtctgagtttggttaccatttggggacaactcatatgatgtttattctttaagacaacacacaatcatcataatacatacttatagtgtataagttggatccagctaaggaacaattagaatcatcacaactcatattatggtcgtcgccctcctccaccaccaccaaactgttgtagtacccccaaatccagccgttcctatggcagaagaacaggcaggtgagacctgtagtgcttctcaaggtgtgggacggggaaaat

SEQ ID NO: 18703 - DNA, 393 bp, Zea mays
aacaagcaccatctctttatattttattttctatggatagactcaacacaagagatgacgattagagcacaagcactagtttcctattatgcaaccctttatatgtggaaagcaagtgagttgcttaaattgaaagacctcattatatgaactaaatttccctgagccctcatgcacaatatattttgaatgacatggataatatgcatggttattcaatgaagtctaaagggctgacttaatccatattatggtgagcgtctaatatagaagaaacaaatccaaattaactagatagagaatatgtcacataattttggattgttgaccatatgataatattcattcatcttccaattggacctttatttcataatcaacaactgatgtata

SEQ ID NO: 18704 - DNA, 324 bp, Zea mays
  unsure (1)..(324): unsure at all n locations
agctntaattccgaaaatgtgtctntggggtatcggcagggaagctactcggatttattgtcagccaccggcgaattgaagctaatccggataagattgaagctatcatgaaaatggaagctccatgatcacaaaagaagattcagcgacttaccggatgtatggcagccctgagcagatttatatccaggctgggagaaataggtttaccattttacaagctactcaagaaagtggacaagtttcaatggacttcagaagcacaggaagccctagatgcactgaagaaattcttgacaaccccaccagtactgaaaccaccac

SEQ ID NO: 18705 - DNA, 454 bp, Zea mays
tacaaaccaacgctatgcgagttggtgcttccctactattactacattactactactactatactacattatactactctacattactactacattattctaactacactatactaatatctaaagaccagtggcatttagccactggccttgctgctgctgcccttgccgccgccgcccctggtgctgcccttgctgctgccgcctctggtgctgcccgtgctgctgccgcctctggtgctgcccttgccgccgctgcccccaccgctgccgctgccgtcaccgtcgccgtcgccaccgtcgtcgtcgtcgccgtcgtcgtcgacatcgtcatctttgtcctcgccgccgtccgagtcctcctcgtgcgaggagaactcagactcatccgagccctcgagcccggagcgctcgacggccccgatgtacgtccagacttccacgacaatcccct

SEQ ID NO: 18706 - DNA, 427 bp, Zea mays
  unsure (1)..(427): unsure at all n locations
ctaaggganaacacgtgataggtttgacttacgttctttctaataagatagaccttgtgcagcttgtcaagcatgtaaacaagtgggaggagcgcatcacagcaagaatgtgatgaccacttcaagacccctggagctgctgcatatggacctcttcggacccgtcgcctatctgagcataggagggagtaagtatggcctatttattgttgatgacttttcccgcttcacttgggtggtctttttgaagataagtctgaaacccaagggaccctctagcgctttctcacgagagctcaaaatgagtttgagctcaatgtgaagaagataaggagcgacaacggatccgagttcaagaactcttcagtggaggagtttctttgaggaggagggatcaagcacgagtttttcgcttcctacacaccac

SEQ ID NO: 18707 - DNA, 430 bp, Zea mays
  unsure (1)..(430): unsure at all n locations
acctgctgcatgcaagctnctggagtangagcgacacgatttncatgctatatntcgtctatagcttcttcttccgcgtgcctttctgcaatttccgaggatttctctctggtgggctctgaaggcccagtttcaacattggcctggctcattgtagcttcggcttcggtcagcttcgtctcagttacaacatgtgttttcaaagccttgttattttttcctggagtagagcttgaagtttttatcgtctccagcacatctaaaacactggccatcctttttctcttgtgggttgctgctagatcttcttagatcttcggcgcctccacccctaccgaaaggcctagaatttctgatgttttgctcttcggttctcgagtcttcaattttggcagccttcagcattacagttggctcttcaatcctctgt

SEQ ID NO: 18708 - DNA, 435 bp, Zea mays
  unsure (1)..(435): unsure at all n locations
attcatcgncaagtcgaaggcatccctcagtgcttacaggctggcaacatcatccagcgaagacttagagcattcctggaacatcgataatctccggaaattttttgtttaagtctcagggcctacgcgcctatgtaattctgcaaacaatgttgttcaggctcgcactcttttcctcccgggggtgaagtttttaatgaggtcgagtcatataatataccagtgaaaagcccccgcaaaaatattcaagtatcaccatgtcgaagaagaccacttcgacggtcttcggcattngacatattcgaagtcaccacgacaggtagcgtagattaccctcgcgtgcgacaaactctacgcaaaagtcgcctaatggtgcagccggacaagcacaacaagtgcatgatacgaagtattttactaanagacaaactccac

SEQ ID NO: 18709 - DNA, 430 bp, Zea mays
  unsure (1)..(430): unsure at all n locations
tgcacaaaacgtattattatgcttatgagtgctggagtaattaaaaacgtaacatacctatagtggttggccaatactgtgatggtgaaaaatgctaatggaaagtggaggatgtgcattgattttacagatctcaataaggcatgtccgaaggacgagttccatttgccacgaatagactcccttgtggacgcaacagctaccttagagctcatgagtctattcgactactattcaggctaccatcaaatctggatgaagaaagaagacgagccccaaacaagcttcataacccctagtgggacctactactaccttcggatgtctaagtgctcaagaatgatggaggaagcttcagcagaatgactgctanagtcctctgctcgcaaattggcacgaatgttctaacatatgttgttgatttcatagt

SEQ ID NO: 18710 - DNA, 198 bp, Zea mays
accacgagcaccacccagcataagacttgcctacatatttaaccaagaacagagccatgatagttctcatggtagcactgttatcttgggtggtcactccatgttccaattaatatgcaataatcttgtttaaccatcggcgtaacaaaataatgtaaacttaccatttggaacattaatatcataacaggagtgact

SEQ ID NO: 18711 - DNA, 323 bp, Zea mays
  unsure (1)..(323): unsure at all n locations
tgtatatttgatgtatataacttttgaatatgatatgntaantatcgtagttatatctttgcgatgcatgaaacattacatacataccggttttcagccttacgggaagaaaacaccttcccttattttcatgcttcgcatagaaagagattgcttcttgtgacgaggcttatacaactggattgtccgaagcttacttcgggccttagcacatcttcattttgacgaagcatttgtcgaagattggcttcgtattccaattttgtagcattgatgcaatatgagagatggcgttatgatattccaatatgaggtgatggtgt

SEQ ID NO: 18712 - DNA, 276 bp, Zea mays
catgcagcttggaggagcagtggcagcggtgttcttgtattattcacacccgaatacacggaagtggtcatagcgcggatgggtaccaaaaagtgcctggtgaggagtaagagccgggcacgcaatataatggagactgttgaagatgtatgtataggtgtggaggccctctgcccagaaatgtgccggaaggtgcgcctggaggagaaaagtgcggatggtgtctgtggtcgtgtggatcatgcgctcaaccttgccgttctgggaggaggtata

SEQ ID NO: 18713 - DNA, 358 bp, Zea mays
  unsure (1)..(358): unsure at all n locations
actatcttctttggcacaccatgaagacaaatgatccangacatgtacagcttcgccaatattgcactgatgtagctagtcttgacaggtatgaagtgggctgacttggtcaagcgggccaccactacccaaatggaatcgtagccggctcgagtgcgaggcaatccgactgtgaaatccatcccaatttcatcccatttccactgaggaattcgcaacgggtgcaataacccggctggcttctgatgctcttgcttgatcctttgacaactgtcacatatagccatgtgctctgcgatctcccttttcattctgtaccactagaatntcttcttcanggcctgatacatcttctcac

SEQ ID NO: 18714 - DNA, 273 bp, Zea mays
  unsure (1)..(273): unsure at all n locations
agctngaaccgagggcccgcgtcaccggagaatctcaaccgcgctcaccggagttcaagaactcgccggcgcacgtggaccgggtaaaccccttcaccatttcccgattcgntgcgcgcacggcctctgtgtcaccctgtgaagctcctcgtgcaccctaattgacctatgccgccgtggtttggccggagcaagcaccgccgtctatccccgccgcctgtgttcgtggccaggggagctccgaccacctctgacgccgacccgcacatcgac

SEQ ID NO: 18715 - DNA, 338 bp, Zea mays
  unsure (1)..(338): unsure at all n locations
ctagaagttgtgtttggtatcttctaaatagtacttgtattatttacacgacttaataaatgctgatattgtttgcagtaaacaacgtttatatanccgggcttgccgagaagtttggttctggtgctgtggctcatctggctcttgacggttcaatgggagttgtttgtgccagtggtaatcattctaagtctgaagagtgatcaatatgtagatgtaagtcatctttntgccagtgatgagctaattggttatgttttgaaccctgtccaataatgcataagagcacttgcatggcaaatcatctcaaagaattttaatgatntttttcttcaagc

SEQ ID NO: 18716 - DNA, 459 bp, Zea mays
  unsure (1)..(459): unsure at all n locations
gtctcagatcagtgctgctgtacaatgacattatatagatgaagagaccgcacaaataccagctacaaaaagatactccagnttattcagaaacaaaacgcgaagaagcagtttgctgtgctggcaggttggcgcttcaaaaagaagctgccatctgcatttcagctgccattgccaataatgtattatttctgagagacgacgactgtgactgtatgatacggtctttgaagaacaacggaagcctgccctgcgagaatngtgctanatatgtgctttcctatgcatcacggtatctggtattggtatgagattaaatagcagcaaccacggcaatgatgtcactgcaataatgattccagattagcatcttcccaatgattgcatgaactgtgcgttaccatcagttatggcagaaatttttatttgcaaaacaattggttctagctaagatcactc

SEQ ID NO: 18717 - DNA, 468 bp, Zea mays
  unsure (1)..(468): unsure at all n locations
tagaaaaataattttaatacaaacttaaactatnnttaaaatcgctttaatcacttttatactgcctttatcttttgtatatttatattanaaactctatcctcactctctatcttttacaatacacacttccacctaaaattttgccgattgatatgtgtttatatttttctatcattagatttttttttcatgtgcacaaagtttgagagttgtgataaagagtgtctctaagggtttgtctcggtagaagggtataaaaggggattgagagggggagggggttaaaggggattgacggacaattagttcatttcccctacaactcccttttaactaaacaagttctaagaattttcacataatcatatttttagtaggattaanaaacttctctcaacaactcccatgtganaaatgcatgtgcgtgtatggaccgtctattagcatccaaacccttattgattt

SEQ ID NO: 18718 - DNA, 460 bp, Zea mays
ctataaaactcagcttatttggatacttatgtaggaaattgtaactatcattctttgttggtcatgttactacatgtcaaattatgttggacaggcccctggcaccctattctcatcattactgcaagattttatctgtcagacttgttgctgcaccttattcagcaacaataaattttagagtagaaggttttaacctactcagtacttcctcaaggtacttcatcatcttgaattctgattaacttattcgtgaagtatatacatgtaaaccttgatattccctttggcttatccatttacatgtaaataccatcttctcatgtttgcagggtaatttgttcatttgaagggcgttgtatattacaggaagacatagattatgtagcagagaatgctgagtataaggatagggacatcgaatcccttagtttgtgttgttatgttcctggtccaagag

SEQ ID NO: 18719 - DNA, 373 bp, Zea mays
  unsure (1)..(373): unsure at all n locations
tgcattgcatatctaaatntcttgtattgcgtctattgctnttctatatctagntaagaataccgccaacaaagcgagtgaaaagcttaacttgggctcaaacttgacaagtcttagttttaagcctttagtacttaaattcttacttactatgcgattgctgggtcttgagatatgcatgaggcactacacttaaagggagtattcaaaactcaaatctttcgtgagaacccctagtgcaaagccaaaatgcagatctcaccatttgcctattttctctaaaaaatatttagcctatggcaaaatattttgaaaactatgagaaaatgtatgaaggtgccaatacctgtcccaacaggtgttcttttgtgtg

SEQ ID NO: 18720 - DNA, 454 bp, Zea mays
  unsure (1)..(454): unsure at all n locations
acctgttgcatgcaagctcacncatgacgaggcatgtgaccagnttaatgctcctcgatcagcaagcctacatcgagaaggtccttaatcgactcagacggagacactacaccgagactcctttctcatgcaagtcaactacccggtctcagctctatcatttaaaacccaaattttggtacctggcagaggtacatcttttcctaatgttgaatccatcaaggccctgatggatcaccatcaagttttatttttgaaaacattcccaccaactgaagcatcacttttgttttaaaacacaatatttntgtttgctaaagcaaggctaagcatcaaaaatccttttcaaaacgggtgtcaaggaagggtattcaatttttcaaggaaggaaatgcatcaacggtttagcacacaactcctatcaactaatgcatcaaacaaggcgatacaaatt

SEQ ID NO: 18721 - DNA, 470 bp, Zea mays
  unsure (1)..(470): unsure at all n locations
agcttgcacacatagctnctttaatacctttgatcatatctcttttatatgctattactaatgngnnnncaagtctatttcaaaccaagtcataggtatattgaaagggaattggagtcttcngcgaagacaaaggcttccactccgtaactcatgcttcgccaacactccgagcaactctctcttctttgggggagaaatgagcatcaaagaanagaacttcatccctgnggaagagagtaaaagctcaaaagcttcngcttttggtataatcttaactcatttattttatgaccaaaggggaagatagcacttaaatggctctaatgattccgtttttggcgattcatgccaaaaaggtggagaaatgagcccaaagcaaaaggaccgcaccaccaccaccaaattcaaaaacttagtgctttctaaaagtctttatcattnggtatcctattgtgtcaaaaggggga

SEQ ID NO: 18722 - DNA, 408 bp, Zea mays
  unsure (1)..(408): unsure at all n locations
agctagaagctatgcatacattaccgcccactttatgtggtagctataaagaacaaatatccgtggcctcgtattgaagatcttttccatcagcncggtaggaaccaaagtgttctccaagatagacctttgctccggctatcatcagatcaagatactggcaagtgatattccgaagaccgccttctcaaccaaatatgggttgtatgaatttttggtgatgttatctgcgctgactaatgcaccatcatatctcatgtatctgatgaattcntgtttcatgcctgaactggacaagttcatagtggttatcatcaatgatatcttggtgtattcaaagaacgaagaggagcatgcccgtcattcgcatgtagtgcttcaacgtctgcgagagcaccgtctttatgt

SEQ ID NO: 18723 - DNA, 453 bp, Zea mays
  unsure (1)..(453): unsure at all n locations
tcatgggtcactggcgaagctaaccgataggccggtgcatcttggttcttctggagtaggctggccgcggtggccgatgcttggcagaggtggcggacggtggcgcggcgtgctcgatgcatagtccggtgaacttcgtcttatgcaaggtctgagagcgcacggtgaggtacggncgaggccttgggctgctttatatgcacgacnanggcgaaggcgcgcggcggacttgaccggatgctggagcgagcgcccgtgggggttgagcgaacgcctgcgtgccgaccagtgtcgaacacgtgtgcgccgtcattctacccgagttctgcgcgtgtggtcattcatacgagcctgctctttccttggcagtgcacataacctcttctccttctataagcactgatcttgtgtggggtcataggatttggctactgcttcaagattggggtctga

SEQ ID NO: 18724 - DNA, 296 bp, Zea mays
  unsure (1)..(296): unsure at all n locations
cttatcaaatatatttaacttatatatnggcttaactcgaaagtttaaacttttcattcccttttgcctattcttttgaattctgctcatggcgctcacttangggtcttaattaaggttgcacattcttatcttttcaaagactcaaatgtcttgatcatgacacttttaaatacatacttggtgaaatctttattacttaaggtaatttgatgctcatgcttacttttatttacataaaatgatggttnttgttgggctttacaagagaaaccctatgtgacattggggtgtca

SEQ ID NO: 18725 - DNA, 453 bp, Zea mays
gcttgacgtcgctggcccgaccttctccgagctcgctccatacgtcattctaccttgccgcgtcaccccaacctcatcaaagctccatcgtccgccattcttcgacgccaatcatcctcgccccttctaccctctcggagaggcctctaacgtgctcgcgtttttctcagcctcacctcgagccttgccctagtcatgttggccgctcggagtgtcattccggccgactctggcgagggtccagccatgtgccaccacacgccgacccacaccctagcatcgaccctcttggctctcggagtagcgcgctcgaagcccagccaagcctctgtccattggattctgatcgcgaggatcgttttgcttaaaccgagtcggctcacccgattaaattagagcccttggatggtgaagagcccgacccttttagataatcacggataaggcctttca

SEQ ID NO: 18726 - DNA, 377 bp, Zea mays
  unsure (1)..(377): unsure at all n locations
cgatccgacactatcttgttcggcacaccatgaaggcagactatccgtgacatgtataactcaactaacggtgctcccgtgtatgtcgtcttcacaggtatgaaatgggccacctttgttaagcggtccacaaccacccatatggaattctatccggcccgggtacgatgtaagccaactatgaaattcatcccgatctcatcccacttncactgaagaatccgcaatggctgcgacaatccggcaggcccctgatgctctgctntgggtctctgatagctatcacaaatggcgacatattctgcgatctctctttttatgccatacccaccacaacctcctttttaaatcctcgtacatcttcttactccctgggt

SEQ ID NO: 18727 - DNA, 423 bp, Zea mays
tgaaggtcaagtcaagaagcaggccccaatatattatggatctctaagttttagtttatcaaagaaaaattatacagaattggagaaagtactgtatgctgttttgatggcctccaggaagcttcggcattattttcaagcttacaacataatcattcctttttcacaacctttgaaggatattatgagaaaccgagaagctactggaaggattggaaaatgggctgcagagctcaatgaattttgtattgattatgtccatagatcttcgattcagtcccaagcgttggcagacttcattgctgactggacgctatgggctcaggaggaagaaacgaataaagatgccgaagcatggacagtgttttgcgatgggtcttagggaaccttcggagtaggagcagctgctgtgttggtttcacc

SEQ ID NO: 18728 - DNA, 277 bp, Zea mays
  unsure (1)..(277): unsure at all n locations
agcttgtgaaaggtcttcatccccacatgtgctattctgtgatgccacagccagcccatgctaggggtagctattaagcatgcatctagaccggnctcctcttttgcaaaatcaactaaataaaggattgccgtctaatacacccttaaaagctagtgaaccatcacttcttctaaagacagacacatctacatttgtaaatagacagttattccccatgtcgcataattgactaacagatagtaaattatattcccaggactcaactaaaaacaca

SEQ ID NO: 18729 - DNA, 324 bp, Zea mays
tctctagacacgaaagattaactgcttcatgcaatggatggttcacttgcataagctcaagccgcatacgctagattaaacgaggaacttctgcaaaaatcagatagccttgaacaacatgtaagatatgctgtcgaggacactatagctgatgctgggcacctacatggcttctacaaactttgaaagaactgtggaacatatggttgaactttggcaaccgctgagtacaaccattgaaaaaggtcttcaactccgttggagccatctctgaagagtataccccttcagctttagagatttcatacacctttgaacacattg

SEQ ID NO: 18730 - DNA, 433 bp, Zea mays
agaacacatcttatgactaacaaatgttcatttttatatagacaggatatgcaccgcatgccaagcacggaagcaagttggtgttcatcatccacataagaacattatgacaactgacaggccactggagttactccacatggatttattcggcccgatagcttacataaacatcagcgggagtaagtactgcctagttattgtggatgattattctcgctacacttggatgtcctttttgcaggagaaatcacatacccatgagaccttaaaaggattcttgagacgggctcaaaatgagttcggcttgaggatcaagataattagaatcgacaacgggacggagttcaagaactctcaaatcgaaggcttccttgatgatgaaggcatcaagcatgagttctcttctctctacacaccaccacataatggc

SEQ ID NO: 18731 - DNA, 357 bp, Zea mays
  unsure (1)..(357): unsure at all n locations
gtctatggggagcctacttgatgtagactcttctttcttctcctccgtcgctttgaatgcgacgggttgcacctccggtgtagatgtggcgccttgctcaattatttgtttggagcctntgatcatgagttcaaagctcacaaactttcatataacttccttgggagacattagcttatatctaggatcaccacgaattaattgaacttgagtaggattaagaaaaacgagtgatctaagaataaccttgaccatctcatggtcatcccatttagtgctcctgagggtgcgcacttgggtcaccaaggtcttgagccggtttgacatggcttgtggctcctcccttggtgaacatga

SEQ ID NO: 18732 - DNA, 446 bp, Zea mays
  unsure (1)..(446): unsure at all n locations
tcgcattgatcctttcaaggtgttacagtccgctgctacctgttactggtagccnctangccgtgggactgtgggaagccaaaaccagaagggagctgacctaaccaacgatgtggcgggagctaggtagctggccctggccggcgcccgatcgatggcctctgcccttgcatggctgcctctcacttgggcatcggtcagccgttgatgcctcaccaccagcagactggcgacgtggagctgcagccagcgggtgtagcagggagaatgaggtcatgagatacacaccctaggccatgccctggcggccatgggtctcgcactctggctctggctccgcccttgcgggaggccaagaggctccaacctccaagtggtggacgcgtnttcgagcccatatgtcgggtcaggcggaggagggccgatgcaacacgacgtcagcgtgg

SEQ ID NO: 18733 - DNA, 424 bp, Zea mays
  unsure (1)..(424): unsure at all n locations
ttgcaanacgagtctttgatattttatgatctttaccttgattcccaacaaaccagcatacccttgagagtctcttctttagtcgggtaaatcttgctgagtaattgcgtactcagggttttattccttggtgtttttcaggctgtaattttgttctgttgtggatggtgctaagtgccggtgggctcggccttcttctataagtatatcccgtctttagtttctctattgaggattggcacttaagttaacatgtattttaaaacttataaatattttatacattgtaaattggaattctatttaatcattttcttctgtaatcactccgataattgataatgtaacttattgaacatgtaatcatttgcaaaaagaattatttccctgcaatgtcgggtggatttggttactaatctgcatc

SEQ ID NO: 18734 - DNA, 431 bp, Zea mays
  unsure (1)..(431): unsure at all n locations
ntgcgtcacgctctaatatatagagcgtgacacagttttcgtctataacactcctgtcttatgaagtaaacggaggccggctcgtgggccgttgaatgaaaatagcgtggcagaggggaaaagggacgacgtggctcaatggtttttgcaagctttgcgtcacgctntaatatatagagcgtgacacagttttcgtctaaaacactcctgtcttgtgaagtaaacggaggccggctcgtggaccgttgaatgaatatcgcgtggcagaggggaaaagggacgatgtggctcaatggtttgcaagttttgcgtcacgctttaatatataggaataggaatagcccatgattcatgcaccatagcccgaagcgagtgtttgtcaattgtcatagcaagatgggcatatcatactttcgattcgacctgacata

SEQ ID NO: 18735 - DNA, 215 bp, Zea mays
tgggtgctatgagggcttctttttatttgtgtgccctgtcgtgtcaatcggaacctgaccgcccctgcttatgaatagccacgcgaaccctgcggcgcctggcctgaacaatgttagtttgaagcatatcatcaatatctcgcatctacgctattatccttattcagcgacaccagtcgttaaggcccaaaactgccttaaaaataaccccgcct

SEQ ID NO: 18736 - DNA, 438 bp, Zea mays
  unsure (1)..(438): unsure at all n locations
ctcagcttctttctgttctcctttgaaggcagaggtaccagacaggctgttggacgggcctttatctcgcttgcttctttttttccttgcaatccgngtgcatctttccgtggatgaggtgggcaacggagttctccgggtgaatgaattctctgcttccgtcttgcaagaggtattcttcgcccggggcactggaggttgcgctatttcctgctttgttctggctttcccggagattttcaacgaaggatttttctccggtgaatctgctatatgatgcagaatcccttcttcgtctaccacagatgagatggttccctagaagaacacggatccagggcagagagtgatcttgtgctgagaagtgatggtcatcgagctagcctggatcagcgacacaccccctatcctgcgcgccagctgtcggtgtttgggacc

SEQ ID NO: 18737 - DNA, 333 bp, Zea mays
  unsure (1)..(333): unsure at all n locations
gcatgcaagctnggcatacagcntacaatctcgtagttctctgaagtactttcctcaaatgctcctcatgctcttgctcattctgggaatatataagaatatcatcaatgaataccaccacgaacttgtcgaggtagtccatgaacacattgttcatcaagtacatgaagtaagcttgcgcattcttcataccgaatgacatgaccgtgaactcatatagtccatacttaatgatgaacggtgtcttcagaatgtctganggtcggattctgagctgatggagcattacctcagatctatcttngagaacacactggctcctctcaactgatc

SEQ ID NO: 18738 - DNA, 461 bp, Zea mays
  unsure (1)..(461): unsure at all n locations
tatgaagattcttcatcccaacatgggctagtcgacggtgctctatccaacccatgttagtcttagcaatcaagcatgtgtcgagctcagctctatcaaaatctactaagtatagctgaccctctaacacacctttaaatgctattgaatcatcacttcttctaaagacagtgacaccaatatcagtaaaaagacagttgtagcccatttgacataattgagaaacagaaagcaagttgtaatctaaagaatcaacaaaaaaaaacattggaaatagtatggtcaggtgatatagcaattttacccaaacctttgaccaaaccttgatttccatccccgaatgtgatagctcgttgggaatcttggtttttctcatatgaggagaacatccttttctccccggtcatgtggtttgtgcacccgctcgcgagtatccaacttgagcccncggatgcataaac

SEQ ID NO: 18739 - DNA, 252 bp, Zea mays
agaagagaccggtctagatgcatgcttaattgcttagactagcatgggctggctgtggcatcgccgcttatcacatgtggggatgaagaaccttcacaagcttctaaagggagaacacgtgatatgtttgactaacgtacaattcgaaaaagatagaccttgtgcagcttggtaggcaggtaaacaagtgggaggagcgcatcacagcaagaatgtgatgaccacatcaagacccctggagctgctacatat

SEQ ID NO: 18740 - DNA, 441 bp, Zea mays
tggtgccgatggaaaaacaaaaatccttgaaatcttggctgtcgaactgtttgccgttgtcgactgttagctcggacggtactccgaagcggcaaacgatgttctgccagaagaatttttgggcagtctttgatgtgattgtggaaacagccctcgcttcaatccatttggtgaagtattcgacagctacgagggcgaacttaaggttcccctgagcggtgggcaggggcccgacgatgtccaggccccagcgctggagaggccatgtatgggcaatcagctttgtatattgcgaggggttgcctgaccgatgggagaacttctggcaggcttcgcaggacctcgtgacccgatttgcggcgcagatcattgtgggccagtaaaacccttgacggatcaccttggcagccagggcccttggccctgcgtgcgagccgcacg

SEQ ID NO: 18741 - DNA, 395 bp, Zea mays
  unsure (1)..(395): unsure at all n locations
cacccttggcaaatgtcgatgaactggccattggagtggtaaatgtctcttggcacgcgagcggtcccctacctggtgtgccaactgtcgcaatttcggaaaccaggggacaataagatttatgttcggagggaaagctagtgtggactcattccgaaaggtgagccaccgggactcaagcgatggattngagacggtgggtttatactggttcaggcttgcgccctagttttgtagtgttggttgtagtatttgtcggggaccataattaggggtaccctcaaggctcctaattctcagctggtaacccccatcagcataaagctgcaaaggcctgatgggtgcgattaaagtcagggatcagtccattcgagggactcgatcacgcctcgccc

SEQ ID NO: 18742 - DNA, 461 bp, Zea mays
  unsure (1)..(461): unsure at all n locations
tgcaacaagatttggaagataaaaaacacgaagttattattgaaaatttagaaagcaagataaaagaccaatcagctgctcttgaaaagaaagactttgagcttcagacaactgaaggtttattggcaaaagctgaagctaaaatagcagagttaaatacgaagcttctctcccagtcagaaagcttcgaacaagataagcagaagctgaatgaaaaatttgaggccgaggtccaaaaaagttcagatttgaaaaaaatcattgaccagtcttcaaaacaaatgtctggagttcagtaatcgatgcattcaacggctgaagcanattttctatttggttggagcaagcagcgaaaaatttaatccttcgtctgaagacctgccaggggccttcgaacatatcgaaggtgaaattgatgaccttgaagaagtatagctgggcatggtgacttctgtgcccta

SEQ ID NO: 18743 - DNA, 413 bp, Zea mays
caacacaatctgcttgatgattgcctacatactctgggatgtgaggcgaatgatacgaagtagtgtgcataacctgcttccgctgagcctgttgtgcaacaacttccgctatttccttttgcttctggatggtaccatggcacatcctggtggtatggcctcttgtctcaccacagaacaagcaaaatatttttcttggctgatcgccaaatcttacgccgaagcccctggcacctttgcctctcagagctggtggaccgaaggagccttgcatgtgcccaaagcctgtgaagacactgtggccttgttggtggctcccctatcatcattgtggtagagtatgaagtgatctaactgcttagataaacctcctccaaccccttgcatttaaaacctgaacctcttctttttgc

SEQ ID NO: 18744 - DNA, 331 bp, Zea mays
  unsure (1)..(331): unsure at all n locations
agccctcacaatagacatatcccaaaagtacctttctctcatgttctcaagatgactctgnttgatggtcgattttctgaagattgaatgacttggcctccagggccgatccttagaatcttcatccccactttccacatcatatctatcgttgtcaccacgatcttcagataagccttccagcatctctttaggaatnttctctatgtttgtgtttgccatccactcgagcaatccagcaatataacgatccacagtcttcttctcctcagatagcttctgctcttcagttagcttcggctcagcagcaaacctcttttcctgagacatt

SEQ ID NO: 18745 - DNA, 273 bp, Zea mays
tactcaaatggttatccaaagccgaaggtgtagagttgatgaaagaaatacatgcaggcttgtgtggatctcacattggatctagggctctgctgggaaaagtctctcgccaaggattttattggccaaaagcagcttctgatgcatcagaactagtcaaaagtgcaaggttgcagaaatgtcaaaagacaaaacaacttcgctttactaattatacacccacttggcgtacaaagggggcttgattgtagccgctccccacccaagaattta

SEQ ID NO: 18746 - DNA, 445 bp, Zea mays
tcggagccgatagcaactccagcttgaacgaagccatcggctcataaagtggaagtgagttcaccggaggtgggcgacaatgttgggaacttgttctcaaatgcttcgaattaagaacaaggcaacacaaagatgttaagtataaacgcccttcgtccgctgaagcattatctccccaaggatttaatgagcttcggacgaaggtcataagtaaagtatcacgaagatttcaccttcgtgattatatttgtaaaatgaatatcaatgaaaaatgaaatatatagtataaaatattttcatatgtttttattatatgaatatacaagtatcaaaacataatatttaagcacatttatacctttgccttggcagatagcaatattcaaacgtgacgtgtccgtgattacaggatcgcatgaacagtgccgggatactggtcacctat

SEQ ID NO: 18747 - DNA, 370 bp, Zea mays
  unsure (1)..(370): unsure at all n locations
tctgaggaagttcgtcatctcactcacgatgagcagaacagaaggcctcatcagaaagaccttcatcaggagggcttcgtcaacgaagacgactggtatgataatttccatcagggaaattntgtttttgatgatgcttctcctctgtctgctgagctgcaggctactccttggcctccatcctataagccaccccagctccccatgtttgacggccactccgacccgaagcaattcttgatgagctacgaagcaacagtgtcttcgtacgggggcaacgctgcagtcatggcgaagtctttcgtcatggccgtcaggaatgttgctcagacctggtattcctcccttcggccaggaacaatcacttcat

SEQ ID NO: 18748 - DNA, 289 bp, Zea mays
agatatttccttgcccttttttgacaggcagatctgatggcacctggagtatcaattctgaaaggacaacacagaacatgcagctggcaagtctaccacctggtctattctacgaagtccgacaggatcctttggacaatgtttattgagatatgtatagtctacgcacatgcgccgatccactttatatcttattagtactagaacaggatgcgctaaccactcagggatgcaggacttctcttatgaacccttctgcgactgagcgagcttgctggcactaataact

SEQ ID NO: 18749 - DNA, 278 bp, Zea mays
gcttatgaagattcttcatcccaacatgggctattctgttatgccagagccaacccatgttagtcttagcaattaagcaagtgtcgagttcagctctatcaaaatctaccaagtatagctgaccctctaacactcccttaaatgctattgaatcatcacttcttctaaagacagtgacacctatatcagtgaatagacagttgtagcccatttgacataattgggaaacagaaagcacagtgtgatctaaagaatcaacaagaaaaacattggaaatg

SEQ ID NO: 18750 - DNA, 386 bp, Zea mays
  unsure (1)..(386): unsure at all n locations
taatgcccctaagaaattgtctaattntgttaagggtaatgctcccatggctcangataacgagggctatattttatatcctgctggttatcccgagcacaagattaggagaattcatgctaagaagactcactctgtttcccatcatgcttttatgtataagagtgaggcttctagctctaggcattctactcatgttaaaatgcttaaaagaaatctccaattgcatcaaatgagcataatgtttcatttaaaacttttgatgcttcttatgtttagactaacaaatccggcaaagtagttgccaaatatgttggggggaattacaagggctccaagacttgtgtttgggtacccaaggtgcttgtttctaatgtgaaaggacc

SEQ ID NO: 18751 - DNA, 346 bp, Zea mays
  unsure (1)..(346): unsure at all n locations
agcttctccaccatgtcgctgctagccaagtttgtgcagctacctccatcaatgatcaaacgacatgaacgctccttaatgacacactttgttngaaacaacgtatgtcgctgattctgctctgccttctccatttgtgcactaagcacacgctgtacaatgaggctctcataatgctctgcatcatctgcaccaatctgttcttcgggtggttccttagtgcctgcatcatcagccgcaagcaaagcaagtgtagcttcatccaaatcactagcagaggaatacccaccatcgtctnttaccaccaaaacatgctgattangacaatcacgcttgacgtgtccat

SEQ ID NO: 18752 - DNA, 331 bp, Zea mays
  unsure (1)..(331): unsure at all n locations
nttntaaggatagaggcaccccanatatttgcaagggaagtttgcaacaacgcatggcagcagattacatatggtatcaagattttcaacagcacagtggatggggaaaacactgctctttgccatatttgttttgagcccacatgcctcaccaaaaatcctgagaattgtccatggtgatttctaaatcaagtgccaccgggtggaggaagatcacatcatcagcatatagagaaatatggttatgaactgaattttccgttagaggctccaacaatccaacatcagcagccttcttaattaagtaggccaatacattcataaccttgga

SEQ ID NO: 18753 - DNA, 434 bp, Zea mays
tctaagcggagaacatgtgttacgtctaacaaatgtaactttttatttagatagaccttgtgcagcttgtcaagcaggtaaacaagtgggaagtgcccatcacatcaagaatgtgatgactacatcaagacctctggagctattacatatggacctcttcggacccgtcgcctacctcaacatcaggggaagtaagaatggtcttgatattgttgatgatttttcccacttcacttgggtattctatttgcaggataaatcttaaacccaatggaccctcaagcgcttcctaagaagagctcaaaatgagtttgagctcaaggtgaagaagataaggagcgacaacgggtccgagatcaagaaccttcaagtggaggagtaccttgaggaggatggaatcaagcacgagatctccactctctacacaccacagc

SEQ ID NO: 18754 - DNA, 386 bp, Zea mays
  unsure (1)..(386): unsure at all n locations
acttagcgtcgatggaccgaagcgatagtgatttgcttatgaagntgcaattgatgaaccaatatcactgcatgatgacataaagttgatcatatcattgacacaaaatggaatgcacaaggcgaaggtataacttgtagtatattttatttcatcggacaaaggttgtgcaaagaaggaactcgatcacgtttaaggttgatattcatactatcaaaaggagtcaatgcattttacttgatggatctctaatgtctcgtagcgcatataggttagactcctgcatgaagactatttgtgctgacgattntcaaaaaaaaagcgtgggagaagccttctttgcaaaagagctataaactaaggaattgatactatctagctcacat

SEQ ID NO: 18755 - DNA, 356 bp, Zea mays
  unsure (1)..(356): unsure at all n locations
agcttgtagataggatttctgggtggagcgatgatggagtctgancatggaagccggctgcttgtnctgcttttgtagacgatgctcggtacaagagttgtgctgctgctgcggacaattaagactgccagtaccctgcaaagatatccccactggctctatactggcacaaggcgatttggacttcctctgagtgcctctacgagggcaggacctagcccggtgcccaggaagaatgcagaaccaacaacgcgactgaacctagcaccgaaaggcaagatggccacgagcgagacagttgtaacatctatcttgaagcttcagtntgagagactggatgcctgtcaaccaaatct

SEQ ID NO: 18756 - DNA, 445 bp, Zea mays
  unsure (1)..(445): unsure at all n locations
tattacggaccttaaaactcagcttaaggctccgtcccgaacggcctcccacgcttcaagtgtcttctcggcaagagccaccgtctcctctgggctagatggagcaataatctcatcataacgtagttcctcaagaagtggctgcctaaatctgtcaggctctggttctggtaggtcgtcttcatttgcatcaacaaactcttttcttccgattttaatgataggctttcttcgacgctttgtggggtactcggggaggtcaactccagcttggatgcaaagttccacgagagcgggaatgcggngtacagtaaacctctgatcatgaggaatgcgattccctagacggtcctctagatgataggcttcgacgggtaagaaaactgcctccactagagtactttcccagtcatgttcttctctacgttgatctgatgacattcct

SEQ ID NO: 18757 - DNA, 379 bp, Zea mays
  unsure (1)..(379): unsure at all n locations
tgcaagcttggtgctcaccaaaagcaataagaatatctagcttatctaagttgttgggtccttagggaagttcatcaacctcataacttgagggttgtaatattgagtgccatcaaaaagaggacatagggtattacacatattatggcccaaacttctataaaaatccatgtgtcattatgtttgtatattcatgacgtggtaggcatacaacacatcgtcaagactcacttcctctcccctagttgcttccactcatgtaccttgagtacccttgtgtcatttccacgatatnttgcgccattcgtggggacaaacacatgaccacggggcaaacgagctcttcttcgtaggcccctttangttcactgacatctat

SEQ ID NO: 18758 - DNA, 423 bp, Zea mays
  unsure (1)..(423): unsure at all n locations
ntgtaggagaaggagatggtatcaagccttggggcgcttgatggagttaattcaattcttatcaactcgagctatcaatcttcaaatgatctacatattcaagattgacccaaggttacttcaatttattgtatccaaaacccatatcatctcggggaagatattgatgttgtaggaattgaagaatcatcatgtgcggaaaatcaaggcctacaacatggaggactgtcaaaggatggtaacacttatgcttttaagtgcaagtatcttgaattatcatttcttatgtgtcttgtgtagtcacatagaanaaggaagcacttaagatgcttttaaatttatgtcaccattctttgaagaaattcctcccatatggtagattgcatattcttcatttccatattatgacaatctacatgcttt

SEQ ID NO: 18759 - DNA, 483 bp, Zea mays
  unsure (1)..(483): unsure at all n locations
gacctataaaactcagcttgaggagaagagatggatgaagccttggcgtacttgagggagtttatttaattcttatcaactcaagctatcaatcttcaaatgatctacatattcaagattgacccaaggttacttcaatttattgtattcaaaacccatatcatctccgggaagatattgatgttgtaggaattgaagaatcatcatgtgcggaaaatcaaggcctacaacatggaggactgtcaaaggatggtaacacttatgcttttaagtgcaagtaccttaaattatcatttcttatgtgtcttgtgtagncacatagaaaaaggaagcacttaagatgttnttaaatttatgtcaccattctttgaagaaattcctctcatatggtagattgcatattcttcatttctatattatgacaatctacatgctntnaaaatgttgcttcttcccatggcatggtttacactaattattcta

SEQ ID NO: 18760 - DNA, 360 bp, Zea mays
gagagaacgctgcttcggcatatcagtctatacctatgctcctatgcgaagatatagcagatcatagggtactgttgggatctcagctatctgattaataagaaaaaactctgctaagatttttgtttaacaacaaagatgtcttcgcttggacagccaatgatctttgtggtgtcaaccgagatgtcattgaacattcacttaatgtggatccatctttcatgccaacgacgcaaagactttggaagatgtctgaggataaagctgaaagtgctcggaacgaagtaaagagacttctcaatgctggtgttatcgaagaagtaacatatccagaatggctagccaacactgttatggtga

SEQ ID NO: 18761 - DNA, 376 bp, Zea mays
  unsure (1)..(376): unsure at all n locations
ttaatcactcagctgcagcttatgaatgcagacatttgagactgttcttctattcctgcaactactgaagggcttattccatgcgatcaccttcnatagagtaaaattccagttaataagcgataatttttattcgcctattcacccccccccctctatgcgacatccaaatcctcgttcccggcaaaaggaaacttcacggccgcgtcgtttatcgcatcaccccgacgaagagtcaccccctcgccaatcgactgctgtttgcttcaaactctgaccatcttaagaagagtctgacttcagtggtaggtctgagtcctacacgtggctaggagcctgtataccagtcatcccatccaactacctcctaaaaaaa

SEQ ID NO: 18762 - DNA, 479 bp, Zea mays
  unsure (1)..(479): unsure at all n locations
tacggacacaaaaactaagctaaattgccttgcttggttatgcatccgcgggctcaagctgtattatctacatcggatgcacgaaccacatgacggtggagaagaagatgttcacctcctacgtcaaaaacaaggattcccaggattcgatcatctttggagatgggaaccaaggcaaggtcaaaggattgggaaagatagccatcacatccgagcattctatctctaatgtgtttttagttgaatcgctcgggtataatttgttatctttgagtcaattatgtaacatgggttataattgtttattcacaaatgtagatgtatctgtttctagaagaagtgatggttcactagctttctaaggtgtactanatggcaagctctatttatttgaatttttcgaagagaatgcccatctagatgcatgcttattacctaaactatattggctggtttggcatcgcggctacacatgttgg

SEQ ID NO: 18763 - DNA, 203 bp, Zea mays
gtgtctacttggcgtagactcctccttctttcctccgtgccttataagccactggttgcgcctcggaagtggaaggctcgtcaagctcgttgatcttcttggagcccttaatcatgcattcaaaactcacaatattcccgattacttcctcgggggtcattagtggatatctatgattcccacgaattaattgtacttgagtg

SEQ ID NO: 18764 - DNA, 459 bp, Zea mays
  unsure (1)..(459): unsure at all n locations
tggcgaactagagagtggtggctctcatccagcgaaaccgcccgatcctgccccgacccttagaggagatcgacattcgacaaggtatagacaacttcaatttggtggattttggttntattcgatcgactgttcgagcacgtgattgaatacttggattggattggaatattcacttgacgatgaattagagattagataagtagttgatgattattgcttctctttgtttatataaagatattttcaaccattntatggggtttcacgaccagtggttaggacaatatttacgtgaacaacacaactgttgcacaaacaagaattctagatctgtcaagtgtcggaagggcatttaatctagatgaaataatttcatatccaacattaagaagaaaaatcgatgatgatctcattattcggtgattgatgatgagcttttcaaatctattattgatg

SEQ ID NO: 18765 - DNA, 356 bp, Zea mays
tagtataaaaagtgcccatatatgtttttgtatcacagctatccctctgtgagagtagaaacgctcattgtaaccccggaatacactctaaccaaaccctaaggacctatgtgcaaaattagtgcacttttggactaaagtgcaaaaaccaagttataatagtatcttatagtcattttgggtcacaaatatgtggactctgtaagccaaataaatggatcttggacttaaatgcaaaatggacctcaccttaagttctattctaagtctgaaattcagtgttaggactcactttgagccctgttctataaaatatacgtttttgtctgagtacccatcaacttgtgacctataat

SEQ ID NO: 18766 - DNA, 294 bp, Zea mays
ttctatacttgtatgcacacatccaccgggaggctactttataatctaaaaccttgagacgaataactttttcaagtctatttcatgtaaaagcctcattgtaaggaaaatgaagtccccggagaaagactacaagcttccactgcgaatctacaaaaatacttatgtctccaaacctaccattgggttcaattagtaactttgagactataactcacattacttacatgtcttcttcaacatttggttagactatatgtattatactatacttgcatgctgcttcacatgcat

SEQ ID NO: 18767 - DNA, 483 bp, Zea mays
  unsure (1)..(483): unsure at all n locations
ctattacggacctataaaactcagcttacatctctggactaactcggctgcgtcattctttgctatttgccagtaganaccagacatgaagactgtcccaaccagagtcctggatgctgcgtgtatcccgcattgtccagcgtggacctcatctagcagttgcttcccagtagccgaaagaatgcatttcatgaggactcctgtcgcgccccttctgtatagtgtttccccaatgagagtgtagtgagctgactgccttgcaatgcgctctgctgcatttttgtcattcggctcctccttattctttatgtatctgatgattggctccctccagtcatcagaatctgactctggttggctcagaatattgcactcttctgcccgatctaatgagatgctcgggcgcaatacttcttggacaaagactccaggtgggacctgagtccgactggatcctagctttgacaatgcatcagctgtcgt

SEQ ID NO: 18768 - DNA, 225 bp, Zea mays
  unsure (1)..(225): unsure at all n locations
gaaagtgttgatactcctttcggagagaaagattttgatcttccgcacttgagtggtcacgaactttctaaggaagataaattagagctgaaagaanttgctatgtgttgcggttaccaaccggggtccatgatcttcggtggggtcgatgaaaaaatcttagtgttggggacttgctctcanatgctatgaattaagaacaaggcaacataaaatggtaaatat

SEQ ID NO: 18769 - DNA, 433 bp, Zea mays
  unsure (1)..(433): unsure at all n locations
tcgatctctgggcgccgggcgccgcgggtgacgctaggaaagttatgcgatgggtggtggggccgtgggggactattcttggccctgctcgaagcttctcgatgcgtcgcgtggtgcggaggcgcgggaggtttcgtgctatgtggaaccattcaatcttcatcggacggctccaaaatacgatgatgacgtggatgagctcatagaagccgtttcctaccggctntaaagtataggaaattccaaatagtattagatatagcataaatactgattcactcccaaccaatagccccacgttcacgtggacaccatgaattaagggattaattagaagagttaattagagaaattaattagatgagttgattagataatttgatctttatgggcagcatgaacattatagaataagggggattcctttcactgg

SEQ ID NO: 18770 - DNA, 354 bp, Zea mays
ttataacttaatggtcatgtgttgttctaaagacacacttcacgtcatcagattgatgcaccaaataaccatatacagcattcaatgtccatatcatctatgtaatggaccacactcgttcctttgatacaattcaaagaacttaaccaattcagatcagattttaagataagagggacttataatctcattcccaatgatactcatcaagtatccatcttatgggaaaaacatgaccaataaaattgttcataacttttcatttcattccaacaatgggatgaccaattcaatcctacccagcatggtatgtatcaacactcgaaaaggtataacatatgcaacactttgtat

SEQ ID NO: 18771 - DNA, 351 bp, Zea mays
catctaccatgtacacagtgcacggtataacgtcaacgatgcttatatcacataccgatgagtgaataagaagtctgagcctatgcatagggtgatcgaatctagaacatctaccgcacatacaggatcaatacatattgacatgacttacaaccaatgatgcaacaactacaataatctggggtaattcataaggctcaagaccactctctaaaaaggagatctaggtcactagatggagaacaagtgtcataaccacaactggtagcatcccaaaagagctaagttcatcgtcatctttaggctgcggtgctactatgatcggagatgatctatatgacctttgcacga

SEQ ID NO: 18772 - DNA, 144 bp, Zea mays
ttccggaatctcgtaggtatccttagcgggataatataccccttcttagtagccttgatataaaaaatttaagttgccaaatgaagacttacttgctgaatcttggatcaacgggttcgtcagggttatcttagactatagagg

SEQ ID NO: 18773 - DNA, 225 bp, Zea mays
  unsure (1)..(225): unsure at all n locations
tcgactccatctatgttgtggattgcctttgaatcttgtccttctcccttcagcccttctagcagcctcttgactgccatggacaacaatgggcccttaatctgaatgtatcttcatgcatgagtatgctggatgaacnactgctcacaacgcatgaactcgtcgtacaacgatgattgcttgataacgggccttcaagtcgtcattgtcaataacaacatgctc

SEQ ID NO: 18774 - DNA, 216 bp, Zea mays
gagtttctattatccaactccatttttccatgtctgagaaaacttttaacttggtttttaactccctggagctttgttatgttatatgtggactgtggaaaagcttttctaggtggacaagacactgatctactggatgaatatcatactcttggttgctaccttaaagtctgctaagcataatatcttattgaaatagctgccgctactactata

SEQ ID NO: 18775 - DNA, 381 bp, Zea mays
  unsure (1)..(381): unsure at all n locations
tcttctcgagccgactccgcctctgtccacgctgacttctttgctccggctccngctcatcgcagagcggtcgaaagtttctttaactgagcaagagaaacctcnggtggcaaaacctgaccgagccgagggactcctacgcctccgggatatggatacctcactcgtcaccttccgcacagggcaactcacacttggttaagcagtctagctagccgacaagcgagtcctggtgctcgaaataagaaagagacacgatatttgcgcccaaatacctagatgttcaggccccgacagccacaatgaacagacaccggcactcaaggtgccattacaagcggaactccgggtccactcccgcgtgtatgaacaacctccaca

SEQ ID NO: 18776 - DNA, 341 bp, Zea mays
  unsure (1)..(341): unsure at all n locations
ctgcagcttgaggctggtaagatactcgccttttatgcgtactatcaagaacaagtatcgtttgcctcgtattgatgttctttttgaccagttggacggagccaatgtgttttccaagatagactttcgctctggctaccatcagatcaagatacgagcaagtgatattccgaagacggcattctcgaccagatatgggctatatgaacttcttggtgatggtcatcgggctgacaaatgncccacatatttcatgtatctgatgaattctgttttcatgccggaattggacaaattcgtggtggttctcaatgatgacattttggtgtactcaaagaatg

SEQ ID NO: 18777 - DNA, 389 bp, Zea mays
  unsure (1)..(389): unsure at all n locations
tggccgccgcggtcgcctgcgctggcggcgccaccaccacctcggcggngacgtccccctcgtgcccctccagctccgacacctgcgacacaccaaaacccccgacaacagtcacaacccgcacctcaacaaatttccttcatcgaagacggcggcgcacggggccgggcttactatcatggcggtggcggtgctgaagacggagacggcgcgaccggagcagacgaggaggaggcgcccgtcggccgagaaggccggcggcgccgagacgtagctctggccgccggtgatcatggcggtgacggcgaggaggcgctagccgctagggttttggggtccaagtcccaatgggaatggagtgggggatggagactgcgctggctcgacag

SEQ ID NO: 18778 - DNA, 424 bp, Zea mays
  unsure (1)..(424): unsure at all n locations
agcttgttactggagagatgacctattccagtgagacatataacatgagagttcagcatattgcatacaactcttccttctttccgctntcccagcaaaatgcatcttcacaccctggtaccacccatgtgccaccaccgttccacccaccccatcccaatgtgccaaaccaccagatgctgtcccacccaaacactcttccagacataatgcagcaagagtctcttggacggctgcaagggttggacattggaaaggggccactggttgtcaagtcagagagcagctcgatctctgctagtgaaagcagcaccaccttctaacgaggcctaccaatgagaaattggcggttcaatacagtccattggtcataatagcctgacatccttgtgctgctttctgctctgtaagctatttgttatta

SEQ ID NO: 18779 - DNA, 455 bp, Zea mays
tcacctagggtgactaatagcgttgccatatatatatatatatatacatatatatatatatgatattcgtcaccctatgcgataatcacccaccctgatatgacttaacagacttaagttatgagtgatcattgtaagctattctttaattcattgcagtgcatgagatcatcacctaaggtgacgaatatcgctatatatataagacaggaggagtcccatttctagtacactcaagtgctgatctcatctacaggcgcggcgaccaatgatgtcaagatatcactccttaccttggactatgagggcgactaagtacaacgagctcccacaagtcagaacgacagctcgacgaacgttcagactagacctgaactatctcaagaccagacaatgccaacccctagtgaagactttgacaaactttatttgacaaacaacgtgtggacacatgc

SEQ ID NO: 18780 - DNA, 461 bp, Zea mays
  unsure (1)..(461): unsure at all n locations
cacctgttgcatgcaagcttaaagccatggtaagtagcataggccaataatatgcgaattgactcaagcctagctacgggtgcataggtttcaccaaaatccaaaccttcgacttgtgaataccccttggccacgagtcgagctttgttcctcgtcaccacaccatgctcgtcttgcttgttgcggaagacccacttggttcctacaacattttgattaggacgtggaactaaatgccatacctcgttcctcgtgaagttgttgagctcctcttgcatcgccatcattttgaggtggctcatcctcttgatcttcttgttcaacatcttgagcctcatcctcaatttgagttggtggagatgctagcgtggaggatgatggttgatcttgtgcatgtggaggctcttcgaaatccttangacacacatccccaatggacatgttccttagtgctatgcatg

SEQ ID NO: 18781 - DNA, 467 bp, Zea mays
  unsure (1)..(467): unsure at all n locations
ggtcttaggttcatcctcgntcttcatccagatttgatgataacctgagtagcagtccaataagctcatgagctctgaagtaatcgctgcatccacaagggaatctattcttggcaatgagaattcatccttcgggcattccttattgagatctgtgaagtcgatgcacattctccattttccattagctttctttaccatcacagtattagccagccactctgggtatgttacttctctgataacaccggcacttcataagccttttactttgttccttgcgccttcggctntatcatcagatatttttcgaagcctctgcttcttggcctggaggctgggtctacattgagtgagtgctcaatgacatctctactgacaccacagagatcattggctgaccaagcaaaaacatccttgnntgtgaacaggaatntcaacaaagtcttctcttggtcatcagataa

SEQ ID NO: 18782 - DNA, 373 bp, Zea mays
  unsure (1)..(373): unsure at all n locations
gcttctaaagggagagcacattttgggactaaccttgttattttgagaaagacaggtttgtagcgtatgtcaagcaagaaagcaagttggtgttcattatccacacaagaacattatgacgaccgacaggccgcttgagttactccacatggacctattcggcccgattgcttacataagcattggcgagagttagtattggcttgttatcngggatgattattctcgcttcacttgggtgttctttttgcaggaaaaatctcaaacccaagagaacttaaagggattcttgagaccggctcaaaatgagttcggcttaaggattaaaaagattagaagcgaccacgggacgaagttcaagaactcacaaata

SEQ ID NO: 18783 - DNA, 421 bp, Zea mays
  unsure (1)..(421): unsure at all n locations
gacactatagatactaagcttacgggctactggcggatggtggctggagggtggctggagttgtggttggagtggntgggctggagggtggctggagtgggctggccactgcagccgtagctctggcggcaatggcgggcggaagtgagctcgccggagctaaggaacggtggctggccggtgagggtgagtgcggggcgaaaagatgtgcgcccggggaggctttataagcgccggcgggcacagcccgaggcgtgggcgcgcggcggacttgaccggactccggggcgagcgcgcgcgcgggttgggcgagctctggcatgccgaccagtgtcgaacacgtgtgcccgtgcgttctgaccaagctctggcgcgtgtggcgctcatccgacctgctttcgcttgtcaatgcacaaacctc

SEQ ID NO: 18784 - DNA, 415 bp, Zea mays
  unsure (1)..(415): unsure at all n locations
cctgcangcgtgcgagcttcttggaggcgcgcagntccctgatgatggaattcttggtggacaacaactggccaaggcgagagacttcatcctgagatgcctgcagctctggcgatgatggactaagtcacacatggtgactcgatggctcctctccaggaaggtcaaggagttactatcgtcaccgtacaacctgtccagattgtcatggaagcaacaagtcgcttgttttcttcctacaaggaaagaacaacattcggcatcgaagcaaggagagcaaggcatgatcagccaatgaagtttacctcgtgtgccatcttctcagaatcaagctgtgcattagagaggaatcacggaacggcattatcgagaaagcagagtctgactagtccgctgctctgaagacttccttcat

SEQ ID NO: 18785 - DNA, 450 bp, Zea mays
  unsure (1)..(450): unsure at all n locations
gcttctaaagggagaacacatcttgtgactaacatatgttcattctaagaaagacaggatttgtagcgcatgtcatgcaaggaagcaagttggtgttcatcattcacacaagaacatcatgacgaccgacaggccactcaagctcctacacatggacctattcggcccgatagcttacataagcatcggcgggagtaagtactgtctagttattgtggatgactattctcgcttcacttgggtatgtcttttgcaggaaaaatctcatacccaagagaccttaaagggattcttgagacgggctcaaaatgagttcggcttgaggatcaaaaagattagaagcgacaacgggacggagttcaagaactcacaaatcgaaggcttccttgaggagganggcatcaagtatgagttctctttctcctacacgccacaacanaacggtgtagt

SEQ ID NO: 18786 - DNA, 310 bp, Zea mays
agcttatgcatgcataggaagccgaagacattgctgtgaaaaaactctggtgtaatcttggactataccttggaagaatattgcaatttaagaatcggatactactctgtaaatttgtccgtacctaggcgaagatctgtacgatcccatccatgcatgaactgctttgatgtggacgaaacttgtatttattgatcgggaaggcgaattatgcagtaacgtggttatctatacaacaaagcctaaatctgctttatttcctttcgccgaagcgctattcttacagccgaagcaactgtgaccaaattac

SEQ ID NO: 18787 - DNA, 440 bp, Zea mays
agcttcatgggaattagattgtctagaggcatactggattgctgccttggtggttgcagctgaatcacaatgcataagaggactctgtgggtggtattctggctgcgcaatagcaccataatggtagggaatagtggcatctacaggaattggaacaagtataaacccatgagggatggctcatattcttttctatgggaacaactacttggaccagcatcttccctggcactactggaacacatgatgtcagtaccctccgtcctactgtccagagtaattcgagcttgccttgtactgtcatctgtattatgttaattgggaggcaacaacaccccattctgttgcaaaactgggtgcttgccattattatgctcttgccccatgatgcacagagaatggagaaactgaatctcacctgatgggtctatccttttatt

SEQ ID NO: 18788 - DNA, 439 bp, Zea mays
  unsure (1)..(439): unsure at all n locations
tccataatctttattgtagcttatttagtatatttcaatgtttataattgncctaagccatgagtttatatttttcatggtcttttaccccttttctttatctctacttatgtagcttgattagggttggtgttagggtttcaacatttttcccttttgaaaatcttatttgtttggaacatgattctttaaatatacacttagtagatcttttattcttaagttaatttgatgcttcatgctcaatttggctcacatgaaatgttgattcttgggttagcactgattcttgggttagcactgagagaaacccttgcctgacttgnatcttctgctttcttcncttgnctttgatttggtgctggcatctgcctttgctgatttcttgngcaattcttggcatantgggccacattggcacaagtgaacacttgttccg

SEQ ID NO: 18789 - DNA, 391 bp, Zea mays
  unsure (1)..(391): unsure at all n locations
ataatatgatgacagacgtcttcattgtaacacaatggcacgaagccttgcgacttagtgcatctgccaccacgttggccttgcctgggtgataacgaatctctaaatcataatccttaattagctcaagccatctcctctgcctcatgtgtagttctgactgggtaaaaatgtacttcaaactcttatgatctgtatatttatggcaaatatttcccagcagataatgacaccatatattaagggcatgaaccacaacaactaattctaaatcatgaggtggataatgattctcatgccggcgcaatcgtcttgatacatatgctataactcgtncctctngcattaagacacattcgagaccactagccgatgcggtacaatacaccgt

SEQ ID NO: 18790 - DNA, 458 bp, Zea mays
  unsure (1)..(458): unsure at all n locations
atagatactgcagctntataactcatagtggaacctattgataccttcgtatgccctatgtgctcaagaatgctagaggaagcttcagcaggatgactgccaaagttcttcactcccaaattggcagatatgtgctaacatatgtcgatgatatcatagtaaagagcacaaagcatgaaaaccatgttgctgacttgcaagaaacatttgccaacttcaggtgagctggtcttaaattaaatccataaaaatgcgttcttggagtaaagaagggcaagtttcttcgttgcttggtatcaacaaagggtatcgaagctaatccaagcaagatagaagccatacttcgaatggagccaccgaagtcaaggaatggtgcccaaagtataacagggaagctggcatcattgaacagaatcatttaaggtcagcagagaggaacttgccattcttcgaagtgc

SEQ ID NO: 18791 - DNA, 433 bp, Zea mays
  unsure (1)..(433): unsure at all n locations
ngccaatacttgtcaaagcaacaacatctgccagcacagcatctgctgaccataccagtaactnggcctttcgcatgctggggactggatatgattggacctttcaagaaagctcaagggggatacactcatgtattggtagcaattgacaaattcactaaatggatagagttcaagcccattgcttctttaacctctgctaaggctgtggaattcatacaagacataatattcagattcgggataccaaacagcatcataactgacttaggatccaacttcacaagttcagagttcttcgacttctgcgagcaaaagagcattcagatcaagtatgcatctgtagcacatccaagggccaacgggcaggttgagcaagccaatgggatgatactggaggcactcangaaaaaggtcttcgacaagaatgaaa

SEQ ID NO: 18792 - DNA, 394 bp, Zea mays
  unsure (1)..(394): unsure at all n locations
agctntngaatgtactaagcacatgccggaataattggtgatcggtaaacctactacctaagtgaagccgggcgcggactttatccctcatgcgacctgagactgggtctcccatgctagcttttgtgggtacaagtgcggtcactgcacggcggcagccggtgtcagtggagcattgtatgccaaggcggtgaggcctggacgcgaacggngaatcgatggggacggttgacatgtgtggggtcggagtgccctgacatgtcatgtgtttaagtttaccttgcaaggataaaactcgattcgaattgtctgcttctcgcagctaatgagactgcttgaccccttgtactgcatcgagtaagaagtgaaatgagggtacatatgacaaattgtg

SEQ ID NO: 18793 - DNA, 453 bp, Zea mays
  unsure (1)..(453): unsure at all n locations
cggaactatgaaactaagcttgacattgctcctttgaagccataccattttaatatcttgcgcctcccaatataaagcatgctacgagcaaatttaagggcccgtttggcacagctccggctcctgattctaagcgaggatctggaggagccgtgccaaacgggtatttttttaaaccgattctcgtgtggagccgaaagattgggagtcgtttttatgaagaaaggtgggatctaaaaaaacctgctccaccctcccttaaaacagctcctcaaccaaccaaatatagacctccccttatagtttgatcgaaattacccgcaattgccattggacaaaaacataacgagccaatttatggattaaacatttgagaccatattatgcactactatgatgggaatattttatatgttattgctcataatntctttccgatatgcatcctactta

SEQ ID NO: 18794 - DNA, 434 bp, Zea mays
  unsure (1)..(434): unsure at all n locations
agcttntaaagggagagcacattgtatgattaacaaatgttcatattgagaaagacagggttgtgagcgcatgccaagcaaggaagcaagttggtgctcatcatccacacaagaacatcatgatgactgacaggccactggagctcctacacatggatctattccggccgatagcttatataagcatcggcgggagtaagtactgtctagttattgtggatgattattctcgcttcacttgggtattctttttgcaggaaaaatctcatacccaagagatgttaaagggattcttgagacgggctcaaaatgagttcggcttaacgatcaagatnattagaagccgacacgggacggagttcaagactcacanatcgaaggcttcttgangagganggcataagcatgagttctcttctcctacactcacaaca

SEQ ID NO: 18795 - DNA, 432 bp, Zea mays
tatcagatggtgatgaagccgaagacattgctgtgaaagaactctggtgaaattttggattatccttgtgaagaatattgtaatttaagaatcggatactactctgtaaatttgtccataccttgtaatatatttttacctttacatccatgtatgaactgctttgatgtggacgaaacttgtattttttgagccgaaggtgaaaaacaccttcccttcttttcgtacacaacaaagcataaatctgcttcatttgctttcgccgaagcgttatccttacagccgaagcaactgtctgtatctgtatgatatgatgatgatgatcctatgtattgctaaatgaatggatatgaatgcaatgaatgatgtgatgtattgtgcaaatgaatgtccaaacacacgcttatggagccgatcaaacttctcattcct

SEQ ID NO: 18796 - DNA, 275 bp, Zea mays
cacctctgcgaatgtggtggtgcatcggcacttgggatgggcgatactccggcttgaatgtgcgtagtatcggcaagggccctgagttttggcgcgcacgcgctgcccatgccgctcctgagctgctaagctactggtacggcgccttcgtcttccgtaccatgtcattctattgcaaataggtgtctacagtgttggtgatcgtttgtgaggtgcacagcagtatgcgcggtatgcacgaagctgttcctcattagatgcattatgttatgtga

SEQ ID NO: 18797 - DNA, 308 bp, Zea mays
gcgcgtgcacagcgcgctagctagtcacgttctaggcgcgaaacgattacacccgccggcgtatttttgtttccgcgtcgagcgagcacgtgctaacacccgcgcgcgtgcagcacgcgccagcctctccgtgacctcagtcctctcgagccagccggccgtcttgtccggacagaatcacgcgcagcaaccagcgctgcccgcggtgcgactgccatcgagctggcgccacgcggtgtacatatgcgaggcatatagtagtattgttgcattgtgcgaagtattgtgcagtatattcaaaactgtat

SEQ ID NO: 18798 - DNA, 294 bp, Zea mays
aactactgacttactactcgtgtacttcgcgtgcataaatccactgaacctccactaggctggtgtgcggattccatgccactgactattaagtgttcctaatgaaaagcttatagacccatcccctttgtaggctccatatggatactatgtacatcctgtgtttgattgtctttattttatgaacgcttcactaattattgtgtaaatcatttgctgctgagctgtcattctgcaactcggactgatataacactgcatctactcgttcattttctggatcactcatattat

SEQ ID NO: 18799 - DNA, 205 bp, Zea mays
ttgatccctaactcgaatcctaatggccccattgacaaaattgtgtctaactaacccctctgtcgtgtgccaaaagatggcattgggacgcgagccctatacacgacacaaccttgtgattgcctcgggtttgggcaaggagacagaccggatttcctgtgtccatatctctgcaaccagtaggcataattctatgaccccacac

SEQ ID NO: 18800 - DNA, 355 bp, Zea mays
aatacttcagcgaggtggtgttgtccgctacggaatgtgtatcgccgctcctgcacgcaacgcacactactcgtgagtgagggtgcgagggtacgacctggaggatatactcgccggccacggcggctgcaggcccgcacgtctctgcgcgcgaagcgcaacactgaggagttttcatgtaacgctcaagatgaacggcaattcgctgattgccaactctctgcctaggtttaatggggtcaggtatccctatagaatacgccaattgctgtctgcctacacatgagatggaatcactgtaattcgggctatgtacattgttaccggttggcttagaccgtgctgtagtatgata

SEQ ID NO: 18801 - DNA, 177 bp, Zea mays
gattcttttccgttcttttcagattcagaagccctatggacgctctgaaagcccagtcagtttcgttgactttggcactttgcctcaattggtcttggagcttgacagtatcttcgcagacagcttgaaatatatcgtttcaacacatctagcacgtaaccatctcttcctctggag

SEQ ID NO: 18802 - DNA, 281 bp, Zea mays
actgatacttatttctggtccgaacctatggacctggaacctgaacaacctaggctattgcaatagtcacttgataagacaaaccaccaataggctaatctttgtcaactgggctgaagcaacctagttgactaatcaaaggactattgagctcctagctgaatatgtaagtcattaggttggcttaactaagtttgctaggacctaagtgaacaaatagaacattgtaggtaagctgtgtaagatgaaaaatactaagtcgtgatcatcttactatttat

SEQ ID NO: 18803 - DNA, 65 bp, Zea mays
  unsure (1)..(65): unsure at all n locations
tgcagctaccgatntgagcacaacgcttcccttggctttgtcttgttggtgtccttgcgacgttc

SEQ ID NO: 18804 - DNA, 281 bp, Zea mays
tacatgcttacgctctttgcaacacagaagtgcgtaaacctaactggacatcctttaaacaccttcttgatacatttcaatgtatgctcaaaatttcaaatcctaacctaaaaaggcatgttgattgctactcctctgtcatcaaatactggactttgcaaaaatcttccgcggtggatctgaatcctactcgtctactcaggcatagtggctagaccattgtggctcagtgacatgcaggccatgagttttctgattgctatttaacattcatcttcatg

SEQ ID NO: 18805 - DNA, 296 bp, Zea mays
tctattattttccgctatggcaagcatctctaatcagtcatgacacatattccatttcagagaaacatcattctgcctcggcgaggctaaaaatactcgactttacggatctattagcagcagtactgactacatatatattatctcaaagaatctaagtctgcactagagttaggaactctacactaggccatacgtctcagcatagtgagaagacaatatacatgtatgctaacgggctgcttcatgtgggtggggaacctatagagcttgagctgtctgtctctctgacagct

SEQ ID NO: 18806 - DNA, 131 bp, Zea mays
  unsure (1)..(131): unsure at all n locations
actgatgatcgttcttacttgtacaacaggttaatgagcatgaaaaatatcttaccccacgctactanattctatcagggtgagaatggaaatatggaaattacttgtgattaatcctcatccatcatcca

SEQ ID NO: 18807 - DNA, 86 bp, Zea mays
acttgctcgtgacatgattgggaatacaatttccacatggcactagttcgagagatgcacatactaattgttgctcatcgtgggct

SEQ ID NO: 18808 - DNA, 222 bp, Zea mays
tctctctgatacagatactagctcacgcgcatggtcgcaacctgtatcccgtggcgccacccttctcaccacgtgggctacggctccaaggggagaaaaccactggcactttatctgatgggacctaaagctcagaaaaggtccacccatgatccattgtatcagcaagtaaacttactctgtaacgtgtatacctccctctctttttacaccggtgagctc

SEQ ID NO: 18809 - DNA, 116 bp, Zea mays
atcacagcaagaatgtgatgaccacatcaagacctctggagctgctacatatggacctcttcggacccgtcgcctatctaagcataggaggaagtaagtatggactaaagtattgt

SEQ ID NO: 18810 - DNA, 233 bp, Zea mays
tagcaccgctgcactgctcctcgattagggtctgtaggattacctgttatttgcttgtcagtcagctggtgtttctctaatgcagttaaattgttgtttaatgaggtcttgcaacgtcttaatggaatagagggagtcgtttttgcttgcaccatggttctctggctgcatggcagtgtcactttggatttctcttctaccctctgaagttcttctggtaacccttatttttc

SEQ ID NO: 18811 - DNA, 335 bp, Zea mays
ttgataagattgttctagtgtgatgacaaactaaatatctgaatatatggaacagtgtagaactgtctacactctttattcttacctttgtactttgcgcactactcactcagaaccttcacaacttaaggctatgtttgaatatcatatcgaaattgacaactatgcttgtgccccgctatcaacaaataataatattgcgctttacccattggccttttcagacacattgtatgtccaaacttgaactatactgtgtcaagacatgcttttggcaaaatctacaagcaagatgtaaacgctttacatcatgtaacgcatttatcaaacataag

SEQ ID NO: 18812 - DNA, 200 bp, Zea mays
tgtagtcttaacaattaagcacgtatcaagttcagctctatcagaatctaccaagtatagctgaccctctaacactctcttaaatgctattgaatcatcacttcttctaaagacagtgacacctacatcagtaaatagacagctgtagcccattctgcataattgagagacggaaagcagattgtaatctaatgaatcta

SEQ ID NO: 18813 - DNA, 369 bp, Zea mays
  unsure (1)..(369): unsure at all n locations
tgctagtcttagcaattaagcatgcatctagacctggcctctcttttgtcaaatcaactaaatagaggttaccgtctaatacacncttaaacgctaatgaaccatcacttcttctaaagacacacacatctacacttgtgaataaacaattatatcccatatcgcataattgactaacagataacaaattatatccaagtgactcaactaagaatacattagaaatagagtgctcggaagaaatagcaattttcctacccttttacctttgctgggtccatcaccaaatatatgaatcttggggatcctgtcttgacgangaagagaacatctctctccccgcatgtggttgtgcatcgtgtcataatc

SEQ ID NO: 18814 - DNA, 425 bp, Zea mays
  unsure (1)..(425): unsure at all n locations
gctatacctctaagatgctacttgtaggcaggtccatgtatgtactaggtcatttatacctgcgtatctcaccanatatgagatcttctagagctcctctgcttatacctttatgttagatgaacattattcttgcatcactctgctaatgctaaaagaactctatgctcaatgaactaattattaaactttgtgctctattctactacaatcagaagagtgcaaatgtgtggaacacaaggcaaactggttggtccanggctgttatggaagaccaacgtggtctaacaactaatgttgagtatctcgggtagtgtatgaccgtgcaacctatggaaaaagttctctaaaacaatccaagcatctcggtgaacagtgcagctgaatgtttacgcttatcagtttgatctatcatgttgttattc

SEQ ID NO: 18815 - DNA, 66 bp, Zea mays
gtggacttttggcacggctgtcagtagcatagaccaccaggtggacacccaacctgggcgctcaat

SEQ ID NO: 18816 - DNA, 118 bp, Zea mays
aactcctgctcacctcaaaaggaattccttctgacaaataactgtgaaatacagctctgcatctgacccctcttgctggggtcatcaagatctcatttattgtacccatccttgtgac

SEQ ID NO: 18817 - DNA, 317 bp, Zea mays
  unsure (1)..(317): unsure at all n locations
ttctattacacccgtgccatttactcagntatacaataatcaaattacataggactgacttctaaataattgcgctggttgaaagctaataacaaaaatgattagataaatttacaactagaatataatctcttacttgatgacataatggataaaaatgcacagtgaacgtctcttgggttgtgtgataaccataggtacagtgtaggtgacagaatcattgtaatactgatatgtatataggacacgtcgccaggtatacatgacatgaatgtatattgatttatggtgatttgcagaccgaatctctcttacaa

SEQ ID NO: 18818 - DNA, 197 bp, Zea mays
cactgcgctgcacttttggtctgccattgactgggaattgatattccctgaaggcggggacatactggtgggcttgtgaatccctggagaaatgtatttgaaccttcagacgattaggatggctgagggtattattaaacatgaatcttccccacgcggaacgcgagtcccctgatggacatccccaatagagggtg

SEQ ID NO: 18819 - DNA, 193 bp, Zea mays
tactattcggaatctgcttcggtagtttactttttgtcttcaacacaaacaaataacttgttgtaaaaggtgagtcattatattattataaaagtgactatgtgtaaatacaatgttgattgagagaaaaaaaaaaatagattgttggcgggatgcttgcggggctgctgcacacacaagaagctgccggcgg

SEQ ID NO: 18820 - DNA, 132 bp, Zea mays
atcatccacataagaacatcatgacgactgacaggccgctgtgaactctacacatgtatctattctgcccgatagcttacataagcatcggcgggaagtagtactggctagctattgtggatgaatattctc

SEQ ID NO: 18821 - DNA, 334 bp, Zea mays
ccttgcagatcctcttctcattgatccaatcccacgggatgccggtgcctttgaacagactccgagtcacctcatctctcggcggtgcgtactcaacggtatatgtccaggcgctcctcctcaccatgtgcgcggcctagcacacacgccacgaaacgccccatgatcaagttcgcatggcgggagagaaatatgtaccgatgtgcgtgttgtcacttgtctcaatgctataatcaagacaaggaacccaatgtaatatatggatttgctttgaacatatttcactggattatgctatcaacaaggcaagatgattaccttatcaatatattga

SEQ ID NO: 18822 - DNA, 164 bp, Zea mays
  unsure (1)..(164): unsure at all n locations
gcacctgggctgcagcttctcgcagtctggcagtcaacaagaaaacaagatcttaattgctaacttannagccgagctcaaaagaattcagatttgaaaaactactggaagtcttaagaaactgttggaatcacaacagatcattctcggtgaaaagattttac

SEQ ID NO: 18823 - DNA, 80 bp, Zea mays
ataatgcaataaaaggaatatttctttatgagcgttacaatggtgggactatcgccactaatttcttgccacaacaatgc

SEQ ID NO: 18824 - DNA, 279 bp, Zea mays
ccttttgtcagttatataatattcagtgagctgtgtgttgctcgactcgatattactcacttgtctctcacttagttttagacaactcgaaatgaagtgaactatgattgtgatacttaactataacacgtacatatgtatgacaggtaggaacaaaaaccactgcggtgcaggtggactcgagacgtgtgtgtctcagtaatttcaaatgtttgcatactcatattttgctgacagaggacagcttaagttattttgttcatcacaacatgagctacc

SEQ ID NO: 18825 - DNA, 276 bp, Zea mays
  unsure (1)..(276): unsure at all n locations
actactgggcggcgacaccagggcttcagtcgttttttgtgccctgcaagtatgctgtcgactatagtaatgcccgcacttacacaactccggcttgttacggcaccgaggtcgcaatccacgaatataacagcgggactngtgactctctgctggatctctcttgcgtgtgtggtcacacctcccgtgccgctggagagcccacataccctctagggctacgacctaatgggccatctgcattgtacagtgcctccgagttcacggtctgtgtcg

SEQ ID NO: 18826 - DNA, 400 bp, Zea mays
  unsure (1)..(400): unsure at all n locations
ctctgtctgcaaattctttgtcaataacatttaagcggatgatatatataatcatacaacaatattctcaaaactgggagttggcctgctttgcgacttatcgcatctaacatgtaccgcgtttagttgacacacgcctatcacagcaccgaggcggacacaagcacacacacgaagcagccgtcgcggcgcaattgaacacccacctgctgcaccacaagcatgttactcccaaagacgagccactatgagacactgagcagcagaggaccacccgtacacgccagatacggccactctcgtcggccgcgtgcgaacgtatttatcgccgtgcgtagcgcgaaccccgaactctccgaatcgcatgcctgctcgcttnttcctcttcacgtgctatcgc

SEQ ID NO: 18827 - DNA, 125 bp, Zea mays
caccttatgaccttagcatgctattgagaaagaatcggagaatacccagggatcaattgacatacctccagatcattggctcgctcatgtacctctgcagtgcaacaagggcagacatctcttat

SEQ ID NO: 18828 - DNA, 212 bp, Zea mays
  unsure (1)..(212): unsure at all n locations
actttactagtctgggagaagtcttatgatcctcctattattgtgatagaatttccaacaaacagctatacatgcttgtatctgngactgtccataagcatctgtctgtttactatggtgcaattttgacccgagtttatgcgacatcacctatctgagactattgtctgagtgtgtatctgtctactcacggcgacctgactgctgtactc

SEQ ID NO: 18829 - DNA, 215 bp, Zea mays
  unsure (1)..(215): unsure at all n locations
agagttctggatgctgcgtgtactccacactatccggcgtggatttcatccaatagctgtcttccagtagtcgaggaaatgcacttcatgaggactcccgtcgcaccccttctatatagtgtcgcccctatganggtgtactgngccgactgtcttgtgatagcgtctgtcgcagccttatcatccggttcttcttcattctttatgtacctgat

SEQ ID NO: 18830 - DNA, 270 bp, Zea mays
gtctaccgacaaagacatgtgaatgcgctgtgctatgctgaaattagtgagtcatgctatgctgtaaggtgactatgaagtgtcattgcgagcaccctgactctgaacaaatgtctatttgtgttacaactcacatgaatagtgtatagacaactgctcaacttaaccttgtgcttgcttaactttctactgatagatgtgctactcaggactccaatgcgaacatcgcctcttactgtgagactactcacattcgtgacacactgatat

SEQ ID NO: 18831 - DNA, 72 bp, Zea mays
cttgatgcacattttcgctgtgtaatataaaggatgaccacagccaacagaactgcgacaattgctgatgct

SEQ ID NO: 18832 - DNA, 225 bp, Zea mays
  unsure (1)..(225): unsure at all n locations
gctgccgcgttcacgagccaatcactacgttctgtctcgcgcggcgtgacgacatcagtagttcgccattcttcgtatattttctgcatcgtgacctctgaccatcatgactattgcggacaggcagctctcgcgcacagcatccgctgcccgtgacgacgactcgcattcganggttcgacacgtggacccgaactccctctctcacactaccgacatctgcgc

SEQ ID NO: 18833 - DNA, 181 bp, Zea mays
gaatgataaataattgataatgaactgtgaaactatcatctagacattcctcaatgatttagctcatgctctgctacactccgccatactattacgttctgatatacatcacttggtgatatacactcgcacgctctgccttaataatacctaagacatgcgtactctgagctttagtggc

SEQ ID NO: 18834 - DNA, 218 bp, Zea mays
tacagaaaaggactggggtaggataaccctcagctcttaaggaggagttctctttccttatatgaggagtctcatatgacatgctgcttttaattaaaatggtatgagaagacttatacaatgatacactagtacccagacattgtatattaagaagcgattggtccttattttatatctttctttctacgctacgaccaatgatcccgatctaacac

SEQ ID NO: 18835 - DNA, 184 bp, Zea mays
  unsure (1)..(184): unsure at all n locations
gcagcgattctggactgganagcaccacaagatgtccgaggaatcaagagtctcattggaatggtcggctactatcggccgttcattgaagggttctccaagatttctagacaaatgacagccttgctagcanagaaaggtgagttcaagtggaccccaatgtgccaagaatcattctagatgt

SEQ ID NO: 18836 - DNA, 340 bp, Zea mays
gctgcgactcactacacctgcggcggatgtttattttttgtgttacgcctgtaacttctgtcgctctgggacgattctgctgggatggtcgatgttgttttacgtgcatatacaactgtacttggttactctattatgtctgttgagaggtgaagtttcacaaattaaaaactgctccaagaatctccatcattgcatttacggttcgctcctatctacgagattagttgccataactcacagacatgttatcgtctcactcactccatttggatacaacttcacttttgtctattcgatgagactcactatgcttcaggcctatcgtctttagtctaat

SEQ ID NO: 18837 - DNA, 320 bp, Zea mays
  unsure (1)..(320): unsure at all n locations
aactatggctcgcggactaccggctggcctgccagcatggtggaacggactgtgacaacctcatcatccgcaacctccccctgttcctctccgacgccgcccgagcctggctggagcatctgcctcctgcgcagatcatcaactgggacgacctggtcaaagccttcgccggaaacttccagtgcacatacatgcgctctgcgaactcttgggaatctcgaagctgccgccagcagccaggagattccnctgcggactacatncggcgatntcanagcagcgcaccgagctacccaacatcaccgactcagatgtcatcg

SEQ ID NO: 18838 - DNA, 284 bp, Zea mays
tgactgtgtatgacttcgacgcgcattactagagagaaatgctatatgtgagacttcccttacttgggtctttgcagaagctaaccaggacctacctctagaactaatattactaggaaatagcacacgcagtcaactcatgagatctagagagataaacattcgtctccccacaatgggtaagataagcctatattgcaacatctgaaataacccatgtttgcgagcgaccgtgcccatacggtactatgctctaaaccatacttactgacaccagttatttg

SEQ ID NO: 18839 - DNA, 313 bp, Zea mays
ctaactactgtgctgcgtgcacaactatcaattactgcatattatgttggggtgataacactgctctcagtgtggcagattgccttaactgtatttatgcaataggattgacagggaaactttactttagatctaattgttggatttaacaaatacgtctattaacatagtgatgaccctgagaaaacgtagaatgtgaaattttaggtcaattgtgactgtattaagccactctaccacaggtgtagaacccttcatgatcttatccgaacagtgggagattcacgttcatatccaacaaacctggaggaaa

SEQ ID NO: 18840 - DNA, 347 bp, Zea mays
  unsure (1)..(347): unsure at all n locations
cggacagtgacctctccacaaaatatacaccgctgcgtgactctccatgatcttcgccatgtactactcgcgagagatgctgatagggtatattccttactggatctttacagaaatctaaccaaaacctanagatctgaaggctcaatgattgctaggtcagaataaacacatgacggtaaacttcatcagtctgaggagctacatattcttctccccacaatggttgaagaatcacttatgctgagacatctgtatcaaccgacgttggcacgcaacctgtcctacgttttacatctaaactttactctacgaacactatttagttgcacgtttgtaagaatatg

SEQ ID NO: 18841 - DNA, 166 bp, Zea mays
atagctaaggggggcatgtactatggtactgagccccgacatgtgggcccacgaacataacggatgtagtacttggagctacttaactgtcactgctggagcaatcttcttgcgccctgacatctgagatctacctagcatcggcgtgcaggggaagcttctcgat

SEQ ID NO: 18842 - DNA, 109 bp, Zea mays
acatcctctctgggcgtcgttcctaccccgtgacactgtaccccactgagccaccgactggcgcgacaacacaagccgggactcacctttacgtcgtctcgcactcgct

SEQ ID NO: 18843 - DNA, 360 bp, Zea mays
  unsure (1)..(360): unsure at all n locations
acaatatagttctactggcgtaggggttcagcttataccaccattttcgccgcattgcccaattgggcataatctattcatcttcggctacttggaataacaattgtgtgcagctaagttgctattacatcttcgtcgcagcatcttaaaagcgactggcctaaagtacggccaaatngatgcacatactcgaaacatacctactcatagtcacggtggcagttgtgaggaatttaactgtcaaaggaaaatctagcgtgagcttgtgcgaatagatttctgagtctcatatttgcattgattctactagctgactgtcagtctcttttgtaattttgactcagatatctaactgatcgt

SEQ ID NO: 18844 - DNA, 296 bp, Zea mays
ctactggtgtcaacaacgggtgcctttgtggggagtcaacgtctgacgtcgtgctgtggtgtgttacattctcgtttgaggactgaatctgagatgcttgttccgaataacaaatcttcgtgtgcaattctcaaccagccttgcttgactgtgtgagacttggtgccagctgagacatggctgtgtgtgctttatattggtagatatgctcggctcgaactctcagctgcataaactgagcttctttgaatatatgtagctcctttgcattcagtaggtcacaatgtagctgtact

SEQ ID NO: 18845 - DNA, 86 bp, Zea mays
cactttacttgggtagtatgaacttatatgcaataccaactactaaacacacttatttaattttcttaatataataataatggaca

SEQ ID NO: 18846 - DNA, 365 bp, Zea mays
ctgcagctgctgctgttaattctgattgcttaggctgttaccagtgaataccgcacaagcaggaaagctactcgataactgacagcttatttagctttacacttaatctacttttatgcatgtgttcttgaaatgctgagactgcactagggagattaaactaatactataaacctatcaccaaagcaattacattgctattttaaaaattaccatgcaatattgaaatataaattatagggcatctgccaacaggtattgggtttaatggattgttgtgaactgataaaataaaacaaattccttgtgctacgacagcgggacgaatgctggatgcggacgagcgcctaatctttctgctgcgg

SEQ ID NO: 18847 - DNA, 335 bp, Zea mays
  unsure (1)..(335): unsure at all n locations
acccgctgcacgatgacaaccattatgcgaagctgccctgtatgatgcagcaccgtcctcgataatctaagcagcgtgatgcctactangctcgccatgtacgtacggcctagcaacgacacaggctcgctacagagtccctcganggacactgngccgatccatatgcggttcagctaagctcttgccttctcctagactagacacagactgatccttggacccgccgtatcaagcactctcggagtagactgtgactggattactttgcccggtcatcgcttgggagtctttccacggggctcgatgcttcttaggtcctatagccctactat

SEQ ID NO: 18848 - DNA, 352 bp, Zea mays
  unsure (1)..(352): unsure at all n locations
atttacctggtggtttgacaatattgtgcggtacatgcaaattgaagaaggagctggatgatttgatgctagatgaaaagccaatattggtttggctaaatttgaggaactgaagctatgaccctagtttcttctaaactgatgacagtgatgggatgttgggcanggacttggtcatgttaatgctatcatacacattatcactgtaacttaaaccctcacaatatccaacttacgtccaatcacaacaatgactatctaccacatatacacgtcaatgtgatactattcctaccatcacaatcttattgtatctatcctcttcccttggatcacgctagctctccttcca

SEQ ID NO: 18849 - DNA, 347 bp, Zea mays
ttaaccactgtgcaatcctcaccgacacgactgcgcgtcttatttcttttcgcgctaactgtcgctgtggctcttgagaatgtaaagaagagccacactatcgacatgacacaacaagtgcagcagagtaagctgtctacgatgagagagaatgcactacccaccatgccgccaactcggtgaaaaactagcttactaccgctggcgtggtgtctcgctcctctttcaccaacatgtggctgcatcggagcactagaccctgcggggctggaaggaccatgtgactgtctatcatattaatgaacactactgactctgccaatgactatcatgtactacctgtatta

SEQ ID NO: 18850 - DNA, 369 bp, Zea mays
  unsure (1)..(369): unsure at all n locations
taactactaaacaaagcaatangcccactacagatcggctattttatctgtcacttaaaaacaaagtaaccaatgtcactttctctacacttgaaatagctgttgagatacttataacagatgccctacttatattatcaagtcgtagcacatatattaaataatggaattatagtattattttatgaagagataacagataatgagtacatatatgtaataataataaatcattataaatatgacagtgagtgtcattgataatatgctacgacaatctataattatattaaatatacaaggattacattttgctactcaccaagtcacaacacttactgtaaaacactagtacaacccctgtcctat

SEQ ID NO: 18851 - DNA, 183 bp, Zea mays
catatgcgggatggatctagtgagtatcatcgacgcgtctttaactaaactgcctgctccgactcatacaaggtgataagtttgcagcgctggagacttatagagtactgtaacgttagtccataacttgacagtgttgatactctgctctagcacatctgagcttattgcggaactgaatcc

SEQ ID NO: 18852 - DNA, 242 bp, Zea mays
ccggatctaagcactgggctgcagctagaattatattaatctatgaattatatatttattcatatcaatatctgacattataagaaaattataaggggtcggagcgacgacctatcagtagcgacctattgagctgcataagactactcctccacacgggcgtcaggagagctaaaagaacccattaatacgcatgcttatagcggtgtgacgttacggtcgacactattcaattgccgttt

SEQ ID NO: 18853 - DNA, 362 bp, Zea mays
  unsure (1)..(362): unsure at all n locations
tgtgactaccttctttgcttctatttacactctgtggctggcttaatgataaaaagcttactcacatntcatcattatttacaatgccttataaggattgaactgtattttctcagtaacttggaataccattcatcgggcgctgtgaataatgataactgcttaaagtgacaaccctatcaagatactgatcgggagacacactacatggaaagaatatgtacctcacngcaatttctattgtcatataatttatgctaatgcccagtaatgaatgaatgtgtctatttgccttttactgttgattatgangcttacaaacatgatgtaatctgcttgtgagatatatggtaggctgtatc

SEQ ID NO: 18854 - DNA, 211 bp, Zea mays
ttactagagatagatgctgatttgtattccctatggtttttgagaattaccatgcctacctctaaagtaacattactaggaaataaccatatcatagactctgagattagaaaataccattctctccctacatggtgaagaacagcttactgagcatctgaatatccactttggacaccgtcactacgtcttcttaaatttactacgcaca

SEQ ID NO: 18855 - DNA, 87 bp, Zea mays
atggaacctatttaatgcaaaaaagggaatccaacagaagcaggatagagagtatcactgtatcagaccatgaattttataacaaat

SEQ ID NO: 18856 - DNA, 171 bp, Zea mays
ctcccatgatggtatactgactgtacatgcctcgtggtttgcattgtctctattctattattgagacgctttcatcataatctattagtgtcacaatacatctctgctgtcatgatgtgatggattctgtcaaactcagggacagtcatgatctactgcatcatactgcgg

SEQ ID NO: 18857 - DNA, 256 bp, Zea mays
tacgtaaaaccgcgtatcatactacaatgctaatacaatgaaacaatgaagtcataaatacctgaagtataagtatctcataagaactcaaaagttatcccatatttattacttgcacactatgttaaaattctcaacaaggtatcatcaaacatctaatatactgaggaaatatctgcattatggattcctactattgttgcaattacaatctcgtattgagacctaagtgctctgaataggtttttgctatcac

SEQ ID NO: 18858 - DNA, 225 bp, Zea mays
  unsure (1)..(225): unsure at all n locations
ttcttggagacatacggtccaaaatggattctctaccaaacaccacttgtgaattacgaatagtgatggtccttagcgcgtatatatcataatgtgacatgctctttattcttgaatataaaatctaatgaaccacccaattgtcactnggctaaaccgagtataattggaagggcagacttgtattgagaatacaatattgatatccgacgcgataatgcgcta

SEQ ID NO: 18859 - DNA, 295 bp, Zea mays
aactactggcgtgaacaatctgaactgtgaactgtgcgtgtacgactcgacaactcacggaacagttgcaaaaatttggacttgagtattgaaaagcctcttatcttgggaaatcacgtctagcaactagtcctgacgggaggcccatgcacccacctgaagcatgtgcatacttgtactgaggtgctacagaaaacttgagttcagactaaccatgcgcaatatcgccaaaactgggaacttgatggctgctctcaccactcatggctacagatgtctcgtcggacctacatgt

SEQ ID NO: 18860 - DNA, 382 bp, Zea mays
  unsure (1)..(382): unsure at all n locations
cttggcaaagcaacagcacatgccagcacagcaactaccgaccataccacgtaattggcctttcgcatgctggggactggatatgattggacctttcaagaaagctcaagggggatatactcatgtattggtggcgattgacaaattcacttaatggatagagttcaagcctcttgcttctttaacctctgctaaggtcgtggaattcataccagacataatattcagaatcgggatacaaacagcatcatcaccgacttangatccaacttcaccagttcagaattcttcgacttctgcgagcaaaagagcattcagatcaagtacgcatccgtagcacattcaagagccaacgggcatgttgagcgagccaacggaatga

SEQ ID NO: 18861 - DNA, 233 bp, Zea mays
  unsure (1)..(233): unsure at all n locations
tctcagctgagttgtgtgacctgacctgactacatatgaggacacaagtgctgatgagcgtgcgctcggcccagcgcaccgaaacgagcaggcacgggccctgtgacgtctggcccttggtgacgttgaacgagggagcgctgccgggctcgccgctgcgacagccgcgggcgcgggcaccatcgagagctcctggagttgggacgcgcgcgcggnggaaaatagcgcacacc

SEQ ID NO: 18862 - DNA, 469 bp, Zea mays
  unsure (1)..(469): unsure at all n locations
agcttcttctcgtcgtcgatgagcgacgccaacgcgagcgccttctaccagtggtgtttgttcggggtttccaagtaagaaacatggattcatctttagcgttggtttatgaaaatgactcacaagtcagatccatggaaaaaatattacggagaataaatgtcacacatataaaaagaatttaagttgaaaacattattcaaacaaaaagaaattgcatgcaaggttcttctttaaatactactccctccatccaaaaatataattcaggaatctcgttgataattatctactactacacattgtgcaaaagtagtaggtaggctttgggagagatgtaatagatattntactgtaacagatattgacataaacacacatgtggtgtagtggtagctacgagcatanttgcttgagaggtcgtaggttcgaatcccattgtggcacatttgtgttttttaattaattt

SEQ ID NO: 18863 - DNA, 477 bp, Zea mays
  unsure (1)..(477): unsure at all n locations
tgactctctcaatcaaagacttttgcactccatattgtctangtctactcttgttngatggacctatgaatgttactttgacctttccattngcaacatttcttagaacataatgagcattgaaagcaaatggtcttgagtgcttacgcaanggagtcggtggtttggctttgcagttgtgggcacaatgaccttcattaccacactcaaagcatctgatatgcttgtgagtctgctttggctagtattgagtggtagcttcttttcacaaagcattgatccatacactcttgttgtttatgacatgttatagcactcatttggaggatgaccctgtgaacttgacactgtgcaaagtcattcactttagtttgactatttaaccttgatgtcatgcaactatgtgaacatgtctatacaccttcttatagtgatagcagtatcttatttggtgctaagcagacttactttatcatc

SEQ ID NO: 18864 - DNA, 471 bp, Zea mays
  unsure (1)..(471): unsure at all n locations
agctngcacacatagctcntttgaatacccttgatcatatctcttttatatgctatgactaatgagttttcaagtttatttcaaaccaagtcataggtatattgaaagggaattggagtcttcggcgaagacaaaggcttccactccgtaactcatacttcgccaacactccgagcaactctctcttctttgggggagaaatgagcatcaaagaaaaggacttcatccctggggaagagagtaaaagctcaaaagcttcgctttttggtataatcttaactcatttattttatgaccaaaggggaagatagcacttagagggctctaatgattccgtttttggcgattcatgccaaaaagggggagaaatgagcccaaagcataaggaccgcaccaccatgagcccaaagcaaaatgaccgcaccaccaccaccaaattcataaacttagtgctttccaaaagtctttatc

SEQ ID NO: 18865 - DNA, 165 bp, Zea mays
  unsure (1)..(165): unsure at all n locations
atttactgtgtaaactntgtccataccttgtaatatatagttacctttctgtcggggaccataattatgggtacccncaagactcctaatctcagctggtaacccncatcagcacanagctgcaaaggcctgatgggtgcgaataagtcaaggctcggtccactc

SEQ ID NO: 18866 - DNA, 457 bp, Zea mays
agcttgaaatcgagcacacatgcaaacactaaacataacatcgggcctagatgcagtaatataaagtaaactaccaattattgagcgataaagtttttgatcaaccatagtacctccttcatctaagtctagatgaccatttgttgccataggagtcttgataggctttgcattttctaagccaaacttcttgagaatgtccttcaaatattctgattgacttataaaaattccatctttcaattgtttgatttgaagaccaagaagaagctcaattctcctatcatagacatttcaaattcttttgacatcatttttccaaattcctcacaaaataattcattagtagatccaaaaataatatcatcaacatatatttgacaaataaataagtctttgccaattcttttagtgaatagagtagtggtcaccttcccaatttaaaagtctttggaag

SEQ ID NO: 18867 - DNA, 218 bp, Zea mays
  unsure (1)..(218): unsure at all n locations
tgtgcataatagcaactctcttcccatggcagatggcttcggatagaaccacgcctaccgcctncgggattggagcaagacttcctctatgagctganggagaggctggcggagaagggggtgagacccacctncccgcacctncagaactaccactagacctagcccanattctggccaatcaaaccagactcattgaagtcctcactcgaagccct

SEQ ID NO: 18868 - DNA, 494 bp, Zea mays
  unsure (1)..(494): unsure at all n locations
ctcggcccggatcttaagtcacctgcggcatgcaagcttatgaaggttcttcatcccaatatgttctagacggtgatgccacagccagccaacgttagtcttagcaactaaacatgcatctagatcgtcattctctttagtgaagtcaaccaaataaaacttgtcgtctaatacacctttaaattctaatgaaccatcaattcttctaaagacagttacatcaacatttggtaataaacaattataacccataagacataattggctaacagaaagcaaattataaccaaccgattctaccaaaaagacatttgaaatcgagtgctcggtagtaatcgctatcttacctaacccctttaccttgcgttggttcccatctccaaagttgaccgtgtcatattattcttgatgtaggaagtgaacatcttattctctcccgtcatgtggtttgtgcatccactatcgataatccagcttgagcccncggatgcata

SEQ ID NO: 18869 - DNA, 209 bp, Zea mays
gcctcatacgatgtcatcccattgagtgccttgatggggcaagcggtgaagatgtaaaccgttgtcaccatcgtctctccccaggagacagtcggcattcccctctgcttgaggagagcccgagccatccccacaaccgtctggttgcgccgctcgacgatgttgttctgctgcgggatgtacgacacagagtagtggtgttgacaccc

SEQ ID NO: 18870 - DNA, 438 bp, Zea mays
  unsure (1)..(438): unsure at all n locations
agcttctaaagggagaacacgtgataggtttgactaacgtgcaattcgaaaaagatagaccttgtgcagcttgtcaagcaggtaaacaagtgggaggagcgcatcacagcaagaatgtgatgaccacttcaagacccctggagctactacatatggacctcttcggacccgtcgcctatctaagcataggaggaagtaagtatggtctagttattggtgatgacttttcccgcttcacttgggtatactttntgcaggataaatctgaaacccaagggaccctcaagcgcttcctcaggagagctcanaatgactntgagctcaaggtgaagaagataaggagcgacaacgggtccgagtttaagaaccttcaagtggaggagttccttgaggaggaagggatcaagcacgagttctccgctccctacacaccacagc

SEQ ID NO: 18871 - DNA, 131 bp, Zea mays
ttcatcattcacacaagaacatcatgacgaccgacatgccgcttgagctactgcacatggatatatatggcccgatagcttacatatgcatcggcggcagtaagtatcgacttgcaattgcggatgattat

SEQ ID NO: 18872 - DNA, 455 bp, Zea mays
  unsure (1)..(455): unsure at all n locations
agcttgtgattntaccaattgaaagagcacaatctctacttatgaatttccatgaaatatcttaaaagagattgtattagtaacacaagcgatagtttcctatttagcaacctctagtatatgaatgacaagaaggttactaaaacatgcaaggaaacctcatgatatgaactaaattacccttacaagcatcatgcataacatcaattgtaaaaaagatgaaagtagcacgattatttaattaagttcacatggcaagtttaattcatagcatggtgagtgattaatgtagaagactcaaaaccaatttaaacaagaatgaatacatcacatagtattggttcgatcttctttgaatgttgaatggcacactctatttgggaaacacattttcatgttgtgagactacataaacacttagatagaaacattagtctcacaactctagtcatata

SEQ ID NO: 18873 - DNA, 461 bp, Zea mays
  unsure (1)..(461): unsure at all n locations
agcttatgaagattcttcatcccaacatgggctattcggcagtgccagagccaacccatgttagtcttagcaattaagcatgtgtcgagttcagctctatcaaaatctactaagtatagctgaccctctaacacacctttaaatgctattgaatcatcacttcttctaaagacagtgacacttacatcagtaaagagacagttgtagtccattntgcataattgagatacagaaagcaaattgtaatctaatgaatctacgagaaaaacattggaaatagaataatcaggagatatagcaattttacccaatcctttgaccaaaccttggtttccatccccgaatgtgatagctcgttggggaatcttgattttctcataggacgagaacatcttcttctcccctgtcatgtggtttgtgcacccgctatcgatgatccaacttgagcccccggatgcata

SEQ ID NO: 18874 - DNA, 461 bp, Zea mays
  unsure (1)..(461): unsure at all n locations
cttgaaaaaatattttctctatgtttttttcaattcgatgcaacatctacttggtcacctaccatacgaagctaggtatgaggtcctgtgcagtatagatgcatgtatcacatcgaaaggacactaaagaagctacgtgcaatggttggtaacaagagacgaagtgaanggtgcattgctgaagaattcanatacaaagacatagcatcgttcatgggactgtactttatagaggaacacaatgtcaatgcccctgcattgtggtatcatgtcgatgagcccctattagtgatcttgaaaattttcaatggatggcanaactgtttgaccacacagcatatttgttcaccatgatgaatggaagactgcttactctacatgataacaacatggaagagatgagtggggnttctctatagtgtanactaattntagtcattgcactatcattatttctatat

SEQ ID NO: 18875 - DNA, 458 bp, Zea mays
  unsure (1)..(458): unsure at all n locations
agcttcgtgaatacattggaggtggcggcgagctccagcagtagccgacaggggaaaagattgctcgctggaacttgaatccgccgatcaacgagggtagagaaaagcaccgcgcaatccaccgacgagtccacgccatcatgcttgcctggtttgctgctatgtttagcatcccttggaacggagtttggcgctgcgggtcattggatgtgtggcctcaataatggcgccgccgcatgggcgcttaaacatggcggtgcgccaccgcggcttgngctggggagaggagaaagaacatgcgggtgcggtgttgatctgctagcctgcagccacgattatgccacgtaccctttcgtttttctttgaaagctcaaccgttggattgnngttggcatggcgtgggtgcaacggatgtcgtggatccgagatccgacgactggnggtgtgcactgattcat

SEQ ID NO: 18876 - DNA, 290 bp, Zea mays
  unsure (1)..(290): unsure at all n locations
ctcagcttagttcctctatatatggatgctntgagtctgccaatntccttctgcccttctagcagcttcttgacttccatgaatagcaatgggcccttggttcgaatgtatcttcatgcanagataagctggatgcagaattgcttcgaaggcattaagagtgccacgaccaatgattgcattgtaaggggattccatgtcaacaatatcaaacataacttgnntcagtccttgtgttgtgataaatccgaaggccactgacattgagattntgccgagtgctacaatct

SEQ ID NO: 18877 - DNA, 457 bp, Zea mays
  unsure (1)..(457): unsure at all n locations
agcttctaaagggagagcacattttgtgactaacatatgttcattttgagaaagacaggatttgtagtgcatgccaagcagggaagcaagttgatgttcatcatccacacaagaacatcatgatgaccgacaggctacttgagctactccacatggacctattcggcccgattgcttacataagcatcggcgggagtaagtactgtctagttatcgcggatgattattctcgcttcacttgcgtattctttttgcaggataaatctcatacccaagaaaccttgaaaggattcttgagacgggctcaaaatgagttcggcttaaggataaaaaagaatagaagcggcaatgggacggagttcaagaactcacataatgaaggctttcttgaggacgagggcatcaagcatgagttctcttctccctacacaccacaacanaatggtgtagtggaaag

SEQ ID NO: 18878 - DNA, 358 bp, Zea mays
  unsure (1)..(358): unsure at all n locations
ctcagctggagcatggactagaaggctcggaggattggtangctcttctcctgtgttaagaaagatgaaggcaccagttncatatgtgcgtttcgcttcacccttctggcacagctgcccaagcatatcagcatgctgatctccaagacaccccgagatgggaactcctgcanacgggaactctntggcgaccacaccgattntctctgaattactgataatctctggcaaaatctcaacaggaactcctaacacagcaagtgtnggcttatcccagtcaagtgtctttagaatcataagcattgtacgagatgcatgtgagcaatccgtgacatgctgcccaccagcaacaccttct

SEQ ID NO: 18879 - DNA, 457 bp, Zea mays
  unsure (1)..(457): unsure at all n locations
agcttgcattgcatgtttaaattccttgtattgcatctaggacttgtctaacctagttgagataaccgccaacaaagcgagtgaaaaagcttaactcggatcaaacctgacaagtcttagttttaagcttttagcacttaaattcttactttttatgcaattattggttcttgaaatatgcatgaggtcctgcacttagggggagtattcaaaactcaaatcactcatgaaaacccctagtgcaagccaaaatgcaaatttcaccatttgcctattttctctaaaaattatcttgcctatggcgaaatattttgaaaagtatatgagggtgccaatacctgtcccaacaagtgttattttgtgtgattataagttgggaattggtttggttgggagttagatagaanaattcaaatttttccaaactctcctctgtctgggctcaccggacagtccg

SEQ ID NO: 18880 - DNA, 82 bp, Zea mays
ctacgtcacttttatccttataatggttcaaggcattcatgtatctcgctctctctacatgcataaataaagtctaaccatc

SEQ ID NO: 18881 - DNA, 471 bp, Zea mays
  unsure (1)..(471): unsure at all n locations
agcttgctacagccgagcaggaggccgaagaaataccttcagatattaaaatagcttttgaaaaaagtgcggccaaagaagccgaatcccttacccccaaagcatcctccgaagatattgattatatcattcgacatgctacgggaaagaaattatccaaagaagaaatttttgaagccaaacattatgcccgggaactgaaatatccgaagggggccttagtgtttaacggtacggataaagtgtaatagttatctcaacacccaaaaccacatatagcaatagcaaagactacccaaaagttcaggcataaacaaggtgtaaagatgaccaaactagggtgacctattgggtcccatcaaaattaaacctatgcataccanaatgattatatagaacattattagataaataaaagtggtcaagggcacaacttgccttcaatgagctcctgctcagcaacttctacct

SEQ ID NO: 18882 - DNA, 411 bp, Zea mays
  unsure (1)..(411): unsure at all n locations
cgtacaacagggagtacttgtctgatatcacncncgaacacaacagttctcccaccaaagggcagctcaggccgtcccattatatcacgcatgctattgtctagcgcctcaattgcttgtctcttagtcatcgatgcctcatcccagataatgagcgatgctttntgtagcaactntgctgtcccgcttttgttcgtgaagctacatacagcaccatcatcaatagtaagtggtatcttgaagcgtgaatgggcagtccctcccccaggcaatatggaagccgcaacaccagaatgtagctgtgcaactgcaatcttgtcctgactgcgtagtgccgcaagcagtgccttatacagataggtcttgccagtcccaccaggcccatccacanagaacnnactcaccgtattg

SEQ ID NO: 18883 - DNA, 284 bp, Zea mays
atttagaccatagtgtctgatattaatcagaaggcaccgcctaggatatacttgacatagatagtgtcggtgggagtactagagcaacgcccatgtttacagactcacgctcagtgctgcccaggcattatagggctttccatacaggatgctatgcaagaatgcattcagcactccgcaaatcaacacctacactatactcagtggcacgcaagtaacaatattggtggacgcgaccatacgcggaccactctgctcgtcattggtcgtttatgtcgtggatc

SEQ ID NO: 18884 - DNA, 220 bp, Zea mays
  unsure (1)..(220): unsure at all n locations
gagaaagacaggatttgtatctcatgccatgcacggaagcaaggtggagttcatcattcacacaagaacatcatgacgaccgacaggccgcttgagctactccacatggatctattcggcccgattgcttacataagcatcggcgggagtaagtattggcttgtaatagtggatgattattctcgcttcacttgggtattctttctacagganaaatctc

SEQ ID NO: 18885 - DNA, 445 bp, Zea mays
  unsure (1)..(445): unsure at all n locations
agcttcggcttatggtcaaattttggcaacaaaacagtgcaatagcaatgaatgctgtggtaacttcacacctactcgtctgtttatatagtgccgcaggtgggaaggtaaatcatcaagtcttccgcaccggacaaatagctgcccgcacccactgaacggtgggccacagagcccgagaaggtgaatcgccaggacgcgcgtaactgctgcatggtgggaccacctcgcgctcggattattttaatcgtttctcggcaacgagctcagggaaggtgtttttcggatcttcagtatcccgaagcctaagagactntttcatggatgaagctcgttacgaanaacgatctagcaccgcgaagggctactgttgggggatgcttcgtaccgaaatcttgagaaaaaacaccttcgagatctctcaaagcgtgcgagctatacctat

SEQ ID NO: 18886 - DNA, 282 bp, Zea mays
  unsure (1)..(282): unsure at all n locations
ctctttcggagcaggagaagtcctatctccgttgtcttttctctcgatnacacacctcanaatatcttgcctcatatgtcgagagactctgctaatagctgatcttccgaanactgtatgacttggtcgccaaggtcgatctttggagtcttcgccaccgctttccacatcataactatcactatcaccggtgtcttcagataaaccttccanaatctccctagtgatcttctctgtattngtctatgctattgattcaagaaacccaagattcttctcctc

SEQ ID NO: 18887 - DNA, 426 bp, Zea mays
  unsure (1)..(426): unsure at all n locations
agcttgacaatgaggagatggcgctcgtcatcaagagcttncgccaaatcctcaaacaaaggaggggaaaagactacaagtcccgctccaagaaggtgtgctacaaatgtggtaagcccggtcattttattgctaaatgtcctatatctagtgacagtgaccaaggcgacgacaagaaggggagaagaaaggagaagaagagatactacaagaagaagggcggtgatgcccatgtttgtcgggagtgggattcctacgaaagctcaagcgactcctccgacgacgaggacgccgccaacatcgccgtcaccaagggacttctcttccccaatgtcggccacaagtgtctcatggcaaaggacggcaaaaggaagaaggtaaatcaagatccttcactaaatatgaaacctctagtgatgaaaatgc

SEQ ID NO: 18888 - DNA, 451 bp, Zea mays
  unsure (1)..(451): unsure at all n locations
tctctattacaacctcatgagcaatgcttaatatgatatgatcatccataagattntcattagaatatagaagcatatcatanttttcttgaaaagctatattttcattntntagctnttccattaggtccttaagcaaggcattcctattcactaattcagcgatacaatgtanagagttatcttgctcaattgaaatagtttcatacctttggaccaaatcaacatgagagcactctagctcctcatggtgcttagtcaactcgtcaaagtttaagcattttatggagataatatcttctagcctttgacgagcttcgctntgtctctcgctctttagaagttgagcatgaccacttatcttctatgctataatagcgaagagtncatgaagcttcttcatcctctcatctcattgtgcttccgtatcatttcattagcacacacatat

SEQ ID NO: 18889 - DNA, 459 bp, Zea mays
  unsure (1)..(459): unsure at all n locations
agcttggagctttntagtgttagaaaacaactgattagctctcaaattagatttccctgctgctgaaatgcaggagtttgttcattcactctcctatttaatccatgtattcccgaattaagtcagttcctctcgcatgacgaaacggaagaacaacctgaccaaatggatttctgcccaagtgcatgatcaactgttagtatgagtgaactctcgaccgttggcttaccgatggtactgagaggacatgcccaatgtcaaaaatggtacaacaagttggttttgactaacttgtaactggccaatgaacaaatattgagtttagagatcgttttatcgagttgcctgaactcattttgggtcaacccaccctaaagaaagtacttacaagaatcgagattaagtcggccagtaaccacctaatcatcgctctactcgtgccttgatcggctcacgtgt

SEQ ID NO: 18890 - DNA, 134 bp, Zea mays
acgctgaggtgagcggtacgggtgctgagtcccaacgggagcggtggaaccaccgttcatataacgacgttccgcgcgctcagcccgcagcagggcgatctcagcacgagccctactcaactcgtctaatgcat

SEQ ID NO: 18891 - DNA, 467 bp, Zea mays
  unsure (1)..(467): unsure at all n locations
agctngccctccttctgtgcccagccctagctcgtcccaaccccactccctggctggccttgctctggttttcccccagccctagccgagctcgcccctgccctaagttctcaaggcagcccctctgtgttttccatggccggcaccctccccatcttttgtaggtgagcctatgtcctttgctgcggattatgttgtgcatatgtgagtaagtgctgaaatatatatgttcatgtgtgcagattggaagaaaggattcctatgagtgtgagaagaagcaaatcctagcataacgcatgctangtgttcgacgaaatgttcgaattgggattgtcgttgatattgtggatctgagtcgcgctntgtattggtgagccgattccttgctcttattctttggttctatgcctgaagtgattagatgtattaaatacgatgaatctcttgttngtagcacatgtgtgtcg

SEQ ID NO: 18892 - DNA, 199 bp, Zea mays
  unsure (1)..(199): unsure at all n locations
aatcgactcaagcggagacactacactgagactctcttctcgtgcaagtcacccgcccggtctcagctttatcatttcaacccatagtttggtacctggcagaggtacatcttttccgatgttgaacccatcatggccatgatggatccaccatcaagttntatttttgaaaacatccctcccactctgtagcatcatc

SEQ ID NO: 18893 - DNA, 460 bp, Zea mays
  unsure (1)..(460): unsure at all n locations
agcttcggaattatgaaccgatttaaaagtagaaagaccttntagtccataagcgtttgagtcgttattgtaaactttcatgaagggcacggttgtaaattctcacaggctgtgtcctgcgcctataaatagtgaacaatattcctctactgttcacgcttttggagtattttttgccatcacatcgtctgggaaccaacctttgtcaaggcagaggtataatactatccaatacttaaatatattaatgaatataatatgattcatttacctctgatactctatattttatgtcatttcgtataatttattaacatacaattacaaaaactcaaccttcgtaatcgtattatcgtccgccttcgtccagaatccattatccccgagggaataatgcttcgttggacgaagggtattataatttaacattntatgttgccttgttcttgattcatagcat

SEQ ID NO: 18894 - DNA, 271 bp, Zea mays
  unsure (1)..(271): unsure at all n locations
tagaatgcaacacaggaattttggcaacactaatggcactagtgctatcacanagcanaggcacatgcgataactcgaatccaaaatcccgcanagtggccatcatccaaagcaactaagagcaacatatagtagcagcaacatgctcagcctatgtggtaaactgagcaacactagattatttctgagaagaccacganggccaagaagatcccanatactgacaagtcccagaagtggacttgtgatccaagcgacatcccatgaaatc

SEQ ID NO: 18895 - DNA, 467 bp, Zea mays
  unsure (1)..(467): unsure at all n locations
agcttgaagtacgcanagtttaacaaaattggtctcatgaaanttgggtcagtagtcaataagttacagatttttgaagcttgctgcagaattaaaacgtatttcgaattaaaaaggaaaagaaaagttgttttgcgctcggccccctagatttttccactgttttctctttcactaatgccctcgggctcctattcacctgngtcgctgactgtgcaaaagggccctcgggcttttaaggatctcaacccgcgctccctcttcccctcgccagaacagcgcctagagcgtgtcggggactgggtcgtggagcttcgggttggtcaggcgaactcgagggcggtagtgatcagacggcggcgagcgaagcaagccggtccacgggcgcaggcgggtgtaggtcgccgacgagcttcaatccgagggcctagtgcggtagagcttcgaggcaacgctcanggagcttg

SEQ ID NO: 18896 - DNA, 227 bp, Zea mays
  unsure (1)..(227): unsure at all n locations
tacatatcgtggtggaggcaagcttattcgcccttctcttgcanattcttacaatttgaacctgtgaaaaagaattactttcctcgtggcaaacgaacaaaccattacatngaagttaaaaagtgttctttatttcatgananatgaaacttgaatagagaagacttctatcagagtaggatacttgtcaatagatgtgctntgactcttgcacagtgctattaact

SEQ ID NO: 18897 - DNA, 457 bp, Zea mays
  unsure (1)..(457): unsure at all n locations
agcttgtgaaggatcttcatcctaacatgagtaantcggcgatgccagagccagcccatgggtgtcttagcaattaagcaagtgtctagatcagcattgttatcatgaaaatcaaccaaatataactgaccatctaacactctcttagaagctattgaattatcacttattctaaagacagtaacaccaacatcagtatatagacagttgtagcccattttacataattgagaaacaaaaaggcagttgtaatctaaaaaatctaccagaagaacattataaatggaatggtctgcggatatagcaatattacccaaacctttgaccanaccttgatttccatccctgaatgtgattgctctttgaggatcatcgttnttctcatatgaggagaacataattttcttccctgtcatatggtttgtgccccgctatcattatctacttgacttgcaga

SEQ ID NO: 18898 - DNA, 260 bp, Zea mays
  unsure (1)..(260): unsure at all n locations
atatatgcattcaataatcacagcacatatatgatacgtcaagaagataactgcagacacagaanatttgcaacaaaatggtctatgatgactgagcactttgaacagcttaaccctatggagaagaacaaacatgctntggaatcttaanaagtacatcacagcgaagacanaatcagatcaactttattcttatgcaatcttgtaatatggataaaaacaactactcgtngatggacatctagaacaatcgacagtgg

SEQ ID NO: 18899 - DNA, 387 bp, Zea mays
agcttgaagccatggtaagtagcataggctaataatatacgaattgactcaagcctagctacaggtgcataggtttcacagaaatccaaaccttcgacttgggagtatcctttggccacaagtcgggctttgttccttgtcaccacaccatgctcgtcttgcttgttgcggaacacccatttggttcctacaacattttgattaggacgtggaactaagtgccatacctcattcctagtgaagttgttgagctcctcttgcattgccaccacccaatctgaatcttgaagtgcttcctctaccctgtgtggctcaatagaggaaacaaaagagtaatgctcacaaaaatgtgcaacacgagatctagtggttacccccttatggatg

SEQ ID NO: 18900 - DNA, 373 bp, Zea mays
  unsure (1)..(373): unsure at all n locations
gcagcttgtcaagcaggtaaacaagtgggaggagcacatcacagcaagaatgtgatgaccacatcaagaccnctggagctactacacatggacctcttcggacccgtcgcctatctgagcataggaggaagtaagtatggtctagttattggtgatgactnttcccgcttcacttgngtgttctttttgcagaataagtctgaaacccaagggaccctcaagcgcttnctcaggagagctcannnatgagttgagctcaaggtgaagaagatatggagcgacaacgggtcggagttcaagaaccttcaagtggaggagttccttgaggaggaanggatcnagcacgaagtctttcgctcctacacaccacaac

SEQ ID NO: 18901 - DNA, 452 bp, Zea mays
  unsure (1)..(452): unsure at all n locations
agcttcggcgccactttcacaggccgggccactctcagaaggtggcagggcccgcgacgatgacaaaaaggaagatcaccaagcaggagagttccccgaggtccgcgactgcttcatgatctacggtgggcatgcggcgaatgcctcggctcggcatcgcaagcaagagcgccgggaggtctgctcggtgaaggtggcggcgccagtctacctagactggtccgacaagcccatcaccttcgaccaagctgaccaccccgaccacgtgccgagcctgtggaaatacccgctcgtcgtcgaccccatcgtcggcgacgtcaggctcaccaaggtcctgatggacggnggcagctgcctcaacatcatctacgccgagaccctcaggctcctgcgcgtcgatctgtcctccgtccgagcaggcgctgcgcccttccacgggatcattcttggga

SEQ ID NO: 18902 - DNA, 449 bp, Zea mays
  unsure (1)..(449): unsure at all n locations
agcttactaaattaaagaaaattaaacaccacatgctttatcgaactgggtcagcctaagcccgacccatacgtactggtcgtgtcggagatccgataagtcgtaatgtaaggttcagcttgcctttggaccatgctaacctaactcatatcatttcatgttgggccgtgctttatgctcctatttttcggccatgctcgttgttggaacttgctctcctgngcaagttgatccaacgggggaatgaaagcaacgtaaacaaggtttcaacttgatatggcaatagttctgttaatccagcctctcagggcactgtacggnggtatttataggtgcctgagtgcccaacgtctcgatgtaaggatgcatgtaccctcangcacctggactatctccggaatattcctataaaggagggttacagactgtcattacagaaaagctattac

SEQ ID NO: 18903 - DNA, 465 bp, Zea mays
  unsure (1)..(465): unsure at all n locations
agcttatccagtggtgtagacaaaggaggctagggagctacngcctcccctcacaaaaaaggcggcgtctctgtggtgtctgggttgtatttgtatcaatgccagacactgagtgcccgggtgttggtcattatcagcggagctacgcacgctaatcagcgtagctgcaactgctagcatgccgggccgaatcgtcagtcctgggcatcatcaggccgaaataagtagccaccccttggtcgccgtcgcggtcgccgcctcaacaataaagagcagcgtagagtggttgggaactangccgcgcgagcgtgactgccacatcccaatcaataaccacggaagcggaaggggggcggtggcgggaccgccggaccggtgctcggtcgatgcggatccgtcgccgtncaacaacgcgccgacgccgactcacctacacgtncaccagcacgcacgggatcatccaac

SEQ ID NO: 18904 - DNA, 455 bp, Zea mays
  unsure (1)..(455): unsure at all n locations
ttgaactcttcaattcttcgtaccatgaatatagaagntcttagctgatcttttatagtcttgcaatcatcaaaagaaaaatcatcagaatagatatccacgagccgagcaagcttatccacatcanacttagaaaacgaatcccttgggtcaagacaagaaaaacacacaagcaactcttgagatagctcattaaagcgatgatcaaactctgtggtgatagaatctatagcagcatagaaagtatcaacacgataaaaatgctctatggtaatattatttctcccacctttccttgatcgaccanatcgtggacaacatcactcatattgngtattgggatatcatttgcanggcagaaatgtgtgcttcttcaacaatggctccaacatctttctcanattatanacgtgtctacatcacaccaaaacatggtggacaacgtntgatctttc

SEQ ID NO: 18905 - DNA, 468 bp, Zea mays
  unsure (1)..(468): unsure at all n locations
agcttatgaagattcttcatcccaacatgggctagtcggcggtgccagagccaacccatgttagtcttagcaattaagcatgtgtcgagttcagctctatcaaaatctactaagtatagctgaccctctaacacacccttaaatgctattgaatcatcacttcttctaaagacagtgacacctacatcagtaaaaagacagttgtagcccatttgacataattgagaaacagaaagcaagttgtaatctaaagaatcaacaagaaaaacattggaaatagaatggtcaggagatatagcaattttaccaagtcctttgaccaaaccttgatttccatccccgaatgtgatagctcgttggggatcctgggttttctcatatgaggagaacattctnttctccccagtcatatggtttgtgcacccgctgtcgagtatccaacttgagcccccggatgcataaacctac

SEQ ID NO: 18906 - DNA, 444 bp, Zea mays
agcttctaaagggataacacattatggaactaactaatgttcattttgagaaagacagggtttgtagcgcatgtcaagtagggaagcaagttggtacccaccatccacacaagaacatcatgacgaccgacaggccgcttggactactccacatagatctattcggcccgatcgcttacataagcatcagcgggagtaagtactgtctagtaattgtggatgattattttcgcttcacttgggtattctttttgcaggaaaaatcacaaacccaagagaccttaaagggattcttgagatgggcccaaaatgagttcggattaaggatcaagaagataagaagcgacaacgggacggagttcaagaactctcaaatagaaggctttcttgaggatgaaggcatcaagcatgagttctcttctccctacacaccccaacaaaatg

SEQ ID NO: 18907 - DNA, 458 bp, Zea mays
  unsure (1)..(458): unsure at all n locations
agcttgcacacatagctcatttgaatacctttgatcatatctcttttatatgctatgactaatgtgttttcaaggttatttcaaaccaagtcatacgtatattggaagggaattggagtcttcggcgaagacaaaagcttccactccgtaactcatacctcgccaccactccgagcaactctctcctctttgggggagaaatgagcatcaaggaaaaggacttcatccttgggggaaagagtaaaagctcaaacgcaaaaggacttcgtctttggtataatcctaactcacttatttatgaccaaaggggaagaaagtacttcgagggctctaatgattccgtttttggcgattcatgccaaanagggggagaaatgagcccanagcanaaggaccgtaccatcaccaatttcgaaaacttaagtattgaatattttcaattggatcctattgtgtca

SEQ ID NO: 18908 - DNA, 451 bp, Zea mays
agcttgtgtgtttgctggagaagaaaccactccaacgccgaatgatgatgaagtagtggttttcaaaagttttttcagagcaggattacggtttcctctgaacgagatgataggagaggttttgaaaatttttgaaatttatcttcatcagttagagccccacggtgggcgccaatgttggggacttattctcaaatgctatgagttaatgacaaggcaacacaaaatgttactagttaaagaccttcgtccttcgaagcattatttcccttaggatataatgatcttctgacgaatgttatgaagggcgtaccttcaccgtctcagtatattataaagcaagtaaaagcatatggaacatggtaaataacatgaataattatatgacattatcagaacatgttattatcttatcagaaataaacatgagcaatattgaattacatttata

SEQ ID NO: 18909 - DNA, 203 bp, Zea mays
  unsure (1)..(203): unsure at all n locations
atattggaactagagattcggttctggagtacttggccaataaggtattcccaacattaaaggaatggattatgccgaagctcataggagagaagagaaagaatgaactcattcggctgccctatcatttgaagttcaagaaacacttcagagaaccctaccaagaaatggtggatacaattgaagttatngtgcatgaaatc

SEQ ID NO: 18910 - DNA, 442 bp, Zea mays
  unsure (1)..(442): unsure at all n locations
agcttgtgaagattcttcattccaacatgggctagtctgtgatgccagagccaacccatattagtcttagcaattaaacaagtgttgagttcagctgtgttctcattaaaatcaactaaatatagctgaccctctaacactcctttaaatgctattgaatcgtcacttcttttaaagacagtaacacatatatctgtaaaaagacagttgtagcccattttgcataattgagaaactgaaagcaagttataatctaaagaatctacaagaaaaacattggaaataaaatggtcaggtgatatagcaattttaccaagtcctttgaccaaaccttgatttccatccccgaatgtgatagctctttggggatcttgggttntctcgtaggaggagaacattcttttctcccctgtcatatgggttatgcatccactatcaatta

SEQ ID NO: 18911 - DNA, 531 bp, Zea mays
  unsure (1)..(531): unsure at all n locations
attaaagtcaccactttcacgagatgagtcttgtttatatcttagccacaccttcnggcctcagtggaccttaatccatctntccaaggtgaactctatgtatactatcgcanattctgattcttccaatattatctagaaagcttgttcttaaggacgccatgatactggtttaacatggtaaagcagcaaattccataaaataactctctgtgaaagggtaagaatcattcttttattagaataataaaatacatggtgttggctaacatattagntacttattcgttcaatcctttngtttcttacttgaaaagttgacaattacggagtggttggtattctgactaaagaccgtgcacatagatcgttgaatgtaaatacggtataaatataattaatataaagtactactagagaagctntcgacagcagattataagacaatattcatgctcgggttgatcatggtaatagactcataatcgctcgcgtagcttattgttaatagtcacattaatatatcatact

SEQ ID NO: 18912 - DNA, 466 bp, Zea mays
  unsure (1)..(466): unsure at all n locations
agcttcaatgtctgctctctagtggcactagaagttatggtctatgccattgttttcaactatgttaggtcaatgctctaacctccgatgacctgatcattggtggttaccggaggatttcgatggatgattgggtcgagccgattcagcgctctatgattcgaagacccaactccaattatcatcagagactccagtgtgggtaaaaatcctccatcaagttttcttctcgaaccttttaaattggctaactccaatagatctttcacgggatgaccaatactttagcactagacaatcacattagcaaccaaatttcactctctttatagcatgactatgtttcctatcaatctagtttttcctctccactgatcaccacacggacgatgaaagacaaatccttatcattataccttngctntatgtgtcatccttcgtctttatcttttcacttctcgatctt

SEQ ID NO: 18913 - DNA, 339 bp, Zea mays
  unsure (1)..(339): unsure at all n locations
tatgagctattacaagtagtgctggcctgctgtcccaaaatcagcanatattanaatgatngcttggagtctcttttgtgtgggtaactagaaattggtagttcttgtcttgattaatgaagtcttgtgatctgaacatacatactatggtggcgcgaagtgcttttagctctgtctntcttctgtgtctatcaaccactctaatcctacacattccaatgcactttatgttntacacantttggactggcattttctttatgctaatgtagcattcacacattntacanttcttggaataaagacatcnaantctacatcatcttatgatgtgggtat

SEQ ID NO: 18914 - DNA, 460 bp, Zea mays
  unsure (1)..(460): unsure at all n locations
agctntggaagcagagaaggacgaggctgatgccattaaaaaggtaagaagaacttgcttctgaattctgatatctatcttagaagcaaccaactgtaggtcaggtcacttgagttntctatattcttctttttgacttctccttggcttctgaacttgtccttattgtttgacgacacgtgagataggagctagctgctcttatttttttccttgaacatttagacaaattactattcctataaatatttaattacataacttaatgatcaaaagctaagcacgagtaggcggtgatcatgcatgagcctctccttaactcctagtgaagtacatatgtgctaataactatatatatatgcatgattaagttgagttttagttggttcttctttctttgcattggactgttatgttcacgatgatgttttaatacagttcctacgatatctccatactt

SEQ ID NO: 18915 - DNA, 400 bp, Zea mays
  unsure (1)..(400): unsure at all n locations
atgccacacaatgcgaaggtagtctgaatcttcctctatggaattcacttggctcgtcaaataatcgtaactatagtcattgntctcgtgtattccaacagttattgtggctcagatgctaatatattaataattgaatngggataatgatttggacattccattctgtatgtcccagcgagccttttcagtacctcctagatcatcctttctctatttcggtggagaaccaagccgtagtacccccacctatggcttctgtgcgtgaccacgtgacacgattgtggactgctgctgcattcgctttgcgtatactataactgaagcaccatatgatgcaccaatccagcagaccagcatgttagcattctctataattgcatggaattgcagtcatgtg

SEQ ID NO: 18916 - DNA, 441 bp, Zea mays
  unsure (1)..(441): unsure at all n locations
agcttgtgaacagtacaaattcagaagggagaaagcagcttcatcagaccagccgaagcctatgcttttatgtgaggacatagcagagcagaaggtgctgttaggctctcagttatccgaagagcaggagaaaaccttgataaggtttttgttcaataacaaggatgtttttgcatggtcagccaatgatctctgcggagttaatagagatgttatcgagcactcactcaatgtcgatccatccttcagacccagaaagcaaaggcttcggaagatgtcagatgataaggccgaaggtgctcgcaacgaagtcaaaagactcctcagtgcaggagttatcatagaagtgaagtacccagaatggctggctaacactgttatnggtaaaaaggccaatggcaagtggcgaatgtgcattcgatttacagatcttaacaaagc

SEQ ID NO: 18917 - DNA, 318 bp, Zea mays
  unsure (1)..(318): unsure at all n locations
ctctcgcattcagacgaagctncagttnggtgcctacttcgtcagaagaatatcttctggaganaaggggtattaattcccaagagactttcaagaaatcanaataaatggccagagtgcgctctactgctagangtgagcgtgagggagaacgaaccgaatgtgcggagactggtcctatctccgaagcaatgcagtgatccggattagtgacctctgaaagaatccccacttgcgaaacagaacaagctgctgccgaagcggaacaatgagatattgaggaagctgattctgacggtgattaccatatcgcagtac

SEQ ID NO: 18918 - DNA, 458 bp, Zea mays
  unsure (1)..(458): unsure at all n locations
agcttgtccgaagggctgcgtgctatttaggaaagaatacacggaggcaaagtactgtcccaagtgtaaatcatctaggttcatggaggtagactctggtgatggacagaagagacagctcgacatccccttaacaatcctacgataccttccgttcataccgaggatccagcgtctgtacatgacagaggaatccgcgaaacatatgacatggcacaaaaatggaaaacgatacaatccagacaagatggtgcacgcatccgatggtgaagcatggaaacactttgatgccattcaccgtgagaaagccgaagaggctcataatgtacgtgctgcgttagccacagatgggttcaatccctatggaatgagcgctgccccgtacacatgttggtccgtgtttgttatcccaatcaatctcgcccctggtttgtgctttcanaggcagaatatattcg

SEQ ID NO: 18919 - DNA, 216 bp, Zea mays
  unsure (1)..(216): unsure at all n locations
agcaattaagcaagtgttgagttcagctctatcanaatctaccaagtatagctgaccctctaacattcncttanatgctattgaatcatcacttcttctaaagacagtgacacctacatcagtgaatagacagttgtagcccatttgacataattgagatacggaaagcanattgtaatctaaagaatctacaagaaacacattggaaatagaatg

SEQ ID NO: 18920 - DNA, 451 bp, Zea mays
  unsure (1)..(451): unsure at all n locations
agcttctccaccatgtcgctgctagccaagttggtgcagctacctccatcaatgatcaaacgacatgaacgctccttaatgacacactatgtttgaaacaacgtatgtcgctgattctgctctgccttctccatttgtgcactaagcacacgctgtacaatgaggctctcataatgctctgcatcatctgcaccaatctgttcttcgggtggttccttagtgcctgcatcatcagccgcaagcaaagcaagtgtagcttcatccaaatcactagcagaggaatacccaccatcgtctnttaccaccaaaacacgctgattaggacaatcacgctgcacgtgtccatagcccttgcatcgataacacagaacatctcttgttctacctgtggaagctactgaagaggcactacctgcgggtttctgggcagatttggttgctgaatttgtgg

SEQ ID NO: 18921 - DNA, 456 bp, Zea mays
agcttcttcacatatgttgtaatggataacttgtcaaagtttagttatatacttagtagtttatattttagtccaaatgtgttactcactcatgaacaagtccatattctgtgattaaatatatcatgtgataaataagtctatgatttattcatctactatagtttgatccatgatgtaaatggatgaatatatgatttgttcgtagtctgtgattcaatgtgtgatgcaagatatgttcattatcttttgtctatatgtgttttcttgatttggtcatcgtcgacgttaataacatctaccacacgagaccacaacatctaccgtgttgggctcaacgatggcggatgcggtcgtgtgggtgttttttgttttttgaacatgtatcactgtcaggtggaagtcgagtaatgggaattactggtcatcacttctagcccaaaatttcaacggtat

SEQ ID NO: 18922 - DNA, 101 bp, Zea mays
acaagtgggaagagcgcatcacagcaagaatgtgatgaccacgtcataacctctggagctgctgcacatggacctcttctgacccgtcgcctatctgagca

SEQ ID NO: 18923 - DNA, 417 bp, Zea mays
  unsure (1)..(417): unsure at all n locations
agcttaatgcccctaaaagattgtctaattntgttaagggcaaagctcccacggtttaggataatgaaggctacattntgtatcctgctaattatcctgagcacaaaattaggagaattcatgctagaaaacctcacactgtttctcatcatgcatttatatataaaaatgaggcttctagctctaggcaatcaactcatgttaaattgcctaaaaagaaaactcctactgcatcaaatgagcataccatttcatttaaaacttttgatgcttcatatgtgcttactaacaaatcangaaaagtagttgccaaatatgttggggggcaaacacaagagtccaaagacttgtgtttgggtacccaaggtgcttgtttctgacgtcaaaggacccaagactgtttgngtacctaagaac

SEQ ID NO: 18924 - DNA, 470 bp, Zea mays
  unsure (1)..(470): unsure at all n locations
ctcagcttatccatttgaactcttgctttctcagtagagaagtaagaggcttcactatcttggataaaccttcaataaatcttctatagtatcctgctaatccaagaaaacttctgatcttggacgcatcctttggttgcttccaatctagtatctcacttatctntcctgggtccactntaattccaccatcggtaacaatatgccctaagaaagcaacttctttcaaccaaaaatcacacttcgagaaatttgcgtacaatnggttgtcacgaagcttttgtangactagccttagatgatcttcgtgtgcttcttcattcngagaatatatcagtatgtcgtcaatgaatacgaccacanactgatccagatattccatgaatactntattcatcaagttcataaagtatgctggtgcattagtcagtccanacgacatgaccaanaactcatataatccatatctc

SEQ ID NO: 18925 - DNA, 466 bp, Zea mays
  unsure (1)..(466): unsure at all n locations
agctntgaccttcatcatgccgccgaagaagtcatcatggccaggggctgcattgtagctattggacgttaatcaaaaaacattacgcgaagctaggagccagtaaaggaaggctaccagtccaacacctcatgaggagttggaccatgaaatcagggacctcgaagccatccatcaacaggttcagaagaagaaagaaaagatgcttcgtctcgctgatcttcagaagaagattgatgaggccactgaggaaatgtgtcatctcacccaagatgaccaagaccgaaggcctcaacacatagagcttcgttaagacaatccatacaacgatgatgaatggaatgatgatttctatcatggcaattttgcttttgatgatgcttctcctctagcagcagagntgcacgctatcccatggcccccatcatacaagccacctcagcttcctatgtatgatgggcactca

SEQ ID NO: 18926 - DNA, 379 bp, Zea mays
  unsure (1)..(379): unsure at all n locations
cttcaataacttgttatttgtttacaagcttcgaaanatctggtatgaatctgccgtaatatccaaccagtccaaagatacttctgacctgatgaacagtgatcgggggtttccactccaaaatgtccttgactntgctgggatctaccgcaattcccctggcagatagtacatgtcccagaaactgaatntccttcagccaaaacgcgcatttgctgaacttggcatataactgatgttctctcaagcgccgtaacacgatccgtaaatggtgggcgtgctcctcttcattcttggatatatcanaatatcgtctatgaagaccaccacanacttgtcccactcgggcatgaataccgagttcatcanatacgtgaag

SEQ ID NO: 18927 - DNA, 455 bp, Zea mays
gcttaccacatttgaagcatgagcacttcccctttgtcttggtcttgcttggctgccccttgcggccttttagcgccgtcttgaatctcttgatgatgagagccatctcttcatcattaagtctgaccgcctcaatttgtgccaccttgctaggtagcatctccttgcttcttggtgccttgagagcaaaaggttgaagctcattgattggaccgtttagagcgtcgtcgacgtatctcgcctccttgatcatcatccgcccgcttacgaattttccgagtacttcctcgggcgtcatcgtcgtgtacctgggattctcacgaatattgtttacgagatgaggatcaagaacggtaaaggaccttagcattaggcggacgacgtcgtggtccgtccatcgcgtgcttccgtagcttcttattttgttgataagggtcttgagccggttgaagttt

SEQ ID NO: 18928 - DNA, 310 bp, Zea mays
  unsure (1)..(310): unsure at all n locations
tgcataacgcttttgacgagcttgagcgttcttcacattatgaattatcctttgaactctntcttcagtctctgtcaccatatcaggcctgaagaagtacctttcaccaggttcagaccaatttagcggagtacgacatcgtcgtccatataaagcttcaaagggtgccatcttgatgctctcttgatagctattattatatgaagataccgctacgacaaacattcatcccatttttgtggaaattccagaacacatgcgcgcagcatatcttcaagtattgggtcactctctcagtcttgccactggg

SEQ ID NO: 18929 - DNA, 470 bp, Zea mays
  unsure (1)..(470): unsure at all n locations
gcttcnggtctcttgccctacaactcttgtcaacatgaccagaaataacttgggaatcgggtttaaggaccgcccttcttattcccattggctttaactttcgaagccccaaaagcaaagcttcgtattcagcaatattatttgtgcagctgaagtcaagctttactgcataacatggtctgactttggaaggtgcaactaagacagcagctgcacctgccccaaaggttccctaggaaccggcgcagaacactgtccaagcttcggcatctttatttgcttcttcttcctgagcccctggcgtccagtcagcgatgaagtctgctaacacctgngactggatcgaggatctatgcacataatcaacgctgaattcgttgaattccgcaggccacattccaatccttccagtagcttctctattcctcataatatccttcaaaggatgtgatgaaggaacaattatatgg

SEQ ID NO: 18930 - DNA, 374 bp, Zea mays
agctacaccctgaacttggaggaatcagcttattgagctgaatatattattctcttaagatagcaagcagctgacagctgttattcattataatataaacagtgcataaaaacacaagcaatcagacgagacacatgtttagcatggacaatcgtaatgtgatagatgtcaatgaatacctctattcgtagagctgtagtagatagaaaagtcactaattggcatagcctaatgccctagtagctaatatacctcatattcgattatcgaatgagaaagacatcttacttacgacttacataagcatggccaattctctgttagctgagacatggaatgctctctctgtataaatctatgtcagctggacatat

SEQ ID NO: 18931 - DNA, 444 bp, Zea mays
  unsure (1)..(444): unsure at all n locations
agcttctaaagggagaacacgtgataggtttgactaacgtgtatttcgaanaagatagaccttgtgcagcttgtcaagcaggtaaacaaatgggaggagcgcatcacggcaagaatgtgatgaccacttcaagacccctggagctgctgcatatggacctcttcggtcctgtcgcctatctgagcataggagggagtaagtatggtttagttattgttgatgacttttcccgcttcacttgggtattctttttgcaggataagtctgaaacccaagggaccctcaagcgcttcatcaggagagctcaaaatgagtttgagctcaaggtgaagaagataaggagcgacaatgggtccgagttcaagaaccttcaagtggaggagttccttgaggaggaagggatcaagcacgagttctccgctccctacacaccccagcaaaatg

SEQ ID NO: 18932 - DNA, 425 bp, Zea mays
  unsure (1)..(425): unsure at all n locations
gagcagtcggncatgcgagagccaacccatattagtcttatcaatcaggcaagtgtctagttcagcattattatcntgtaaatcaactaaatatagctgaccatctaacactcccctaaaggctagtgaatcatcatttcttctgaagacggtaacatcaacatcagtaaataaacagttgtagcccactttgcataattgagacataaaaagcaagttataacctagagattctacaagaatacattagaaatggaatgatcaggtgatatagcaantntacccaatcttttgaccaaacctgantncatncncgatgtgatagctctttggcatcattntctatatgaagagacactctttctccctgcatgtggttgtgcctgctgcgatatccaactgtcatcgatgataaccacacacaa

SEQ ID NO: 18933 - DNA, 392 bp, Zea mays
acatcctgcctaaatcagagctgaccactcgtcacatagctctccaatttcatcctcaaacttatacacatactgatgcctgactagtccaagtttaatatccgaagcattattattagacatcttctacattttccactcagcccgtagtggccatgtcttaaatgccatatactcttgagaaagatcccttgtttcaatatgcgagcaaatagcattgaaagcaactatggcagcttgagattcgtagttatatattacaagttggattcttaataccaaagcaagtataaaaggtgtctgaatgacccctcttatgacactccgctacttcaagtctgtattcatataaatctctctattgccaattcatttaccatatgctttgatat

SEQ ID NO: 18934 - DNA, 278 bp, Zea mays
  unsure (1)..(278): unsure at all n locations
ctatgtgggattgccttgatctgtccaactccttttgttcttctgcagcttcttgacttncatgaatggcaatggaccctcgcttcgaaggtatcttcatgcataagtatgctggatgaagtattgcttcgaaggcattaagtgttcctcgaccaatgattgcattgtacgggtattccatgtcgacaatgtcaaagacaacttgctcagttcttgtgttgtggacataaccgaaggtaactgacattgtgattntgccaagtgccacaatctgtcat

SEQ ID NO: 18935 - DNA, 437 bp, Zea mays
  unsure (1)..(437): unsure at all n locations
agctngccgtctagtacacccttaaaagctagtgaaccatcacatcttctaaagacagacacatctacatttgtaaacaaacagttatatcccatattgcataattgactaacagatagcaaattatatccaagagactctactaaaaacacattagagatagagtgctcatttgagattgcaattntacctaacccttttaccttgccttgattcccatcaccgaatattattgaatcttgggaatctttggttttgacgtaggaggtgaacatcttcttctcccccgtcatatggtttgtgcatccgctgtcaataatccagcttgaacccccggatgcataaacctgcaaggcanatttaggcttgggtcttaggtacccaactcatgttgggtcctgcaaggttagcacacatatccttagggacccaaatgc

SEQ ID NO: 18936 - DNA, 368 bp, Zea mays
ctgatgtattgctgctcagagaatctgattgctcgcagattgtgcatcaagggccttccctgttggacagtggttaagagcccacaaggaatctgggcgggagagtctaaaaagcaatagccattgacaactttttggcctcttcggcttactaatgccttaatctagtcatgcaagtgagcatggaaatcgcatattgcgaccataatctgaattaaaaaactagtgctgtgaaacgaaagcggtgagctaaagcaatatgaaccttattcagcattgttctgcagaaacagttcaaaattaatgtgacaacagtgtaaggacagcaaaacatgcactttatataaattatgtactggccaatctac

SEQ ID NO: 18937 - DNA, 465 bp, Zea mays
  unsure (1)..(465): unsure at all n locations
agcttattgcagtagctgctgaaacacacatagcggagactaaaaaaacaattatcagagcacctgtagttacacacatagcagagactgactgtcaaccactaaactccaagtaatgataaaggtcgaatttctatgataaatctaaaactttagcgtcttaaacaaaaaattgctaacaaatacaaagcaaacaaatattgacaagttaatacctatgaaccatcggtggagaacattcatgatgcagatagcaaagagcctcagctacccccgttgcaatcttcaacctctttatccagtccaaagattgcaagccttcatcttcctcccttgactntntgtgtagtgcacttgacaagtcaccattttggacaaacctatacacatgaaccttttcttcttctttatcaagacagtgacccaggagaggaaccagcctttcatgcaatcctttagcaaaca

SEQ ID NO: 18938 - DNA, 428 bp, Zea mays
  unsure (1)..(428): unsure at all n locations
cactgtagaagcaatagaagccggtaccgattaaagccaagcgaacaccataccggcttctattacttctacagagtgtcgtctctatgaattgcatcttgcagagtccaaacaactggctttaatctgaagtgaacagcctaatgcagtcccttcataatgcagtccacctagatagacgcactaatcatacctcataatgcaacgcaccacctcatcagcatcgagacaattcaagatgtanaatccangataccatcacanataatattatcttgcctctctagcacatctacaaagtcngtacagtccctatctagtgcantaactaatattctatacactatacanngctgcattgnttctttttaagcgaagtanatactcttacatgatcatatgggacccaccaatagtanatatactct

SEQ ID NO: 18939 - DNA, 413 bp, Zea mays
agcttatgaagattcttcatcccaacatgggctaatctgcggagccagagccaacccatgttagtcttagcaattaagcaagtgtcgagttcagctctattaaaatctaccaagtatagcttgaccctctaacactcccttaaatgctattgaatcatcacttcttctaaagacagtgacacctatatcagtgaatagacagttgtagcccatttgacataattgggatacggaaagcagggtgcaatctaatgaatcaacaagaaaaacatctgaaatggaatggtcaggagatatagctattttacccaaacctttgaccaaatcttgatttccatccccgaatgtgattgctctttggggatcttggtttctctcatatgaggagaacattcttttctcccctgtcatat

SEQ ID NO: 18940 - DNA, 318 bp, Zea mays
  unsure (1)..(318): unsure at all n locations
ctcagctatgaagatctcatcccacatgtgctanntggcggtgccagagccttctctatgttattctatcaattaaacaagggtcgagttgagctctatcaaaatctaccaagtatagctggccctctaacactcccttatatgctatcgaatcatcacttcttctagagacagtgacacctacatcagtgaatagacagttgtagcccatttgacataattgagatacaganagcatagtgtaatataaagaatatacaagattaacattggagatagaatgggcaagagatatagcaattgtacccaatcctttga

SEQ ID NO: 18941 - DNA, 463 bp, Zea mays
  unsure (1)..(463): unsure at all n locations
agctntangtattagaagtgatcttcatcctattaaagttgaagaccaattttatttaccacctgcaccttactcaatgagtcctgatgagaggaaattattttgtcaagtacttaaaggtgtgaagtttcctgagggttatgcatctgatatacgtcataatgtacatgttaatgagagaaagataattgggcttaagagtcatgagagccatattattctacaacacttgttgccgcttgcattgaggaaaatattaccagaaatagttagtgctggagtgattcgtataagtaaatttttcaagaaactttcatcacctgtcattcgaataagtgatatggaaaagcttgaggctaatatagctgaaaccctgagctttcttgagaccgttttcgtgccttcattntttgatatcatggtacactcgatggtacatcttcgtacccaagcaaggatagct

SEQ ID NO: 18942 - DNA, 225 bp, Zea mays
  unsure (1)..(225): unsure at all n locations
gatcgatgctccgtgcccncgtagtccacccactctatctatgattccagatcttggagcaggctatgaaagacttcatgcgcttctacaacagcgtgaggttcgntgtacattcaagtgtacagttggttccgctcaagtgtacagttggttgcgcttctacagcagccncaagtaagtgtggattcttcctcacagcagcttggtagcattcncatcttctca

SEQ ID NO: 18943 - DNA, 452 bp, Zea mays
  unsure (1)..(452): unsure at all n locations
agcttctactggttatataatggttttgtctttatagattatacatgcagtgatgcaaactgcaaacaaccgttttaatcgaacagactcacatgtcacatggaatagtggtgacgagaggataaacttgacaggataggtgagctgtaatgtaacgggctactgtttgcctgtttcggcgtaagaccaggctttttttctacggttatttggtaggtaatcttgtccttcggtcccggtgacgccggctntgcttgtaggaaaaaaaagaaaaccaggttacgccccaatttctactagcacgctgcacaccggtgtggacaaggttggagtacagtangaatgaccggagtgagcgtccgccggcggcacggcgagcgacagcactagccgtgggtggtggacgtgacgcctcacgccttccatcaccattcaccaccactgacaccgca

SEQ ID NO: 18944 - DNA, 427 bp, Zea mays
  unsure (1)..(427): unsure at all n locations
gaagattctcatcccaacatgagcaagtctgtgatgccagagctagcctatattggtcttaataataagtaagtgtctagctcagcattggtatcattaaactcaactaaatatagctgaccttctaacactccctgaacagctactgaatcatcaccttctttaaagaccgtaacaccaacatcatgtaaaagacaattgtaacccatctttcataattgagaaacagaaagcaagttgtaatctaaagaatctacaagaaaacattgaaaatggaatggtcaagagatatagcaattttacccaaacctttgacaaaacttgatttcctccncgaatgtgattgtctttanggtcatcatttttcaatatgaggggacattctttctccctgcatgtggttgtgccccgtatcataatcacttga

SEQ ID NO: 18945 - DNA, 507 bp, Zea mays
  unsure (1)..(507): unsure at all n locations
ctcagcttatctgaagtganggacattntgagacacgatctctgattccgctgcaacctactcgaagagtcttctcacttcacagcgtactaagtcttcgagtagagtaagaaaattaagtctaaagtaataagttttattcgcctattcacccncccctctatgcgacatccagatcctgttcccgggtcaaagggaactntcaattggtatcggagctaggcctctccagtgtgggcttagccgtccggagatgacgatgtcgtcacaagaagtaactgtagaacttcttttaggcgatggctctaantacaagtctggtnctgctctattatagtgcttcatgagtgtgatcctgattgagacaggctttagagtagattttcctctaatatagtaaatcctccatgagactaaaatgtaacttaatatatgctcacatctagtgatcttatctaaggctattttcatatgagaggaaggactattgtgagctatattatgata

SEQ ID NO: 18946 - DNA, 448 bp, Zea mays
  unsure (1)..(448): unsure at all n locations
agctngtgagtagtacanatacaaaagagagaaggctacttccgcggatcaaccaaagcctatgctcctatgtgaagacataacanaacaaagggtattgctggggtctcagctatctgaagagcaagagaagactctactaagattcttattcaacaacaaagacgtctntgcttggtcagccaatgatctttgtggtgtcaacagagatgtcattgaacattcactcaatgtggattcatccttccggccaagaaaacaaaggcttccgaaaatgtctgaagaacaagctgaaggtgctcgaaacgaagtgaatagacttctcagtgctggtgttatcaaagaggtgaaatacccacaatggctagccaacactgttatggtgaagaacgccaatggtaaatggagaatgtgcattgattttacagatcttaacaaggcttgtcta

SEQ ID NO: 18947 - DNA, 454 bp, Zea mays
  unsure (1)..(454): unsure at all n locations
atctatcagatactgcttcagctcttcgaaggctttctgctgagctgatccccattgaataacttcggctgacttcagcacttcacagaatggtaaatttctctctgctgatctggatataaatcgattcaaagatgccagtcttcctgttagccgttgagcccctttctttgtgcttggcggctccatccgaaggatagcttcgatttatttggatagctcnatcccttntgtgaaaccaacaacaatgaattcccctctttactcgaaacacattttctgattcagctcagacagcttgctaatatagcgaatgtctctgaaatcacaatataattcttctcgtgctttacatgaatatcacatatgtacacgttatcctattagatgaagacctcctgcatctgtgagctctcacgtctgaccctcagctcgnatacaatgacactgggta

SEQ ID NO: 18948 - DNA, 469 bp, Zea mays
  unsure (1)..(469): unsure at all n locations
agcttctaagggagaacacgtgataggggtgactaacgtgcatttcgaaaaagatagaccttgtgcagcttgtcaagcaggtaaacaagtgggaggagcgcatcacagcaagaatgtgatgaccacttcaagacccctggagctgctacatatggacctcttcggacctgtcgcctatctgagcataggagggagtaagtatggtttagttattgttgatgatttttcccgcttcacttgggtgttctttttgcaggataagtctgaaacccaagggaccctcaagcgcttcctcaggagagctcaaaatgagtttgagctcaaggtgaagaagataaggagcgacaacgggtccgaattcaagaaaccttcagtggaggaatttcttgaggaggaaggaatcaagcacgagttcttcgctccctacacaccacagcanaatggtgtggtagagaggaagaacaggacc

SEQ ID NO: 18949 - DNA, 465 bp, Zea mays
  unsure (1)..(465): unsure at all n locations
agctntaatgctcttgacaataagaatacttcatcctagttttaacaaagatgcataaatgcacgaatgaaatgtttgacaggttaaattatgtatgaagcagggaaaaatgcatggacatgctttctcttccttttatacaagatatgtaaataaagtatagaaatggaagatttacgtacaagtttgaatcaaaggaagtagttntacccttttgtaccttcacatagagatgctctcttcattgtgcttgtccttagtcttagttgattaagaccaatacttaagacaatatatggaaatattttgcacaagagagagttctacaactagtgatccttttctaagtcattatttagcatatatcagaatggatcacaaattgcataaatgaatcatgaattctccttttaacttagtgcatatcaagatagatgtcgattgaaattaccaattgaaatcaaa

SEQ ID NO: 18950 - DNA, 356 bp, Zea mays
  unsure (1)..(356): unsure at all n locations
aatatcgaatatgcaattatgtactagtgatgccaccgttgaaccattaagaactacaaactcatcgcccttgatgccttattcttctgagttctgacanaccacgctcctcaactatctctacatccaaagtattgaatatatgcttaagagacaatctgaattcatgagaatgctaatagaccttcagggttaaagcatataaacctggttatatatatgaatagattggcatgctaagtgtagagaactcatctagtcaccacctctccctanggttgaggtgcncaagacacaccatagttttcttgctgacacatggtggagcacatcggtgcatagtatctattcttgat

SEQ ID NO: 18951 - DNA, 450 bp, Zea mays
  unsure (1)..(450): unsure at all n locations
agcttgacggtccctccacgtctgaagcacaaccggtcgcatttaatgcgacggaggagaagaaggaggagtctacaccaagtagacaaccaatcaactcctcaaagctcgacaacgaggaaatggtgctcgtcatcaagagcttccgccaaattctcaaacaaaggagcgggaaggactacaaaccccgctccaagaaagtgtgttacaaatgtggtaagcccggtcattntattgcaaaatgtcctatatcgagtgacagtgacaggggcgacgacaagaaggggagaagaaaggagaagaagaggtactacaagaagaagggtggtgatgcccatgtttgtcgcgagtgggattccgacgaaagctctagcgactcctccgacgacgaggacgccgccaacatcgccgtcaccaagggacttctcttccccaacgtcagccacaagt

SEQ ID NO: 18952 - DNA, 233 bp, Zea mays
  unsure (1)..(233): unsure at all n locations
tcatactacgagcaaatntaaatgtttcattttcaagttcatgctcggcgaatttagcatctaaatttgctatatgatcattntggttgttaattaaagccatgtgatcatgtatagcattaatatcaatgtctctacatctagtacaaatagaaatgtgctcaacggtagatatagatggtttgcaagatttaattctacaaccttagcattgcatatatcatttttacttc

SEQ ID NO: 18953 - DNA, 471 bp, Zea mays
agcttatcataagagaatagcggcaagagcccgtccatatgtaataatagaaggggagttatataagcatggagtctgttctccattactcaaatgtttatccagagctgaaggtatagagctaatgaaagaaatacatgcaggcctgtgtggatctcacattggatctatgcctttgttgggtaaagtttttcgtcaaggattttattggccgaaggcagcttccgatgcagcagaattagtccaaaagtgcgaaggttgtcaaaaatgtgcaagagaccaaaaacaaccttcgtctctaactcaattaatacagcccacttggccattgcaaaggtggggccttgatttgctaggcccacttacaccagcacaagggaatttaagatatgttgtggtggcagtagaatatttttctaagtggatcgaggcgaagcccttagccacaataacttccgtcactattcaaaa

SEQ ID NO: 18954 - DNA, 390 bp, Zea mays
  unsure (1)..(390): unsure at all n locations
gatgctgtaccgngaccgtgagtggtcatgtgattcaaccaagcctcaactccctactacatcatgtgatccaagaacaacacatttattaatgccaaanaagatcagactcagacatctcatggcaaanacaaactacttgcaccaagatgcangcagcaggctcttccggtgcaaaggcgatgtgtcatggaactgatacgccgagagattcangctagtaaatatgtanaagcacacgcgaattacattanaattcaatggcatggannttaaccggtccgagccttcgctcccaaactgaacggaagtaagcttncccacacagaagtcattaccaaatggaaacaacacatttgcaatcccttcaganacgcagtcccctcgtct

SEQ ID NO: 18955 - DNA, 454 bp, Zea mays
agcttcgggaaatacagtcttatcatccttgtcacaagaagggatctctttctttacgaagcatgaaaagaagggaaggtgtttttttcgccgaaggctcaaaaatggtatgtatgtaagtttcatgcatcgcaaagaaataaattacaataatttacatattcgattcaaagttacatacatcaaatattatagtcttgttacaatagaagcttgatgttcattctattgtctcatacatcgaccatttcaaaatatttttacaatgaggttattcttctctgagaacttttttcgcaactttgtttaaaagtttgttgacaacttcgtcaataatggaatctgccatatttataatgtccagcacttccttcatttctggatcagctaggggatcgtatggttccggcggcggagatagttaagctgaagtaggtaaaattaattagtctga

SEQ ID NO: 18956 - DNA, 330 bp, Zea mays
  unsure (1)..(330): unsure at all n locations
tattgggcaatgctatgatagttngagtaagaaagataagcatcaccctctatcactgttatgtgaagattcagaagtgtctggaacttattatcattgngacccttcacgccagtcttgtagtcaatacccangaggccagatacccaattnggttgaatcaagtatgagggcaaaaactatttttccaactgatgtaaataactgttcctacagctcacgcacttcaagtttggatcattatagatacatacacatcaatataaacgtctctaatgctgtactccaagaatgctgcccatgccagtagattctaatgatgactgcctg

SEQ ID NO: 18957 - DNA, 463 bp, Zea mays
agcttatagttgacaaagcctataataagaatgtttagactaagtcattccaggtcgaagatctaatctgaaagacaatcttgccattaaggagcagagtccaaaaatttggcaaatcgtccccaagttgtggaaggccttacagagtcacacatgtaatatctggtaatgcgtacatgctgcaaacattgaaaggtgagaagttatataaggcattaaatggttgttttctaaagcaataacatcctagtgtatggtaagatgttgagaagatcgatgttctcacatcgagttttattgattagaaagcttgtaccaattgcttttgattcgctaagctccactaaaaggcaggggcatgtgttgagaacaagattggcacctagatgtccgattggtccagtcttgtggctcggacggtccgaactacaaatgttccgcgtgatagcctggatgatccgcg

SEQ ID NO: 18958 - DNA, 416 bp, Zea mays
agcttgggaaaacttcatgtagcatatgtgctataaaccatcttacacacaagatatcctaaattagtgtgtatgaaggacgctaagcttgctaagacgccaatgggaacttactgatatctggacctcaacgcgcattatatcaaaaggtataccggtctatgataggacccttgcttttatctttgtgcatgtagaccaaatattatactttctgtttgcatatgtgctagattttaatctgaccccaaggaatgtcaccttgtgactgtgaagcgtattcttcgatatttagttcatatgcctcacatcacgttctggtatgttatggggtctacctttgacttcattggatactcagactctgattatgccggatacaagggtgataggaagagcacatcaaggacttgtca

SEQ ID NO: 18959 - DNA, 421 bp, Zea mays
agcttatgtggatgatgtggtgattaagatagagaattcagaaaatttcattgaagatttacagctggtcttcaacagtctacggcgatatcgatggaagcttaatccccaaaaatgtgtcttcggagtaccgataggaaagttgctcgggtttattgtcagccaccggggaattgaagcggggaattgagggcaatccggaaaagatcgaggctatcatgagaatggaagcaccacgatcacagaataaagtacaaagacttaccggatgcatggcagctctaagcagattcatatcaaggctgggagaaaaaggcataccgttctataagtggctcaagaaggtagacaaattccagtggactttataagcacaggaagctctatatgcgtttgagaaattcttgacaacaccaccagt

SEQ ID NO: 18960 - DNA, 372 bp, Zea mays
  unsure (1)..(372): unsure at all n locations
tcatagtcatgtaatcttctattacagtagattcttcaaattcaagatgactaggctctgccgggttgagaatgatgttatcctcttcgctttcgntatcactctcaccctcaaccatagtttgtccagcttcggcattcgaagcaccttcgtcagtaacttccnctggcacaactagacctgatcgcttcattacttctgatatgggcgctgtttcggcagcttcggccttgtcccctcacgaacaccctatcagtgatcgactctagccattgtgctacgcttttctaagacaagctatctangtgacgaacgtttgctcaaatgcaaccaagagcttngtatggtaaaaaatttgacacaacagtgaat

SEQ ID NO: 18961 - DNA, 447 bp, Zea mays
  unsure (1)..(447): unsure at all n locations
agctntgcagtaacatgaaaataaaatttcgtaccatcttcacgattgttcccagtagcatccacaggcgatggttccagaatgttcattgaattcttaactaaatcatccatggtggtgattttgagcatcctcatgttacggttcttatcctccactcgaggaacataaagatcctttgccagttcctcttgtccttaaggaaaacctaattgttagcgacagaatctgtaacgggcataactacagatggactcaccaggattcgacggtagacactctgctagtatntttgatgtatcaacttctcgcaactgctgacagcttatataagcgcacaaccgtttgcttgctttgaaccaagaggaatccagtattgtagtttgaatagccagatctagaaaaaataagaaaattntaacctccaaatactcaaatcaaacaaca

SEQ ID NO: 18962 - DNA, 427 bp, Zea mays
ggatcttagaatcactgcagatgccactcatccaaagaatttctagtatctttactcttgtacctcccgcctaatggttgagaataatattgctcatccgtgcggctcggttaagatatccgctacttgacctttatgattaatgtaagatacctccatatccccttctggtgcggatccctaagaaaatgacaccgaatggctatgtgcttagagcggctatgctcgatgggattgtcggccatcttaattgcactctcattatcacatagcaaagggactttggttaatctcttactcgtattctccagtatggtttgcctcatacacaagcatattgtgcgcaacaaatgacctgcgggaactgtactcagcttcgggggtggaaagagccgaccgaatattgcttctttgaagcccaagacac

SEQ ID NO: 18963 - DNA, 371 bp, Zea mays
  unsure (1)..(371): unsure at all n locations
tgatcacccgcattatgagtgtatgtatatgtcagcggcataaatgtaattgtgtccgggctgcgtgccacgcctataaatagatgaacagtacccctgtactaatcacgctggatngtaatctctctctcgcgtcatctttgcattcatatcttctcgcgaaccgaaggtacaattgtattataaatatcattaatggtgattctgatatgtggatatgaatatagatacattggacgatataatcatgatctntcattctttagtggtctttcacactcttattcatatggtatatttgattcatatgtacatactgaaatgatgaagctacgtgcttcatgaccttcgtctgaagatcatatatctga

SEQ ID NO: 18964 - DNA, 466 bp, Zea mays
  unsure (1)..(466): unsure at all n locations
agctngagcccgtagaacttgtcttccaagcgccgaacctcgtcgcagtaggcctccatcttccggtcgcggcagtgagagttcttcatgacttggtcaatgacaagctgtgagtcgccatgagcatcgaggcaccgaacccctagcttgatggcgatgcgcaacccgttaaccagagcctcgtactcggccatgttgtttgacgccgggaaatggaggcgcaacacatagcggaggtgcttcccgaggggtgagatgaagagcaggcccgcacctgctcctattntcatctgcgacccatcaaagtacatggtctagagttccggttggatcagagctgttggtagctgggtgtcgacccattcagccacgaagtctgccaagacttgngactngatggccttccgaggagcgaacgagaatatctcgctcatgatctccaccgnccactttgctatcctacctg

SEQ ID NO: 18965 - DNA, 172 bp, Zea mays
  unsure (1)..(172): unsure at all n locations
ctgaaaatccctcatttcaaagcttctgaatgtaatgcttatacccaacatgagtccctgagcaactggtcagctgtagatctactncaagcatgtngaggaatgccaggtaatctaacaacaaccaactcagccatcgacgatgatgacgcatgagcgaatctggaccatc

SEQ ID NO: 18966 - DNA, 468 bp, Zea mays
  unsure (1)..(468): unsure at all n locations
agctagtgaagattcttcatcctcacatgtgctaagcggtgatgccacagccagcccatgctagtcttagcaatcaagcatgcatctagaccagcctcctcttttgcaaaatcaactaagtaaagtttgccgtctaatacacccttaaaagctagtgaaccatcacttcttctaaagacagacacatctacatttgtgaatagacaattatatcccatattgcataattgactaacagataacaaattatatccaagagactcaactaaaaacacattagatatagagtgctcggatgaaatagcaattntacctaacccctttaccttgccttgattcccatcaccaaatattattgaatcttgggaatccttgtttttgacgtaggaagagaacatcctcttttcccccgtcatgtggtttgtgcatccgctgtcgataatccagcttgtacccccggatgcataa

SEQ ID NO: 18967 - DNA, 468 bp, Zea mays
  unsure (1)..(468): unsure at all n locations
agcttgtgaagattcttcatcccaacatgggctagtcggcggtgccagagccaacccatgttagtcttagcaattaagcaagtgtcgagttcagctctatcaaaatctaccaagtatagctgaccctctaacattcccttaaatgctattgaatcatcacttcttctaaagacagtgacacctacatcagtgaatagacagttgtagcccatttgacataattgggatacggaaagcaaattgtaatctaaagaatctacaagaaaaacattggaaatggtatggtcaggtgatatagcaattntacccaatcctttgaccaaaccttgatttccatccccgaatgtgatagctcgttggggatcttggtttttctcatatgaggagaacatcttcttctcccctgtcatgtggtttgtgcacccgctgtcgagtatccaacttgaacccncggatgcataaacctac

SEQ ID NO: 18968 - DNA, 465 bp, Zea mays
agcttgctgcatgcagccagatgatccaactaagataatggtttgacttcgttaggcaagcatctggttcacaacttacgcatggcccatggcattgtgacaggtggtccttaaccttaagtgtgccaactttctaagttacggtgaccttttttcgctgccacaagctagacaaaaaaaagtgcgggaacaccaggttttctaagccgaatgatccaaaaagactgctggattcttcttcgtgcttatttcaatattgaaaattttgcattgtgtattatcaccctgaaaaattattcccctttttcactgtcatcagaggtatttcacgaatggaccctgtggtttcacggaggaaccaaccgagccctatacctacctgcagctagatccttcgagaaaggtggaagtgaatctggagcaacaggaagtgaccttgaacagcatgcctagttacatctctgc

SEQ ID NO: 18969 - DNA, 465 bp, Zea mays
  unsure (1)..(465): unsure at all n locations
agctntgaagttttacaggatcacctattcacccccccccctctaggtgctctcaattggtatcagagccattctcttcaagaaagggactaaccgcccaaagagatggatcctaaggggaagggaatcgtgatcaacgacaaggagaaggagtccttcgtcaacgagcccaaagatgacaagcctaccgactccggctcgggccataaacggaaggaatggaagaagaaaaagacaacgcgcatcaaggagattgtctactacgacgacagcgacgaatcttcctcttcccaaaggacaacgactacgagcaaaggaaaccggttaattctaacttttcttttgactactctcgtattccgcaaagatcaaattcacaattgctntccattccacttggcaagcccncacactttgatggagaggactactgattntggagccacaaaatgcgtagtcacctat

SEQ ID NO: 18970 - DNA, 101 bp, Zea mays
gacttgtgaatatccctcggccacaagtcgggctcttgtccttgtcaccacaccatgctcatctttgcttgtgcggagaacccacttggttgctacaacat

SEQ ID NO: 18971 - DNA, 463 bp, Zea mays
agcttattattactgttagatgccaacaaaaataatccttatgacagaacccacccctaatcaagagttgtagtgctaagtggcccatttacacaacttttgttatttttgtctagagcatagcctttttaatttgaacctcaaaatcctagaacaggctatattgaccaagggcaacccactgtaattttacagaatttttggaaaaagttaaaccactgttataattcaaacctacactagaatccataaatagaagataaagataggaaaaatgaataatggaaatcagtgtcatcataaaaccctttgtaagagcatctccaacaatgcctcaaactagtgcctcaaattgaaatatatggctctacacaggagaaactactccaacagtgcctcatttcataaaattgtgtcagaaaattatagggcaccctctcaagtgactcaaatatactacacc

SEQ ID NO: 18972 - DNA, 466 bp, Zea mays
  unsure (1)..(466): unsure at all n locations
agctntcatccttcggtgctttacgcatgctcgttgtagcttcgacattcaatcttgttgcttacagacaatatctccatcttgaggaccttcggcagaaaaggagacccccaatagtaccccttcgcagtgctaggtcgttttttcataacaagctcgatccacaaaaaaacacgaaggcttctgaatgccgaagatccgaanaacaccttcactaagcttgttattaaaaaacgaataaatacttgtggcctttgccggtccaccgttcagtcagtatgcgtgttacggtggttcgccttcttcgcctgcagggctatataaacagaagagatggtgataagttaccacgacattcattgctattacatcattgtngctgtgaaaatttttactgaagacgaagctntctgttttctgtgcccttactgaagcctaagctagttgaatttagcttcgtcttaag

SEQ ID NO: 18973 - DNA, 125 bp, Zea mays
cgggcgtaatcattgacgcagatcattagggagcgcggacctcgattgaggcctgaatgatcagatatgacttggcgtaactgacgagatgtgcgacgatgcttattgacgtatgatcgtcgctc

SEQ ID NO: 18974 - DNA, 459 bp, Zea mays
  unsure (1)..(459): unsure at all n locations
agcttataaaagagacgtgcccttgccattcttgtctccaccaatctcaaaatgctngcacctctgtgacacagggagtaagcaaagagtgatctataaccaatggacacagggagtaccttgatggcgtgctgtgagtagtgcttgcagctctggcactgcagcttcagaacaatcttcttggtggtcttggcctgaaaggtattaatacaatcacatttgtcatatcccaaattattctctcaacaggcatttagaattcgcagatatttctagacattcatgctaccatcaaaacagacaaaggtataagtacaatcaaatagatatgttgcattaccttcttgtggaagacaggctnggtctgaccaccatgtcctgactgcttgcggtcataacgacgctntccctgngcagacatgctatccttgcccttcttatactgagtcaccttgtgga

SEQ ID NO: 18975 - DNA, 364 bp, Zea mays
acaaactgccatgttgacacaacggaatacatgatacacagtggaaccgaagtggactgactcacgtgtgtgggacttagatactgtcgcatctacgtacgttcgtctcgcgctgcttatgactactggcctgaagcgaaacatggcgtcatgctcgttagacacaaactaagaagaagcgtcacaacgcgctgcacggttcaatgccccatgctgatgatggagaaagataaacacaccagcaatctggatatcttctgacgacccgctgttgccttgcactacacgacggacgtcgacgttctgctcgtgctggaatactgttgcattatctgggatgtcatactgtgcagacatcctctta

SEQ ID NO: 18976 - DNA, 463 bp, Zea mays
  unsure (1)..(463): unsure at all n locations
agcttgttctcttttgttgggtagaccttgggaatatgatactgatgcacgtcaccatggtaggagtaatacatacacttttagccataaagataaaaacattactttgctacctttgactcttgctgaaattgtataagctgataaagatagagctgcaaatacccataaggaaccaactaatgagacagaaattcagcaacaaattaaattgaaagctcctgttatgcttgctactaaatctgatcttcttgaaactcatgctactgatgtttgttgctaagcaccacatctcctctggttatcaaacgtgtgatgcgcgattgaccttgccatgaaggctaatccttgcctgcgaatcaaagacacaagncagaaaaagaaaaacacaatctagaatattgcggatgaattgattaagctcacaagtggggtctcacaaaccgatctacggtgactggtc

SEQ ID NO: 18977 - DNA, 315 bp, Zea mays
  unsure (1)..(315): unsure at all n locations
cttgacagcggttatcatgtactcacaattatttcttgtagcattctggctgtaatgagttgtaactaaaagttttnttgtgctgcaatccaagggcaattctggtcgaacggtatcagttcttaatattccagagattgttgctgataaaattgatcattcaagcatcgctaacggtggtgcatntagctacttccatgctttgtgtcgccatcctattccttggccctcttgtggtggaagtgctgcatcanaggatctgaatanatggcttgatgatatgagtggcgtatatgaatcttctcagacagaatt

SEQ ID NO: 18978 - DNA, 447 bp, Zea mays
agcttgttaactcgccagccctgatatcccatacatatgcatctctaccagcagtactggcaacagtatttccacgcagagcaagatcccaaacccagtctgcatgcatgaacttttgcacacactccatctggtctctgtcccaaacacgaacagtcatgtcccaagaaccactataaatcctcagtgaatccagggcaagacaagtcacaggaccttcatgaccccagaggcgaaactccgcattctggtcggtaccacttccagagatgtgaaataattgaccattgccttcaacggccctccaacactgaatataggcattagttcctccactcactaaaagcctcgagtcagctgcaatcgcccggatggtgccaccaagtgcacgggatgtatcaatcaataacccttcctccatcttccacatcctaaccacagaatcgc

SEQ ID NO: 18979 - DNA, 205 bp, Zea mays
  unsure (1)..(205): unsure at all n locations
acgtgcattggataaatctagtatagcaaatcttccttcacacgacggtgaattatgagataatacacgtaatacatcggntaaaggttgtcacgaccagtcacacaccccttatgggatgccgatggacacgtaccctgagcaaacgcanatcggcagtaaaccagccgatctacacatgtccggaaccgtcgctcgcgagcgc

SEQ ID NO: 18980 - DNA, 462 bp, Zea mays
  unsure (1)..(462): unsure at all n locations
agctntagctgataagtagntgtgataagaatcatcattgacataagggtataagctcagattgttcttcagacataaatgaaaccattgtcataaagacaacaactaagaattgtcataaatagagttcatattattgtcagaagggcaataattaaataaaattaacaaaagttcacatcattggcataagggcaacaattcagaattaacggaaatagagtacaaatcattgtcataagggcaacaattcagaattaacagaaatagagtacaaatcattgtcataagggcaagaattaaaatgagctaaagttcacattattggtataagggcataatctcagaattaaggtaaattaagtccacaataagaatcatcaaattaacatcacaaccaatcatgggtgatcccatgtgttcatcacacaagacataagttcctagcagttacataacaca

SEQ ID NO: 18981 - DNA, 475 bp, Zea mays
  unsure (1)..(475): unsure at all n locations
gctcggaaatacaaccgacttannagtagaaatgacctttagtccatatatgtttttgtcactgntgtaatcccttataagggggcataattgtaattccccacaggctgtgtcctgtgcctataaatagtgaacaatattcctttactgttcangcatntcctgtattgcaatcgcatcattcgggaatcaatctttgccaaggcagaggtataaagattaaatatactgagtaaatataatatggttcgtttatgattcatttacctttgatactctatnnatttatgtatcttatacaantctataaaanntcaatacgaagaattaaccttcgtaatcgtattgtcatcaacccttcgtcaagatccattaatcctcaagggaataatgcttcgttgggcgaaggacatttaacatntaacatttatgttgccttgtcttaattcatagcattgagacaagtcccaacact

SEQ ID NO: 18982 - DNA, 421 bp, Zea mays
  unsure (1)..(421): unsure at all n locations
agctttgcatcaaaatccttcttctcttggtcgaagctttttgatttcatggagaggtcactggttaatctagaaatctcggcttgggcttctgccaacgaaccctccattggttgaagcaccaaatccttcttctccagagcagcttcgtgatctttaatttttccctctaaaccctcaattataatctcgtttctcttgtcctcaaggtccttgtgcatccctcaggttttacttatcagtagactctgaaaaaataactttcatcagaagtaacattcatctcgaaaacaataaaaaagctaaggtaagaactntaccttaaaattagaataaaacaagctgccagcgatatgttgtcgccggtatctgctgaggttggcctcaagcttcngaaagccaacactcttcgatagagtgc

SEQ ID NO: 18983 - DNA, 437 bp, Zea mays
  unsure (1)..(437): unsure at all n locations
agtcgttctaanggaacgcagagtaagtttggcgaagtcacaaaaagccgctccanagggagtgcagtgtaagttntctgctccaaagtcgttccaaagggaatgcagagcttacagcgaanagtcaacgctgataccgcctaagtaaaaggcgaagcgcgaaaagtcaacgcgaataccgctgaaagtaaaaggcgaagaatgctctaagggaggcttatagcgaanaatanacgctgattccgctgaagtaaaaggcgaagaaagctctaaggggaggctataaagatatgtgtntattgcgagatgtgtgtgatcttcggaatnacaccactcacataacataacatcatacatcatttccatagcataagcatatcatcatggtgatacggacaagaggggacacatatcatctgagaagatgttttgaaaaa

SEQ ID NO: 18984 - DNA, 469 bp, Zea mays
  unsure (1)..(469): unsure at all n locations
agctggtggaggttcttcatcctcacatgtgctaagcggcgatgccacagccagcccatgcaagtcttagccattaagcatgcatctagaccggcctcttcttttgcaaaatcaactaggtaaagcttgccggctagtacacccttaaaagctagtgaaccatcacatcttctaaagacagacacatctatatttgtaaacaaacagttatatcccatattgcataattgactaacagatagcaaattatatccaagagactctactaaaaacacattagagatagagtgctcatttgagattgcaattttacctaacccttttaccttgccttgattcccatcaccgaatattattgaatcttgggaatctttgtttttgacgtaggaggtgaacatctttntctcccncgtcatatggtttgtgcatccactgtcaataatccagctggaacccccggatgcataaa

SEQ ID NO: 18985 - DNA, 289 bp, Zea mays
  unsure (1)..(289): unsure at all n locations
tgaagacagtgagtaccctaaccatgtctataggctctctaaggcgctntatgggctcaagcaagccccaagagcatggtatgaatgcctaagagatttccttattgctaatggcttcaaagtcggaaaagccgatcctactctattcactataactcttgacaatgatttngttngtatgccaaattatgttgatgatattatatttgggtctactaacgaatctacatgtgaagaaattagtaggatcatgacacagaaattcgagatgtcaatgatggnggggggg

SEQ ID NO: 18986 - DNA, 436 bp, Zea mays
gcaagcttgtgaagaatatgcatcccaacatgggctagtcggtggtgccatatccaacccatgttagtctgaacactttatcgagtgtcgagctcagctctatcaaaatctacctagtctagctgaccctataacattcccttaaatgctatcgaatcatcacttctgctagagacagagacacctacatcagtgaatatacagcccgtacccattctacataattgggatacggaaagcaaatcggtccttaaataatctacaagagaaacatcggaaatggtatggtcaggtgatatagcatttctacccactccttcgactcgagaccttgataccataccgcgatgtgagagctagatccggatcttggtcctcttatatgacgagaacatctgattctcccatgtcatgtggttcgcgcaccaggtgtcca

SEQ ID NO: 18987 - DNA, 469 bp, Zea mays
  unsure (1)..(469): unsure at all n locations
agcttcactacacaattntaggacatctgcttaattcatgaatatcatcgtcacacacactgactcgatttgaattaaccacacatgtctatcacatgaatgtagcatttcaacaaatatcctataacaaactaacttcatcacacatctttcattacaaacctacttgacttatttgaagtgtctactcgaaattttgagcacaatcatacactatatgcgaaaaataatttaacgaacgcataatacgcatcgtcatgacttgacctataaatatagagaaagcgatgactactctggcatgtcaccacctctctatttaagccaagacaatttctaccatcgactaagagtcgtaagcattaaataccttactactttatatgcacaaataaacctcaacttaacccaagtgacanccgatggaattttactaaactcatcatgcgcataacctcgtctcgcatac

SEQ ID NO: 18988 - DNA, 510 bp, Zea mays
  unsure (1)..(510): unsure at all n locations
tctacttcgatagcagaggatgtcgcagaagcctttctttttcataattgatntttgcttcggagtcaaagcctttcttttcttcggagcaactagtttcgcctcagactcttgttntttcttcttcggttgatcttcatcatccttattcagagcactagctactctcttccttttttggccttcggcacccttgtccagccgctcgtagtcaggatattcanaacctatatcnatcatcactcngtttagccttcngttcngacgggtgccgaangccgcagtcatcaattggtcttcttttttagaataatttccaagtatttcgttgcacattacttcggattgatccagccattcttggcaggcactntgaatgtctctgaattgtatgtangggtagccgatagtctcttccttcttttctcagcttcgatgccactcttcataatgaacacttgagcaaaatcctcctaatcctatgcgattgcttcatacctaatcagcacc

SEQ ID NO: 18989 - DNA, 455 bp, Zea mays
  unsure (1)..(455): unsure at all n locations
agcttctaagggggaacacattntaggattaaccaatgtttattttgagaaagacaggatttgtcgcgcatgccaagcctggaagcaagttggcactcatcatccacactagaacatcatgacgaccgataggccactggagctcctacacatggatctattcggcccggatgcttacataagcatcggcgggagtaagtactggctagatattgcggatgattattctcgcttcacttgggtattctatttacaggaaaaatctcacactcgagagaccttagggggattcttgagacgggctcaaaatgagttcggcttaacgatcaagacaataagaagcgacaatgggacggagttcaagaactctcaaattgaaggcttccttgatgaggatggaatcaagcatgagttctcttctccctcacacctcaacaaaatggtgtagtggagag

SEQ ID NO: 18990 - DNA, 201 bp, Zea mays
gcaagtggcgagttcagctgtatcataatctaccaagtatagctgaccctctaacacttccttaaatgctattgaatcatcacttcttctaaagacagagacacctacattagtgaatagacagctgtagcccatttgacataattgagatacagaaagcaaggcgtgatctaatgaatcaacatgaataacattggaaat

SEQ ID NO: 18991 - DNA, 460 bp, Zea mays
  unsure (1)..(460): unsure at all n locations
agctnntaaccccccccccacgcgagaccttttctcgtttctttctaaccataatgaatgtgacatcgaatgtcatacttgatgcatatccactttatttgttcccttgtatgatgtactgtttgcttcccaatttgaatggatgtatgtatgtatgcttgcaatcgcatagagaacgatccgtgtgaagagcccgaggaactcgcaggagaagcccctgagcagcagtcggttggtggaggcaagtgtcccttgacctatctatgtcctattcattatttaattcacctcccgctgtatacatttatgcctaaggattgactagttttgttatccctgtccttgcttacctatttgngttggattattattgtttagctntatgctattgctcaaccataatcaatgaacatgatgagattatctatgatacgctgntntccctcttcttattatgatg

SEQ ID NO: 18992 - DNA, 147 bp, Zea mays
  unsure (1)..(147): unsure at all n locations
agcacatcacagcaagaatgtgatgaccacttcaagacctctggagctgctgcatatggacctcttcggacccgtcgcctatctgagcatatgagggagtaagtatggtctagntattggtgatgactnttcccgcttcacttgggt

SEQ ID NO: 18993 - DNA, 466 bp, Zea mays
  unsure (1)..(466): unsure at all n locations
agcttatgaagattcttcatcccaacaagggctagtcagcggtgccagagctaacccatgttagtcttagcaattaggcaagtgtcgagttcagctctattaaaatcaactaagtgtagctgaccctctaacactcccttaaatgctactgaatcatcacttcttctaaagacaataacacttatatctataaaagacagttgtagcccattttacataattgagaaacggaaagcaaattgtaatctaaagaatctacaagaaaaacagtggaaatagagtggtcaggtgatatagcaattttacccaatcctttgaccaaaccttgatttccatccncgaatgtgatggctcgttggggatcatggtttntctcataggaggagaacatccttttctcccctgtcatgtggttggtgcacccgctaccgatgatccaacttgagcccccggatgcataaaccta

SEQ ID NO: 18994 - DNA, 426 bp, Zea mays
  unsure (1)..(426): unsure at all n locations
ctcactaataaagataaatggtaagggcattgacatacttttttataggggctgctcaagtattttgtggattacagaatatagctttgtgccaaacacaaagctaaggggtattagtatgattctaagttaagccaaaagcactttactacttgtattgaaaatgtaacacaacttatttttttaagttaatacaaacttttatccaaggggggtgttacctgngtatttgtaggttttctagttcttgttattataatagatcactatttatcaacaggatgaaatttcagaacactgatatcctacaaataggtgcttagtcatattcatacttctattttaactactatataataggaaactctatgatgacaaagtactttaacagcaagaattcacttaaatttacctcaaaacacattt

SEQ ID NO: 18995 - DNA, 445 bp, Zea mays
  unsure (1)..(445): unsure at all n locations
agcttgaatagggagatattagcgcaagattattttgtttatgaggcaagctcttgcgaacacaaacaatcacagagaggaacaacacaagagacacgcgatattattccgtggttaggccaagtaacacttgcctactttcatgttgtgacgtcccaatggacgagggttgcactgaacccctttcaagcgatccaatgatcaacttgaataccacgactttcttccatataggctttctcccgtttgcgaggaatctccacacgttggagcctctcgcccttacaataaagatctcaaggaatgcacaagagtaaggttggagagcaacacacactaatctgcagcacacacacgcacacaagccaagactngagctcgaaacgtagcacatagagttcacaactagaacggagctcanatcactaacacaatcgatcgaatg

SEQ ID NO: 18996 - DNA, 262 bp, Zea mays
gactatggtggtcggtatcagcagacgagagcagggaacaccacaccggcgcttatacgggccgcgtgcacgacgcgcgcgccgggtcccacgcggcttaggcgccccgagcactccgcgacactgagctgtttgctgtaacgaataacaccacggcgattgcaagcactggacgcctcttgtctatctactttgtggagtcagtcaatatgcggaggaataaaggaaattgtggcactagtcaccaacaagggcagcggta

SEQ ID NO: 18997 - DNA, 466 bp, Zea mays
  unsure (1)..(466): unsure at all n locations
agcttgagtcaattcttctacagagaattattgatgcccaaagaaccgacaagggtatgaaacatattcatgagaaaatggaagtcggcaaagcaaattgcttcagaaaagatgatcaaggaaccatatggttcaatgattgcatagttgtgcctaaagatgctgagatccgccaataaatcttggattaagctcatcttagtcgatattccattcatcccagaagtactaagatgtatcaagacttaaagaaacactattggtggacgaaaatgaagattgagattgcacgctatgtggcaagatgtgacatctgcagatgtgtcaaagcaatacatatgaagaccgctaaaccattacaatccttacacatcccanattggaaatgggaggatattagtatggacttcattgtgggattgcccaagacagtcaaaggatttgattctatctgggttatagttga

SEQ ID NO: 18998 - DNA, 402 bp, Zea mays
  unsure (1)..(402): unsure at all n locations
agcttcgggaccagacgcgggagttntctcangcaaactctgttctatagcctcttcctctgctgctttctcttcgaattccgaaggttgtttatcaacaggctctgaaggcttagcttcggcactagcctggcttgctgcaacttcaacttcggccgattttgtttcagcttcgctttgtaatttcgaagcctcggcgattttccttgaaggagtagaccttaaagctgtcactgtttctagcacatctagtacatttaccatcctttttcttttcggggttactgcaagattttcttgtgcttttggcactgttacttccgccgaagggcttanaatttctagctttnttgcttcttcgatttttggctcttcagttttacctttattagcctgcgactc

SEQ ID NO: 18999 - DNA, 201 bp, Zea mays
  unsure (1)..(201): unsure at all n locations
tcgcatgccacgcanggaagcaaggtggagtccatcatccacacaagaacatcatgactaccgaaaggccgcttgagctactccacatggatctattcggcccgattgcttacataagcatcggcgggagtaagtattgtcttgtaatagtggatgattattctcgcttcacttgggtattctttttgcaggagaaatctc

SEQ ID NO: 19000 - DNA, 436 bp, Zea mays
  unsure (1)..(436): unsure at all n locations
agcttgggctaccaccatgcaaccggagcgcggagaagatcctgcgtgaacatccatggaaatacaagagggagaccccgctcggacaccctcgggggctaggctatagtttgcgctacccacttgagccggatcatctccggcagtaccctcgagggctgggcagtggcttgcgtttcccacccgagccgagtcatcaccggcaacatcctcgggggctaggcaagtgtcaacaccatccttgaggaccaagttctccgcagtagccgcctctaaggctgagggtccctcaattacttccatgggagcaagacgatccaagtcagtttcctgaccctcgagaccgcgctctaaggtcgacgaggcgcgggacgctgcccgggatgatcccaacccggcgtcgagcacatcagcacanaccttcatcacaccatca

SEQ ID NO: 19001 - DNA, 528 bp, Zea mays
  unsure (1)..(528): unsure at all n locations
tctattacatttcagcacatgcattcctcaatgaatgttgatcaaacctccaagtgctatgagctctctctncggntgcttgcaaagtaccttgccttgngtctttatcatatctgattggggtgcgctngtagacattacaatgtttatttaatgaagatgtaccatgctgattggaatcagccttaatgatacgctgataatatttgcacttagcagactntagcctaccctttgcatatttgatcttaatgaaatgatcccacatacttgaccttggaccatgtnctttcttgcctcttttctcagttcattgcaaggctacangataggcatccctcagttcactagatttacctgtattgttgtgactgacaactgtatntcatagtgcttgtcanatgagtacagtcccatagatctctttcaattcatgttactatatcatcagatanggatctacanaacctcnacatataacagaatgctactactactaagtactgactatagacacatataacaaat

SEQ ID NO: 19002 - DNA, 415 bp, Zea mays
  unsure (1)..(415): unsure at all n locations
agcttaacagatgctccgaaagacttttctgcatatgattctagagaaatttttgtaatataattgtaaagaaacttatgtaaatatgtgcataccttgtaatatatcttttcccctttatccatgtacaatgtgctttgctgtggacgaaattttatttttgagccgaaggcgaaaaacaccttcccttcttttcgtacacaacgaagcatgaaaatttcttctttctccgaagctttatccttatagccgaagcatctgccttttctgtatgatatgatgataatgatcctatgtatgtctaaatgaatgtttatgaatgcaaatgtcatgatgtaatgtatcgtgcaaatgaatatccgaatatatatattcaaaaccataatcatagccttcattcccttangaatgactc

SEQ ID NO: 19003 - DNA, 227 bp, Zea mays
  unsure (1)..(227): unsure at all n locations
agctagccgaagcactggcttgcccagatgatggctgtagtgggctggccacgttggccgaagctctggcggcaatggcgggcggaatagagctcgccggagctaatggaaagtggctgaccggtgagcgtgagtgcggggcgaagtgtgcgcgcctgngaaggctntatatgcgcggcgcggtgcacgggtggtcgtggaccggcgagtgcgcgctggcgtgcact

SEQ ID NO: 19004 - DNA, 424 bp, Zea mays
tttgctgctgactccctcgatcatcagtttgagcagagttatgaattgacctaacgtgcctcgggtgaaatcttcctccgaagcccctggtcattttagagaacctgaatgcttcctcccttctttggcggaagtcattgtcagctcgaatgtattcgtccatcttttggagcagcttctccaacgtttgtggtggcttcctggcaaagtactgcgctgaaggtcccggccgaagccccttaatcatggcctcaatgacaatttcattgggcactgttggcgcttgtgccctcagacgtagaaaccttcggacgtacgcctggaggtattcttcgtggtcctgggtacactgaaataaagcttgagcagtgactggcttcgtctgaaaccctcggaagctagttatcaacatattcttcaactt

SEQ ID NO: 19005 - DNA, 374 bp, Zea mays
  unsure (1)..(374): unsure at all n locations
agcttcgctctacagatctcgaaatagacctgttcagggaagcaagtcttactgctagcctctaagctccttttcttgactntgatggctccatctaaagtacggctccaagacatcccaganattnntcctttttactccaaacacacactnttcanaggattaatttaagcccgcccttcanaagttagtaaagggttcatggacgtctgagatgtggtntatggcttcatgcttctcatngatgatatcgcaaacgtaagtaagacattcctatcaagctaagaactcaacaccttgggtntcattctactgaagcttctgctagcattcttgagcccctcatgcatncgaagctaacaataagtaccact

SEQ ID NO: 19006 - DNA, 468 bp, Zea mays
  unsure (1)..(468): unsure at all n locations
gcttgatatggaaagtgaagacgaagatgctgaatatcggccctggtgaccaagtcacaccatctttggaaaatcatccattaagcagagtcaaattgatgctatgaaagagagatatttccgagatatttccattgtgagaactagaggggatagtgccacccctgctcccgaagaatatgaagtggttgtttacaggagcttcatgaaggcacggcttcagttcccgttaagcaaattcctggttgaagtgctgaagaccttcgaaattttccttcattagattacccctgaagacattatcangatgggggtttttgtttgggatgtgagaagataagggctagagccaagcgcanaatgcttctgcaatatccatgagcttctatatgagacanagactactggcaaggagcagtatcacaacaatttcgtttgctatggcttcgntcctcattctgatgaagg

SEQ ID NO: 19007 - DNA, 205 bp, Zea mays
  unsure (1)..(205): unsure at all n locations
taatcgctttccgtctcgctcatgcttcgtnctgaccatattcttgtatactcatgacccgattccgaagatacctgtccacatatttcacttggaaaacattgntaaatcatgnttttgaggaccttcggaagccgaaggcccncaacagtagcccctcgcaatattaattngctagaatgataaattcatattgcgacgtgga

SEQ ID NO: 19008 - DNA, 458 bp, Zea mays
  unsure (1)..(458): unsure at all n locations
ctgcacgtcgatactacgcagatctcggatgttanggcacaaagagaatgctccaacagcaaacattagtagctcatccgttatgttcctgggcccacgtgtctgggctcaatacccttgtgcatgccccccttaactataaaaggggaggcatgcaatgttacaaggcaagctcaatctttaggcttaaacccaagtcattcaagacaactcaagctctcaagcaatataacacacagtggagtagggtattacgctccggcggcccgaaccactctaaactcttgcgtgttcttgtgttcattccttcatctcgcaacaagcaaaacgcttaagcccctcctcatcttaagatttagggcgggtgcactccgccacccggccggagatttcctctccgacaatctcttaccgggaaccgctcctatttctaaaaggccatatangatgtccgtgga

SEQ ID NO: 19009 - DNA, 207 bp, Zea mays
  unsure (1)..(207): unsure at all n locations
acgtagttgactggcttctggatgggtcggacccctacgggtggtcccgagccctcaagctcttgaccttccattaccatcgtggtggtcggaccaccaccttctcctatgggaactttttgactcccctanggatgttgtgtcgtcctttcgacgaccagcaccatgctcaccgnctctgcaaccactgcaatgtataagtacaac

SEQ ID NO: 19010 - DNA, 452 bp, Zea mays
  unsure (1)..(452): unsure at all n locations
gcttgagtcagtcatcttacaaaggatgattgacgcacaaaagaatgatgaaggcatgaaacatattcgtgaaaagattgaagctggcaaagcccattgcttccgaaaagacgatcaaggggttgtatggttcaataaccgcatagttgtgccaaagaatgaagagggtccccagcaaattcttgatgaagcacatcttagtcgctattctattcatcccggaagcactaagatgtatcaagatctgaaacaacattattggtggacaaaaatgaagattgaaattgcacgttatgtggctagatgtgacacttgcaagcgtgtcaaggccatacacctaaaaagtgccggtccattacaatntctaccaataccaatatggaaatgggaagatatcagtatggactttattgtggaattgccaanactgcaaaaggtatgactctatctgg

SEQ ID NO: 19011 - DNA, 467 bp, Zea mays
  unsure (1)..(467): unsure at all n locations
cctggcagagagaagagtaccatgtctgtgccacacttctgactgccatgacgaaggactntgccatgacgaaggactntgccatgactgcagtattgcccccatacaaagatatagttgcttcgtaactcatcananactactttgggtctgagtgctcgtcatacatgggaagctaaggtggcttgtatgatggnggccatggngtggctgtagttctggtgatagaggagaagcatcatcaaaagccaaagttccatgatggaaatcgtcataccagtcatcatcatttgtaagaaatatcttgacgaagctctctttgtggaggtcttcggtccttgtcatcttgagtgagatgacgtatntcctcagcagcttcatctatcttcttctgtagttcagagagacgaagcatcttctctctctcnctttaactngctgtggatagctcaagatcccttatctct

SEQ ID NO: 19012 - DNA, 339 bp, Zea mays
  unsure (1)..(339): unsure at all n locations
agctttagctttgaagcttccgatttgaaaacagttntttagtgtttccgaagatgtccgaggataagaagactgttgctgagacgaagctgagcctctacgaagagaanaacttggggttttttatagcgatgtcgaagaccaacacggaaaagattaccaaggagattctggaaggtttgtccgaagatactggtgacagcgacagctatgatgtggacagtggtggcgaggactccgaagatcgtccatggcgaccaagtcactcagtttacggtaaatcaactatcatagagaatcatcttgtcaacatgagagggaggtatttccgggatttgt

SEQ ID NO: 19013 - DNA, 231 bp, Zea mays
  unsure (1)..(231): unsure at all n locations
ctcagctttacctacatatgcagtttgcactgctgatgcgatgatgtatgtacaagccgccgtcancaccgtgtcatataacngataaaccagaaggcgattttttctcaggtcgaatcctcggatcccanagcacagagagcaccacaactttaaccgtccgtngctcagaaagcttagagcttttacctgtctacctacggcaggaccagcactctcgtctggtacgca

SEQ ID NO: 19014 - DNA, 444 bp, Zea mays
  unsure (1)..(444): unsure at all n locations
agcttctaaagggggaacacattntaggattaaccaatgttcattttgagaaagacaggatttgtagcgcatgccaagccgggaagcaagttggcactcatcatccacacaagaacatcatgacgaccgataggccactggagctcctacacatggatctattcggcccgattgcttacataagcatcggcgggagtaagtactgtctagttattgtggatgattattctcgcttcacttgggtattctttttacaggaaaaatctcaaactcaagagaccttaaagggattcttgagacgggctcaaaatgagttcggcttaaggatcaagataataagaagcgacaatgggacggagttcaagaactctcacattgaaggctctcttgaggaggagggaatcaagcatgagttctcttctccctacacacctcaacaaaatg

SEQ ID NO: 19015 - DNA, 195 bp, Zea mays
  unsure (1)..(195): unsure at all n locations
cttagcaattaagcaagtgtcgagttcagctctatcanaatctaccaagtatagctgaccctctaacactcccttaaatgctattgaatcatcacttcttctanagacagtgacacctacatcagtgaatatgacagtgtagcccatntgacataattgagaaacagaaagcacgttgtaatctaaagaatcaac

SEQ ID NO: 19016 - DNA, 452 bp, Zea mays
  unsure (1)..(452): unsure at all n locations
agctntaccctgtagtctggactattaagtggttacggtaggtgtgccttatgaagtttgaccatctccagcatctacgtaatgaggactctagggagaagcctcgtagtgagaccctagccattcacctcggaagtgaatacgggtctggctaacccgggctagaagggaatcgcgactcatgggtaaagatgcgccacctctgcagagtgtaaaactgatatatcagccgtgctcacggttatgagcagcctggactcctcacatgataattgaacttgaagatggaaataaatctagatacgatgatctgccaatggtttgcttaagtggtttcacttaagtgtttntgaaatactcttgtacctttgcttaatgggaatacttgggatccacacttattagtaagatatgtgttgttaataaaatgttgaccaactaanatgcttact

SEQ ID NO: 19017 - DNA, 283 bp, Zea mays
  unsure (1)..(283): unsure at all n locations
ctcanatgctataagttgagaacaaagcaacaccaaagacaagntatntgttaatgtccttcgtccttcgaagcattatttgcccaaggatataatgatcttcagacgaaggtcatgaaggacataccttcatcatctcaacatacttatacgtataaacattaacaatgaatgaaacatgtaaagcgtaagaaacagtttgaacaataacattatcacatatatttcttaacatattattgcaaaataacataagaacaatattgannatacattggtacct

SEQ ID NO: 19018 - DNA, 414 bp, Zea mays
  unsure (1)..(414): unsure at all n locations
agcttgccatcagatacacctttaaatgctaatgaaccattgactcttctaaacatagttacatcaacatttgtaaataaacaattatattccatatgacacaactggctgataaatagcaaattataaccaagcgattctaccaaaaagacattagaaatagagtgaccaatagtaatcgctattttacctatcccctttagcttgctttggttctcgtctccaaaggtgatcatgtcatgggaatccttattcttgacatangaggtgaatatcttattctctcctgtcatgtggtttgtgcatccgntatcaatgatccaacttgagccttcgaatgcataaacctacaaggattntatgcttggngtttaagtacccaacttgtgntgggtcctgtcatgttaagtacat

SEQ ID NO: 19019 - DNA, 308 bp, Zea mays
  unsure (1)..(308): unsure at all n locations
gcaagtgtcgagttgagccttgctatcattaatatcaactaaatagagctgaccatctaacactcccttaaatgctattgaatcatcacttcttctaaagatagtaacacacatatagttaagagacagttgtagcccatgttacataattgagagacacanagcagattgtagtctaaagaatctataagaaanacattagaaatggaatggttagggatatagcaattttacccanaccttataccaaaccttgatttcaacccctaatgtgatagctctntggggaatcttcattttctcatatg

SEQ ID NO: 19020 - DNA, 453 bp, Zea mays
  unsure (1)..(453): unsure at all n locations
agcttctaaagggagagcacattttaggactaaccaatgttctatttgagaaagacaggatttgtagcgcatgccaagcaggaaagcaagttggtgcacatcatccacacaagaacattatgacgaccgacaggccactggagctcctacacatggacctattcggcccgattgcttacataagcatcgctggagtaagtattgtcttgtaatagtggatgattattctcgcttcacttgggtgttctttntgcaggaaaaatctcaaacccaagaaaccttaaagggattcttgagacgagctcaaaatgagttcggcttaaggatcaagaaaattagaagcgacaacgggacagagttcaagaactctcanattgaaggcttccttgaggaggagggcatcaagcatgagttctcttctccctacacgccacaacanaatggtgtagtgga

SEQ ID NO: 19021 - DNA, 450 bp, Zea mays
  unsure (1)..(450): unsure at all n locations
ccctgagtgcacaagtactcagcaagacttacctgactgaagagaagactctcaagggtatgctggcttttgggaatcaaggtatagctcatcaaagttcaatgactcatgttgcagaaaagcttactagaagtgggtgcttaagccaagctgtatttcacaagttacgttattacctgaatcttctagcctgaatctagcatctttctaatctagatcactcacttgacctacactangnatgctttanaatccanatgttgttcgcttgtatcacgatgaacggcacgatcagcttatatccgaaagaacggtgatcgaatcggtataccatcagggattcaacacanacaatgtagacttaacctgcttgtaccatccacgatctcataatgaatgtcgcctactggaccatacctacatcagctctgcagaggtactgactccaca

SEQ ID NO: 19022 - DNA, 454 bp, Zea mays
agcttgcatgacaaaaacgtgaatgccatatatctgactcatcagaaaaatgaacagaattcaccagtttattacacacatcatgcagtgataagcggaacaagcctccgcagtcatatcctttaccaacaaaagtaccatgtttcgacacaacacatttattagactcaagaacaactttgtgtccatctcgacataacatagaagcgctaacgagattcttcttgatagagggcacatgctgcacgctcttcaatggcaccgtctttcccggaagaaacttcagaatgaccgtaccaacaacaagaacatgagcacgcgacccatttctcatcaacaaggcgccagacctccctacctgataggaagtgaacatagaggcatcagcacacacatgaatgtttgcaccactgtcatccacactcagtgaataccgactgaagaacaatggtaa

SEQ ID NO: 19023 - DNA, 386 bp, Zea mays
  unsure (1)..(386): unsure at all n locations
ccttntgacttatctatctgaatgcagacaatgatacttataacactctgagatatactacgaaacaatcattatattgatgnttcgaggatctctgtaaataataaggctcccaacagctgccaaacttccatgtgtggcgtagtacctttgttgctcgtgtaccatgtgttgccagacgcaatcangctctatgtataaacgtgcanacggacccactaccattagatcatgattcaactgtagtttgcatttaacacttaaaatatatcactatggactcgcgtagatttctcaaagaactacaacagaccacaactatatctacatgtgaatcgtacattaacgaccatgatgctctcttatacataatgtctgattacatg

SEQ ID NO: 19024 - DNA, 418 bp, Zea mays
agcttgtgaaggttcttcatccccacatgtgctaagcgacgatgccacagccagcccatgctagtcttagctattaagcatgcatctagactggcctcttcttttgcaaaatcaaccaaataaagtttgccgtctaatacacccttaaaagctagtgaaccatcacttcttctaaagacagacacatctacatttgtaaaaagacaattatatcccatattgcataattgacttacagataataaattatatcccaaagactcaactaaaaacacattagaaattgagtgctcattagaaattgcaattttacctaacccttttaccttgccttgattcccatcaccgaatatgatcgaatcttggaaatccttattcttgacgtaggaggtgaacatcttcttctcccccgtcatat

SEQ ID NO: 19025 - DNA, 321 bp, Zea mays
  unsure (1)..(321): unsure at all n locations
agcacaataatcgccaagtggctagagagaaggtcttgcacaatacgataatcacaaagaagtcaacatagagaagacacagtgatttatcccgtggttcggccaagtacaaaacttgcctactccacgttgtggcgcccaacggacgagagtngcactcaactcctctcaagtgatccaatgatcaacttgaataccacagtgttatgcttttcttttcttattccgttcgcgaggaaatctcacaacttggagcctctcgcccttacacttttgatgttcacaaagaatcacggagtaaggaggggaagcaacacacac

SEQ ID NO: 19026 - DNA, 460 bp, Zea mays
agcttgaggctgtgcatagattaccgccctcttaatgcggtaactatcaagaacaagtatcctttgcctcgtattgatgttctctttgatcaattggtcggggccaaggtgttttccaaaatagaccttcgctctggctaccatcagatcaaaatacgagcaagtgatattccgaagacgacattctcaaccagatatgggctgtatgaattcttggtgatgtcattcgggctgacaaatgcaccagcatacttcatgtatctgatgaattctgttttcatgccggaattggacaagttcgtggtggttttcatcgatgatattctggtgtactcaaggaacgaagaagaacatgccgggcatttgcatgtagtgcttcaacgtctgcgagagcaccacctttatgccaagttatccaagtgtgatttttggctaaaggaaatcaaattcttgggtcaca

SEQ ID NO: 19027 - DNA, 222 bp, Zea mays
  unsure (1)..(222): unsure at all n locations
tctgcagcagcagccatggtcccatgactgactctgncaccggaaggctctcgttcgcgtccccactcaatggacgcgaaccacatattaaagccaaagagccgagggtcggtccgtatgcgacgctgacgacctcgacagtggtgaagctttctccagctgccaccacatcagcaccgacggcggcgtncgcctctccaccaacgtcgcaccggcgagcac

SEQ ID NO: 19028 - DNA, 60 bp, Zea mays
ctcatcacaccaaaaatgtgatgacaacatcaagacccctggagctgctacatatggacc

SEQ ID NO: 19029 - DNA, 224 bp, Zea mays
cacgtacgtgcgccccgggtatttctgggacctccgaagctgccgacagcagccgggagagtctctccgggactacatccggcgattctcgaagcagcgcaccgagctgcccaacatcaccgactcggatgtcatcggcgcgttcctcgctggcaccacctgccgcgacctggtgagcaagctgggtcgcaagacccccaccattgcgagcgagctgatggaca

SEQ ID NO: 19030 - DNA, 362 bp, Zea mays
  unsure (1)..(362): unsure at all n locations
atgtatatataaaanaaaaactggtgcttttttaataaaagagaagaaaagcacgttaagaagagggttacacttgaatttggtggatattaagaaagaaattttattccccaacttcatggtgttacagtccttcaagatctatctaacgtatgagtaaccaaattacatataagctttggatcatcacatgttgacacgcaggtcattacattaaaattggataatacatatggctccagccttattgccctggtcatgacacgaangtcatgaataattcattaatatgcatcatatacacacaacagccataccgatcacaatatgtcctacaaaaacatgttatacaaacacatttc

SEQ ID NO: 19031 - DNA, 410 bp, Zea mays
ggatcttaagtcaactgctgatgcagcttgtgaacagcattggtcacaagcttgtttatttctatgctaggtcaacccagctcggcagctccgtgtctactccatgcagtagcttctcaccacccaaccatttcggtcgtatcgttagtcggctgctaccggtaatcactggacgcaccacgccaccacccgtgcaatgctgtagaatgtcctccgcgctacaatcacaagctatgttcctcctaattccaagcaagcaaacttaacccatatgtagctcctggaggaatccggaaccaccgagacgaatagaacacgagcaacttaaccagcagatcgatcacggataccgacggaccattccatcacattccctgatcatggccgcgtgtgggaagacagaatccccc

SEQ ID NO: 19032 - DNA, 412 bp, Zea mays
  unsure (1)..(412): unsure at all n locations
tatacaattttcttagcctactatgggtgataggtgtaccaaactcaaaccttcgattgtgaaaacccttggccaaagtctggctttgttccttgtcaccacaccatgctcatcttgcttgttgcggaaaacccacttggttcctacaacattntggttaggacgtggaactaagtgccatacctcattcctcgtgaagtttgtgagttcctcttgcattgccaacacccaatccgagtctcttattgcatcctccaccctatatggctcaatagaggacacataagagtaatgttcacaaaaattagcgactcgagatcgtatggttacccccttatgaatatcgccgatgatggagttcacggcgtgatctctttgaatcgactggtggactcttgggtgtggcggtctt

SEQ ID NO: 19033 - DNA, 360 bp, Zea mays
ctatgctccacaagaggaattggacgtcaataatacaatccacataaccaaactatctttattaacctcacatacaacaaaacctactattacttgcagtgaacaatatggacttcgtgatatcacagaatgcgttataagtggtatacattcatgatctatcacaccatcattcatattagataaatctcaatacgatgcaacaaccccattctttaagagatcgatgactaacaaacattagccactctcaggtaagcattgacttcattaaaataaagcggccaaatatgattcacaatcatgcatagaaaactgctatataaatcaactgcatacatgttgcaataaaaaatataa

SEQ ID NO: 19034 - DNA, 358 bp, Zea mays
  unsure (1)..(358): unsure at all n locations
gattccagggttaactaaatcaaatattacagatttcgaaatctgttccgacggtggacagaacacaacaaccagtctcgaaaattcataactcttaaaccggcaggcccgttattatgaaatctttacacaagccagataagaaaagcctctacaactttcttataattgacaaagactgatttaacattaacttaagccaaccatgcagtttctgatatcttgacagaatttggacagattcaagtactgaatttgtaaaaagcacaactcctaaacggtcagacctatggctgtcaaatcttaacacccagcagataataaagntatctaccacttttctatagcacatatctac

SEQ ID NO: 19035 - DNA, 371 bp, Zea mays
  unsure (1)..(371): unsure at all n locations
atctcccatgggttatgataatgatggctatatgttatatactgcttattatcctgagcacaaaattatgagaattcatgcgtaaaaaccttataatggttctcaccatgcatttatgtataagaatgatgcttctagctctatgcattctactcatgttaaaatgcctaacaagaaaactcatgttgcatcataaccatgtaaaagaccgtttatgtacctaataacaatacctaaacttgttttgtatgtctatgcatccggcggctcaagttggataattgatagcggatgcacaaaccacatgacatgggagataaggatgttctcctcctacgataaatacaaagatccncatcgagctatcacat

SEQ ID NO: 19036 - DNA, 400 bp, Zea mays
tgaatgccgagctcttggtagtggatgagaagaggaaagcttggatgccatgaatggtggggtggttggggtatttatagcctcaaccaccataagtggccgctgggaggctgtctgttccatggcgcaccggatattccggtgcacaccggacatgttcggtgcccccgccacgtcatcactgccggtggattctaaccgttggagcttctaacttctgggcccgcctagatgtccggtgcacaccggacatgtactgctggatgtccagtgtgccagtatgggcacgcctgacgtctgcgcgcgctgcgcgcgcattaaatgcatcgcatgtagccggtggcgccgaaatagccgttgctctgatggttcaccggacagtccagtgcacacctgacat

SEQ ID NO: 19037 - DNA, 450 bp, Zea mays
  unsure (1)..(450): unsure at all n locations
agcttattgaataattcgaattagggatgtgtttattttattttttgaaggaaacgtactgtaagaaggtcctacagtactgttattaattcaagataaccgagtttatagatgaagaggaaaattacaaaggaaggagagggggaatgagaaaggagaagagttacagtcctaagtttagtagccaagatgtaatatcttctttaagagcaggcttgactttaagacanagcaaggcaaattcactcttaaacatcgctttgcacccagaaaccgtcggnggaatttcattgaagatccaattgtttctgcaccgccagatacaccatgtcatgatatgataataacttcaagtcgccagggaacttgcaagcgtcttctaattctcattatggtatgcangagatccgtagaacaatgcgggaggaagcccaaaagaagccaacatcg

SEQ ID NO: 19038 - DNA, 278 bp, Zea mays
cattatgtgtgaaaagaaatgagtgcgcttggttttagtgactgtgatcctgctccaacaccttatgaccccagtgtgctattaagaaagaatcggagaatatcaatggatcaactgacatactcccacatcattggctcgatcatgtaccttgcaagtgcaacaaggccagacatctcctatgctgtgactatctaaatccgttgtgtcgatccaagagatgatcactggcgggctcttgagagagtgctgcgatatttgaaatgtactatgacata

SEQ ID NO: 19039 - DNA, 460 bp, Zea mays
  unsure (1)..(460): unsure at all n locations
ggatcttaagtcactgggctgcagcttgcagagtccactcgaactatcttctttattcccgacctcgctgcaacatgacaccagaatgtccaacacaacaagcattgaatgaatntaggattattgcagagcatatgagtacaagagacctggttcaggagtttttggctttcaaagtttttcctagtttgaaagaatgggacatgccgaagctgaagggggagaagaaagaaggtgaacttgtgcgtttaccttactatttcaagtttaagatatactttaaaacaccttgccaagagtggctggatacaattgaagtaatgtgtaatgaaatacttggcaactactccaaaaaagaagatcaattgatgactgcagccttcggcacccgtccgaagcgaatactgaaccgagtgctggacgccctgngttttgataccctgactattgaaatctgaac

SEQ ID NO: 19040 - DNA, 386 bp, Zea mays
gcttaatgatttaaaacctggtgaagtgtctttttggacatgttgatccttaccccaaacctttactttagagtgcctgcctatgaactaaatactgactcacaaccctatttctggataccggaagaaaatgattaagaacaatatgatgtacctttattattgcatttcatagcattacatgacattcatggtttatatgattatataggaacgaagaaaagagtggtgaagaaaagtgcacactaccactatgaccactgcataactgtttatttgattttgggagcaacccgacttcttacacatgatgcccgtcattgcactcttgtatttaaaactttactgttgagcataggaagagtggtgcaaaatgagcttcttct

SEQ ID NO: 19041 - DNA, 462 bp, Zea mays
  unsure (1)..(462): unsure at all n locations
agcttgatcacgatgaattgattggtgtggtctaattgcgcatggntatgggcgnggataaaaagtaattgtgcgaagagcgcattgatgtgtgtatatatatatatataccaggtatgattattgtggtgaatacgtttgttaaatgtgtgtggtaattctagcgcacgaaatgacttgaataaaatttgtaagtcgactggtgggtcctcctttgattgtttccactcaaataaatggtaaagtgttagagtaattcaagtctctagaacttggccattcttgaagtaaataggagctaaaatttattagttggtggtttgggctgcacgctcttgtttcgccgtgctgtctggttaatgaactaaattatgttntatgaagaaacgtcatatagaaagggtgtagataactttattatcttgcttgtgtaaaatttgacagccataagtctgaatcgtt

SEQ ID NO: 19042 - DNA, 422 bp, Zea mays
  unsure (1)..(422): unsure at all n locations
tttcagatcattcttcacataaaaccattctgtcatccagtcgccgggccatctcttacgaaagggtggcacgggacagcttgacccataccgagaaacgaaactatagcagccaaaattattgtgatactgttccttaccccnaggttttgtctcgtatgataattcgtgtatgttgcagaaacttttcgcatcaggttccagaccttggcttctcacggcccacacgaagatattcagccttatgattgcttcggnggtaagttgatgaagatagacttcaaacattttcagcacctctacgacaaagctgctcaagggaaatcgtagtccagctttcaaaaagcttcggaacactacgacttcattntcctcangggtcgggcaaagtttctctccttcgtcgatcctcacaatggata

SEQ ID NO: 19043 - DNA, 466 bp, Zea mays
  unsure (1)..(466): unsure at all n locations
tgtaagcatattttggtacccatcgcttgatatgtccatctaggttagtcaacaaagatctatgaacccaatagtcctttgtgtcagtacttggtaaactcattacctttctatcacaagttgcaattttgggttgcctagttacatgagaaataattgataagctagaggtgaggtagttaccaatgggacaatccttgcattgatgtaccttctttcggtatatgtagcaaaggcgatcttcaagtcttgaagatttcttctttccttgtttcttgcttgctacatgggtagttaatattttcttttctaatactatgcctttgtgtttcaaattgggacaagacttaattaaatgtcccttctttgagcatttaaaacaaaggttatcatccttgttaataatcaagtcatttntaatatatggacataacctaatcgagtgtcccttntcatagcattcact

SEQ ID NO: 19044 - DNA, 420 bp, Zea mays
  unsure (1)..(420): unsure at all n locations
actatttagggttaagtcctttaaccacggtcctatttgtaaaacattaaaacaatacaacttgtttgaaattttngcctagtggatgcactctatgtgtgtcaaacatatgcaatgcccatgctcatgatgccatgctcaagttttagttatagtaacaccaggggtgttacatccttccccccataaaagaatctcgtcccgagattaaaagtcctagggtaaataatggtaaaggaaacgcatcacattnttatttccttatttttggtacaagacaggggtgatgtgggggttacttctttattacaacagctatacaggctttacaacttacaagaggctagaaagcctgggaaattcttatctaagaagtcttgggtttcccatgtagcctcatcttccgaatgctgtgtcact

SEQ ID NO: 19045 - DNA, 332 bp, Zea mays
  unsure (1)..(332): unsure at all n locations
gcttcgactatgctcaaattnttcagcagctcttcagtgcaatagtaataaatgctatggtgacttcacacctacccgtctatttatatagtgccgcaggtgggaaggtgaatcgtcaagccgcccgcacccattgaacagtggaccacagtgcgcgagaaggtgaatcatcagatcacgcgtacccgtcatatggtgggaccaccttgcactcagaatatttaatcgtttctcgacaacaagctcaaggaaggtgtttttcggaccttcggcattccgaagcctaagagaatttttcatgggtcgagctcgttacgaaaaacgatctggca

SEQ ID NO: 19046 - DNA, 78 bp, Zea mays
ctctgggatacagatacctcactcgtaccctccgcgagaagcaacttttgctcacacaaacattcctgttaccgacag

SEQ ID NO: 19047 - DNA, 298 bp, Zea mays
taccgatggctacgacaagtgacaaaacggtattttctgcaatgattttaatacaaacaaagttaagaaataagatggaagatagacagtctattcactttgatttagcacgatgttgtttcaaggtgattgagatgatataatgaagactgaaagttgcctagaggggggtgaatagggcgaatctgaaatttacaaacttaatcacaactacaagccgggttagcgttagaaataagaatgagtccgagagagagggtgcaaacacatcgcgggcaataatgagtgtgacacaaga

SEQ ID NO: 19048 - DNA, 328 bp, Zea mays
  unsure (1)..(328): unsure at all n locations
ttcacaagaaacaagatgatgtgataaaaatcaacgatgccacggataaaatgagatattggaaagccgaagccgctaanaaagaaatgagtgtatactactgactcgtgggtatcttcggatgggacagtattcccgtggctaacccgncaagaacagagtttccgcggaggaagaacccctattgagacaaggcggagaatctcatcttcagaaattacagacatgtggttacctgcgaagggtaactgtgtgttggggtcgattgcggtgatcactgtaacacacgagttcgcagtttttctcttgcgcgccatcttgcttctac

SEQ ID NO: 19049 - DNA, 416 bp, Zea mays
  unsure (1)..(416): unsure at all n locations
acatgtgcttagcggcgattcttcttccagcccatgcaagtcttanccatgaagcatgcatctataccagcctcttcttttgcaaaatcaactaaataaagtttgtcgtctaatacacccttaaaagctagtgaaccatcacatcttctaaagacagacacatctacatttgtaaatagacaattatatcccatattacataattgactgacagatagtgaattatatccaagagactcaactaaaaacacattagagatagagtgctcattagatattgcaatcttgcctaaacctttcaccttgccttggttcccatcaccgaatatgattgaatcttgggaatccttattcttgatgtaggaggtgaacatcttcttctaccccatcatatggtctgtgcatccgctgtcgat

SEQ ID NO: 19050 - DNA, 465 bp, Zea mays
  unsure (1)..(465): unsure at all n locations
ttctagaatcaagaatattgttctcatgcctaagtctggtaaaagattgttcatcaagtggcttggtaaagatatcggctaattgatctttagtattaatgtaagaaatctcnatatcccccttttgttggtgatccctaagaaaatgataccgaatggctatgtgcttagtgcggctatgctcgacgggattgtcggccatcttaattgcactctcattatcacatagcaaagggactntggttaatttgtaaccgtagtcccgcatggtttgcctcatccaaagcaattgcgcgcaacaatgtcctgcggcaatgtactcggcttcggcggtggaaagagcgaccgaattttgcttcttttgagcccaagacaccaatgatctttccaagatctggcaagccccgatgtgctcttctattaatttgcaccccgccaatcgcatcgataccatcaatcaacgtg

SEQ ID NO: 19051 - DNA, 393 bp, Zea mays
acactaccccactttataagaaagagggtagaactcttgaatcctggggatttgaaactcctgaagtacctcattacaaatgtggtacggggccttcttcttgtggtgctgcttgagctggctgcggaaggatgactggcacaaggttgattctgggagaaccttcctcttatcttctcttcaatatactcttttctcttctcacttttcacttttcacttgctctttctttctctttgctcttcccactggaggagtctatcgatgagtattaccatcatacagaggaggaaaccaatgactatgaatgtcacacaccggttttatgggtccaaagcccgatcgcgaacataaacaccatgtgtgctgggaccaagtctcacacatatgatg

SEQ ID NO: 19052 - DNA, 429 bp, Zea mays
  unsure (1)..(429): unsure at all n locations
agcttctaaatatatatatgggtcatccaaacatgttgtggatttttggaatcattatttattttctaaaaatccaaaaacaagatgttagcctgttttaaacactctattattctctatttggattaaaaatcctaaaattatttttattaaattctatggaaaattaggaatctagcaaaattggtcctacattnttaggattttttctaccattttctagaattggtttagctctggaagaaaaagaanaagaaaaggaatgaacagtcttgggccaaatccagcccatgcgtgccaatccctgtaggaaaacacgcgcgcccacgcccgcgctgacagacttgcacagaggcccncgcttgttagaatatctggtaaaacccctagtactattcctctctctcgacattacagaaaaccctacac

SEQ ID NO: 19053 - DNA, 477 bp, Zea mays
  unsure (1)..(477): unsure at all n locations
tctaaagggagaacacattgtaggattaacaaatgttcatttttataaagacaggattnngagcgcatgccatgcatggaagcaagttggcactcatcatccgcataagaacatattgacgaccgacatgccactggagctcctacacatggatctattcagcccgatcgcttacataagcatctgcgggagtaagtactgtctaattattgtggatgattattctcgcttcacttgggtattctttntacaggataaatctcatacccaagagaccttatagggattcttgagacgggctcaaaatgagttcggcttaaggatcaagataataagaagcgacaacgggacggagttcaagaactctcatatcgaatgctttcttgatgaggatggcatcaagcatgagttctcctctccctacacgccacaacaaaatggtgtagtggagaggaagaatcgaactctattggacat

SEQ ID NO: 19054 - DNA, 419 bp, Zea mays
  unsure (1)..(419): unsure at all n locations
aattatgagcttagacaatagttggtgttctgctgtccaaaatcagcaagtattaaaatgatttgcttggaggttcttttgtgtaggtaactagatttggttaatccagagaaacatgattgttatgcttagggatatatcgacgtctagtgtttgcttatgggtgctgtaatgtgtctctccactaagtggttaattctctaccacgtagcattgtttattatcgttctagtccttatgttcatacatgagcattatgcatatcatttaggtacgttaattgatcacatgatgtagaggaaaagtgttggattaatctcaaagtgatgctgatgaataaaccagatgagtggatgatctgatcaagtaccangaatggagatgtcaccaagtggtcgtcatttaacaacactaacgta

SEQ ID NO: 19055 - DNA, 336 bp, Zea mays
  unsure (1)..(336): unsure at all n locations
gcataagcaattngaatgtaattatttatcaagactgtattccagntgtaataaatatatgtatgctgttaatcctcatatgcacgtgagtggtgaaatggaattgcaaataatgtaataatgacaagctaatgtacaacagaggtatgtgaaatgaatacttacacgagaacgagatctgctgtgagtgatgctcagctttctggtccctgattcaaacttcttaaccaattcttgcagtgatacatatgttngtgcttcctaaaaacgccacaggattcatattagtaacacttcatcttcagttntatctgttacaatccccagttccccact

SEQ ID NO: 19056 - DNA, 302 bp, Zea mays
tacgacttgattgttggcatggactggcttgaacaatttaatcctatgtgggtgcatcgggcaaacaaatggctgaccattacttataaagggttcccaaagcagttatttggattgcattcgcccaatggacagtattcagttgtcgaactgtgtcatattgctgaattgccacacaaggatcattctattctatctgcattgccagctgatcttcaaaccttgttgtacaagttctattcttgttttgcattacctaaatgattgtcaccttccccagattgtgaccatcatattaatct

SEQ ID NO: 19057 - DNA, 468 bp, Zea mays
  unsure (1)..(468): unsure at all n locations
gagagcacattttgggactttccaatggtcattntgagaaagacaaggtttgtagcgcatgccaagcaagaaagcaagttggtgttcatcatccacacaagaacatcatgacgatcgacgggccgcttgagctactccacatggacctattcgacccgatagcttacataagcatcggcgggagtaagtattgtcttggaattggggatgattattctcgcttcacttgggtgttctttntgcaggaaaaatctcaaacccaagagactntaaaggggttctcgagacgggctcaaaacgagttcgggttaaggatcaaaaagattagaagcgacaacgggacggagttcaagaactcacaaatcgaaggctntcttgaggaggagggcatcaagcatgagttctcttctccctacacaccacaacataatggtgtagtggagaggaagaatagaactctattggaca

SEQ ID NO: 19058 - DNA, 494 bp, Zea mays
  unsure (1)..(494): unsure at all n locations
tactcaagcttgtgatctatgttatcatattgtaatattgtgatcttgttatatttgcgaccaaactgttatattgtgaacntgtggtcttcgtgattaatattctatattgtgaattgcgaacttatggtctttgtgatatgtgcaaactttgttgtattctgaacgcgttatattgacatatgttcatattgatatggttaccgattgtatttaatgttccgaccggttccgatgtattgtccgtaccgaaatctcgatatcgatgtctgcgaaataccgatatcgttttcgtttccgaattaccgttttcgatttcgtttccgatataaatatgaaaacggtcacggatttagtgttttccgaccgttttcgaccgttttcaaccctatctgtcgacttgaatgcgacctgttgtgcttccggcgtggaggggccatctaactcgatgactatctttgaacctttgatcatcacttaaactgacaaattct

SEQ ID NO: 19059 - DNA, 431 bp, Zea mays
  unsure (1)..(431): unsure at all n locations
cgggacaatcagatgaataccaatttgtatgggcatgcactgttttttaatacaaacaagttctttgaaatcagagagaacaatatgagactcgctacaagactgtgcaatttttaatgatgtattgtagtgcacacgagatggattgaccacctatggggggcaaatcctcgtgtaggggctatgagggctcacagcgcgagtaaagatctggatataggggcggaccctcatgttgcacggtggaccagcttccgtgacctttctcggttggagcttcgattgagcttcttaatataatatcgtggggtcagtctttcccttaccgaccgagtatatttaatgatgtattggagaagatggagactgatgaagatatactaaacaaggtngtttctagtgtttcagcgtgttttagtatagcatatata

SEQ ID NO: 19060 - DNA, 498 bp, Zea mays
  unsure (1)..(498): unsure at all n locations
agcttcgctcaacaagctaaagctgaatcttgtccttcagagccctgcaaggagcaaccttttgaagccgaagcaataaatattccagaacaagtattagttgaagaaactgacaccgccatccccgaagcacctgccagcatgcgtgattacatgatacgacatgcttcggggaagaagctatctgaagaagaaactcatgaagccatccattatgcaaaggaactaaaatatccgaagggggcagtaatattcaatggaacgaatgaagatgacttcttatactgcctgcctgacaacaaagagctatctgtctgccgagaaatggccagaagtattggctntccgaagcttgaagctgggttaagcgccatgacgaaagaggatctcgcagacagcctcgcgtacaacagccttgaggtatatggaataaacactttgaaaatccccttatttttacgcaactcattcctttnttcttatatgaanntcttttcg

SEQ ID NO: 19061 - DNA, 317 bp, Zea mays
tttgatgattatggccatctcctcattgtcgagcttggattgcgtaattggttgtctacttggtgtagactcctccttcttctcctccgttgccttatatgccaccggttgcgcctcggatgtggaatgctcgtcaagctcgttgatcttcttggagcccttaatcatgcattcaaaactaacaaaattcccgatgacttcctcgggggtcattaatggatatcttggattaccacgaattaattgaacttgtgtggggttaaggaaaataagagctcttagaataaccttaaccacttcgtggtcatcccattttg

SEQ ID NO: 19062 - DNA, 293 bp, Zea mays
gatgagaggagcttaaggattctcaacaatagatctaagatcatgctatgatcaagtgaagaatcgaaccgaagatattccttatacaaccttcactacaagatatggactttatgaagtgttagtcatggtctttggactgactaatgcaccaacttactttatgaacttgataaataaagtattcatggaatacctcgaccaatttgttgtggtattcatcgacgacatactattatactctgagagtgaagaagcacatgaagataatctaagattaggtctacaaaaac

SEQ ID NO: 19063 - DNA, 318 bp, Zea mays
  unsure (1)..(318): unsure at all n locations
cgcgtaagcggcaaggccgaccgagccgatggattcccacgcctctgggatactgatacctcactcgccccttccgcgaaaagcaactctcgctcacacaaacattcctgttaccgacagagtccatatgctcgaaacaagaggaaaaaagacgcagcttcgcgagcacggcgagggtgtgttntctggcctcggcggccgcataaggcacacgctacaagacgatctgatcctgcaggctcgggtcttcacgctgaatggagccgtagcaccctcgtgatcgacgacgtcttcagcatagtccgaccaggcctcgga

SEQ ID NO: 19064 - DNA, 491 bp, Zea mays
gatcttaagtcacctgcggctgcagcttcgatctatccttgtacttttgcaatatgaccagaaatgacttgagagtcagttttaaggatggcccttcttattcccattgcctttaacttccgaagccccaacagaagtgcttcgtattcagcaatattatttgtacaactgaagtcaagctttgccgcataacatgttttgattttggaaggcgcaactagaacaacagttgctcctgcgccgaatgttccccaagaaccgtcgcagaacactgtccaagcttcggcgtctttatttgtttcttcttcgtgagcccctagcatccaatcaacaatgaagtctgctaatgcctaggactgaattgaggatctatgtacataatcaatattgaactcgttaagctccgcagcccattttccaatccttccagtagcttctttgtcctcattatgtccttcagaggctaggacgaaggaacaattatgtgatat

SEQ ID NO: 19065 - DNA, 369 bp, Zea mays
  unsure (1)..(369): unsure at all n locations
ctaagggagaacacattntgngactaacaaatgttcattttgagaaagacagggtttgtagcgcatgtcaagcatgaaagcaagttggcgcccaccatccacacaagaacatcatgatgattgacaggtcgcttgagctactccacatggatttattccgcacgatagcttacataagcatcggcgggagtaagtactatctagttattgtggatgattattctcgcttcacttgggtgttctttttgcaggaaaaaccacagacccaagagaccttaaaaggattcttgagacgggctcaaaatgagttcggattaagaatcaaaaagataagaagcgataatgggatggagttcaagaattctcaaa

SEQ ID NO: 19066 - DNA, 289 bp, Zea mays
  unsure (1)..(289): unsure at all n locations
cttttcttccggaggcttgaatgcaacggagtgagcttctgatggctcgcccagctcgttgattttcctcgagccttctatcatgcactcaaaacttacaaaatgcccgatnactttctcgggggtcattttagtatatctaggattaccacgaatcaattgaacctgagtgggataaaaaaaatgagagatctaaaataacgtttaccacttcgtggtcatcccatttcttgctcccgatgttgcgcacttggttcaccaaagtcttgagccggntgtacatgtgttg

SEQ ID NO: 19067 - DNA, 324 bp, Zea mays
aacttaatttaaattgaacgcacagcacatctttcattttcaacaggatggactacttgtttcagtagaaacttatgtgaaacatctgcaacaagcgagtgcggcatttccacgcatagattccatatctcctcttaaatatttaccagcatcttattgatctgacctgctctcttgattgagtctttgtctgtacctacacaaaccaatgcctctgcatactgtattggacacattgcccttgtagaaccagtatactggtcttctatcaccatggaggctggaccacgtttttaattagtaccatgcaattacacttaaact

SEQ ID NO: 19068 - DNA, 341 bp, Zea mays
gcttataaaatttctgtgataatatgccatcttttattaaattatttaccattaaaaccatgatgacctagagcttttgatgaaggcatatgttttattactaaatcaatttcaccctatgataaaggaccgaccaattcagagagatttaacaacatcgttggttgatccgaaaagcccattatgtctccgaaggtttcctagaggagggcacctttctcctcatgaccagtaaccaaactaccactgttaagcgcaaaatttggtaataataataataataaaataaataaattaagataattatgatagtggttctagaatttataaacctttggaat

SEQ ID NO: 19069 - DNA, 417 bp, Zea mays
cctacaagattccctcttgtggccaaactcttagataactctatagatagtcttataccttctccatgaacatgaatctctagaatagcctcttctatattgctccctgcaagatctcaattgagatggcgacctgcatgaatttgtcatgcacgacttgcatcatgttgcggactaccttcacatcatctatgttgtccccgagtaatcgcatggtgttggctatgaccgcgatccacatggagaacttgtccacaccttcgccttccctgatagcgatgttgttgaagtcgcgtcgtatcctctttgcgttcgcaacacgcactcgctcaacgtctactcacatcaccttgattgcctcacatgtctcttacacggtgtcattgcttgcgatcatgttcaccatctctagcggaa

SEQ ID NO: 19070 - DNA, 276 bp, Zea mays
gcttcacgatggctatataatgcgaaacacaatttttcaactatgaccaaccttatgaaaggctgaccacgcatgtgcaccactctgcagcgcttgtgaccaccgatggggaacaactggtgttcttggctaccgacggtggaacgggggaaacaaagggtggcatggatgcgttacggagaggcgagactgagagcacgctcaatttaaagggagtcaccatgacggtggtcaatttgacagctgaatcacgacggcagcggtagcccgtggagc

SEQ ID NO: 19071 - DNA, 272 bp, Zea mays
atattcatgagaaaatagaagttgacaaaacttattggtttataaaggatgaacaaaggatattatgggttaatgaatgcataagtgtgcccattgatgcgggagtcttgcagcaatttttgatgaagctcattttagtcgatatttcattgatcccggaagtacttaaatgtctcaagattaaagcaacactattggtggacaaaaatgaagattgagattgcacgctatgtggcgagatgtgacacctgcagacgttgtataacaataca

SEQ ID NO: 19072 - DNA, 397 bp, Zea mays
  unsure (1)..(397): unsure at all n locations
acgagagacaccttttcttaggtgatactttcaaatgcacatagtcttcaacttgaaagtacaagggctggcgtcnattgtctgcataactcttttgtcgagctcgtgcttctttcacattatgtataattcgttgaaccttttcctcccgttctttaaccatatcaagcctgaaaaaccacctttttcctggttcagaccaattcaatggagtacgacaccgtcgtccatataatgcttctaagggtgccatcttgatactttcttgataactattggtatatgaaaactcggccaaaggtaaacattcatcccatttctgtgggaattccagaatgcgggcccgcaacatgtcttcaagtattagattcactctctcagtctacccactgggttg

SEQ ID NO: 19073 - DNA, 222 bp, Zea mays
ctacattgtcttgacatgcgccaattattaagttgtaatacactaaatgagctacaataattagtttgaaagtttgcccatagaatttttataatcccaaacaggccattcaattatgaggctttctttagaaatcagaatctcaaatttctgaaattctacccctctcccaaactcgagtgcgatcaccatgagctgctgttggaacttgctctacggcgc

SEQ ID NO: 19074 - DNA, 337 bp, Zea mays
agtgcacttgaagttgcataatctggaagtgatggtacgttgaattcagtattgcttgcgacatccaataaaacagctctagtgacttcagattgttgcactgatgtgatatcaagattctcctcgttgttgttgccgcagaagtacatattcattaacagcagtagctaattgcaccttgccttcatcgtcatggatcctaaaaataacgggttataagagctacatgataaagatggggctcagataataaaagaaaggagaggaacatacctgccatctgattggtcaattgaatcatcatcatgaactgtcacaacatccgcatgacattctc

SEQ ID NO: 19075 - DNA, 414 bp, Zea mays
  unsure (1)..(414): unsure at all n locations
ctgcagcttgtgccccggattgaataacattattcanactctgtaactatttgaagaaatgaatgtgcttactatcctcctgggactagtaattgtatcacatttgagtcccaaaggatcgggacacttcaggtggtatcaaagcctatatgactggccgtagaccgtagccctgaccttaaaaagttgccttaacaagaaaacacctcttacccccaagaaacactctctctcctttccccgatattaacagacccttcttttcttctaccagatggaagactcctgngttattatgacatcctattgctcaggggaagaaggattccctcacctcttattggagtacgcgctatgcatggngatccgcaagaagcccgaatatgtctggaatgaataccacgaaaatggagt

SEQ ID NO: 19076 - DNA, 361 bp, Zea mays
  unsure (1)..(361): unsure at all n locations
ctgcntgatgttctaataatcatgaagccttctatttcttgtatacccgtttgattgagcgagaccaccctgaatcaccatgaacacctcgatttcccctcatgtttcgccgtcgtcgtgggcagaaaagctccgggctggaattgtgcaattgagggtcagattagaatcgcctggggtaggatctggtgttagccaagttatggcaccggccattgcgtgttctatccagtacaagttcgccggatgcatgctcgtcgctgttcaccgtcgtggacttggcgcagttaagaaacagaaatacaatggcctaagtgagaatgtcagcgagataatgaatagtggctatggaattcttact

SEQ ID NO: 19077 - DNA, 496 bp, Zea mays
  unsure (1)..(496): unsure at all n locations
agcttcaagggagaacacatattatgattttcatatgttcatnnttgaaaagacaagatttgtaacgcatgccaagcacggaagcaagtctgtgcacatcatccacacaagaacatcatgacgaccgacaggccgcttgagctactccacatggatctattcggcccgattgcttacataagcatcggcgggagtaagtattgtctagttattgtggatgactattctcgcttcacttggngtattcttttgcaggaaaaatctcaaacccaagagaccttaaagggattcttgagacgggctcaaaatgagttcggcttaaggatcaagaatattagaagcgacaacaggacggagttcaagaactcacaaattgaaggcttccttgatgagganggcatcaagcatgagttctcttctccctacaccccgcaacanaatggtgtagtggagaggaagaatagaactctattggacatggcaagaaccatgcttg

SEQ ID NO: 19078 - DNA, 307 bp, Zea mays
aagctcgattatatgaaatatccttgcataacataatggcataaatcacacatttttccactatagataaataaaaactagtaccaatgttagaagaatcaagaacaatgttgatcaaaagccatgttgtaaggcgtaacaacgcttaaataaaagagtaattttagcatgcaacatagttgatttacctcatctctctccaaatattgatcttctgatatgaaatccacagcttcactaccaagaaagcagttgctaaatcttctcatcttatagaatctatccttatgagtgattgactctctca

SEQ ID NO: 19079 - DNA, 481 bp, Zea mays
  unsure (1)..(481): unsure at all n locations
agcttaacttgttgtgcaggatcactccttctatggatcaagttgggagcttaataataaatgtataaatcatatttggagatagcagcaagggtggtaacaattgaatctcaagtgcatattattntcaaatcttatctttttgtgacttgtgtagccactaaggaaaaaaaagcacttgaggatatacattagttgttgattatgaaataaaggtctaattggaagatgaatgaatattatcatatggtgaacaatccaaaattatgtgacgtattctctatctagttaatttggatttgattcttctatattagacacttaccataatatggattaagtcagcccttttagacttcattgaataaccatgcatattatccatgtcattcaaaatatattgtgcatgatggctcaagggaaatntagtccatattatgaggtttctctattttagcaactcacttgccttccacatata

SEQ ID NO: 19080 - DNA, 291 bp, Zea mays
aggccttcctgattctgagaatttcgacttacatttactatcactgtatacctggcacatactaaatggacattttctgcccgttaaatgaaaaaatctcacttattggaatgtgttacatcaatacttggtgctatatctgattaagttcatattgcttacccatggaaaaagtggtagttaatgagtgtgaagccaatgagtatgagcagggacttagacagtgctgcatcacgcttcttcatggttaattatgcttgttgattgggaccactaatacattcatggttc

SEQ ID NO: 19081 - DNA, 435 bp, Zea mays
  unsure (1)..(435): unsure at all n locations
agcttcgcttatcacaatgacagcgattgttatggaaccgacctataggggaatatactgcccagtcctcgacagattactccttattcaatagtaagtgttagggatatggatgtaattntactcacgctgcgtcatgtgcctataaatagatgaacagtaacaccgtactgttcatgctaacttgtactcacttgcacatcatttctggatttttaccttctgccgagccgaaggtacaaatgtaattcaatatcattaatgtttgttcatgtttatttaatgagaatatgaaaaatataatgatttattattattattcacattcttttccatatttcatatgttcctgcccttattattacatgttgtgaatatgaaggtatgcccttcataaccttcgtctgaagatcattatatcctaaaggagataat

SEQ ID NO: 19082 - DNA, 372 bp, Zea mays
catggaccactctttcataggtggaaacactttgttttccaaaaattcctgcactatatccctagtgccaatgtgctctgcgataaccctaaattcagccagcgcaatttgggttggaccctctggtgtcatattgcacgggggtctggtctctccgatgatcaactctaacggactctgaaccagcttctccttatcatcgtcaactttgacgtagaaccattcagatttccagccagctggccacttgcttctgcaactgattactggaaatattgtagtcttgcggtaggcaaaattgtatcagccgaagttttcatgtaacccatctcctctagccttggtctgataatgcagctcgtgcactcggca

SEQ ID NO: 19083 - DNA, 286 bp, Zea mays
acaagtatacgttgcctcgtattgaaggtcattattaccaaatggacggggccaaggtgtttttcaacaatgaccttcgctccaacttccatcatatccatataccttcatgcgatattccgtatacagcattctcaaacagatatgggctatatgaaatcttggtgatgtatttccggctgactaatgcaccagcatattgcatgtatctgatgaattctattttcatgcctgaattggacatattctcaatggtgttcatcgatgatatcttggtgcactctga

SEQ ID NO: 19084 - DNA, 418 bp, Zea mays
  unsure (1)..(418): unsure at all n locations
gcttgtgaaggttcttcatccncacatgtgcttagcggcgatgccacagccagcccatgctagtcttagctattaagcatgcatctagaccgtgcctcttcttttgcaaatcaactaaataaagtttgccgtctaatacacccttaaaagctagtgaaccatcacttcttctaaagacagacacatctacatttgtaaatagacagttataccccatgttgcataattgactaacagatagcaaattataaccaagagactcaactaataacacattagagatagagtgctcattagaaattggcaatttacctaacccttttaccttgccttgattcccatcaccgaatataatngaatcttgggaatccttattcttgacgtaggaggtgaacattntcttctcccccgtcatatg

SEQ ID NO: 19085 - DNA, 343 bp, Zea mays
tgctgagatgaagctgagtcttgatgatgagaataacttacgatttcttatatcgatgtcgaagaccaacacagaataaatcaccaatgagattctggaagggctgtctgaagatactggtgacagtgaaagttatgatgtggacagtggtggcgaagactccgaatatcgtccctggcgaccaagccattcagtttatggtaaatcaactatcaaagagaatcatcttgttaacatgagaggaaggtatttccgggatttgtccgttgtgatggccgacgaatgggagaatacttgcccacaccctgaagagaatgaagtcgtattgttccgaagctttctg

SEQ ID NO: 19086 - DNA, 110 bp, Zea mays
  unsure (1)..(110): unsure at all n locations
cgagtcactttatgctgcgcttcgctgcgtgcgtncgtcgcacgcccagttgatggcgatgccagggcgatggttcgtgacagggacaccacggtttggtggccgtcgtc

SEQ ID NO: 19087 - DNA, 336 bp, Zea mays
  unsure (1)..(336): unsure at all n locations
aacagtttttagtgtttccgaagatgtctttatctgctaagaatgctgctgctgagatgaagctgagtcttgatgaagagaagaacttanggtttcttatagcaatgtcgaagaccaacacagaaaagatcaccagggaaattctggaagggctgtctgaagatactggtgacagtgaaagttatgatgtggacagcggtggcgaagactccgaagatcgcccctggcgaccaagccattcagtttatggtaaatcaactatcaaagagaatcatcttgttaatatgagatgaaggtatttccgggatctgtccgttgtgatggccgacatatggg

SEQ ID NO: 19088 - DNA, 386 bp, Zea mays
  unsure (1)..(386): unsure at all n locations
ggatctctaatcacctgagcttgcacttattgcagtgagagtgcttgtcgtgtttttttagctcttgcgcttggatcgctttcttctttctcattctttcctgggatcaaacactcacttgtaaccaatgcaagagacaccaattgtgtggtggtccttgcggggaagttttgttcccggctgatttgagaagagaaagctcactcggtccgaaggacccgttgagagaaggaaggggttgaaaaagacccggcctttgtggcctnctcaacggtgagtaggtttgcgagaaccgaacctcggtaaaacatatccacgtgtcacacttcttatttgcttgnnggattgttttcactctctctcgcggactcgattatatttctaac

SEQ ID NO: 19089 - DNA, 444 bp, Zea mays
  unsure (1)..(444): unsure at all n locations
gcttgctcatctcagaacttttactacctatatcttagccatatgtatgaattagaaggggtcaacgatgcagaagaatatttaaaaacaccgagagctatggacattgttggtatatggttttctgatcaaggtcatcttggcctcattacaacactaggacagaaaattaccaaactcttgtttctcttgataaatgattttgactcttgatgctaccatgaactctcaagaagctatattccgaattgtggctgctatccttcatctaagaaacattgaattttctcctggaaaggagtttgattccttctgtattaacgatgaaaaatgtaaattccatctncagatggctgctgattacttatgtgagtatttataatccttatcttagctcctgtcactgtgctatcatcacanaacagcaaagtaacatgctacttt

SEQ ID NO: 19090 - DNA, 480 bp, Zea mays
  unsure (1)..(480): unsure at all n locations
aatatatagagcctgataggatgggatggtttgtgtttgatanactctataaagcctcaaatgatgtaccaccttgctttgatgatcttattgcaaatttgggacatacatgttcagatgacaaactcaaggaagttttatccaagtatgatgggtggattacttgtgaagtggatccatagtaatgaaattgcacaataaagttctatattgttagggcacatgaatttcatgtccttaaaatgttctttttagctcacattnttttttgtccacaatgagtcaaatgacaatgaacatagacatacatgcaaaccacattcatattgcattgcatatgtaacttatgaatatttaattaagttaatacgaaattatattttgaatggagggagtagttctttattactacacatttgctctcaattttagatagtncacttcacacttcatatagaagtatgaatgtataaagtctgt

SEQ ID NO: 19091 - DNA, 446 bp, Zea mays
ctacatcgcaatctgcattatctttttcataccaatggagaaatgcactcgtaccatgtgtggtacctttaccttgcctgaatcattgatccactgaatgtggtatggatgtggccgtggacgtgtggtcaatccaagcttcttgaccaaatctaaactcaccaaattattgcaacttccaccattaataataacacgtgcacgccgattctcgatggcgaataaagtctggaacaaattatggtgttggtgcttctctgatgattcaggctgagcactaagaacatgctgcaccatgatgcttcgaaggttcaccatagcatcagcaccaagcatagcatcatcattagcagcaacatcactggagtcatcatcgtcatccctcactgaagaagcactaatgtagccatcatccgtagcaatgtatgttcgctgaactcggcatc

SEQ ID NO: 19092 - DNA, 396 bp, Zea mays
  unsure (1)..(396): unsure at all n locations
tatattcttacaacattagggcataggagtagataggactggagcttgggcacacggttcggatatgtcctcggtcttctattacctagaatttttccataacgtatgggtgcaacccgtgagaactagacaattagttgatgtacgtgttgaatagaagagagacccagtttgatgagggcccgtgaaaatatattcgatcagcatgcaatgcaagaagtttgatgggtcgtgccattggatcgaccaacaatttttctataattaattgcacaacatgcatgccacttggtcatcatatgcatgttgcactcatctgcacagacgtgcgtcccgatgtcacaacacaagtgatctanatagtgttggcggtggagtttcaagggatcaatcatg

SEQ ID NO: 19093 - DNA, 278 bp, Zea mays
ccatgtttataactctctaatgcgctttatgggctcaatcattccccattatcatggtatgaatgccttatagatttccttatcactaatggattcaaagtcggaaaagccgatcctacactctttaccaaaacacttgaaaatgatttgtttgtatgccaaaattatgtggatgatattatatttgggtctactaacgaatctacatgtgaagagtgtagtacgatcatgactcaaaaattcgagatgtcgatgatggcggagtcgaagtatttctt

SEQ ID NO: 19094 - DNA, 362 bp, Zea mays
  unsure (1)..(362): unsure at all n locations
cttcctcatgctgaatggcacatgctctcaacatatcttccaatacttgaatattcctttcagtctgtccatcagtctgatggtgataagctattctgaaactcaagtatgaactcatattctcatgaaagcttcttccaaaacttgaggtatacttgcaacctcgattagacacgatcttctttagtactccattcanacacacaatccgagccatatataactctgctagttgagaacctttataagtagtcttgacaggaataaagtgagccactttagtcaatctattcacaatcacccatatagcatcatatcccttctgggtgcgaggcatcctattatataatgcataccaatct

SEQ ID NO: 19095 - DNA, 129 bp, Zea mays
tgttatcactgtcttgttggacattgctcaattgaggatgattatgatgtgccttatcataatctggtgaagccatactgagaaacctgcacatcgtgtgagcaatgcctgtcatcctgttattatttt

SEQ ID NO: 19096 - DNA, 434 bp, Zea mays
  unsure (1)..(434): unsure at all n locations
tatgttgagcaacactccggctttgaagatagtgagttccctaaccatgtgtattaactctcttatgcgcctgtatggctcaagcaagccccaagaacatggtatgaatgccttatggatttccttatcactaatggattcaaagtctgaaaggccgatcctactctatttactaaaactcttgaaaatgacttgtttgtatgccaaatttatgttgatgatattatatttgggtctactaacgaatctacttgtgaagaatttagtatgatcatgacacgaaaattcgagatgtctatgatgggggagctgaagtatctcttaagatntcaagtgaagcaactgcaagaaggcaaccttctaagctgaacaaagtatactcaagatattctaaccaagtttggaatgaatgatgccaaacccatcaagacact

SEQ ID NO: 19097 - DNA, 432 bp, Zea mays
  unsure (1)..(432): unsure at all n locations
gcttcaagggagaacacgtgatatgtctatcttatgtaactntcaaaaaagatagaccttgtgcagcttatcaagcaggtaaacaggtgggaagctctcatcatgccaaaaatgtgatgacaacatcaagacccctggagttacttcatatggacctctttggacccgtcgcctatctaagcattagaggaaagaagtatgggcttgttattagtgatgattnttcctgcttcacttgggtattctttttgcaggataaatctgaacccaatggaccctcaagcgcttcctaatgagagcccaaaacgagtttgagctcaaagtgaagaagataagaagcgacaatgggtccgagttcaagaaccttcaagtggaggagtaccttgaggaggaaagaatcaagcacgatttcttcgctccctacacaccaca

SEQ ID NO: 19098 - DNA, 451 bp, Zea mays
  unsure (1)..(451): unsure at all n locations
atactaatttggaaatatatgaatttcctttatatttatattccttcttctttacccttttaaattccaaactcagtttatgttttaatccaatctttgactcatttttttatattgttatccatgttattatgttattaagtgcacaaacaataactccaatacgatgcatattccccttttttatcattnntttaattcatctctcctaattataggtatgctctcttatgatgaaaatatggcatacaaaacaagaagacctctatatattccttgtatacaattntgagtattacaaatccctacccccttaacaagaatctcgtcttcgagatttaggaatgactanggaaaagatggngaatatctatgagaagctcatcttctctctcccaagtagcttcatcttcttcatggtgactccattgtactttgcacatcattatca

SEQ ID NO: 19099 - DNA, 407 bp, Zea mays
  unsure (1)..(407): unsure at all n locations
atacagcacggcacatgaaacagagaaatngttatcattggttttattcctacatttataacctatagttactttggacattcatcttttgtgttctttataccctttggtgatttgacaattagagattaactagttatgtgcatgtgcgttgtgacgacatataaattattcgataaaatattactgcacaacaattatatgataacgaacaacacatattatcgactacatacttgcttggtgacagaaacaagcatggcattaatctcaaacaaaaattgtcgatggttgcaacctcagacgatgatttatcaagagttgttggaaccatgcaacttcaccgtttatattgctgttggaaccatccacatcgtaccattacttatcttctcgcggatggggat

SEQ ID NO: 19100 - DNA, 481 bp, Zea mays
  unsure (1)..(481): unsure at all n locations
gcttctaaagggagagcatanttttggactttcaaatgtncattntaagaaagacaggatttgtagcgcatgtcaagcatggaagcaagttggtgttcatcatccacacaagaacatcatgacgactgacaggccgcttgagctactccacatggacctattcgacccgatagcctacataagcatcggcaggagtaagtactggctagttattgtggatgattattctcgcttcacttgggtgttctttttgcaagaaaaatctcaaacccaagagacattaaagggattcttgagacgggctcaaaatgagttcggcttatagataaaaaagattagaagcgacaatgggacggagttcaagaactcacanatagaanggcttcttgaggatgaaggcatcaagcattagttctcttctccctacacaccacaacanaatggtgtagtggagaggaagaatagaactctacttgacatg

SEQ ID NO: 19101 - DNA, 477 bp, Zea mays
  unsure (1)..(477): unsure at all n locations
ctaagcttcactttgtctgggaatgatgtttggcgtgtttgatcgaatgagcacttgtacgagtttgtcatgctctcgctacgctgtgtatataccatcaatccacaataatcatgtttgaaaaaagctggtatccaatcattacgaatttcatacatactggatagactgatgttatcatgtagatggaaatcatcaatcagcattgcccaggcagtctcaaactcagttacagntaaaggatgatgtattatagattggaaccttggtttgaaatcatattcctcanatctagcgtacaactcgtttaaatacggcatatacctgttctgaacatgccacaaacacatacgatggattgtgtttggaaataccctgcctagtgcaactggcattgctggatcttgatctgaaatcatataatttcacaacattatgcaacacattaccaactataattgcattcaatacaatcct

SEQ ID NO: 19102 - DNA, 439 bp, Zea mays
  unsure (1)..(439): unsure at all n locations
attagaccctcaagaattactgtagagntattgataaatgtgaatgacattaatgtaattntacacgggctgcgtctcgtgcctataaatagatgaacaatattcccgtactgttcacgctgacttgacattcgcatcacgcttgtacctttgcttatcttcggaccgaaggtacatttgtaatttgccattcgttatacaagtaaaaacgaaataaaagtaaaatcaaggataatgttaaaataatcatgttattctctttatttcgtgcataaatcttttcttgtcttttattatgactatgaagggatgatcttcataaccttcgtccgaaatcattatacccaaggggaaataatgttagaaggacgaanggcttgatantaatattctatggtgccttgtcttaattcaaagcatttgagacaagtccccacat

SEQ ID NO: 19103 - DNA, 473 bp, Zea mays
gagctaattccttgcagatattccacaccttattatctctcttaaccacctcattctaagttattttaggtcgatccctacctctttttccattattgactcgctctaaaacccctctacgcaccaacgtctcagtatgtcttctttggatatgtccaaaccatctcaactgattttgaatcaatttcttttcaattggtgccaccccaatcctattccaaacatcttcccttcttgtgtgcccataaaaccaatgtaacatacgtatgtctgctacaatcgtttgttggatgccatataacatcgtcaagcgaatcactaataaccgaatgcccaagcatgtatacagtcgtcaccacacgtggaggggatgcatggatgttgtgcccctacagtcgtcaccacaatgacatgtagaagggataaggcatgatcgtgtccgcagtagagctcaagcaaccaatgagtctatg

SEQ ID NO: 19104 - DNA, 488 bp, Zea mays
  unsure (1)..(488): unsure at all n locations
gcttcaaaatatatctaaaaatctggaactccttattttataattccagttcctacgatctcattttaatgtgtagatatttactgtatactttatgtacatgcttggtgtgatgttaattggtgctatactatgtatgtattgggttgatgcgagtagacgagcaagctacagaggattctggggttcaactggtagagactgctgagcangagctcgttgaatgcaaattgtgcccttgatcacttcttttacccattcatgttcttattaatcataatgatctgcataggttaattttgatgggactcaatangataccctagattntgactatctttataccttgttacaccactggttttactactataattttgggtagtacatgctattgctttatgtggatttgggtataaagatattcatcactcattggtatancttttattatctggttattattattattcatgataagatcatta

SEQ ID NO: 19105 - DNA, 422 bp, Zea mays
  unsure (1)..(422): unsure at all n locations
tattttggggttaccaaatgctggtggagggaccaccttgggcattaatgaagttgttgctgccaacaatttaaaggctgaactttggttatcgaaagaagatttggggttgcagctcttcaagatcgtctgatgaaagggtctgacgatgatctaaccatcatatccttcttcctgatactgttcaataggttgttgttccctactgcaagctggagattaaccaaccatgatgttcttttaactgatgagatggatcgtttccagatggactggtgccagcttattttcaatgatntatgccaagttgtcaagaagtggcatactatgagcagtacaaacgtttctacaaccatntatggatgttccatcgtcattcttataagcatatcctttttttgtctgtatatgtagccatattt

SEQ ID NO: 19106 - DNA, 203 bp, Zea mays
cttaatccgacaagcgatatactattaaatacacttcaaattgttcattaattcatcacaaacagagcaccatatactaagagtcatgacccaatatggactctccattgctcgtgaacacagtggtgtgcaataacgtgcgggcacccgatccaatgctcgaccctatttcaggctcctcctccttcgtgtccctatatgtc

SEQ ID NO: 19107 - DNA, 415 bp, Zea mays
  unsure (1)..(415): unsure at all n locations
agcttctatggactcatttgacatgttgatttgcttttatatgntgatgcgaacacatcatgaaggctttctaatacatgcctactcattctaaacataattaagcactctctaagatcattaagngtcctcactaccaaataatatacagtgactctaagttccccatgacttgttttatttaagaacgtatcatcatatgacataccacatacaggcatgaagacaccatattcttccatcatctcaagttcaacaagagccacctttactatttcatttgtctcatcctcatcattttcgaaaaaatcaatctacatagacaatcataagggattagcaaacttaatcattcatggaacatacatatgaattagaacacataagattcatatatagggtcatgacagtagtg

SEQ ID NO: 19108 - DNA, 230 bp, Zea mays
tatttttactcattggctatttggacattgtacaccatttgactcgccccacaacatgcatacaacactatttcatttgaataaggtctaacttaatattataaatatcgtcgcaatgtacaagcacttacctagtaaatctgttaatacagttgttgacgccgatctgagcgctaatcactgcggttgaaactggcggtgatgctctctacatatgcgcgaacggtgcg

SEQ ID NO: 19109 - DNA, 433 bp, Zea mays
ataggatctctactgtttctatgtttatctaagccagatatcatgcttagtgtgtgcatgtgtgcccgttttcaacctatcccgaaagagtgtcacctagaggatgttaagagaattttgagatatctagttcacacccaatatctaggtctctggtatcccaagggctcctttttccatatatttggctactctaattaagactattgccggtgcaaagtatatcgaataagcacctcggggacttgccaattccttgggcggtccctaatgtcttggagctcttagatacaaaactgtgttgcactttccactgtcgaagccgaatacatagctgctggtgcttgttgtgctcagttgctatggatgaagcatactttgcggaatttggctgtgatattataagaatccactactatgtgacaatgagagc

SEQ ID NO: 19110 - DNA, 361 bp, Zea mays
agagagcaaaggcgccgcaggctcggtgtcactgttgacaacaaactggacagacgcgccgtctgcaagatgaccttgacgccagccgccagcggagtggacaggacacattaaatgctgagagggcacgtcgactgtcagcgtggcggcatgcggcgcgtactctccgcaataaatgcagatgctacgcggatttaagggccttacgtcatgcccggccccgtggcttatgtcatgggccataagccacgcagtatcagcgggtctccgtctgagcggggagcgtatggcaatgcctggacacatgccatcaccggaccctgactcataccatggtgctccacgtcccgggaccttgcta

SEQ ID NO: 19111 - DNA, 336 bp, Zea mays
  unsure (1)..(336): unsure at all n locations
atatcttctagtagatgtgcttcgactctggcacagtactgttgactgtgcgagcttcagactcctctcttaagtctcgttgctgattagtgtgctggctcccttctggctgntggcctcgttgcattggtggcgggggtggaagttgttgccaaaacgccatatgttggctatgcaaatcaacagaagctgcatgatggttacccacatactttggaatgtacggtgagtgatatgaagcagtatgcataacttgcttcggttggctctgttgggctgcagcttctgctatctctttctgtttctggatggtgacatggcacatcctggtagtat

SEQ ID NO: 19112 - DNA, 388 bp, Zea mays
cgatctcagatgcatgctatgctttctttgttaatgccgccgaatagtaatgctcctggcttgtatccacatgatatagcataatcccgtagctcctctttctcaaccttagataactcttgaccaattatgttttgaaaattgaagtcttttttctctgaaatatacttggcaatctccttcccttttccacgcactgtggccagtgtttcttcagcagctgcagcaacttcttctgcggccatatccaagagtattctatcaatatcagataatgtgctctccagattcgtggcttctgccgttgtatcttcagcagttgcagcttctgtgggagcatcttctgtagctgtagcaacttcggcagtcagtgttatttttgatgctg

SEQ ID NO: 19113 - DNA, 443 bp, Zea mays
  unsure (1)..(443): unsure at all n locations
ttcatctcgaaattgctcgatagaagattttaacttcctcaatcacattgagatttgatccaaagatcaaaatgtcatcaacataaaggcacagcataacagactcacccccaccataccgatagtatacacacgtgtcaaattcatttacaacaaagccagctggttgaagagtattatcaaaactttcatgccattgcttatgtgctttgtntacgccatacaatgatnttatcaacctgcacaccttgttctcttgaccatncgcaatgaacccttctggctgatccatatagatctcctcatccaactcttcatttaggaaagctgtcttaacatccatctgatgaatgataagaccataagaggctgccacggctattaatgtgcgaattgantcaatcgagccactggtgagtaggtatcaaagaaatcttcaccct

SEQ ID NO: 19114 - DNA, 475 bp, Zea mays
  unsure (1)..(475): unsure at all n locations
attgtcggcagccacgatttggtcatgccttcgtctcacaagcggaggcggatgatgatgccctgctcctggcacatgcaagcatcgtaccaactccagcggcaccggccgcagcggcactcctccaccttgatgaatcgaaagcacgcgctgtcctcggcgacggctccaacaaggacatgatcgaatgatggtgcctcgacaccggcgccactcatcacatgaccggccgactggagttcttcaccgagcttgactctatcgtccgatgctccgtcaagtctggggacgcctccggcgtatagatcaagggcgccggctcaatcgtcttcaccgccgcgtctggtgagcacatgctgctcaccggagtctactacatccacgcgttgaggaactctatcatcagctcgtgacagctggatgagaacggntcgcgcgtggaggtcgagcacggagtcatgatgatctgggatct

SEQ ID NO: 19115 - DNA, 516 bp, Zea mays
  unsure (1)..(516): unsure at all n locations
tcgacccgngatcctcttagtcacctgcngcatgcagcttcactcggctgcattgttagatgtcttgaatagcaactggagagcgtacttgatgtgctcgcctccacgtgcagtgaagagaatccctgctcctgctccctgcagcttcagcgagccatcgaaatacattcgccatacttcttgcagttctggattgtctggtacttgctgctctgtccactctgatacgaagtcaaccaatgctttgagtttgatggcagtgcgaggtcggaactcgatatcgtgagatcccaactcgcaagcccacttggctatccggccaatggcttcctttgtgcgaagattgtcccctattggaaaaccagtgactactatgactttgtggtcgtcaaagtagtgacgcagcttgcgggcagttagaagtactgcatataacagcttctgaacctganggatacttttctttgatgggcctagaacttcactgatgaagtatacgggatgttgtactggata

SEQ ID NO: 19116 - DNA, 434 bp, Zea mays
  unsure (1)..(434): unsure at all n locations
accccttttatcactatttanggttaagtcctttaaccaaggtcctatttgttaaacattaaaacaatacaacttgtttgaaatttttgcctagtgaatgcactctatgtgtgtcaaacatatgcaatgccaatgtgtatgatgtcatgctcaagttttaattatagtaacactatgggtgttacaatcatcaactataacaagaccatacttacttcctcctatgcttagataggcgacgggtccgaagaggtccatatgaagtaactccaggggtcttgatgttgtcatcacatttttggcatgatgagagacttccacctgtcctgcttgacaagctgcacacggtctatctttttcgaaagtaaacatttgtagacctattacgtgttctccctttagaagactgtgaaggttctcatccacacatgtgc

SEQ ID NO: 19117 - DNA, 455 bp, Zea mays
  unsure (1)..(455): unsure at all n locations
acagctcttcactgtcttggcaaggaatgatgtggtaactcctcaccaacccgtttgtttatatagtgctgcaggggggaaggcgaaccgccatgccgcttccactcgccgaatggtggaccgcttgacgcttggaatattataatcatttctcagcaatgagctcaaggaaggtgttnttcacaccttctgcatttcgaagtcttcgagtttttcgcggatcgagctcgttatgaaatatgatctagtaccacgaatgggctactgttgggggtcttcttctccaccgaatgtcctctaatcaaataacaccttcagcatgacgatatgacatgaagatatatgtcgaaactacaattgaaagagctttggcataatggcatacttaagatgaatgatggcaccgacttataaggaaaagacatgtagccctgataattgatatgatatggtag

SEQ ID NO: 19118 - DNA, 374 bp, Zea mays
  unsure (1)..(374): unsure at all n locations
taaatcattttagctgcaacagtcatgtgacagaatttctgttacaaaaagagctcggttgcaagctgatgctaaagctgcataggacgttcgcaagatggctgaagcagcatctgctgatgaagctgctgctgtagcttatcgacaaagagaacttgagagaaagcagctcgcatagctttgcaagatgtaatatctactgtatgctctccacattcaacatcatatgctctgctattgccatacttgtagtgtaagcaatgttggcttgcagatggagaaaatggttgacatcaatgaagggagcacatttgtgaaagatcttgaaatgctcngaagtgtcacaggtgaacagatacccaacttggttggtg

SEQ ID NO: 19119 - DNA, 480 bp, Zea mays
  unsure (1)..(480): unsure at all n locations
agcttattctacctactagaccaagtataaatgtttatctcctctgtccactccatttaagttagntgtaccctctattctataatatgcttaaggataaggaaaatagaaaatgttacttaattaatgaaccagagagtacctctatttttgttagggtacttattcaatatagttcactagaaaaatatatcataccctggtttagtacaaattaaagaggataacttttattttaataaaacaaggataacttagaaaaacctacaaaaatgaccccaaggtaaaaacaccccaccctcgggataactattggtttattagagagaacttanganaaatatgaaatctgctggttgacattnttcanataataatgtagtagaaagtggccttttggcattaaacttaagaaaatcataactaaataaccaccccttagttntctgtgattttatcacagagacctattattactat

SEQ ID NO: 19120 - DNA, 345 bp, Zea mays
actatgctttctctgctcggttaagattgcgacactcgcgctgatgtctctacgttctgctaaccgagagccgaatgaaggaatgctcggtcggcatcatgatatgagaaccaccgtttgatcagcgacccggctatagtatgccggggacggtcacccccgctcctccgtgttcctccgaccccgtaccatctactcgccgatcgcaagcacaataggtggggcctcatccatgatgcagccatgctggtggctatcaacaggtatttcctgatcacgaacagcaacccggccggaagaggcggcgaatagatggcgcccgcggccgcttccagcgaccacact

SEQ ID NO: 19121 - DNA, 409 bp, Zea mays
  unsure (1)..(409): unsure at all n locations
gcttaccacatttgaagcatgagctctctctctttgtcttggncctgcttggctgcccctagcgaccctntagcgccgtcttgaatctctttatgatgagggccatctcttcatcattaagtccggccgcctcaatntgtgccaccttgctatgtagcgcctccttgcttcttgttgccttgagagcaaggggttgcggctcattgatcggaccattcaaggcgtcgtccacgtacctcgcctccttgatcatcattcgcccgctcacgaattntccaaggacttcttcgggcgacattttggtgtacctgtgattttcacgaatattattcaccanatgaggatcaagaacggtaaaggaccttatcattaggcggacgacgtcgtggtccgtccatcgcgtgctccc

SEQ ID NO: 19122 - DNA, 316 bp, Zea mays
  unsure (1)..(316): unsure at all n locations
tcccatggttcaagatgacgagggttacattntataccctgccggttatccctaacacaaaattaggagaattcattctaagaagtctcactctggctctcatcatgcttttatgtataagagtgaggcatctagctctatgcagtcaacccatgttaaattgcctaaaaagaaatctcctatagcatcaaatgagcctactatttcatttaagacttttgatgcttcatatgttttaactgacaaatcatgcaaagtagttgccatatatgttggggccaaacataatggctcatagacttgtgtttgggtaccc

SEQ ID NO: 19123 - DNA, 381 bp, Zea mays
cctacatcgagacggtccttaatcgactcagatggagacactacaccgagactctcctctcgtgcaaatcacccgcccggtctcagctttatcatttcaaacccacagtttggtacctggcagaggtacatcttttccgatggtgaacccatcacggccatgatggatccaccatcaaagtttattttgaaaacatcccacccacttgaagcatcatcttttgtcaaaagaaaacattttgtttttctagagcaaggctaagcataagaaaaacctttttattaaacaggggatcaaggaaagggaatcaaattctcaaggaaggatatgcacaacttgttagccacaactctatacctaatgcatagcagtgaaaaattt

SEQ ID NO: 19124 - DNA, 118 bp, Zea mays
gcttatcattgaatctatactatacttaaagcaccttgttttataggcgcctcgcgtcatcgttttacaaattaccccacacagctatttcaaatttatccgattcatgtctatagat

SEQ ID NO: 19125 - DNA, 319 bp, Zea mays
gtattaaatttccacaaattcataattaaatggccagagtgcgctctaccgccatggttgatcgtgaggagggcgaatctgaagcttcggagactgttcccatctccgaagctatgcaacgatccgggctggtgacttcggaaaagatccctagtgatgatgcataacaagcagaacaagcaattgccgaagcagaagaagatattgaggaaactggtcccgaagatgattatcgcattgccatgccaagcaaacccagccacttggacttcgggaaatctactgtttcgaaagctgatctctccaagatggtaaagtc

SEQ ID NO: 19126 - DNA, 402 bp, Zea mays
ttcttgcaccacatgccccatatgatgtattgtgtcctatgatcatgaacctaggaacgtctgatgtgcttataaacggtgttctaagcaaacactttcactggaaacgtggtggcagacacggtgatcctctatcaccccttctctttgtcctattagctgaccttctgcaatatattgcccacaaagcaaaggagactggtccttcttgactccctctttagactggctgcgaacaagacttccacattatacaatatgcagatgcttcggtcatggtaatggaagcatgcccaaaatagttattctttctaaaggcgatgataaattcctttgcacgatcaactggtctccacgtcaattatcataagtccaacatatatacccaattaatgtgtcaag

SEQ ID NO: 19127 - DNA, 381 bp, Zea mays
  unsure (1)..(381): unsure at all n locations
gcgcctatgctcatatcatgtccagctatcaacactttggccgtctcattgtctatggtacgtttggttgcaacgacaggacatgatgaaatgaaatgaattctactattaagttggttgcctctggctcaaggatggaaacatgcctatcttantgttgtccctttgaattggatggacgagagaagaaaccagaatatgtttctgtcctaactgttctgcaaccaaacgtataaaatcgtaaagtaggctgtttagagtaaatgttgaaatattaagtgatattggatgatgtcatatttcgatccccagctaattatagttttatacgtgattaagaaatcatggagagcagagcagacttatatgtggatcgatcgt

SEQ ID NO: 19128 - DNA, 397 bp, Zea mays
  unsure (1)..(397): unsure at all n locations
gtcacctgctgcatgcaagcttctctcctcttaggggagaatacgatgcatttagacttcgtcttgggggagaaagtcagcccaaagcaaaaagacttcgtctttggtataatcctaactcatttatttatgaccaaaaggaagaccagcacttcaagggctctaatgattcccgttttggcgattcatgccaaagggggagagattatgagcccaaagcataaggaccgcaccaccaccaatttcaaaaacttagtgtgttttccaagagtatctttcaattggaatcccttttttgtgttcaaaagagggagataatagtatttcaaatatgatatatcanaaccctcttgaacgctaagaggaggatctcttttatggggagttttgtttagtc

SEQ ID NO: 19129 - DNA, 103 bp, Zea mays
agggaccacattcgagagagtcagggaatcaacttttataaattccagtttaccttgattgaaggacaatgttataaagggttaacaccgctgccgatagata

SEQ ID NO: 19130 - DNA, 439 bp, Zea mays
  unsure (1)..(439): unsure at all n locations
agctnggcacaacatacatcttcatcagcggttatatcttcttgtttggngtgtggcaagcctttttttgctacttgcgctatgtttgatcactctaagacatcattgaaataggtgcttgctaaagggtcatgctcaaagttgttcaatgtgggttcgctcaacaaactaccatactgtgccaggtggtgggtccaattcacagccagtctataaacataataggcatggaatagtcaccaacatcattgtacaaagtgaagtaagaaagacttaacaacaaatttttcacaacaactgcagcaaagaaacatgtcattgtattcaaaaacaagctggtccacttaagcttacataagggttcatgacgacacatacttactatactcaacattcataattacttgccctctcacaaacactaacatggtacttctac

SEQ ID NO: 19131 - DNA, 232 bp, Zea mays
accgccctccattgagcctttgatgggtcctatgcccacatatgaattcgatccgagttaagcctaagaaacctgtctaataaagggaaatttcgtcatgaatttgtggtctgggtttgtctgatataatgattatgaatggttggttcaaacagtgggtttggttgatgcaatggaactgactaacttcaacaagttcaagtaaacataaatattgcattaacgtggatac

SEQ ID NO: 19132 - DNA, 403 bp, Zea mays
  unsure (1)..(403): unsure at all n locations
ctggaccacccncggagacgtgtgttcattctttatgaccggaccctttgttcccagacccactgggctatattttcaaatactaggatacatgtcgtagagtggtggagcgtgcacgcttatggtacggaaccaagctaagcggctacacatctccggaccaccctatggaacgagtacccgttttctataaccgacccccaatctgccggaccccctgctttcgtagagggttcctaaactgcaagccttgctactcaattcggatgtcatgatactagagtggggagctgtatgggtggcttagataaaaataatatctatgaactgcgacagaatataaccatcacagacgcacatcttatgggggatatccttnctttataactcatatgcatgggtt

SEQ ID NO: 19133 - DNA, 288 bp, Zea mays
  unsure (1)..(288): unsure at all n locations
aaaaaaggncgacgcagcagcagaagcagtgggcctatcaacagaactatgacacgttgcgctgacactccaggtctatcgccgaatacctaaggggggggggtaaaagtacccgaaatttcctaaactgaatagttatgagatgacaggcaacggcatcattttttaacgacagttgaccgtcactaattgatatcatgacatgcacgaaaagaatgcaaaattgcctccagaggagatggataatgaccccctgaattacctgcagacaccaaaaacaatcccggt

SEQ ID NO: 19134 - DNA, 493 bp, Zea mays
  unsure (1)..(493): unsure at all n locations
agcttctaaaaagatggacgagtacatcagggccgacaatgactttcggcagagaagtgaagaagcctatagatactccgagatgactatgggctttggaggaagactccaccctatgcatgtcaggacgatccataatcccagctcaagcgacaacagcggaaatcacactcaagggcatcaacaccgctctcaatcgtcagggacacaacaaagctctttcaggccaccagctcccaaccaagaaggttgtttgcctattctgtggggaagataaggggcatacaacaaggacatgccaagtcacgattcagaagcaaaagaaaatatgtgaagccgaagcacggcagaatcaaccgaagcatgtcctgcatacttgttcgtgctattccccatgcatncctgagtatgtgggaaccaacaacccacatcatcaagtgctttggcagccactcacaatgtgcatgggccctgctaccaccaccaccactca

SEQ ID NO: 19135 - DNA, 212 bp, Zea mays
tttaactgattctgtgttacctaaaaaccttttttctctcgactgctcgacaataacgaacatgacttcgagcaagttacccaatatagcatcacttttagcttgtgatatgactgtaaccttaacctcccagtgtccagttatcgatgcaattaactacctacatcgtggggcacgaaaataaacaacgatacaccttgatgatcatgagg

SEQ ID NO: 19136 - DNA, 396 bp, Zea mays
  unsure (1)..(396): unsure at all n locations
agcttcttctattctccttagaaggcttatgtgtcataanancagctngacgggcctttatcttngttgcttcttttttcctggtaatccgcgtccatcttttcgtggatgaagtggacaacggagttctccgggtaaaccaattctctgctcctatcttgcangaagtagccttcgcccggagcactggaggctgcactatntcctgcttcgttttggctttttcggagatnttcgaggagggcttcttctccgatggatccgctatacgatgaagaatcccttcttcgtctaccgcggacgagatggttccgaagcagaacacagatccagggcggagagcgatcttgtgctaaaaagtgatagccattgagctagcttggatcaacgacacac

SEQ ID NO: 19137 - DNA, 377 bp, Zea mays
tctagggatcatcttgggcttttttttctgaagaggcgaaaatgttcgacgcgtggttgcccttgacggctttgcggtcacggatagttccggactactgtcatctccttgagttggcgcatacaatgatcaacgggaatataccggcactgggcgggcttatactgtgggcggcgtggcattggctgcgctgcgcctggtgttccgcacccatgctctacgccccccgtgtgtagcctcgtcgaacacgtgtggttgctttgctggtaacggcgatgggcccttacggaatctggcaaacacttgtcagctttcctacccaatctcctttgatgtatccaacaagatccgcgggatggaattagtggagagtgctt

SEQ ID NO: 19138 - DNA, 375 bp, Zea mays
  unsure (1)..(375): unsure at all n locations
nagcttgatatcctatattgaccattatttttctgcatacatgtaaaaccttactggctaagaaacagtaaacgaagtcatctttgtcatttccaccatataccaaggaccctcgtgggtatttcaaatccttggcatagtgtngcacttcggcaatctgctcttttgttacttgctttcccgaagcatgtcgaacgatatagtccaagtcaccctgagaaggtgcttcgggagcatgcgccataggtttctctagaaagctctcttccacaagattttctggtacgacttccaaaggactcgcttcggcgtgggcagaggtactggcagtaattatctttggaacttcttcagttntactcctagaagctttgg

SEQ ID NO: 19139 - DNA, 361 bp, Zea mays
tctggttgaatccgtattatacccatctgtttcaataatactccggacttggtgaacacggagtggaggttgtcactccacaatatctttgaccttgctatgatctaacgcaattcctttatctgattacacgtgccccaaaaattgaatttcctccagccataacacgcaactgctgaacttggcatataattggtgttcccttatgcgcgtcaatacaatacgtaaatgctgagcatgggcttcttcattcttggaatatatcaagatatcgtcgatgaagactaccacgaacttgtccaattctggcatgaacaccgagttcattaaataaatgaagtgggcaagagcatttgtgagc

SEQ ID NO: 19140 - DNA, 489 bp, Zea mays
  unsure (1)..(489): unsure at all n locations
agcttactgctagtccctgtctagagaaaatttctttctttatatgtgnnacgccttgtttggattcttatggcaacaatttaccagctaattttaacactttaacctccaaacatgttggctaacaaattgactaattattatccggaaggcatgcaaactatttacccatttgccatttaaccttactaataggtgctaatagatcgtataaagagaaaaaggacatctattatccaagtctccaaacatacactaactaattgttgctagctaagtatntatcgactaattattagtcattagcaaataataagttaggaggatccaaccatgaccttaattgtatcatctaaagtgtctttgaaatatagaacacgctcatccatcctctagctatgcagagattnntttttctgagtatatgtataagacatctaagtatatgacaaatacatacataanaagtttgaaactaaatatacatct

SEQ ID NO: 19141 - DNA, 408 bp, Zea mays
taacatgcttgtttcaagtgcattctgttcatttgcaagattatctatagaggttttcatgttaaatacttctttatctttattctctatagtcatcttgactaaagagacttccttagtcaagacatctagcatttcatctttattgtgaatcaactcttgaagctctaggtttctttccttttcaaagataagcaagtcttcttgagcatcaagagttgcttttcttttatctagcttctccattaatttggtgataacattgtatccattcaagccaaattctttaatcattgtatttttcatggcaatttgatcatcatcatcatcatttgaaaaatcattactaaataaggttaccttatatccctttgccatgatgcaagttggagtgtaagagtcgtcttg

SEQ ID NO: 19142 - DNA, 269 bp, Zea mays
ccactcctctgggatacagatacctcacgtcgtccttccgcgaaaagaaactatcgctcacacaaacattccttgttccgacagaggtcaaatgctcgaaacaagatgaataaaggcgcaacttcgcaagcgtggcgagggtgtgtcttttctggcctcggcggccgcacatagcacacgctacatgatgatctgatcctgcaggctcgggtcttcacgctgaagggagccgtaacacccttctgatcgacgacgtcttcagcaaaacc

SEQ ID NO: 19143 - DNA, 392 bp, Zea mays
  unsure (1)..(392): unsure at all n locations
gatattatgtccgggcatcgactgtgataataagatagcttggagagatacaggagtaatccaatcacatctgcttaaaagagggtgtaaaaacaattacacgatatggtcagaacatggtgagttggatccgtgtgaagtgcctggttatgacgaaagagttgtccgaattttagatcttaaaagtgatggtaaagtggataatgtggatgctaatcaagattttgacgaatttgattgcgaagagatgttgcgccatatggaaccagaaatgtngagttctgtgggatcgcaaaaaaggctatctaaaatggagggactggaaagtgcttaaaagaaccttatatgatgaatancaggtgtgacaagagttactacactgctacagtcta

SEQ ID NO: 19144 - DNA, 235 bp, Zea mays
  unsure (1)..(235): unsure at all n locations
tctcttgcctcaattacaagtgtgtttgatngcnaagaaaggatcaagatagatgaaagcaatccaagcgcaagatctcgaaagaacacaagcaaatcactctctctagtcactatggcgttgtgtggagtttggagaggatatgatctcttttggtgtgtctagaattgaatgctagagctcttgtagtatgtgggaagtggaaaacttggatgcaatgaatggtggggtgggt

SEQ ID NO: 19145 - DNA, 310 bp, Zea mays
  unsure (1)..(310): unsure at all n locations
caccaccaaccactttcgggtctctgcaacgctctttcactgtgtcatggtcaccgacgatcgcagcaacttgcaatccatggccccgcccgcctgctggcttgtctcggtgtaatccatggcagaactatggatccagaactgtactatgtggcgttggtgctgaccgcgctcggaatcaaccgatcagtggaggctggcgggctagactcgaaatgatgcctttnttaatgcacctagagaggatggatcgctttggttctagaataatcgacgacaatcgaatatgcgacaacactgatgagcacac

SEQ ID NO: 19146 - DNA, 321 bp, Zea mays
tgagatgctgagagaacaaaatgaatcacactctcaaacctaacaccctcaaaaaggacattcaagtatgatcaaccacacttcacaatagagggtaggaatgcttgaatgggcaactgaatagcatgtactatattatggctcgattataacaaggatgaagaacttgttaaatgcttaagaaggacactgtagatttgcccattaaacaaaagataggtaaaaaaagtttacacctgacagcacagcagaaagaaactaaatgaaacccatgtcacagcgaaaagactatgagatgccttggacatcctcactgcatat

SEQ ID NO: 19147 - DNA, 408 bp, Zea mays
  unsure (1)..(408): unsure at all n locations
agcaggtgagcaagtgtcgagttcagctctatcaaaatctaccaaggttagctgaccctctaacactcccttaaatgctattgaatcatcaacttttctaaagacagtgacacctacatcagtaaatagacagttgtagcccatttgacataattgcgaaacggaaagcaaattgtaatctagagaatctacaagaaaaacattggaaatggaatggtcatgggatatagcaattttacccaaacctttgaccaaaccttgatttccatccccgaatgtgatagctcgntggggatcttgatatttctcatatgaagagaacatcgtcttctccccggtatgtggttagtgccccgctgtcgatatccaacttgaaccccggtgcatatactacaaacaagttagttc

SEQ ID NO: 19148 - DNA, 452 bp, Zea mays
  unsure (1)..(452): unsure at all n locations
cacctgcatgcattgcagcttgtgaaaatcttcattccaacatgtgctattttcgattctctaccagcccatgttagtcttagcaattaagcaagtgtcgagtttagctctaccaaaatctactaagtatagctgaccctctaacactccctgaaatgctattgaatcatcacttcttctaaagacagtaacacttgtatccgtaaaaagacagttgtagcccattttgcataattgtgaaactgaaagcaagttgtaatctaaagaatctacaagaaaaacattggaaatggaatggtcaagtgatatagctattntacccaatcctttgaccaaaccttgatttccatccacgaatgtgatagctcgttggggatctctggtttctcggaagaggaaacatactcttctccctgtcatatggtttgtgcacccgctatcgatgatccaac

SEQ ID NO: 19149 - DNA, 253 bp, Zea mays
gcagcttggcaagcatgttaacaagtgggatgagcgcatcacatcaaaaatgtgatgaacacttcaagacccctggagctgctgcatatggacctcttctgacccgtcgcctatctgagcataagagggagtaagtatggtttaattattgttgatgatttttcccgcttcacttgggtgttcttttttgaggataagtctgaaacccaagggaccctcaagcgcttgctcatgagagcatcaaatgaatttg

SEQ ID NO: 19150 - DNA, 321 bp, Zea mays
gagagaagaattttactctgtacaaaaaacgtgaaccatgcctgatactgtttctctatttattggcgtgaggaacaccctctacataattaccatcatgcccttgatcctatacatttaagctatctgatgtaatgagggtaacgttgtctttccccttgatgtcttgataaacatatttttaagacttctcataatcttgctcaccttctgcatcattgcacgcacatcgtctgttcgatactgctatcttcctgcccgtgtctattagtaattttagcagaagccgtccttccgcattactcctacgtcatatgaaac

SEQ ID NO: 19151 - DNA, 337 bp, Zea mays
ctgctttccaatttatcggcacatgggctggccttaccctcggaagtattctttgaaacaataaaagcaccttcagtggaacatttttgaaaagcagtgctcagcatatttcctgtttatagtgaagattggagaaccgagatcatgtcttgtcggggaccataattatgggtacccccaagactcctaatctcagctggttacccccatcaacacaaagctgcatatgcctgatgggtgcgattaatgtcaatgctcaatccactcaatggacacgatctcgcctcgcccgatcccatgctcgggcatatgcatccgaccccggatgattcacgtc

SEQ ID NO: 19152 - DNA, 301 bp, Zea mays
  unsure (1)..(301): unsure at all n locations
tatgttgagtaaccctccggctatgataatncagactaccctaaccatgttataaactctcttaggcgctttatgggctcaagcataccccaagagcatggtatgaatgccttanaaatttccttatcactaatggatncatagtcggaaaagccgatcctactctcttcactaatactcttgaaaatgactcgtttgtatgccaaatatatgtggatgatattatatttgggtctactaacgaatctacatgtgaagagtttattaggatcatgacacacacattcgagatgtctatgat

SEQ ID NO: 19153 - DNA, 459 bp, Zea mays
tcggactgcatccatatatatttgtagcttctgtttttttccctgctgctcttatccacatggacagcaataacttgagaatcaaaccttacgatggcccatcctattcccattgcccttatttttcgaagccccaaaagaagtgcttcgtactcaacaatattatttgtgcaactgatgtctaagttgactgcaaaacatgttttgactattgaaggtgctactaattctgcatctgctcctgcaccgaaggttccccatgaaccatcacagaacaccgtccaaacttcggtatccttgttttgcccttcttcgtgagcccctggcgtccagtcatcaatgaagtctgctatcgcctgagattgaattgaaaatctgtgcacgtaatcaatggtaaattcattaagctccagtagccactgtaaaacccttgcaatagcttctctgttcctcataata

SEQ ID NO: 19154 - DNA, 406 bp, Zea mays
gcttggcttcgcctcattctatcatccgcagtccaactgttgtctttgaacgcgccaatgggaaaatcggggcagctgtcaagaagatgctccttgatgaataaagggcagatggaccgatctgctacctgatgcaatctgggcactaaacacgattgagtacagggcgactgggtttactccctttcgccttctataccgatcggatgccatgaccccgctagaaataaagcatgggtccacgcgaacagttccgtcagctgtccccgacgtggacgagccaacttctaatgatctcattgacggagaccgagtcattgccctacaagccctcaacatataccaagcccataccatagcatggcgcgaccacacattcattccgagggagttcaacgaaggggac

SEQ ID NO: 19155 - DNA, 477 bp, Zea mays
  unsure (1)..(477): unsure at all n locations
gcttgtccgntccctgatggaaggggaaattatgatgttcagtgctgctgcttgttggtgttggagatttgtagtctcattcggtctgtcttcacccctgagctccccattagtgtggattttggagccatgacagaaggtggtagaaaaagctagatttggcttgtgcgcattgcatgaattgtgtattgtctgataggttgtttggaatggatgataaaaaatgatcgagtgcattcttcaggtatgtagctggatcgcatttttagtgcttagttgcatcccagaaattctggtgattgttnggatccctactaaaactttgcatgtacacatgtcttgtgaactgaggaatcgtagctgtattacattatccctatcatattgtagcctgcctgctccaaatgctgcttcaccatgngtatgttttcctttggtgacaatctcnttcattgagtaactcattctaaagacact

SEQ ID NO: 19156 - DNA, 411 bp, Zea mays
  unsure (1)..(411): unsure at all n locations
ctaagcttgtcagatgtgaaagcacttatgagagaacaatttggttctatggatgatactaaaaataatctgagtaattctactaatgccatgcctttaaataaatctgagttgcctttgttacaagaggattgtcttgttgttccttgtgataaagaagacttttgtgatgatattactattatttctatgccacaactagagaacaaacttgatgttgttgcttctgatcctattaattgtgccaaaattagaacattcaatcctataactggcgtgcaggatgagctgaaattgttatcttctttaaatactttaggctatattaaatntgatgttctatgtaatctaaataatttagaggagaaactttcttgtaatgctgatttgccatgctatctanatatacat

SEQ ID NO: 19157 - DNA, 471 bp, Zea mays
  unsure (1)..(471): unsure at all n locations
agcttaccttactcggcccgttgatcttttttggtactcccctgatcataaagaatattaatgtctcgatatttccacccaacgcatattgatctctcggcgcgtcgtcttcagcggtcccttcttcacttcttcctccagtgtcatccaaaagttggactcccttcttgagactgacattgtggcgctctggacaaccacccctcctttntccgccagtatgattcttcttggtgcctccaaccatgccacttgctcccttggagccctttactgtgccacgcacggccatagtgtcccctactacgtcttgtgcagtccgctgcagcccctgctacccctcacacatgctcaccgtattcgggtgagctacgttggccaactcctgccgccactcactntgtcaaaactgggcatgtctattagcgccgtgcatgggagggtgtccaactcgctcctcctctctttact

SEQ ID NO: 19158 - DNA, 408 bp, Zea mays
tactcaagctgtgaaggttcttcatccccacatgtgctaagcggtgattccacatccagcccatgctattcttagctattaagcatgcatctagaccggcctcttcttttgcaaaatcaactaaataaagtttgccgtctaatacacccttaaaagctagtgaaccatcacttcttctaaagacagacacatctacatttgttaatagacagttataccccatatgacataattgactaacagatagcaaattatatccaagattctctactaaaaatacattagagatagaatgctcattagaaatcgcaattttacctaacccttttaccgggccttgattgccatcaccgaatataattgaatcttgggaatccttattcttgacgtaggatgtgaacatcttct

SEQ ID NO: 19159 - DNA, 437 bp, Zea mays
  unsure (1)..(437): unsure at all n locations
gcttctaaagggagaacacattntatgattatctaatgttcattntgagaaagacaggatttgtagcgcatgccangcangatagcaagttggagcccatcatccactcaagaacatcatgatgaccaacaggccactagagctcctacacatggatctattcggcccgattgcttatataagcatcggcgggagtaagtactggctagttattgtggatgattattctcgcttcacttgggtattctttntacaggaaaaatctcaaacccaagagaccttanagggattcttaagacgggctcaaaatgagttcggcttaaggatcaagataattagaagcgacaacgggacagagttcaagaactctcanatcgaatgctttcttgaggatganggcatcaagcatgagttctcttctccctacaccccacaac

SEQ ID NO: 19160 - DNA, 403 bp, Zea mays
attacgtgcactataaatactaagctgcaagccctcggacccaaccggacttctccggatgcccgagatcaacctcaccggacttctgtctttcgccgccgcgcgtggaccgagctatccagtgagtctccgcccaattcctttcgctcatagcttctctggcatcccgtggacctccctgacctatttaattgaactacctcgccgtgaccaggccggtctcctcgccgtcgacgagcatccccgcctgcgcgcgtggaccgaccgactccggccatctccgacggcgttccgcacaccgttgtgatccccgcgacctccccttcaccctcgaccacttcaccggaacagtctcgccgccggtaagcccctacgcccttttcttcgccgcggctactggttg

SEQ ID NO: 19161 - DNA, 223 bp, Zea mays
cccatgttagtcttaacaattaagcaagtgtcgagttcagctctatcaaaatctaccaagtatagctgaccctctaacactcccttaaatgctattgaatcatcacttcttctaaagacagtgacacctatatcagtaaaaagacagttgtagcccatttgacataattgagatacagaaagcatatggtgatctaaagaatcaacaagaaaaacattggaaa

SEQ ID NO: 19162 - DNA, 341 bp, Zea mays
cttttttcataaagccgagcaatgttgtagctttataagggcatcttgtattcctcaacgcttgcgtctggcctataatagtgaacagtattcgtactgttcaccattcagtaattgcatcgatcttccgaatccaccttttggcacagcaaggattattggtttcatgattcacatattaagtaaacaatgaattcgctatgtgatttgtcctttatacttttgttatgtatctataatttactgaaattattcgaaattaagttcgaatatgcctatagccttctcagatcatatctaaggaatatgttatgacaagacatacttaaactatgtgctgt

SEQ ID NO: 19163 - DNA, 371 bp, Zea mays
tatgtattgggggacataaagcggatgaaacgaagcagtatgcataacctgcttcgactgagcttgttgagatgcagcttcagctagttccttttgcttctggattgtaacatggcacgtcctattggtgtggcccttgccctctccacagaatatgcaaaacagtctccttggctgatctccgaatcttccgccgaagcccctggcgcctctgcctcttggagctggtggccgaaagaaagtttgttgttgccccgatacctgtgaggaagcactgcggcctgtttgctgactccccttatcatcattctgagtgttgtgaatggaacagacatgcctcgggtagtatcttcctccgaagcccctggtca

SEQ ID NO: 19164 - DNA, 406 bp, Zea mays
  unsure (1)..(406): unsure at all n locations
tgtgaagattcttcatgccaatgtggtcttgtcggcgatgccagagccaacccatgggagtcttagcaattaagcaagtatcgagttcagctctattaaaatcaactaagtatagttgaccctctaacactcccttaaatgctactgaatcatcacttcttctaaagacagtaacacctatatccgtaaaaagacagttgtaacccattttgcataattgagaaacagaaagcaaattgtaatctaaagaatctataagaaaaacattggaaatagaatggtcaggagatatagcaattntaccaagtactttgaccaaaccttgatttacatgcacgaatgtgatagctctntggggaatcatggttttctcgtaggaagagaacattcttttctcccgagtcat

SEQ ID NO: 19165 - DNA, 353 bp, Zea mays
taacttctaaggaagccatctagataacaaagtcttttataaaacagattgtacgcagccagcaggaacaagtgggcccatatcccacttaactatgacgaccgacggccctggagctctacaatggacctattcgtccgatgcttaataacatctggggagagtactgctagtatatggatgattattctcgttacttggtattctttgcggaaaatctcataccaaaacctaagggatcttgaacgctcaaatgattcgttaagacaaaaaataaacgacacggaggagtcaaaatacaatgaagcttctgagagaggctatcatgatcttttcctaaccctacaaaggga

SEQ ID NO: 19166 - DNA, 407 bp, Zea mays
aacacttataccatatgtgttgatgtcgtcacagcgctccatgataagctgaaagcttataatacggtgttggagaaacagtgggacaagcaagctgcggctgatgcgaatctgcagaatgaacttgtcgacaaggccagcaacattgctcgcgccgaggaaagcctcaaggcgagggaagcttccttggagaaacgagcgactgatctcacctggcaagaggaggacctcgcctttagggaggatatgtgggcaaggcggaacaagctgctggatgagcttgagctcgaggcataagagaaagggaagcgtttggaggggaaagtgcgggcactggaggagcatgtccgtcagttccaggcagcgcaaacttctcatgcgatgcagatgggctcggacccccaggc

SEQ ID NO: 19167 - DNA, 378 bp, Zea mays
ccccctttttttccccctaaatcttactatgcaggcacgtcagcaagattccctcccctaaatttactcgttccgcaaccgttccccctaaatattcccctacatatccctctactcattaaatatacatttccctacaactaacataactaacttgttttttcatttttatttcttttttcaacacgttgtcattactacatgaaacttggttcacaaatttttttaaattattactcttaattaagacatacttagtacataataaaatattacaataatagcggaaggacgtgtcgaatggggtattaaccacttcgatctacgtcgccaagatagatcgtgctcccttcaaaatgatcttggcgagcacttatg

SEQ ID NO: 19168 - DNA, 317 bp, Zea mays
  unsure (1)..(317): unsure at all n locations
ctcatgcctcgtcattactccgagcaactctctattcctaggggagaaatgatcctcaaagaaaaggacttcatcctccgatgagagagtaaaagctccaaagcaaaaggaccggatttcggctttgtataacattaactcattacatatgaccaatggggaagaacttacttcgagggctctaatgattccgtttntggcgattcatgccatatatgcggagatatgagcccaatgcaaatgaccgcccaccaccacccaattcaaaacttattgcttcccaaagtcttatctttggatcctattggtcaaaaggg

SEQ ID NO: 19169 - DNA, 284 bp, Zea mays
tgtccacaggtgtggacattttttgagaccgcctccgcccattttgtcgtcactacactggggcggggtgtaatcctcgggtgctgctttgccatggctgtaattttgcgtgggacgaagcaaactataaaaatcgggccgcccgccgaccacagctggacgaaacactcccctccgacgtatcacaatcgccactcacgcctgcgccgcgtcaggacatgccttccggcccagccctccactgtcgaatgtcacttatttgactaaagccgcaaaaaaataaa

SEQ ID NO: 19170 - DNA, 447 bp, Zea mays
  unsure (1)..(447): unsure at all n locations
gctgaaaattctagatgcagtccgaatgttgtgttttctcnncttcaagggttntccggcacaaatattccaagaggtgaaaatgaacatgcagaattgctatccaaatcagtcgcttatgggctccccctaccctccgaaagtatttttgaagcaataaaagcaccttcgggtgagctcatggagagagcagtgcttactatttctccagggcataatgaagactggagaactgaaataatatctttccttcaaggcaattgtctttcaagtgacgaagcttataacataataatggaggcaagaacaagaccatatgtgataatagaaggggaatngtataaacatggagtttgttcaccactcctcaaatgtttatcaagaaccgaaggtatggaattaatgaaagagatacatgcaggtctgtgtggatctcacattggatct

SEQ ID NO: 19171 - DNA, 268 bp, Zea mays
  unsure (1)..(268): unsure at all n locations
tgttgctgaagccttttttcggggcatgacaaatgtgatgcttgccgaaagtattaaagctcaagatatggaagtgagtttacccgacgtgggtgccaatgttggagacttgttctcaaatgctatgaatnangaacaacgcaacatattatgtttaatatcaatgcccttcgtccttcggatcattatttcccttcngatataatgaatctaggacgaatgtcatgaaggacataccttcacgatcatgataatagatggagaacat

SEQ ID NO: 19172 - DNA, 427 bp, Zea mays
  unsure (1)..(427): unsure at all n locations
gaccttctggtgtcatgtttcttctaagncaggcttctccgaagattatttcaagtggactttgcacaagcttctccttgtcgtcattcaaccttgacatagaaccactccgactttcatcctgctgcccatttgcttcggtagctgattacaagaaactttgtggttttccgataagcaaaattatagcaaccaaaattgtcatgcaatccatcttttctagccttcgtctgatagtgcagctcgtgaactcgacaaaagctgtccgcaaacggctccaccgcttggctttggagggcccagatatatacactaagcctaacgatagcgttaggagtcaactgatgaaagtagataacaaacctcttcagtacctctgcaataatcccatgtanggggaatcttaatccagcctttagaaagctct

SEQ ID NO: 19173 - DNA, 394 bp, Zea mays
ttaccttgaatcccacaagccagcatatccttgtgagtctttttctttgtcgggtaagacttgcgaaagtacactccgtactcatggttgttgaacccatgttgttgtatgtgatgaaacaacagaattttgttgttcctgctcgaaagtggtaccaaaggatgagccaaaatagtgatcgtgtgtgcgggaggattgtttgcctcccatattgaaaacccttaacttttgtgcgataagtgtgtttgcctccctggtatgcaataatattttatgtactcataacacccggtactgtaataatactctctctatatatttatgaatgtaaattaaagtattgtaatccgcttccgcttattctatcctctgatgtgatgtaatacctgcgtga

SEQ ID NO: 19174 - DNA, 465 bp, Zea mays
  unsure (1)..(465): unsure at all n locations
cacctgcngcatgcaacttctaccatgagatcatggatatcttgtttattttgggcaatgcatttcccctttagatgtgtcaaactcatcattagcctctcattttcttctttgagctttagatatgtatcatcttttgttcctgcaaattctatctcaaaggaaggtttgcttgtcgacggacaacaagcattagcacatgggaatatagtctcaatttgaatacatgtgcatgtgtgaggttgatgagattttaattttctatcacaacctcatgagtaatatctaatatgatatgattatccataagattttcatgagagcacaagagcatatcatatttttcttgaaaagctatattttcaacttttagcttttctacttggtctttaagcaaagattcctatgtactaattgagcgatacaatgtaaagcgttatcttgctcaattgaaaatagttcata

SEQ ID NO: 19175 - DNA, 352 bp, Zea mays
ttgtctttcatgaacaacaatgggcccatgttccgaatgtatcttcatgcataagtatgctggatggagtattgcttcgaaagcattaagcgtccctcgaccaatgattgcattgtatgggtactccatgtcaacaatgtcaaagacaacttgtttagttcatgtgatgcggatgttaccgaaagtaactgacattgttattttgctgagtgccacaatctgtcttcctccaaagccacaaagagggtgtgttgcatcatgtatcttgtcttctggttcttgcatctatctgaaagcccttgcacaaatgatgttcgttgcacttgccgtgtcaaccagtacattgtggacc

SEQ ID NO: 19176 - DNA, 402 bp, Zea mays
cttcattccaacatgtgttagacagcggtgccagagcgagcccaagtttgtcttaacaattaaacatgcatctagatcgacattctctttagtaaaatcaactaaataaatcttgccatccaatacacatttaaaagctagtgaaccgtcacttcttctaaagacagatacatcaatatttgtaaataagcaattataacccatattacataattgacttacagaaagccaattgtaaccaagcaaatctactaagaatacattatgaaatgaatgattagtagtgatgggctatttacccaaacctttaaccttgccatgattcccatctccaaagataattgtgtcttgagaatccttgttctcgatgtaagaggtgaacattcttctctccccgcatat

SEQ ID NO: 19177 - DNA, 451 bp, Zea mays
agtgcgagttctggatcagcggaatcctgttcttgtttcacattataaaccgagaaggattggctgtggatccgaagaaggtaacaactattatggactggtaagcaccgaaagatgttcgaggaatcaatagtttcattggaatggtcggttactatcggcatttcattgagggtttctccaagattactaggccaatgaaaaccttgatggcaaagaaagttgaattcaagtggaccccaacgtgccaagagtcctttgagacgttgaagaagaagttgacaacatcaccagtactgattctgccagatgttcacaagccattctcaatgtattgtgatgcttcgtacaccggtctggatgtgtgttaatgcacgaatggaaagttatggcatacttgtcccgccaactgaagattcatgagatgaattaccctactcatgatctggag

SEQ ID NO: 19178 - DNA, 332 bp, Zea mays
atgatgcaacaaccgcttctatgccctcacactcacatcttcggacgcgttgttgtggactgcttgaattaaacatgaaaccatatgttaagttaatgcccttcgtcctttgaagcattatttcccttatgacataatgatctttatacgaaggtcatgaatgacataccttcataattgcagtttgcattaatgaaagaagaagcatgtgaaacacaaaagataacgtgaatgattatataacattattaattcatcttctattatattaccatgaatcaacagatattatacagaattacttttgtccttcggcttgtagacggaaaagt

SEQ ID NO: 19179 - DNA, 379 bp, Zea mays
atttgttgcgcatgccacacacggatacatgttggtgttcatcatccgcattacaacatcatgacgactgacataccactggagctccttcacatggacctattcgacccgattgcttacataagcatccacgggagtaagtactgactaggtattgtggatgattatactcgcttcacttgggtattctttttacaggaaaaatctcaaacccaagagaccttaaagggattcttaagacgggctcaaaatgagttcggcttatagatcaagatgattagaagcgacaacgggacgaatttcaagaactctcatattgaatgcttccttgaggaggatggcatcaagcatgagttctcttctccgtacactccacaac

SEQ ID NO: 19180 - DNA, 389 bp, Zea mays
  unsure (1)..(389): unsure at all n locations
ctgtataaatatccctcgatgtgctaatgaacatgctgatttgttagccaggtctgcagcacatgggctgccgctaccttcggatgtattcttcgaaacaatataagcaccttcagtggagttacttgaaagagcagttcttactatttctcctgtgtacagtgaagattggagaactgaaataatntcttaccttcatggcaacttcctatcagatgacgaagcttattataaaatgatagatgcaagagctcgtccgtatattattatagaaggggagttatacaagcatggagtttgtgccccgctgctcaagtgcttgtctagagccgaatgtatagagttgatgaaggagatacatgcangcctttgtggatcccacatcggat

SEQ ID NO: 19181 - DNA, 427 bp, Zea mays
tactaacgcttcatgagaatacgagcactgaagtgaactctatttacggtttatcaccctcagactgatggacagactgtatggacttatcaagtattggaggacatgttgagagcttgtgcccttcagcatggtagtagttggggcaagagtctaccttatgctgagttctcatataataatagttaccaggccagtctgaagatgtcaccgttcgagactctgtatgacaggaaatacaggactcctctatttttggaccatactatatgaagacagttctttggacctgaagttattcaagatgcggaagaacaagtacgtatcattcgagataatttgatggtagctcaactatgcaaaagagctatgctgattatagaaggagaccactggaatctgaggaaagaaatcatgtgtacctcaa

SEQ ID NO: 19182 - DNA, 293 bp, Zea mays
  unsure (1)..(293): unsure at all n locations
atgcttttatgccaagatatcgcagagcagaaggtgctgctgggatctcaattgtctgaggaacaagagaaaaacttgataaggtttctgttcaacaacaaagatgtctttgcatggtcagcttacgatccctgtggtgttaacagggatgttattgaacactcgctcaatgtcgatccatccttcagacccagaaagcagaggcttcngaagatgtctgatgacaaggccgaaggtgctcgaaatgaagtaaaaagacttctcagcgccggagttatcagagaagtgaagta

SEQ ID NO: 19183 - DNA, 485 bp, Zea mays
  unsure (1)..(485): unsure at all n locations
ttcctgacaccaaatcaacattgacacatgcaagtacttctatgaatatatatatatgaatgcaatacatactgtgctcaaatagcctaaaccaaacctatccaaacaagagttacttcaaaagatcaatttaatgcttgcatatttctagacaacagcacaacagttatttgttttcctcataactcacaaaatatgcatccaatagaagtaaactatgactttacggaaagcttacaaagtccactatacccctagtattatcatcaccacaagatttgacacttagaaaggccaaacaatgcgaaacgtaaattttgtccagacttggatagaattcaactactcacttcataaatccataattggagtctcagtcatcccattcaggcgctcctagactttgtagaaagccagtanaatggtctatatttcatttataaacctatcaggttaattcaatgcatatcaagatcaaaagacat

SEQ ID NO: 19184 - DNA, 465 bp, Zea mays
tgcacccaggtacattggtccattcctggtgcttgagctttgtggaccagtggcataccgtacttaacttcccgaaacattgtccgctgtgcataatgtgttccacgtgtcacaattgaagaagtgtcttcgggttcccgatcgaaccattgaagtaacatatgttgtccttgaaccggacttgacatactctgagcaccctatacgagtcttggatcaaaaggacagggttacccggagaaaaactctcaagttttataagatacagtggaaccagcattctgaagatgaggctacgtgggaaactcaagacttcttgaataagaatttcccacgctttctagcctcatgtaaatggtaaagtgtatctagttattgcaataaaggaatgaacccccacaccacccctgccttgaccagaaataaggaaatgaaagtattgcgcgtttccttttccattactta

SEQ ID NO: 19185 - DNA, 347 bp, Zea mays
  unsure (1)..(347): unsure at all n locations
agaatatcttcaggcgtatgtccgaagattcttacgcctcanggcacaagcaccaacagtgcccaatgaaattgtcattgaggccatgattaaagggcttcggccgggaccttcatcccaatactttgccaggagaccccctcagactctggagaaattgcttcagaagatggatgaatacatccgcgctgacaatgactntcgacagagaagggaggaagcttacagattctccgaaatagctaggggcttcggagggaggttttatcctagacatgtcagatcgattcattccactcagaatgatgacaggggaagccagcagcagaggccgcaatattcctcat

SEQ ID NO: 19186 - DNA, 193 bp, Zea mays
tgtcgacgactcttgggttgttctggacaccgcatccgacgacgacgccatcacgccgggcagctcatcgtccacctgaagcccaacctgccacgtaagtcgctactggtcggacatgaattcttgtgcgctgggaccatggacgttgctgatgttgtgtgagtgtcctcgaacatgatgtatgtagtggaat

SEQ ID NO: 19187 - DNA, 449 bp, Zea mays
  unsure (1)..(449): unsure at all n locations
acatgtgctaaacggcgatgcctcttgctgtctatgctaancntagcaattaagcatgcatctagaccggcctcctcttttgcaaactcaactaaatatagtttgtcatctagtacacccttaaaagctaatgaaccatcactaattctaaagacagacacatctacatttgtgaatagacagttatatcccatattacannagtgactaacagacaacaagttatatccaagcgactcaactaagaacacattagaaatagagtgctcggatgaaatagcaatatttcctaatcctttcaccttgccttggttcccatcaccgaatatgattgaatcttgtggatccttgttcttgacgtaggaagagaacatcctcttttnccccatcatgtggtttgtgcatccgctgtcgattatccagcttgagcccccggatgcataaacctg

SEQ ID NO: 19188 - DNA, 403 bp, Zea mays
  unsure (1)..(403): unsure at all n locations
tcttattcaacatgtgctattctgctatgccagagccagcctatgttagtcttagcgattaagcaagtgtcgagttcagctttatcaaaatctactaagtatagcctgaccctctaacactcccttaaatgctattgaatcatcactttttctaaagacagtaacacctacatctgtaaaaagacaggtgtagcccattttacataattgcgaaactgaaagcaagttgtaatctaataaatctacaagaaaaacattggaaatggaatggtcangagatatagctattttacccaatcctttgaccaaacctttagtttcatccccgaatgtgatagctcgctggggatcttggttattctcgtatgaggaagaacatcttttctcccctgtcatatgggtt

SEQ ID NO: 19189 - DNA, 455 bp, Zea mays
  unsure (1)..(455): unsure at all n locations
acactatgatactaagcttcaagcaacaattgaaactgaagctgggccttcagagcccttcatgttaaaccttttgaagccgaagaaacaaaaattgcaaaggcagccgataaaatgaaaatgtcagagccaattntggtagaagaaattgaactgctgcccccgaagcaccttccaaaatatacgattatattgtgcgacatgcttcggggaagaaattatccgaagaagagatttttgaagctaatcactatgccagagaattaaaatatccgaagggggcactagtgttcaatgggacagacgaagatgacttcctatactgcctcccagacaacaaagaattatctgtctgccgggagatggctagaagcatggtgtttccgaagcttgaagctggactctgcgctatgacgaaggacgatcttgcggatagccttgcatataatagtctg

SEQ ID NO: 19190 - DNA, 433 bp, Zea mays
  unsure (1)..(433): unsure at all n locations
agcttatagccttacanagtagaaacatagagcattagaagagatgggaacttcaggtatcattccatattcctaatacagccatatgaatgcccaaacgaaaactgaggttcattcaaattgatcataataggaacaagaaattcccggtggaaggtcactcgccagaattgagtcgaatggacgaatcttcatgccacaaggngcctttgctgtgtttccacgcataggatcagtaatccatgtgataatcaatccagcattgcgaacaacacggatgagatgaggcaacttcactctcatgttctcttcccccatccttgtaattatggtgatccttccaggtttgtttgaanggtccagaatctcaatcagcttcaccaagtcactggngttcattntgtcgctcatctacattccacanaatacatgc

SEQ ID NO: 19191 - DNA, 428 bp, Zea mays
  unsure (1)..(428): unsure at all n locations
catcattttcggcaaacatcgattttcttgctgtcaggaaggcagtatanaaagtcattctcttcatcgcctttgtacgctagagatcatcgaggatacttcagatccctagcataacgttgagcgtcggcaatttgcctctggatcagatgttttcctgaagcgtggcagatgatgaattcaagacctccgatcgatgcggcctcgggtatcggcactaatattttctctagcagacgcgcttacttgctccgttggcctagtttccgaaggtccagtcttagtgcagtcaggagcagtacttacgtcgacagcttcttccgattcttcaactttgtctttggaaaccctagtaggagcaggagtagccatctttgaatgtctcagaacagcgtctagaacgttggtgaaagtagcctagagggggg

SEQ ID NO: 19192 - DNA, 434 bp, Zea mays
  unsure (1)..(434): unsure at all n locations
atctcacagtcacctgcggcatgcagcttaccttcatatctgaaggggtatntcagcctaaccaatccaccttcgtcagacttggagatagactcctttggcatttcccacttctctacaagtggccacactctgaaggctatgtgttcctggattaaatcccttgtcccgatgaaagagcaaactataccgaaggcccttccgcattcttcggatgcctcatcaatctctaccttcggtttccgaaggccgaagcgctgatagatangacgcatgatgatatctttaatgtcttctcgtacctttaaatcgtttntcacgtagaaccattccttcatccaatctccangccaccttntctgaaggttggcactgggcaacttgatcttgaacgagcgacgaagctatagcaaccaacattggtatgatattgc

SEQ ID NO: 19193 - DNA, 431 bp, Zea mays
  unsure (1)..(431): unsure at all n locations
tcggtagatcacaacttcattntcttaggagcagggacgttgttgtctccgccagctctcacaatagacatatcccgaanataccttcttctcatgttctcaagatgaatntgtttgatggtcgatttttcgaaaattgaatgacttggcctccacggccggtcctcagaatcttcgcccccactttccacatcatagctatcacttgtaccagtatcttcagacaggccttccagtatctccttagtaatcttctctgtatttggttttgccattgactcaataaatccagcaatataaggattcacagcattcttctcctcanaaagcttctcctcttcagttagcttcgtctcagcagcaatcttcttgtcttgaggcatcttgtcttcagaaatggtgaanacgtgttttctaaaccgaaagctcga

SEQ ID NO: 19194 - DNA, 390 bp, Zea mays
agcttgaagccatggtaagtagcatatgctaatattatgcgaattgactcaagcctagctacgggtgcataggtttcaccaaaatccaaaccttcgacttgtgaataccctttggccacgagtcgagctttgttccttgtcaccacaccatgctcatcttgcttgttgcggaagacccatttggttcctacaacattttggttaggacgtggaactaaatgccatacctcgttcctcgtgaaattgttgagctcctcttgcatcgccaccacccaatccgaatcttggagagcttcctctaccctgtgtggctcaatagaggaaacaaacgagtaatgttcacaaaaatgtgcaacccgagatcgagtagttaccctcttatgaatgtca

SEQ ID NO: 19195 - DNA, 371 bp, Zea mays
  unsure (1)..(371): unsure at all n locations
tcgcacctctgaactaactcggctgcatactcttctctggttgcaatagaatcctgaccttgaaaccttcccgactagtgtcttggacgccgcatgtattccacattgcccggcatggacctcctncagaagtcgctttccagtagatgagagaatgcacttcatgaggacgcctgatgcaccccttctgtataattgtctcccaatgagtgtaacgagccgactgtctggcaatgcgctcagctgcatttttatcatctgggtcctcttcattctttatatacctgatgattgggcttctccagtcattagaatctgactcggggtgacgtataatattacactcttctgcttgatccattgagatgctc

SEQ ID NO: 19196 - DNA, 476 bp, Zea mays
agcttctgccacaatgtgatagtccctggccgattacaataccatgtttgggctacattccggactgccatgatgaaggactctgccatgactgcagtatggctcccatacgaagatatatttgcttcgtagctcatcagaaactgctttgggtctgagtgcccatcatacatgggaagctgaggtggcttgtatgacgggggccatggggtagccttcagttctgctgctaagggagaagcatcatcaaaagtaaaggtatcatgattaaaatcatcataccatccatcttcgttgaataagccttcttgacgaagctccctgtgttggggccttcggtcttgttcatcttgaacaagatggcgcacttcttcggtagcttcgtcgatctttctttgaagatcaaccagccgcgccatcttctccttcttccttttgtacttgtgatggatgaattccatgtccctgatctcttg

SEQ ID NO: 19197 - DNA, 332 bp, Zea mays
  unsure (1)..(332): unsure at all n locations
gccaagcaaagcaggcgtaccaaatgtgctcanggtgagttcttatttatacgcccagcgcgctccaagttggatggcccgtctgtcattgactgttgctattctaacaaagggaaggtgttttttcggaccttctgcttatggccttcgtccatatcgcaatctgaatttgttattctaacaaattaaccttgcgaggagctactgttgggggtcttcgtcttccgaaggtcctcaaaaacatgatttaacaatgtttctagagtataatacataaacaggtaccttctgacgcggatcagaaccacaatgtgaagaagtacatataatat

SEQ ID NO: 19198 - DNA, 483 bp, Zea mays
  unsure (1)..(483): unsure at all n locations
agcttctaaagggagagcacattntatgactaactaatgttcattntgagaaagacaggatttgtagcgcatgccaagcangaaagcaagttggtgctcatcatccacacaagaacatcatgacgaccgacaggccgcttgagctactccacatggatctattcggcccgattgcttacataagcatcggcgggagtaagtattgtcttgtaatagtggaatattattctcgcttcacttggggtattcttttgcaggagaaatctcanacccaagagaccttanagggattcttgagacgggctcaaaatgagttcggcttaaggatcaagaaaattagaagcgacaacgggacggagttcaagaactctcanatcgaaggcttccttgaggaggagggcatcanacatgagttctcatctncctacacgccacaacanaatggtgtagtagagaggaagaatcgaactctattggacatgg

SEQ ID NO: 19199 - DNA, 494 bp, Zea mays
  unsure (1)..(494): unsure at all n locations
tgtctgcatttatggcccgcttggtgcatgattcacataacgaggtggaactcaactggacttggtagttgagttgcccncgaagatcagaaaccttttgcttcaagttcataatatcagcttcagcagcagcaacttcctcaagatcagctttagtctattatcaacacagaaaaaaagagagcttcaaatggagaaaaacattatctatctccatagctagattcagaaagggtaccttggtgtctatcgttgatgggaaggacacttgtcctcttcgcatattcattaacccagactccaatgaagccctcaaatttctctccttctgcagctggtctncgtaaatttccacctatcgaatgtgcaaagtattcttgttgaacagagaanaaaaaacagaaccaattgcaagcacaacanaataattcccagaagcatgtaatacnagcatagtctgagtcagaacttcctggatagaacanatatgaaat

SEQ ID NO: 19200 - DNA, 364 bp, Zea mays
  unsure (1)..(364): unsure at all n locations
agctntatggatgatagcttcggcactgcttttgatatgatctgcctaaggtgtttcttcttacaggatcttcggtgacgaagcatacccccaacaaagaccatcaatatggtgggtggaggtggtataaatagcactcacccaccaactagctgttaccaggaatctgctgtgcatgggcgcaccggacagtccagtgcgccaactgtgcggcaccggtgcgcacggtcgactccaacggctagttctgacagctagccattgggcagatagcacaccggacagtgaacagtcattgtccggtgcgcaccggacagtccggtgcgctctccggtgtgccactaaaattcgacttgcgaacagc

SEQ ID NO: 19201 - DNA, 382 bp, Zea mays
  unsure (1)..(382): unsure at all n locations
gatccttaagtcacctgcggcatgcaagcttttggttcanactgtaattaaatcacgaccttacattnttctatagtacttatggggttttatatttttcttagataggttacattgtttagagtctggcaaaattagtttgaccaaatttgggtaaaccaaacagaagttatgggttttcaaagtttctgtttgaatttaaatcaggttttaattaagtttttctggaaaaacagtttgcgccgaggtccctgtgtttaaaccgaatcaaacctcgcagatctacccttacgccactattcacttgagtctctgacttttcacttaaccccctgactttctctccctctcacccgcagtcccttcctcaactgaaacagta

SEQ ID NO: 19202 - DNA, 515 bp, Zea mays
  unsure (1)..(515): unsure at all n locations
tattacggacctatgatactcagcttctaagggagaacatgtgataggtctaaccaatgttcatttctataaagatagaccttgtgcagcttgtcaagcanggaaacaggtgggaggagcgcatcacagcaagaatgtgatgaccacttcaagacccctggagctgctgcatatggatctcttcggacccgtcgcctatctaagcatagggggaagtaagtatggtctagttattgttgatgacttttcccgcttcacttggatgttctttntgcaggataagtctgaaacccaagggaccctcaagcgcttcctcaggagggctcanaatgagtttgagctcaaagtgaaaaagataaggagcgacaacgggtccgagttcaagaaccttcaagtggaggagttccttgaagaagaagggatcaagcacgagttctccgcttcctatacaccacagcaaaatggtgtggtagagaggaagaacangacgctcatcgacatggcgaggacgatgc

SEQ ID NO: 19203 - DNA, 393 bp, Zea mays
  unsure (1)..(393): unsure at all n locations
gcttaacatgcttgcttcaagtgcattctttttatttgcaagattagctatagagggtttcatgttaattatttctttatctttattctctatagttatctttgaaaaggaattaggcttacacctagttcctaaataattttggtggttgaattgcccaacacaaataattggactaactagtttgcccaagtgtatagattacacaggtgtaaaaggttcacactcagccaataaaaagatcaagtttttgtttcgacaaaggagcaaagaggcaaccgaaggccctctggtctgggggcaccggactgtccggtgtacaccggactgtgtncggtgcaccaccggacagtgttcggtgcaccagaggactccaactcgaactcgccacct

SEQ ID NO: 19204 - DNA, 418 bp, Zea mays
  unsure (1)..(418): unsure at all n locations
cccatgttgagtttagcaatcaagcatgtgtcgagctcagctctatcaaaatctaccaagtatagctgagcctctaacacacctttaaatgctattgagtcatcacttcttctaaagacagagacaccaatatcagtaaaaagacagttgtagcccatttgacataattgagaaacagaaagcaagttgtaatctaaagaatctacaagaaaaacattggaaatagaatggtcaggagatatagcaattttacccaatcctttgaccaaaccttgatttccatccccgaatgtgataagctcgtggggatcttgngtnttctcatatgaggagaacatacttttctcccctgtcatgtggtttgtgcacccgctgtcgagtatccaacttgagcccccggatgcataaacctacaaaa

SEQ ID NO: 19205 - DNA, 410 bp, Zea mays
  unsure (1)..(410): unsure at all n locations
agcttatgaagattattcatcccaacatgtgctattcggcgatgccagagccagcccatgttagtcttagcaattaagcaagtgtcgagttcagctctatcaaaattcactaagtatagctgaccctccaacactaccttaaatgctattgaatcatcacttcttctaaagacagtgacacctacatcagtgaataaacagttgtagcccattttgcataattgagatacagaaagcaaattgtaatctaatgaatctacaagaaaaacattggaaatagaatggtcaggagatatagcaattntacccaaccctttgaccaaaccttgatttccatccccgaatgtgatagctcgttggggatcttggtttntctcgtaggaggaagaacatcttcttctccctgtcat

SEQ ID NO: 19206 - DNA, 428 bp, Zea mays
  unsure (1)..(428): unsure at all n locations
ngcagcataaganaagagtatagaattcttccacaatactgattatacgaacatcttcactgatctccaacacanaccaacacagcttctcagataaagtggaaagtagaacaaaagggcttcccaactagataattaattttattaacacttaacaggtaaaccaaagtgcaggggatgcctacaccctggagacagtcattacaaggatccaaatccaacatagttcatcatgataaacataaaggcacaggataagcaaactaccctatctaactaagactaactaagagtaagactgatgctaagactatagcttctatgtgtatatttttgcattaattacaagatctaacgctgatgatctatggttctaaatntatcttggtcctacagtcggngttgccataagcatggtgtccacgctg

SEQ ID NO: 19207 - DNA, 394 bp, Zea mays
  unsure (1)..(394): unsure at all n locations
acttcagtaatgagttcaacaaattcatgagagcttctgtcaagcgcctcgacgcccaacgtcgctggaccgcggctacgcagttcgtagtcgcgctccagaccttcaccgtgagggattcctcaccggtggcttgagagaggcaagggagaagagcagttttggataattgatctttcttgattatttcccagcctattacacggcatatatatagcctctggttcaaccaacctttcctatgattaaggcatatgaaaaggaaactaatcttaaccaatctctcctattattaaggcatatganaaggaaactaatcttaaccaatccctcctattattaaggcatgcaagagggaaactaatccttatctttctaaacttagccactgatt

SEQ ID NO: 19208 - DNA, 450 bp, Zea mays
  unsure (1)..(450): unsure at all n locations
actaagcttacagccatcttggaactctatgagaaagcactctttggcggtgagacctgtctgcattnttccaaatgtttcttggaatttcgcttaacccanaaccaagaagaatagcaccagtcaccaatccaaaggtatttgagcatgccattgcagatcccacaataccaccatccctgtcaagaaaagttattttaggtcaaacgccctactagatacatgtataacagacagctggtttcagaagaaatatactcactgggatgaaagcaaagcatcattcactgngaataaaggcagtacctcgatagaaccactgattatgttttattcatctcatgaaccaaatgtgattgtgcaacactaatctatgcactaaacttctttttctcgaacacgcaagagaattgtgcatcatttcatgaagagagagaacangaactgaac

SEQ ID NO: 19209 - DNA, 471 bp, Zea mays
  unsure (1)..(471): unsure at all n locations
actgaggatgcagcttaatgaatttagaagtaaacatgagcattcataattataataatttatggaaagactatttatcactatattatctcttaataaaatagctaaatagggataattaaacccataagacttaatgctaaaataggtttagaagaagcttaagccatataaattgttgagcagcaagttttgtagactagtatgtttagtttctggtgtgtccaattagtttcagtttggtcacttgtatcaaatgtgtagttatgtataaacatgtataaactagttatatacttatttaagagtgattatgtttttcccacctcttccttatgaaagtttgcatttcaaatcattacataagcattcatgtacttataattgacttgtaaaacacctanaagaagaagttgaagtggatgtggaagaggaatcagntcctgaatctgaagcttctcatcacaagtt

SEQ ID NO: 19210 - DNA, 355 bp, Zea mays
  unsure (1)..(355): unsure at all n locations
gatcatcgaaatcggagttcggagctattatttatgtgtcaaatacgacaagcggacatgggctatccggtgcacaccggatcgtccggtgcgccatgtccggtgcgccatctttggaagctcaaacggctactnttaacagatagtacacgtggcatgtccggtgcaccaccggacagtccggtgcgccacataaagctgcagaactgctgtccaacggctatatttgagttggggcatatatatacttcacccaaccggccatttggaggtgtggaagaccaaacaacataccaaggcatattgtagacatttccaagtgctcaaacacctaagtgcttaatcgaatcactcg

SEQ ID NO: 19211 - DNA, 428 bp, Zea mays
  unsure (1)..(428): unsure at all n locations
atagttctgtatttttttcattgcgtataatccctggatttactattccaagcactagaatggttatattctttttctttattttataataatggaggtcttcgtagttcctgtttttttttcggcgccttttgaactcttgataagacgtcgctcagagaacgcgtttatctatcctctccataagtgctcgtccgcctctgaagtntgattntggtcaagaggtttactgcatgttaagctatgataagtgtttgcaaaagttcaatcgaattgatatgtagttggaccgaaaaaggtaatgccacgaatatctggagttcatgctattctaaataatatggagttctaatggtaagtgatacaagaaatactatgatgcggtgctgntnggntcacatatttgtanggctgaaaatggatgtata

SEQ ID NO: 19212 - DNA, 457 bp, Zea mays
  unsure (1)..(457): unsure at all n locations
tactcagcttattagatatggctaaggaacagtgcaccgcaaggtaacatggccgcttgcctgcaaggggaaagaaggtgttgatgcttcgtcagaagagaaaagttttgaccttcagcacctgngaggtcaggaattgtcagaggcagataaagaggagctaanagaatatgaaatatcttgtggctatcagccacggtctatgcttttctgcagagttgacaaagaaattctgggatgtatccgcgaccgcgccggagcaaaaataatcagcactctgtcaaagagtgttggtttcccgaagctagaagctagaatctgacattagtgattaccgactgtcaaagagtgttggcactctgtcaatgaatgctcttggattatcgaatcttcgtcgctggtgaattntaaattgttcgaatcacgcgtgtaagtgaatacgaaaatcagaagactt

SEQ ID NO: 19213 - DNA, 422 bp, Zea mays
  unsure (1)..(422): unsure at all n locations
agcttcaagtcttcgaatggtatcccaaatattttcaagcttcggatctcttgctttgcaactttggtcaacatggccagaaataacttgagaatcagttttaaggaccgcccttcttatccccattgctttcaacttccgaagacccaaaagcaaagcttcgtattcagcaatattatttgtacaactaanatcaagtttcactgcgtagcatgttctgactttggaaggtgcaattaagacggcagctgcacctgcaccgaaggttccccaagaaccttcgcagaatattgtccaggcttcggcatctttacttgcttcttcttcctgagcccctggcgtccagtcagcaatgaagtctgctaacgcctgngactgaatcgaagatctatgcacataatcaatgcataactcattgagtt

SEQ ID NO: 19214 - DNA, 472 bp, Zea mays
  unsure (1)..(472): unsure at all n locations
tactcagcttatacaagagaatagaggcaagagctcgtccatatgtaataatataaggggagctgtacaagcatggtgtctgctctcccttactcaaatgtttatccagagccgaaggtgtagagttgatgaaggaaatacatgcaggcttgtgtggatctcacattggatctaggcctttgctgggaaaagtctttcgccaaggattntattggccaaaagcagcttcggatgcatcagaactagtccaaaagtgcgaaggttgtcagaaatgtgcaaaagatcaaaaacaaccttcgtctctaactcagttaatacaacccacttggcccgtacaaaggtggggtcttgatttgtatgtccgctccaccagcacagggaatttagatatgttgagtggcagggatattttctaagggatgggcaagccttagcccaataacttcgtactgccaaagttttctacaaacat

SEQ ID NO: 19215 - DNA, 394 bp, Zea mays
  unsure (1)..(394): unsure at all n locations
atctcacagtcacctgcggcatgcaagcttctaagggagaacacgtgataggttngactaacgtgctattctaaaaagatagaccttgngcagcttggcaagtaggtaaacaagtgggaggagcacatcacagcaagaatgtgatgaccacttcaagacccctggagctgctgcatatggacctcttccgacccgtcgcctatctgagcataggaggaagtaaatatggtctaattatcgttgatgacttttcccgcttcacttgggtgttctttttgcaggataagtctgaaacccaagggaccctcaagcgcttnctaaggagagctcanaatgagtntgagctcaaggtgaagaagataaggagcgactgagagcacctagaggggggggg

SEQ ID NO: 19216 - DNA, 435 bp, Zea mays
  unsure (1)..(435): unsure at all n locations
tncattaacaaaaatgtgtctaactaacccctctaccgcatgtctgaagatggcatcatgacgcgagccctagacacgacaaaaccgaagatttgcctcgagctcgggttgagagacagaccagacttgagagctccatatctttgaaaccagtaggccaaatcctatgacccccacacaagatcggtagcttatagggaggagaagaggttntgtgcactgaccaaggcaagagtaggctcggataaatgaccacatgcgccagaactcgggtagaatgaatgcgcacacgtgttcgaccctggtcgacacgacggcgttcgcccaacctgcgcgtgcgccctcgcccgcgccgtgcctataaagcagccccaaggcctcggccgtacctctccgcgcgctctcangccttgcctaagccaaagttcaccggac

SEQ ID NO: 19217 - DNA, 359 bp, Zea mays
  unsure (1)..(359): unsure at all n locations
ccaaacacncagctcaacttttgaggcagactttatactatctcatccgtcacctatcaaggtcttatcactgcaccaccttgatatgaaaattaagttaaagtgataatttattccctatcccccccttagcgaatcaatctgtcccggccaaggaactttacgtgcccacaatgcagcggacctgtcagacataacatacggagactgctcccccacaatgcagcatccgacttgcacaagcttgctatcaacaccttcgtcttcttcagtacccattgatgaggattggacacggtcataatatcccactcttcatctacaaaagtgaaagtatcctcttataactgaccttattt

SEQ ID NO: 19218 - DNA, 329 bp, Zea mays
  unsure (1)..(329): unsure at all n locations
cgcgccttctacgatgaccacgatgggtgcaacccgccacatgacgccaacactcggtatgccgtgcagctgctcgacgtctgtggtgagccccgaccctacgtcattctcgaaaccctagccgcagtcgttcctgacctccgcgtggtgtcaagtgtgttcgttttctggtaggctggcggaccgtgccttctacaatgaagtctctatgaacggcgacaaccaaccattgaatatttgtaagcttttttgaccttntatatggcctggcacttcaatggtagactagtatagaaggcaaattaatgaaattggttgcaattacagat

SEQ ID NO: 19219 - DNA, 479 bp, Zea mays
  unsure (1)..(479): unsure at all n locations
agcttgtcggtcgttggagatgggtcacatcattacaacgagcgagattgaacttgttgggcaggccggcgtcgccacaatgacgagcagggcaagggcatcgagnaaggcagggtcgagcgacattgggacggaccggttcgtatggcataagaaagaatgggatcgaacggacaaatgcacaaactagatcaaggaagaggagacgagttangaggacagggccaatggatcaatccgacaagtaggctcaggatggaattggtttagtccatccaaaactttntttctatacttaagagcatatccaacagtggtctatcttgaaatataaggctcaacacataananacatctccaataatgccctattttacaattnttattaaaaaataggacacatcatgaagtgccttanatgtattacatctcatattaatactctattttggttctatatcattctcaatattttcttt

SEQ ID NO: 19220 - DNA, 452 bp, Zea mays
  unsure (1)..(452): unsure at all n locations
aagcattgaaaaggatcttcctcattcaaatatttatccataaaaacaaaacgcttattcttcaaatcaacaatgaacaaaaaccaatggttcgcatggcacactggaaaatacagctgaaaaaacagattgaggtaaaataagaacaagacataaatgtatggcacattaaggctgctgtttggaccaaaaaaattacaacaaactaagcaaacaaaaaaccttgttagagcggtgcaacttcaaagcaaaattagcccctagaaacgatttccttagatcttcaacttcatattggctattgtattccatcatcgaatgctgtagtaacaatagaaattnttaaaanaatgaaaaacaataaaaaaaattacaaaaaaacaaaacaaaaccaaattaaaagttgaagaataattacccccacttttggataaaagaaatgtttctttgac

SEQ ID NO: 19221 - DNA, 407 bp, Zea mays
  unsure (1)..(407): unsure at all n locations
agcttgagtcagtcatcctgcanagaataattgacgcacaaagaaatgatgagggaatgaaacacattcatgagataatagaagtcggtaaagccaactgcttcagaagagatgatcaaggtgttgtatggtttaacaaccgcatagttgtgcctaaaaatgatgagatccaccagcaaattctagatgaagcacatcttagtcgctattctattcatcccggaagcactaagatgtatcatgatctanaatagcattattggtggacaaagatgaagatcgaaattgcacgctatgtggcanaatgtgacacttgtagacgtgtcaaggccatacacatganagctgctggtccattacaatctctacctataccaacatggaaatgggaggatataagcatggac

SEQ ID NO: 19222 - DNA, 446 bp, Zea mays
  unsure (1)..(446): unsure at all n locations
gtagcatatgctaataatattcgaattgtctcaagcctagctacgggtgcataggtttcaccgaaatccaaaccttcgacttgtgaatatcccttggccacaagtcgggctttgttccttgtcaccacaccatgctcgtcttgcttgttgcggaagacccatttggttcctacaacattttgattaggacgtggaaccaaatgccataccccgttcctagtgaagttgttgagctcctcttgcatcgccaccacccaatccgaatcttgaagtgcttcctctaccctntgtggctcaatagaggacacaaacgagtaatgctcacaaaaatgtgcaacacgagatctagtggttacccccttatgaatgtcgccgaggatggtgtcgacggggtgatctcgttggattgcttggtggactcttgggtgtggcggccttggtcttca

SEQ ID NO: 19223 - DNA, 468 bp, Zea mays
agcttcggattcctgatgctagaagacgggctcttattgctatctaaagatgaattggctgacagcttagcatacaacagcttaaaggtgagggaataagatttttgtacttaaaaacaaaatttttccatttgcttatacttaataccacactccttttgcagggccttattcttagcaacgcccttagggcgcaaaaaagcgctgaagacaagggatgtactatggccttgaataaccttcgttccgaagtgattgagctaaggaacgaaggtcttgaaaaagataaaatattaaactcattggtgaacaagataaaaaaagatgaggctacttcaaaagcccaagctgaggcccagaaatgcgaaattgaagatcttcggaaacaactggcagaagaaaaattaaaatgtgcaattgtcgaagctgactgagacgccattgactactggaaaaatactgggaaaa

SEQ ID NO: 19224 - DNA, 473 bp, Zea mays
  unsure (1)..(473): unsure at all n locations
tcggcactgaannacaattttagcatttccgaagatgtctgtttacataaaggccggtcccgagatgaagctgagtctctctgaagagaagaacctgnggttccttatagcgatggcggagaccaatacggaaaaaattaccaaggagatactggaaggcttgtctgaagatactggtgacagcgacagttacgatgtagaaagtggtggggaagagtccgaagatcggccatggcggccaagtcatgcggttttcgggaaaaccaccattaagcagagtcatattgataatatgaggggccgatattttcaagatatatctattgtgagagctgatgatggagaaaaaacttctcccacccncgaagaagatgaagtcgtaatcttccgaagctntctcaaggctgggcttcgattcccncttagcaactttgttgttgaagttctgaanacatttcaaatctaccttcatc

SEQ ID NO: 19225 - DNA, 355 bp, Zea mays
  unsure (1)..(355): unsure at all n locations
ttggaatccattaatactccctgcacatatattcccatcatacaatcttagacatatatcatagaaatcattctttagggcaagccaatatgtcttcatgaattcattgttaaagtcatgtagtcacatgatgatttatcagttggctaggtcaggatgacattatctaattcctccttagtgaannggtggttaaggcattcaagattgttgtgattatgtacaagagaatgtaaatcaaataggatggtcttaaactcggaggtgccaaacatgttttgaaataattccaaatacatagagctttggcattatggtcatggtgggtggaacctaaatcatcctctagtgacat

SEQ ID NO: 19226 - DNA, 428 bp, Zea mays
  unsure (1)..(428): unsure at all n locations
tcngatgtgcatagactacaccagcctgtattatgcatgccttcttgacccgtatccactgccgcgtatagatcagattgtggactctacttcggggtgcgacctcttatccttcttggacgcttactctggtttccaccaaatccggatggttaacgtggatatgaagcttaccgcttttgtgatagtagatggactatactgttatgttataatgccctaccgtctgaggaatgccttgccaacctttgntcgggcaatgagtaagaccttcggagacctgatctgggataaggtggaaatttacgtcgatgacatcgtggtcaagactatggaagggtcggctatagtggaagacctggccctggttntcggcaagctgcgggcaacccgcaccaagctgaacccggagaaatgcatctttggtg

SEQ ID NO: 19227 - DNA, 368 bp, Zea mays
  unsure (1)..(368): unsure at all n locations
tcttgtagaagggatgatgggtactatgcgccgctcgacactgtcgcactgttcgccaacagactggtcatgcgcgccatctgctggttgaccctgacgccgtctgccggcggattggacaggacgcattaaatgctgagagggcgcgtcgcccgtcagcgtggtggcaggcggcgcgtccttctcgcaataaatgcaaagactgcacagccatatgggccttacgtcaggctcgacctgttggcttacgttacgggccacaagccatgcgcccgcggcgggtttccgcctgagcggngagcgtatggcaaggcctggacacgtgtcggcaccggacccttgcttgtgctatggttctctccgtctcg

SEQ ID NO: 19228 - DNA, 446 bp, Zea mays
  unsure (1)..(446): unsure at all n locations
tatttcctctgggtttcttaatccgatgccacatctacttgttcacctaccatacgaagctaaggtaggtggtcttgtccagtatagatggatgtatcacatagaaaggacactaaagaagctacgtgcgatggttggtaataagagacgagttgaacggtgcatcgcttaagaattcanataccaagagatagcatcgttcacgggcatgtactctgtagaggaacacaatgtcaacgcacctgcgttacggtatcatgtcgacgagcnccctatcagtgatcttaaatttttcaacggaggggcaaaactgtaggacccaacacaacataatgtttcaccaatgacgaatggaagactgatntactctacatgtataacaacatggaaaaangatgaatcagttttcctggtagtgcacacttaattnttagtcatgatctcta

SEQ ID NO: 19229 - DNA, 427 bp, Zea mays
  unsure (1)..(427): unsure at all n locations
ctcagcttatacaagaggatagaggcaagagctcgtncatatgtcatgatataaggtgagttgtacaaacatggagtttgtgctccgctgctcaaatgtttatccagaaccgaaggtgtagagttaatgaaagaaatacatgcaagcctgtgtggatctcacatcggatctatgccggtacttggaaaagttttccgtcaagggttttactggccgaaggcagcttcggatgcagcagaattggttcaaaagtgcgaaggttgtcagaaatgtgcaagagatcaaaaacaaccttcgtccttaacacagctcatacaacccacttggccattgcaaaggtggggccttgacttgttaggtccgttaccaccggcccaagggaacctgaggtatgttatagtagctgtggaatattnttctaaatgga

SEQ ID NO: 19230 - DNA, 483 bp, Zea mays
  unsure (1)..(483): unsure at all n locations
tactgcgtgtattngacatccaagactntntgctatgaatttctcatcaattttctgaccagntnttttcccctcgaagactagacggcgaaaaaccagaaacaaaaaaagaagataaatgtatacaagagaaggcgttcctagttcgtcgtacctgcactcccatgctcggtcaaatgtccgcagagcataatacgaagggaaacgctggatgcgggcgggagctgcctccggagagcccnccatacattgcttaagagcagcttggagttcccaggtccctatcacctagacaagaaaaagaagggtcagttgtactcgaaagcgtccaaccacccgcatttccaaggctccagctccatcgcttctccttgcgaagcaattcgagtgcgaaataaagcttggatggatcattggaagagaaggaagccgaagctcacacaatatcccttcccggctagctctttttcaccttcaaagact

SEQ ID NO: 19231 - DNA, 317 bp, Zea mays
  unsure (1)..(317): unsure at all n locations
taggttcatcgtctccgagcgaggcatcgaggccaacccggagaagatcgcggccatcaccagcatgggacccatcaaggacttaaaaggggtacagagggtcatgggatgcctcgcggccctgagccgcttcatctcacgcctcggcgaaagaggtctgcctctgtaccgnctcttaaggaaggccgaatgtttcgcttggacccctgaggccgaggaagccctcggcaacctgaagacgctccttacaaaggcgccagtcttggtgctcgcggcggacggagaagccctcttggtctacgtcgccgcgaccactc

SEQ ID NO: 19232 - DNA, 340 bp, Zea mays
  unsure (1)..(340): unsure at all n locations
tcggcgcttgaacaggggcagaggcaacgggaacacgtgttcgaccgcggctgacacccctggttcacgcccgttcgcgcaccgcgccttnccagtgcacgcccgcgcgcactcaccggtccacgaccgtccgtgcaccgcgccgcgcctataaagccttcccaggcgcgccccacttcgccccgcactcaccctcaccggccagccacttccccttagctccggcgagcttaattccgcccgccattgccgccagagcttcggccaccgtggccagctcaccccagccatcctccgggcaagccagtgcttcggctagctccgccagtagcccgtgaag

SEQ ID NO: 19233 - DNA, 419 bp, Zea mays
  unsure (1)..(419): unsure at all n locations
agctngagtcagaccttctacaacggataatggatgctcaaagggataatgagggtatgaaacacatccgggagaagataagggctggaaaagcccaatgttttagagaagatgatcaaggcattgtatggtttaataaccgcatagttgtgccaaagaatgaagagctccaccagcaaattcttgatgaagcacatcttagtcgctattctattcatcccggaagcactaagatgtaccaagatctanaacaacattattggtggacaaaaatgaagatcgagattgcacgctatgtggctagatgtgacacgtgcagacatgtcaaggccatacacttgaaagctgccggtccattacagtctctaccaataccaacatggaaataggaagacatcagtatggactttattgtggga

SEQ ID NO: 19234 - DNA, 491 bp, Zea mays
  unsure (1)..(491): unsure at all n locations
ttaactcgcatgtcanagtcccagattgcacctaaaggctacagacaatctatttcaagcctcaagtttcagaaactggcagaagtaacttgcaaaatgctcaccgctctcctttatgactttgtgtttcaacaggttcttttcattttctacatacatcattgatgtgcatggcttctataactgtggttntaacttttttttcctgttttcctttcatcttgtgttgtagaatcaacaaatacccataaagggaaacctcgccaaaattagaagagaaaccaaatgtatccctgatcttatttttcagattgaggattatgagaagtatttaatacagctaagcaaactaactaaggtaaaccttntgaggcatgccaaacacagtgtagcaagagacttccagatgcaagtagcgtggtacggatggtgactggtgataacatcaatacagctaaagctatagccaaagagtgtggcatactgactga

SEQ ID NO: 19235 - DNA, 386 bp, Zea mays
  unsure (1)..(386): unsure at all n locations
gatccagagtcacctgaggcatgcaagcttctaagggagaacacgtgataggattgactaatgtaatattcgaaaaagatagaccttgtgcagcttgtcaggcaggtaaacaagtaggaggagcacatcacagcaagaacgtgatgaccacttcaagacccttggagctgctgcatatggacctcttcggacccgtcgcctatctgagtataagaggaagtaagtatggtctggttattgttgatgatttttcccgcttcacttgggtgttctttntgcaggataagtctgaaacccaagggaaccctcaagcgcttctcaggagagctcanaatgagtttgagctcaaagtgaagaagataagaagcgacaatgggtccgagttc

SEQ ID NO: 19236 - DNA, 382 bp, Zea mays
  unsure (1)..(382): unsure at all n locations
anagccatggtaagtagcataggccaataatattcgaattgactcaagcctagctactggtgcataagtttcaccgaaatccaaaccttcgacttgggagtatcccttggccacaagtcgagctttgttccttgtcaccacaccatgctcatcttgcttgttgcggaagacccatttggtccctacaacattttggttaggacgtcgaactaaatgccatacctcatttctagtgaagttgttgagctcctcttgcatcgccaccacccaatccgaatcttggagtgcttcctctaccctgtgtggctcaatagaggaaacaaacgagtaatgttcacaaaaatgtgcaacacgagatcgagtagtacccccttatgaatgt

SEQ ID NO: 19237 - DNA, 100 bp, Zea mays
atccctcctccctggagatcaatgagtggcaccagcaggcctatggggtggcctttatgtctgcagacgatgacgaagaagaagcctatgttgatgatcg

SEQ ID NO: 19238 - DNA, 493 bp, Zea mays
  unsure (1)..(493): unsure at all n locations
ttagtgattggagagagagatntgntgngttcattttagctcttgcgctnggatcgcttcttttctttctcattctttcttgtgatcatctcaattgtaaccaaggcaagagacaccaattntgtggtggtccttgcggngacttgttgtcccgttttattgagaagagaagctcactcggtccgagggaccgtttgagagagggaaagggttgaaagagacccggtctttgtgaccacctcaacgtggagtaggtctgcaagaaccgaacctcggtaaaacaaatccttgtgtcacactctntatttgctcgcgatttgttttacaccctctctctcggactcgtttatatttctaacgctaacccggcttgtagttgtgcttaagtntataaatttcagattcgccctattcacccncnctctaggcgactntcaccatcgctccatgtntaactacgacgtcacgtggggtagatatctgaatcatcgca

SEQ ID NO: 19239 - DNA, 414 bp, Zea mays
  unsure (1)..(414): unsure at all n locations
gcgcatgttaagcaggaaagccattcaggaatcaccatccacacaagaacaaaatgaccaccaacaggccactggaactactccacatggatctatttgacccaattgcttacataagcatcggcggaaagaaatacctgtctagtattgcggatgattattctcgcttcacttgggtattctttttacaggaaaaatctcaaacccaagagactntgaagggacttttaagacgggctcaaaatgagttcggattgagaatcaanaagataagaagcgacaatgggacggagttcaaggactctcatattgaaggctctcttgacgaggaaggcatcaagcatgtgttctcttcttcctatatccctcaacanaatgatgtagtggagaggaagaatagaactctactggaca

SEQ ID NO: 19240 - DNA, 482 bp, Zea mays
ggccttcgcttcagtctatcatccgcagtccaactgtgtcgtttatcgtgccaatgggaaaatcttcacagctgtcaaaaagatgctcctcgatgaaaaaaaggcagatggaccgatttattaccggaggcagtctgggcgctaaacacaactgagtgcagggcgaccgggttcactcctttccgccttctatacggatcggaggcaatgaccccgcaagaaataaagcatgggtccccgcgtacagttccgtcagccgtccccgacgtggacgagccaacttcaaaagatctcattgacggagaccgggtcttcgccctacaggccctaaacaaataccaagcccagaccaaagcatggcgcgaccacgcagtcatcccgagggagttcagcgagggggacctcgtactcgtccgaacagctcggacggagtccaagggcaagttggagcccaagtgggagggccccttcatagtcaagtc

SEQ ID NO: 19241 - DNA, 419 bp, Zea mays
  unsure (1)..(419): unsure at all n locations
agcttgtggaggttcttcatccncacatgtgcttatcggtgatgccatagccagcccatgcaagtcttagccattaagcatgcatctagaccggcctcttcttttgcaaaatcaactaaataaagtttgccgtctagtacacccttaaaagctagtgaaccatcacatcttctaaagacagacacatctacatttgtaaataaacaattatatcccaattgacataattgactgacagatagcanattatatccaagactctccactaagaatacatttgatatagaatgctcatttgaaattgcaattntacctagccctnttaccttgccttgattcccatcaccgaatataattgaatcttgggaatccttattnttgacgtaggaggtgaacatcttcttctnccncgtcatatg

SEQ ID NO: 19242 - DNA, 490 bp, Zea mays
  unsure (1)..(490): unsure at all n locations
tattgactccagtctanaatgtatggaaaaagaatcgattagttactgtgtgagggtcaacaacacatcattgtatcatcataaataaaaaaaatgtggagctcacctggagcttcttgatagctgagccatccttgttaaactataactcattagctgcttttactcttaagttcaccttcctttgaaggcgcacattcttccctattggagaagccataaggccgaccgtagaagtggtgtgtgcggttagacacataaattagtcgataaaaaacatatattaccatcgatttcaatatctcataattgtggcattgacttgactgccaaacaatatagaaacagatgaattcaatataattgtggcttcaaaaaacatccactanaggtagctnttaagagtatgataaaaccaaatggtcaaggcataantaataagttattcaatggttatatctaacaacaatcgaattcatcttaagagtat

SEQ ID NO: 19243 - DNA, 431 bp, Zea mays
  unsure (1)..(431): unsure at all n locations
agctngtactaattcttccaatcgccactgcatttgtggataggtgcttntcaacaatgaanattgtgaagacaatgttgagaaatcatatgggagatggatttatgaatgattgtttcatatgcttcgtggaatagggatctatagatacacttccaattgatgatgtgatagttcggttttcacaagatggaggatcgtaatcacagaggaaaaatgtagaaggtaattattattgtgaatgcttattttatcataatacattggttattattttaagaattattagtgttatgcatggtgtcatatcttcaatctataagttactagtaccgaccacgataacaaaatctcctcgctgcgccctangttagatggngaagctgctagtgtttgttatgcgtgtctatgggtgggcactttttttgata

SEQ ID NO: 19244 - DNA, 465 bp, Zea mays
  unsure (1)..(465): unsure at all n locations
tatcctgtcccatatccagagcatgtggctagttaagatagttcttgatcatacaggcctacatacgcatccaatccttaactaacttgggcggagcatcacctgttcctagcccaagtcccgatttaagtacttccatccttaggattgttttgtgttccttaggatgaaaagagcattatagggaactttgcagtaagatcccaccatgctcccaagaaaaatattgttgcaggtagaagccatccttcctcaggataaacctgagctgggcataagtgcaaaggacaaactccatctgcttataagcagggctaagcatttntgtaaatcatgttttgatacttcaccagaagtatctataaaggtatggatatcaaggtaggcaatgcatcanagggtttccaagcaacttctataaacttaatgcacatttcgctagacttaaagtgtataaaatctttt

SEQ ID NO: 19245 - DNA, 496 bp, Zea mays
  unsure (1)..(496): unsure at all n locations
agcttgctacgtgccttagcacattttcattctatcgaagcatttcgaaagatttgcttcgtattcaatctttctgttgatgcgatatgatgtatgatgtgcatccccttaggaacgtcttttgagtctaagctcttcatccccttaggaacgacttttgagcttcttcaccttctatttcggtggtataagttctgcatcccctcaagaacgactttcgaacttcttcgccttatatttcggcggtatttggctctgcattccttttggaacgactnttgagcagaaaacttacactgcgctcccttaggaacgtctttntgtagcttcgtcaattntggctctgcattcccttaggaacgacttctgagcagaaaacttacgctgcgctcccttaggaatggctntngtagctntgttaattntttctatgtgtcccttatanaagaactttgagcttcggaaatttactccactttcttagacatgtcttttg

SEQ ID NO: 19246 - DNA, 488 bp, Zea mays
  unsure (1)..(488): unsure at all n locations
ttgtcaagcatatttggtacccatcacttgatgagtccatcattattagtcaacaaagatctatgaacccaaacgtcctttgtgttagcactatgtaaactcattacctttctagcacaagttgcaattttgggttgcctagttacatgagaattaattgacaagctaggagtgggatagttaccaatgggacaatccttgcattgatgtcccttcttttggcatatgtagcaaaggcgatcttcaagtcttgaagatttcttctttccttgtttcttgcttgctacatggntagttaatattttcttttctaatattatgcctttntggttcaaattgggacaagacttaattaagtgtcccttctttgagcatttaaaacaaagtttatcattcttgttaataatcaagtcattnttaatatanggacatgacctaatcgagtggtccttttaaagcattcactacacttcttacttctcttagta

SEQ ID NO: 19247 - DNA, 326 bp, Zea mays
  unsure (1)..(326): unsure at all n locations
agcttnctatgcccttggattgaactatgccgccgtggataggccggagcacacgccgncgacgagctcgcccgcctgctcacgtggaccgggcgattccggccatctccgacgacgagccgtacctcgacgtgatcgccagacccttcccgagccaaccctacacttcgccggaactccctcgccgccggtaagccgcgccgccctttctttntccgcggctactgtttcaattgagggagggactgcnggtgagagggaaagaagtccangggggtaagtgaaaggtcagagactcaagtgaatagtgccgcgagggtagatct

SEQ ID NO: 19248 - DNA, 496 bp, Zea mays
  unsure (1)..(496): unsure at all n locations
taccgcattngaagcatgatcgctntcccttggtcttagtcttgcttggctgtcccttgcgaccctttagtgccgtcttgaatcttttgatgatgagggccatctcttcatcattaagaccggccgcctcaatttgcgccaccttgctgggtagcgcctccttgcttcttgttgccttaagagcaatgggttgaggctcatggattgggccattcaacgtgtcgtccacgtacctcgcctccttgatcatcattcgcccgcttacaaattttccaagaatttcttcgggcgacatcttgatgtacctaggattttcacgaatattgttcaccaagtgaggatcaagaacggtaaatgaccttagcattaggcggacgacgtcgtgatccgtccatcgcgtgcttccgtagctccttattntgttgataaggaatcttgagccggtgtatgtttgtgtcggctcctcgccccttatcatcgcgaatcgtccgagctc

SEQ ID NO: 19249 - DNA, 379 bp, Zea mays
  unsure (1)..(379): unsure at all n locations
tttatctcataaaaactctcttcngttgggccaaaatcttcacatgctcgcatnctgccttctctaagatggccgcaattcccctggcacctgagaaggcgcagacatctncacggncacccaaaactttctcaaaggcttcggcttcgcccttgatccattacattggaccttcagggtcgcctactacgaagttgtcctcatttgagtatgcgccaatattggcgaagcttggttttatcttttgtacacatgccatagaattttcatagcatctttcttttgaagaacgaagctccccaactggtttttgccagtgatatttccagtattcactggcgtctcggtcagcttcggcaactgcacattntaatctttc

SEQ ID NO: 19250 - DNA, 402 bp, Zea mays
  unsure (1)..(402): unsure at all n locations
gaaacatgatacccccttcattggtgaaactttcatgtttacatagnctcccacaaggaagtataaaggcattcgccgttcgtctgcataactcttttgacgagcttgggctntcttcaaattatgaattatcctctgaaccttttcttcggtttctttcaccatatcaggcctgaagaagtacctttcaccaggttcagaccaatttaacggagtacgacatcgtcgtccatataaggcttcaaagggtgccatctttatgctttcttgatagctattattatatgaaaattccgctagcggcaaacattcatcccattnttgtggaaattccagaacacacgcccgcagcatatcttcaagtatttggtcactctctcagtctgccactggtttaggatg

SEQ ID NO: 19251 - DNA, 340 bp, Zea mays
  unsure (1)..(340): unsure at all n locations
tgcagcttacacgtcgcagtaaaccgctccataatgctggctcatcgtcggtaagcctgccacggtgaaagacacgcagctcttgtgccagtgacctcttccttctccaacccgccctgcgccattccaaatttacaggccaccgcccatggagcctataaattgagtgtgtcgtcnggttcgtaaggtagtcaagcacccaatccaccaagccgtgcctncaattgctcacccgcgagccccaattttggatntccccccattcggtccgaaacaccgcgccttgtgacctcgccgtggtcagtgtgctccaagtccgctcatgccccctactctttca

SEQ ID NO: 19252 - DNA, 478 bp, Zea mays
  unsure (1)..(478): unsure at all n locations
tctanaggggagaacacatttgngactaacaaatgttcatttctagaaagacagggtttgtagcgcatgtcaagcagggaagcaagttggtgttcatcatccacacaagaacatcatgacgacctacatgccacttgagctactccacatggacctattcggcccgatagcttacataagcatcggcgggagtaagtactgtctagttattgtggatgattattctcgcttcacttgngtgttctttntgcaggataaatctcanacctaagagaccttaaagggattcttgagacgggctcaaaatgagttcgggttaaggatcaagaagattagaagcgacaataggacggagttcaagaactcacaaatagaaggcttccttgaggatgagggcatcaagcatgagttctcttctccctacacgccacaacaaaatggtgtagtggagaggaagaatagaactctactcgacatg

SEQ ID NO: 19253 - DNA, 467 bp, Zea mays
  unsure (1)..(467): unsure at all n locations
agcttctcctgctcttgcaggtcggctgcagggactcatccattgagaaggccaccgagctgctcaagttgctcaacaagtacaagagcgtangcgaatgcgtcgacgctgtggatttcagagggctgaataagctgtcatcttaaatcaatgggggctgcgatgtaaaaaatgtgtattttgtaaaacagagagacgatttaacttgtaagtagatgcagataggctagttgcaattttgttgggcgtgcttgcatgctatttcagcagcttagtttcaaacggaaacttagatccgaattccgttttatgaagaacttcagtgtaaatntcttggtttaaaagatgtttttttttcttttagataatggaagcaataacatgttctctaaagaaagtttagaataaccacatctaagtttgactatataacatatttgcatctactacaactttttatagtatgt

SEQ ID NO: 19254 - DNA, 477 bp, Zea mays
  unsure (1)..(477): unsure at all n locations
tctaaaggggagaacacatttgggactaacaaatgttcattttgagaaagacaggatttgtagcgcatgtcaagcaggaaagcaagttggtgttcatcatccacacaagaacatcatgacgactgacaggccactcgagctcctacacatggacctattcggcccgatagcttacataagcatcggcagaagtaagtattgtctagttattgtggatgactattctcgcttcacttgggtgttctttntgcagganaaatctcatacccaagagaccttaaagggattattgagacgggctcaaaatgagttcggcttaaggataaaaaagattagaagcgacaacgggatggagttcaagaactcacaaatcaaaggcttccttgaggaggagggcatcaagcatgagttctcctctccctacacttcacaacaaaatggtgtagtggagaggaataatagaactctattggacat

SEQ ID NO: 19255 - DNA, 490 bp, Zea mays
  unsure (1)..(490): unsure at all n locations
ctctcagtcacctgcngcatgcaagcttgtagaaaagcctctcgatggtcgtccgtcttctgaaaacatgaggttttaagcacaatcattcgaccaaccattcattctaaatgaacatctcatatcaattatgttggccatcacaagctttcgtataagagtagaaaggataaattgggacgacctgaaggttcataatggctgtggtctggtactgtcgcanggtgttcatgaactctttaatctacatatacattaaagtgatcttcagtaagtataaaaagaaagaaaggtcagcacaagaacatgtattgtttaaagtgccccatacttgtgacataaaggagaacaatgangtgtggggtagcatgaggggagtacatgttgttgtgccctatttccttgaatttggcatccaaatagtcctacaataatntgccaacaaaatattcagacatcgttgatgaaacacttaaaagtatcctagaat

SEQ ID NO: 19256 - DNA, 510 bp, Zea mays
  unsure (1)..(510): unsure at all n locations
actcagcttgtcaacaccattgacatcttanataanatttctgagatcatgtatatttaattcattcctcaacatgcaaaagcgggtcttatcaagtggcttagtgaaaatatccactaattgatcttccgacctcactccttctaaaatgatatctcctttcgcaacatgatctctaaggaagtgatgacggatatcaatgtgcttggtgcgagagtgttgtacaaggttcttagcaattttaacagcactctcattgtcacacaacaaaggtatcttttctagaactacgatgtagtctagaagaagttgtttcatatantaaaattgtgtgcaacaagcacctgcggcaatgtattccgcttcggcgggtgataaggcaacactattttgctnnttggatgtccatgatactagtgatctcccaagcanaatggcaccccagaagtattttttctatcatatttgcacccgcataatccgaatcggatagcccaataagtcaaaagt

SEQ ID NO: 19257 - DNA, 434 bp, Zea mays
  unsure (1)..(434): unsure at all n locations
ttctccgctttcattgccaaagtacccaatgtgaactactccgtagaagggcagaagatggtgttcacattgagcacaaaatggcaagtgcagctccgatctgattgctccatgatcagttgtgcctccacctgtcctctcatataagctaacattactaagtgtaaaaccattcagcttcacgtctagtagattacatgctttgaacttcatcagccactgcacataacgctgaggagtgcctaaaagctctttcctgaggnggtcctctccgagtgataagagcatcgaggtaacagcagaaaccatgccattagttgagtttttcttgcagagcccgttagagagtggaacctcatgagaccttanagggcaccaaggaatagaaacagtaccgtncttagcctccacgtctatgcccctaagcttaacaa

SEQ ID NO: 19258 - DNA, 466 bp, Zea mays
  unsure (1)..(466): unsure at all n locations
tactcagctgtctattcaacggngctgaatataaacattatatttttataattaatataaaacatagcatcacatctatttcgagtgctcgtgagttactcatgttccgctcgtcttaagtcatatacaatctagaaccctctttgtagttctcaagcacaagacatacagaagacaatttcaatgttgtgtcttagattaaatgttttaataaatacaacttatgcacgattccataccacactagaccgggaagaaacaacattcatcgtacaacacaagcacaatttcatatcttcatcgtcgagccaagcgctagaaacattgcttatcgaagaggcggttctccaattcattacccactgaagacacaatgtttttaatgacgtcgtacacacccttagacttgagtagtcagttgcccgagtgtcactatagtttctataatcataataataccatatct

SEQ ID NO: 19259 - DNA, 425 bp, Zea mays
  unsure (1)..(425): unsure at all n locations
agctttaccatatgttatcttgtacccatcaaactctttctccatgatcctcatgnatgtcctaaccttcatatttggtcccactgtagtatacccataagtcgcttcccaatgagggtagatgtcaattggcaatgtttcatcgttaactcatgttcaacacatgtgtgtggccccgctacttttgctatcttccactttgtggtgatcttttgtatcctagcacaaaccctccatgcacagttatccttgtcgcatacaaccgtgtaacgacgtttctcgtatgaatgaattactctatacgacctcttacgtaagactgcgtaatgctgcaaccacctcttcaggcagttaggtccttgaagaccctaccattttcaatcatcatgctaggaccggcctcangagcatctagcagctcatca

SEQ ID NO: 19260 - DNA, 473 bp, Zea mays
  unsure (1)..(473): unsure at all n locations
gatatcttanataaaatntctgagatcttgtatatttaattcatttctcaacatgcaaaagcgggttttatcaagtggcttagtgaaaatatccattaattgatcttccgacctcactccttctaaaatgatgtctcctttcacaacatgatctctaaggaagtgatgacagatatcaatgtgcttggtgcgagagtgttgtacaagattattagcaattntaacagcactctcattgtcacacaacaaaggtaccttttctagaattacgccatagtctagaagagtttgtttcatatataaaatttgtgtgcaacaagcacccgcggcaatgtattctgcttcggcgattgacaagacaacactattttgctttttggatgtccatgatactagtgatctcccacgcaaatgacatccnctagaaatactttntctatcaattttgcaaccggtataatccgaatcgaaat

SEQ ID NO: 19261 - DNA, 472 bp, Zea mays
agcttgagcgacaggggctggtactttacagccgctggatcccaattaggatgtcctttctctcagagaggcccgaagccagaagaggaaggctgttagtccaacacctccggaggatgacctggatcaggagatccaaaacctggagatccttcagcaacaggtgcaacgcaagaaggagaagatggctcgtctagctgatcttcagagacagatagacgaagcttctgaggaggttcgtcatcttgttcaagatgatcaaagccgaaggcctccacgcagagagcttcatcaggaaggcttccacaatgaggatgactggtatgaagaattccatcatggaaactctgcttttgatgatgcttctcctctctcaacagaattgcaggctacaccatggccacagtcttacaagccaccccagctccccatgtatgacggtcacacagacccgaagcaattcctaatgagc

SEQ ID NO: 19262 - DNA, 433 bp, Zea mays
  unsure (1)..(433): unsure at all n locations
tataaaactcagcttaacgacgtcttctacagacaacaagatggcagctctgtctgtttatcgaaaagcccaagggttntgctacagatgtgggatgacttactctcgaggacatctgttagacacaatacaaggcaggctgctgatgaggacaatgactttatgccattatcgaagaagcgtaactctgatgacagttctcgaaaagtcttgaagaagatagttacaaagcggaggaaagtagtggaccccccacgacaggttagaatttatggtcaatggcaatattttatttttatgcgtgaaattatgttgtgttgaggtttgatttaaacattgagttgcgattatgcagatgtaaatgtttacgctattcattgtatacattttttcagcagaggcttaatgtgagatgcaatccccaagacgtatt

SEQ ID NO: 19263 - DNA, 463 bp, Zea mays
  unsure (1)..(463): unsure at all n locations
agcttgaacatgccagtcgagtntcttctatgcttgtcgcacttcctagactcgtcacacttcccttacagactgagcagaatataagggatcatataaggctacaccatttgtgaccctctaactntttagcacatgcctctagcgcaagataggagcaggaacaatgcanaggactctgatggctcattacccaatcactctgacttangtgaaaaaagtcaacagagctaaacaatctaaaagcaagagggagaaaactacaaggaataatacccgcactgattgtagaggtgtaccccatgacaggaacttggacacatacatgacccaaccacccncacagttcgcccaacttaaggatggctgggtcagcttaaggatgatgaagcagacgtattcatcgcggcataccttatgaaagcacttgtagagtgatgcgtccaaagacaagagtaacaca

SEQ ID NO: 19264 - DNA, 501 bp, Zea mays
  unsure (1)..(501): unsure at all n locations
tatanaggaaggcccctcgacaatctgtcaatggtgacttacttcatgggcaagtaatcactaacctggtggctagaantttagtctgtatataagctaatacaaggcttcgagtagtgttcctcggtattatattccctttactgccaccaattctaagcaaattgtattaaggtccgtttgtttcgttggaattaaattccattttaataattataatttagacaaaactaattaagttcatatatctatatatgaaatatatttgtatattatcctaaatcatataagagaattaattatatactacatttatgttatagcgaagcaagtaaaagagtgtgttataatttgtacatcgaanaaatagcatgtaaatctatagaattaattttcatctcccaccccatngaattaaaataagcttatatgaataacttggaaagtggtggaacgtcacattctanaaaagtagtctattctattagtaagaatctaatt

SEQ ID NO: 19265 - DNA, 418 bp, Zea mays
  unsure (1)..(418): unsure at all n locations
agcttgtgaaggttcttcatccncacatgtgctaatcggcgatgccacagccagcccatgctagtcttagctattaagcatgcatctagaccggcctcttcttttgcaaaatcaactaaataaagtttgccgtctaatacacccttaaaagctaatgaaccatcgcttcttctaaagacagacacatctacatttgtaaatagacagttataccccatatgacataattgactaacagatagcaagttatatccaagactctctactaaaaatacattagagatagaatgctcattagaaattgcaattntacctaacccttttaccttgccttgattcccatcaccgaaaataattgaatcctgggaatccttattcttgacgtaggaagtgaacatcttcttctcccccgtcatat

SEQ ID NO: 19266 - DNA, 493 bp, Zea mays
  unsure (1)..(493): unsure at all n locations
ngatccgaacagcttaacctaattaaaggctgtaggatactattatgctcttgtattntatgttaaatactatcaactggacctttgaacgttcacattgcatatactgtaaaagagggtatgtgtagttacctggactcatcatatgatcaaaatagcatatggaaatatgagcaactcgatgtggttctgttatacctgttttttcaagcttacaaaaccaggtgatgggtggatcccaagtttgggaaagtgtacataataccacaacatcattacattctgtccatttgaagtcttgactcttgactctcttgactgaacctggtaattcatttgaatgttaacattcaaataatattaaatgtgttttctgtgtatttttacggggtactatacaatgtaattccttgagtactgcatgtaagctgattatattctaaacntngtgtatctatgaacttactacanagtgataacaatgtcttagtca

SEQ ID NO: 19267 - DNA, 400 bp, Zea mays
  unsure (1)..(400): unsure at all n locations
atcttatattaacagcttcagccgaagaccacttcttcctgtaagaccttcagcgacgaagcatagacccaacacttacacctatggaattntttaccattaaatggtttccaccaaaaacccaagaatgtgatttgtgtccaaccaatattaaaatataaaccaagtaatagtaaaatatagagaccataaacaaactaagtgcaaaccatagtaaaattttagagatagtacaatttatccaaaccttaataaatgtctagagacagaaaaaanttggccaaaccataaattctgaaccctaaacactgaaagccaaaccctcaactcgaaactctaaaccccaaaccttaaaccctatgtatcgaaggataactcatatgggcttttgaccattatg

SEQ ID NO: 19268 - DNA, 353 bp, Zea mays
acaaaagatgttgtggcaaaagtgggtgggatgttttcaaaaataaaacttgatgatggatccatcatggccgtgatggattcaacatcgaaaaagatgtacctctgccaggtaccaagttttgggttaaatgattaagctgagaccgggcgagtgacttgcacgagaagagagtctcggtgtagtgtctccgtctgagtcgattaaggaccgtctcgatgtaggcttgatgatcgaggaccctttaactggtcacatgcctcgtcatgggtaagccttgcctcgggcagactaaggccggaataagataacacgaaatgggcgtggagcggtggcgagagtagcgtgtaccc

SEQ ID NO: 19269 - DNA, 464 bp, Zea mays
agcttcgcgtctacaccgatgccgacggggcggtactgtccgacacgcgtcgatccacctcggggtatgccgtgttcctcggggatagcctcgtctcctggtcgtcgaagcgccagccagtcgtctcctgctccagcgccgaggccgagtatcgggctgtggccaatggcgtggttgaggcggtctggcttcgtcagctgctccaagagctccacagtccactggccacgagcaccctggtcttctacgacaacgtcagcgccgtctacctctccaccaacccggtccagcaccagtgcacgaaacatgtcgagctcgatcttcacttcgtccgcgaacgggtcgcctgtggagctattcgggtccttcatgtcccgaccacctcccaattcgccgacgtcttcaccaagggggctccgacgctggtgttcacgggagtttggtccagtctcaacatctgtagt

SEQ ID NO: 19270 - DNA, 436 bp, Zea mays
  unsure (1)..(436): unsure at all n locations
ntatgcgggtactgaaaggtccaactttacccggtttgtcctttacttttcatcattctggcacagaaatggttcttactactgcattctttgtctgttttattatcccagaccggcctacttattgctcagcatccaaccgtcgtcttcaggatatatgggtgctcaggcatgataactgagaggtgcatgccaactcatactgatccatctttagccaggatattggaggaaatatcattcatcacttccaaaagtgaattacttgtatgattgtcttttggctatctaaagcagtagcagctaaaagtctttgctgctcaaccggaagataaaaaaacaaaagtttcagattctgctgtacataagctgaaatgaaatagcccctgctgtagcatatcgattcttattttatttgaccaaataacaatatata

SEQ ID NO: 19271 - DNA, 384 bp, Zea mays
ccttttgcttctccatgtcttggctagctgtttcttcagttggatgtctaggctcttgaggtagatcttgacagcacgcatgtaggactcgatcttcaccagcgacgacgacatgtcgccagcgctcgacaccatcgtggcccgagactggcttctgccaccgtcgccgggtcgtccttcttgtcacactggtgacagcatcgaggaggggatccagctcctccctctcgaacaaagaccggaccaactggatctcaggtaaggatctcaccttgagctcggcctccagctcctcccgctcgagcctcgtggcgatgggcatgacgtcctccacactcgccggcttgtccctgcagcacacccaagcgaccaccgacactcgat

SEQ ID NO: 19272 - DNA, 440 bp, Zea mays
  unsure (1)..(440): unsure at all n locations
ctaagcttctnagggagaacacgtgataggtttgactaacgtgcatttcttaaaagatagatcttgtgcagctngncaagcaggtnaacaagtgggaggagcacatcacagcaagaatgtgatgaccacttcaagacccctggagctgctgcatatggacctcttctgacctgtcgcctatctgagcatangagggagtaagtatgggttagttattgttgatgacttttcccgcttcacttgtgtattctttttgcaggataagtctgaaacccaagggaccctcaagtgctttctcaagagagctcaaaatgagtttgagctcaaggtgaagaagataaggagcgacaatgggtccgagttcaagaaccttcaagtggaggagttccttgaggaggaagggatcaagcatgagttctccgctccctacacaccccaac

SEQ ID NO: 19273 - DNA, 414 bp, Zea mays
  unsure (1)..(414): unsure at all n locations
acccatattaggcctagcaatcaagcaagtgtcgagttcagctttatcaaaatctaccaagtatagctgaccctctaacactcccttaaatgctattgaatcatcacttcttctaaagacagtgacacctacatcagtaaaaagacagttgtagcccatttgacatagttgagaaacggaaagccaattgaatctaaagaatctacaagaaaaacattagaaatggaatgggcaggtgatatagcaattttacccaatcctttgaccaaaccttggtttccatccccgaaagtgatcgctcggtggggatcttggctcttctcgtaggaagagaacattntcttcttcccagtcatgtgggttgtgcatccgctatcgatgatccaacttgagcccccggatgcataaacctac

SEQ ID NO: 19274 - DNA, 378 bp, Zea mays
  unsure (1)..(378): unsure at all n locations
tgcggcgacggcgagcatacctcgtcttgttttggattcatgttgtanaaacaaaacaagctgcgtgtgagtcaagtgagtgaacaagacagtagacgcacctcacgcttgcaggccttgcatagcgcgccgagggagttggcgagcgcggatgcgtcctccgcagcaccgcggctgctgtggccgctctccggcggcaggacgtggagcatggtgagggaagtcgccttgttggccacgtgggtgagcgcccacaacatggcgtgcttggcgccggagctctggtccaccaccaccattacccgcttccgccccggagcagactcctccgccctgcagaacccgccgccgcggcggcggtgtccccgcgccctggtc

SEQ ID NO: 19275 - DNA, 450 bp, Zea mays
cacagtcacctgccgcatgcaagcttcttttgcaatgttctaaaggctcggctcaatacgtagctggtgtaaaaagcttcttagaatctgcattcaaagataaacccgaaggaagcaagaattattgcccttggtagtcatgcgtgcacactactgtgcagccaagtgatgttatgtttgagcatttggtgtgcaatgggatacttgagaattatgaccaataggattttcatggagatacttctgggcatggaaataataatatgggtcacaatagttgtagtaacgaaagacaagttaatatgacgcatatgattcatgatacaatacaacacatgtatgataacacacctatggttgatggcaatgctcctacaaaagggtcctgtttggatgcagcatagttttataagatgattgacgaatcaaataagctgctatggataggat

SEQ ID NO: 19276 - DNA, 382 bp, Zea mays
tattcacccgccctctaggcgactttcaattggtatcttagctcggtacttcattaagagtctaaccactcgaagtgatgtcaggaggatccgccgagagggagatggaaacggccacaagccacgggaaggctccatcaagggagtccggtgccaaaggaagggaggaatctcctccccgcgtcaggtcgcactagagtggcgacaagaagaagaagatgaagaaagtggtctactacgagaccgactcttcgtcgccctccacctctggctctgacgctccgtccgtcacttctaagcaccatgagcgcaagaagtttagtaagatccccttacgctatcctcacattaacaaacgcactcctttactttctatcccatt

SEQ ID NO: 19277 - DNA, 389 bp, Zea mays
  unsure (1)..(389): unsure at all n locations
gcttctcctgtacaagcgccgcactcactgcagagttcgaatctgccacatacaatagtaatggagcccctggcacaggtggagttaatgttgttagatcaatcaagtattgcttcagctcttcgaaggctctctgttgagctgggcctcattgaanaacttcggctgactttagtatttcaaagaatggcaagtttctttctgctaatctagatataaatctattcaatgatgccagtcttcatgtcagccattgggccccttctttgtgcttggtggctccatccgaaggatagcttcgatcttgcttgggttagcttcaatccccttccgtgaaactagacagccaaggaacttacccttcttcactccaaaaacacaattttata

SEQ ID NO: 19278 - DNA, 389 bp, Zea mays
  unsure (1)..(389): unsure at all n locations
tgtatgtcctgttctaagtcctttgatcatggcctcaatgacaatttcattgggcactgtgggtgcttgtgctcttagacacaaaaaccttcggacatacgcctgaaagtattcgtcctggtcttgtgtgcattgaaacaatgactaagcagtaactggcttcgtctgaaaaccttggaagctagtgaccagcatatccttaagcttctgccatgatgtaattattcctaggcggagagaggagtaccatgtctgggccacatttcggactgccatgacgaaggactttgccatgacagcggcgttgcctccgtatgaggatattngtgcatcgtaactcatcaagaatagctttgggtccgagtgtccatcgtacatgggcaactggg

SEQ ID NO: 19279 - DNA, 377 bp, Zea mays
  unsure (1)..(377): unsure at all n locations
aagcacctgangctgcaagcttctaagggagaacacgtgataggtctaactaatgttttcttcgaaaaagatagaccttgtgcagcttgtcaagcagggaaacaagtgggaagctctcatcatgccaaaaatgtgatggcaacatcaagacccctggagttacttcatatggacctcttcggacccgtcgcctatctaaacataggaggaagtaagtatggtcttggttatagtgatgatttttcccgcttcacttgggtattncttntgcaggataaatctgaaacccaagggaaccctcagcgcttcctaaagagagctcaaaacgagtttgagctcaanggtgaaaagaccagaacaacaatgggtccgagttc

SEQ ID NO: 19280 - DNA, 423 bp, Zea mays
  unsure (1)..(423): unsure at all n locations
gcttataataagagaatagaggcaagagcccgaccatatgtaataatataatgttgtttatacaaacatggagtctgttctccattgctcaaatgcctatccagagccgaacgtatataattggtgaaggaaatacaagcacgcctgtgtggatctcatatcggatctatgcccttgctgggaaaagtttttcgacaaggattttattggccgaaggcagcttcagatgcagcagaattagtacaaaaatgcgaaggctgtcaaaaatgtgcaagagatcaaaaacagccttcatccctgactcagttaatacagcccatttggtcgttgcaaaggtggngccttgatttgctatgcccacttccaccagcacaaggaaattaaaatatgtcgtggtggtagtagaagtattttctaagtgga

SEQ ID NO: 19281 - DNA, 425 bp, Zea mays
  unsure (1)..(425): unsure at all n locations
gcttgaatttttggcctctacaatttgtcatgttcttatcaacanatctcttgttttctataatcaattttatcattccagcatcatcaattcattgatttatcaattttatttctatctaatcctttaaataaactagaataatctatgtcatcgtcatcactagactcatcctcacttgaagaagcataagtggtattgtctcgagtaaataccttcttctcctttgccatgaggcatgtgtgacgctcgttggggaagagggatgacttgttgaaggcggtggcggcaagtccttcattgcggagttagatgacgaacaatccgagtcccactccttgccaaggtgtgcctcgcccttagccctcttggatgccttcttctccctcttgttcccttggtcctggtcactattatcgggacag

SEQ ID NO: 19282 - DNA, 363 bp, Zea mays
tctggagccgcattacaaggtcctgatttaatgttattccatcagcaaccaacaacaaatgcatacagtattcaccgattctgactaattttctatgtgattcatactgtcctgttaaacactcaaatagtaatatggcaaataactaatccaatacgtcaaccatacacctaggcaacggtgaaattacatcaactggcaccacgcaacactacaccccatatgaatggaattcaacacaacccccaatcagcaccgcacggtccgggcccgagaccacgccacgccacgccattggacgcaccggccgtccagcccgatctctgcgcgctccgattcgcctgcgcaacacggatcgagatg

SEQ ID NO: 19283 - DNA, 495 bp, Zea mays
  unsure (1)..(495): unsure at all n locations
agcttcctataccaggtcctatctgtaaaacattatttcaatacaccttgctcgaaattnttgcctagtgaatgcattctaggtgtatcaaacatatacaatgccaatgctatgatgtcatgctcaagttttagttatagtaacaccaggggtgttacatccttcctcccataaaagaatctcgtcccgagattaaaagtcctatggtaagtaatggaaaaggaaacgcggaatacttttatctccttatttctggtacaaggcaggggtgatgtgggggtcacttctttattacacagttatacacgctttacaatttacatgaggctaataagcctgagaaattcttttctagaaaatcttgagtctcccatgtaacctcatcttcagaatgctggntccactatatcttatnaaacttgagagttnttctccaggtaactcctgtcttctgatccaagactcgaatagccagaatggagtcagcacactcac

SEQ ID NO: 19284 - DNA, 381 bp, Zea mays
agagtgcattcatatgatctgtgaaactccagctatgttcgttttactgtggctgttcctgtttgcctgacaaaaatgagtgggtctgttcaccggtgggtttcatctagtaaatggccgaattgactcttccaactatggatgcctttgtagagagataaaagttcttacttccagcagaattgcataatttttggttcagtaggttgggagatatcgaattctaaagctaaccatactgctgtctaaaacagattcagtcagttatcttgtcagatgttttagaacttgtagatggcagaatttaattatccattgaatactgaagttgtagagtattttgtgcagatactcctagagtatatgattgatatcaccgct

SEQ ID NO: 19285 - DNA, 491 bp, Zea mays
  unsure (1)..(491): unsure at all n locations
tcagagtcacctgcggcatgcaagctntccaanagtctgggatactcttttggtgatctgaagattaagttatggatgtttaaagtgtgaagacggaatctgtccagttctggacagcacagccttcatagtgtattttacccttcatacatattaaaccaacctgagatgtttataaataatttgtagaacattcgattagctttccagaaagtctaggatcaattgatttgaatacctgagtctctagntataacattttgaagtcgcaagtcttaatctgtccaaatctaaataaaactgtcatgtatcactatttaaccttattaagtgtttaattaccttgagataaaaataccaaagttatagagtgttaataatatttccaagagtatttgttataatgttagataaatacgtgtgagtataactgaacaagcactactatgctgtgtccaacatgtaatggatgatgcctacttgtgagctgc

SEQ ID NO: 19286 - DNA, 460 bp, Zea mays
tgaactgttgtcctctgtgtgacactatcttctttggacaccatgacgactaacgatccgagacatatgcaattctgccgatactgcactgttggacgcggtcttgacagcgctgaagtgggctgacttggtcatacggtccaccactacccaatagaatcgcaccggctcgagtgcgatgcgatccgactatgaaatccataccaatttcatcccatatccactgaaggatctgcaacggctgcaacaatccatctggtctatggtgtgctgccttaattgttcgacaactatcgcacttatccacatgctgtgcgatttccctcttcattccgtaccaccagagtgtattattcagatcctgatacatcttgtcactaccagcgtgaatcgaataagctgtctcatgaagcttcttaatgactcaacttccgatggactggacattgggaacacacaa

SEQ ID NO: 19287 - DNA, 448 bp, Zea mays
  unsure (1)..(448): unsure at all n locations
agctcgaatggtctgtgaatgtaggtgaactacatgatccgggggagtcattgngttattgacagtggatgcacacaacatatgacaggcaacccacggatgttcacctcactagatganaatgttgatggtcaagataaaatcacatttggagacaattcacaaggaaaagtgcaaggacttggcaaggtggcaatctcaaataatctatcaatatcanatgttctcttagttgcaccgttgagcttcaatttattatcagtgggacaactctatgatcttggacttcaatgcttattcactccaacagaggttattgtaacanagatggatgatgaatcaatggtattcaacggatntagatacaacaacctctacttagtggattcacttcagagatgcgacttaaaacttgctcttcaccaagcttctcttgatggctttgcat

SEQ ID NO: 19288 - DNA, 477 bp, Zea mays
  unsure (1)..(477): unsure at all n locations
tataacactcagcttgtataaaataattgtatctatgttnttatatgcaaaattgttatngccttatccaacttgagataccactntctcgatgcttgctttaatccataaatagatttcttcagacgctatccttgtttgtctttcccttcatgacaaaacctttgagttgagccatgtataaatttccaactaattcaccattatagaatggtgtctttacatccatctattgtaactctaaatcataatgagcaacaacaccataattattcaaaaagtctttttgcaaaataggtgagtaggtctcattataattgattccttctcttcgagtgaagcctttagctacaaacattgctttaaagnttccatattccctttggaataattggttatcttatagaacccattgcattctactatnntgggctccattacgaattctacacatttctaaacctcgtaagtactcat

SEQ ID NO: 19289 - DNA, 423 bp, Zea mays
  unsure (1)..(423): unsure at all n locations
agcttctaccatgatgtgattgtccctggtcggttagaagagtaccatgtctgggccacacttcggactgccatgacgaaggacttcgccatgattgcggtgttgcctccgtacgaagatttagttgcttcgtagctcatcagaaactgcttcggatctgagtgcccatcatacatggggagctgaggtggcttgtatgatggggggccatggggtagcctgcagttctgctgatagaggagaagcatcatccanagcanaatttccatgatggaaatcgtcataccaatcatcatcattgtagaaattatcttgacgaagctctctntgtggaggtcttcggtcctggtcatcttgagtaagatgacgtatttcttcaacaacttcatcgatcttcttctgtagatcggaaagaacaagcat

SEQ ID NO: 19290 - DNA, 447 bp, Zea mays
  unsure (1)..(447): unsure at all n locations
tcttgatggctnntattggtgggatntcatttcctgcaatatctttataaacatgcccttgcgagccattagattcatcaaatgtcacgtctatcgctatttcaacaagaccggtggtattgctgaaaacacgatacccatgcgcatttgatgcataacaaagcaagaaaccctcgtccactctgggagcaaactttgatctcttgactttcttgttaagaataaatcatttacaaccaaatactctaaagtaatcaactntaggtttgttaccagtgagaagctcgtaggcagtcttcttgtacatcttgtgaagataaagtcggttgattgcatgacaggcggtgttgaccgcctcagcccanaaattgttaggggtcttgtactcatccaacatggttctagcggcttcaattagtgttcggttctttctttccacaacaccat

SEQ ID NO: 19291 - DNA, 476 bp, Zea mays
  unsure (1)..(476): unsure at all n locations
gcttctaagggagagcgcttttangactaactaatgttcattntgagaaagacaggatttgtagcgcatgtcaagcaaggaagcaagttggagctcatcatctgcacaagaacatcaggatgaccgacaggccgcttgagctctccacatggatctattcggcctgatcgcttatataagcataggcagaagtaagtattgtcttgttattgtggatgattattctcgcttcacttgngtattctttntgcagganaaatctcatacccaagaaaccttgaaaagattcataaaacgggctcaaaatgagttcggattgagaatcaagaagattagaagcgacaaaggaatggagttcaagaactctcaaattaaaggatttcttgaggaggtaggcatcaagcatgagttctcttctccctacacacctcaacanaatggtgtagtggagaggaagaatagaactcttttggata

SEQ ID NO: 19292 - DNA, 459 bp, Zea mays
tagcaagtgctagttctagatcagtgaagtcctattcttgtgttacattataaaccaagagggattgactgtagatccgaagaatgtaacaactatcttggactggaaagcaccaaaagatgtccgagggatcaagagtttcattggaatggccggttattatcggcgtttcattgaaggtttctccaagattgccagaccaatgacagccttgctagcaaataaggttgagttcaagtggaccctagcatgccagaagtcctttgagacattgaaggagaagttaacaacggcaccagtactaattctgccagatgttcccaagccattctcagtatattgtgatgcttcgtacactggactgggatgtgtgttgatgcaagaagggagagtagtggcatactcgtcccgacaatattaccctactcatgatctataattagcagccgtggtacatgc

SEQ ID NO: 19293 - DNA, 386 bp, Zea mays
  unsure (1)..(386): unsure at all n locations
agcttgaagccatggtaagtatcataggccaattatatacgaattgactcaagcctagctacgggtgcataggtttcaccgaaatccaaaccttcgacttgggagtatcccttagccacaagtcgggctttgttccttgtcaccacaccatgctcgtcttgcttgttgcgaanaacccacttggttcctacaacattttgattaggacatggaaccaaatgctataccttattcctagtgaagtntgttagctcctcttgcatcgccaccacccaatccgaatcttgaagtgcttcctctaccctgtgtggctcaatagaggaaacaaaagagtaatgctcacaaaaatgtgcaacacgagatctagtggttacccccttatgaat

SEQ ID NO: 19294 - DNA, 477 bp, Zea mays
  unsure (1)..(477): unsure at all n locations
tctanagggagagcacattntaggactaaccaatgttcattttgagaaagacagggtttgtagcgcatgccaagcaggaaagcaagttggtgcccatcatccacacaagaacatcatgacgaccgacaggccgcttgagctactccacatggatctattcggcccgttttcttacataagcatcggcgggagtaagtattgtcttgtaatagtggatgattattctcgcttcacttgggtgttctttntgcaggaaaaatctcaaacccaagaaaccttaaagggattcttgagatgagctcaaaacgagttcggcttaaggatcaagaaaattagaagcgacaacgggacggagttcaagaactctcanatcgaaggctntcttgaggaggagggcatcaagcatgagttctcttctccctacacgccacagcanaatggtgtagtggagaggaagaatcgaactctattggacat

SEQ ID NO: 19295 - DNA, 401 bp, Zea mays
  unsure (1)..(401): unsure at all n locations
tactttcttctcaatctggtcgagctacttatctgcacaccaatcatgttgcccattgatcgtgtggcttaaattcaatgctatgaaggccgatgccgaggagtcctataacttgtcagatgcaagaactcacgatgcatgtcccgcacatacaatntcatccaacgaggacgaagctccttcacaagctccagaagcgaccgcatatcattgccttcctccctaatnttaaagaagccaacaacgggtgcatccatctctccgagctccttcaattccgcgaccataatcttggcaccataggtcatggcaccgatcactatggttcanacatggtaataagtgcaagagaggtgtanacataatcatggcaccgatcagtatggttcaaacatggtaat

SEQ ID NO: 19296 - DNA, 503 bp, Zea mays
  unsure (1)..(503): unsure at all n locations
actatgatactaagcttataagtgcgagttctggatcagtgaagtcctattcttgngtcacattataaaccgataaggattggctgtagatccgaagaaagtaacagctatcttggactggaaaacaccaaaagatgtccgaggaatcaagagtttcatcggaatggccaatgatagctttgctggcaaagaaggttgagttcaagtggaccccagcatgccagaagtcctttgagacattgaaagagaagttgacaacggcaccggtactgattttgctagatgttcacaagccattctcagtatattccgatgcttcatacaccggactgggatgtgtgttaatgcangaagggagagtagttgcatactcgtcccgccagttgaagattcatgagaggaactatcctattcatgatctggaattagcagcccgtggtcatgcattgaaacctggaggcattatctgtatggacagaagtgtgatatctacacggatcaca

SEQ ID NO: 19297 - DNA, 432 bp, Zea mays
  unsure (1)..(432): unsure at all n locations
gctgggacacgcgacccttacctctgcttgttgtggcttngttatggagnggttggtctatagagactacattttagtctctttaatttatactattttatgtcataagttgctaaaaacggagatagattctgtatttagtaatttaaagactaaagtataataaaatagagaaactaanaattagtccctagaaaccaaacacgtcattatactatggttaactgtntactctannatntaccttgtatataccacttatatgccacatcagtgttctctgttcctatatatctctatcatctacaacggttcactctanatcaaacatatatatctcactacattattattatatacatttctcctcaactaactcaactaccatttattttcttttgacttntttatttccctgatgaacaggtcgac

SEQ ID NO: 19298 - DNA, 355 bp, Zea mays
tgtctttcaccgtgataaaattcttaaaacatctgatgcccgttcgccataacgcacgctagacaaagggagcccacaaccacctgtggtaaaacacatgcgtaaaggaatcataagcctgcctctagccgccttggcatttgtgcattctggcaagccccacctacaccctctgccctgagacagccttgtcgtgcacgccgaactgctatattaaagtgtcaggttgcagaccttgaagtgatacctcagtacagaaagcaactccggcaagacctcgtgcacccgcctgagcacacgccaatcacttgtcacaatcacaactaaatgaatgccccaccatgagccaagttac

SEQ ID NO: 19299 - DNA, 364 bp, Zea mays
  unsure (1)..(364): unsure at all n locations
ctgcaagcttataaatggatggaagagtgccttcctattggacctttcacgaggatttctatgttgagcaacctcccgacttttaagatagtgagtattctaaccatgtctattaactctctaaggcgctttatgggctcaagcaagcctcaagagcatggcatgaattcctaagagattttcttattcgtaatggctcttaagtcggaaaagccgatcctactctattcactaaaactatgtgcaaagagttgntngcatgccaaaattatgttgatgatatcatatttgcgtctactaacaaatccacttgtgaagaatctatacgagcatgactcaaaattcaagatgctatgatggggga

SEQ ID NO: 19300 - DNA, 130 bp, Zea mays
gaacatcatgactaccgtgagggcggtcgagctacttcacatggatctattcggcccgttttcttacataagcactacaccggagagccatagtgtcttgtgatagtggatgattattctcgcttcactt

SEQ ID NO: 19301 - DNA, 442 bp, Zea mays
  unsure (1)..(442): unsure at all n locations
agcttcaagccagtaggcactcggcanaagctccctctttgtaagtataattgagtacactcgacanaggtaccgtcaccatcacttgtcgccgtcacgacgaatttttttgtcgaggaccagatggcactcggcaaagactttgccaagtgcccgacataatgctctatgcaaagtagtcgttgccgatgtatagttcaccgagtcctttttgccgagtgtcacactcgacaaagagtttgccaagtattttcaagactttgtcgagtgcttgcagcactcggcaaagcagtctgttctggtagtgtgctaattatattgcagatgatacctgtnntaaaatagagacatgtgctatttcttatattgcagatgagacctcattaaaattagaggcatgtgaaataattggtttaacaaanaactttgtagaataattttt

SEQ ID NO: 19302 - DNA, 455 bp, Zea mays
  unsure (1)..(455): unsure at all n locations
tactaagcttcaaaggtgccatcttgatactntcttgataatattggtgtatgagaattctgtctacggtaaacagtcatcccatttttgtggaaactataaaacacatgcttgcaacatgtcttgaagtatctggttcactctctcagtctgcccactggtttggggatgataggccgaactatgaagcaacttagtacccaaagatttgtggagttcttcccagaatttggatacaaattgtggtccacggtccgacacaattgttttcggaatcccgtgcagactgagaatacgagagatgtatagttccgcatatgtgattactggataatttaccttaactgggaggaagtggacgatctttgtaagttgatcaatgataacccagatggaatcaaacccttttgctgccttgtgaaccacaatgaagtccatactaatgtcctcccatt

SEQ ID NO: 19303 - DNA, 285 bp, Zea mays
  unsure (1)..(285): unsure at all n locations
acctgaggcatgcagcttaagcatttctcctgaagttctggaaaggatttctgcattatttagtatttatccacttcagnctttaggctcgcttcagaatatttcttatcttgctcgaatttttttgattgacggagcaattcattctttaatttgtcattctcagtttggacttcagccaaagagccctccatggtctgaataatgaaatccttcttttctagtgcaccttcgtgctctttgaccataatttcaagatcttgaattgcgaagtctttctttttc

SEQ ID NO: 19304 - DNA, 428 bp, Zea mays
  unsure (1)..(428): unsure at all n locations
ctaagctttaagggaaacacggatngttaactaacggcattataaaatattaccttgtgcagcttgtcaagcaggtaaacaagtgggaggagcgcatcacagcaagaatgtgatgaccacttcaagacccctggagctgctgcatatggacctcttcggacctgtcgcctatctgagcataggagggagtaagtatggtctagttattgttgatgacttttcccgcttcacttgngtgttctttntgcaggataagtctgaaacccaaggaaccctcaagcgcttccttaggagagctcaaaatgagtttgagctcaaggtgaagaagataaggagcgacaacgggtccgagttcaagaaccttcaagtggaggagttccttgaggangaanggatcaagcacgagttcttcgctccctacacaccac

SEQ ID NO: 19305 - DNA, 394 bp, Zea mays
  unsure (1)..(394): unsure at all n locations
acatgtgctattcggcgatgccacagccagcccatgctagtcttagctattaagcatgcatctagaccggcctcttcttttgcaaaatcaactaaataaagtttgccgtctaatacacccttaaaagctagtgaaccatcacttcttctaaagacagacacatctacatttgtaaatagacagttatatcccatattgcacaattgactaacagatagtaaattatatcctagtgactctactaaaaacacattagagatagagtgctcattagaaatggcaattttacctcaaccctttaccttgccttgattcccatcaccgaatatgaatgaatcttgggaatncttattctcgacgtaggaggtgaacatcttcttctcccncgtcatat

SEQ ID NO: 19306 - DNA, 454 bp, Zea mays
  unsure (1)..(454): unsure at all n locations
tggtgccaatggagaagcaaaagtccctgaagttctgtctgtttaactgtntgccattgtcgactgtgagctcagacgggactccgaatcggcaaataatggttttccagaagaatttataagcagtcttcgacgttattatggatactgcccgtgcctcgatccacttggtaaaatactcgacggcgatgaatgtgaacttgaggttcccttggggcgtgggtagtggcccgacaatgtctagcccccagcgttgaagtggccatgtgtgggtgatcagctntgtgaattgcgaggggttgcccaaacggngagagaacttctggcaggcttcgcacgacctcgtgactcgatttgtagcgcagattatagtgngccagtagaaaccttgacggatcaccttggcagcgagggcnctangcctcgagtgagaagccgatgtgccgatgtggac

SEQ ID NO: 19307 - DNA, 446 bp, Zea mays
  unsure (1)..(446): unsure at all n locations
agcttacctgacanatccgactggcataatacttcccncatcgaanaaattacctgtcactgggcttgcaccggctacaagctatatctttaagattattgctttcaaaaactcaatcgagttgggttcatgggaaattagaacgaagacaagctatcaaaaggatgatccaaggggttcaatgccaggtggtactagactaggacataatagtgagagcctgaaggcaaacagtgatggccagtctgatccttcctcagagggtgtggactcaaacaataatactgctgtttatgctgatctaaacaagtcccctgaaagtgattntgagtactgtgaaaatcctgagatcctagattcagataaagcgtctcgtcgcctcagcgaacacatcgatgacttgcanaatatacagatggctgcagatagggtaacagaagtcactg

SEQ ID NO: 19308 - DNA, 432 bp, Zea mays
  unsure (1)..(432): unsure at all n locations
tgtgcncatntcagccattctcatcaatcaccatccttcgcttttttctttcttttccttgtaataactggaagagaatgttggtgctctctacactagcagtagcaatgggctgtctctgaggagaggagaccccatcgtacatgctccgttatatgacttatatttagggggtttttgttcatccaccagttcgcaaggaaactgatgccttcgcatgcgtcctgccgttctgaattcatccaccagttcgacggctcggtcagtgtggccaagacgcanagcctgtgagactgtgtctccaaccactgctagacactttccatactggatgattcactgatggagtgactgtatagtgtagttatatttatgcgggtntccgtcccagcgactcaaattagtcacttttagtctataaacttgcaatat

SEQ ID NO: 19309 - DNA, 476 bp, Zea mays
  unsure (1)..(476): unsure at all n locations
agcttagagcaagtctggtgctaatctntgcactatatatgatgatatcagaatgagaaacgacgaatgaaccataagcaaacctccacccttcaactgatctttccataaccagcaaggaccctccttgcatctgaagtttaagaaggacaaacaaccagaaggccacaagcgagatcagcagttaacataagaatggacttaaggtctccacacaattcacctggtatgcaggctacaactgcactatcggtttctgatggtaccacaacaggagatgaacaattgagcctgaaaccaccgaatccatgtccaagtgacaaaaccaatgaaccattggatctgacagaatactaacctatctccgaactcagacaaacagatcgccacacaacgtcatgacgaactcagatcagaatcaatcctgcaaccgacatgctgagaaggcgaagacgaaacaagatcgacgaatacta

SEQ ID NO: 19310 - DNA, 444 bp, Zea mays
  unsure (1)..(444): unsure at all n locations
nngaaaatatctagacactgtccnaggatngaatcttccttctaaagattntctgtcaaaaatatccctcgaggacaaaatgagcatgctgatttgctagctaagtcagcagcacaggggctgcccttaccttcggatgtgttcttcgaaacaataaaagcaccttcagtggaacttcttgaaagagcagtcctcaatatatctcctgtttatagtgaagactggagaactgagatcatctcttaccttcagggtaacttcctttcagatgacgaaacttataacaggaggatagaggcaagagctcgtccatatgtcatgatagaaagggagttgtacaagcatggagtttgtgctccattactcaagtgtttatctagagccgaaggcatataattgatgaaagaaatacatgcaggcctgtgtggatctcacattggatct

SEQ ID NO: 19311 - DNA, 495 bp, Zea mays
  unsure (1)..(495): unsure at all n locations
agcttcttcaccacgtgttcgtagatatcttgaggaagttgagcaaggcgtcttctccttaattgtctgtgtttcttgtttccaagcaattttctttntgaccctacaacttgttgctcattcaaacattcgcttccttttgagcgacaggggttagcacatggtgatatattatccaaatgtgcacttgtgcaagaatgaggttcacatgaatttaagtttgtaattacaacctcatgagcaacatcaagcatgatatggtcatcaactagtttactatgagaatacgacaacatatcatacttttcacctagagcaagtttttctaaagttatcatttctactctgactcctaagcatagaatttcagttttaagttgagcaacattagataatacatcatgattatttctttgctcaattaaaacagattcataccgttggaccaaattcccatgagagcactttagctcctcatgttctttggcatcttct

SEQ ID NO: 19312 - DNA, 492 bp, Zea mays
  unsure (1)..(492): unsure at all n locations
tgtaggtcatttcaagtcaaagcgccctcgtgcagatgatgcttattcaacccagctacagattctaaagcccaatcctcagctgggggaagcatctcatggacacagaggatgttccacatgctcatccagactatccaattgacatcacaggatggacttatccaaagagaaggttctctatgactgagtactgctccaggaggacagttaatcagtatgctctgccctcagacaccaacattcagttttttcatactcagcttctatttgatgtcttttggggaaccctaatggacacaaattttcacaagcatcaagtcattgattggaacttcatgttgggtcagttagtcatggagggattgattccaaagttcgaggcatgtggtctctatgactntatgggccagaagacagactttagtgagatggctgtgaaacaattcctggcaactgctgagattgcattgatgagcagcaatcacttga

SEQ ID NO: 19313 - DNA, 384 bp, Zea mays
  unsure (1)..(384): unsure at all n locations
agctgtcttcgttaatctccccgaagagtagcgttctctggtctgtatccacaagatatagcgtactctnttagttcttctttttcagccttcgataattcttgcccaagaatatcttggaagttgaagtcctcttcttccgaaatatcctcggctttctccttcccttttccagccactgttgagagcacctagaggggggggggggtgaatangtcatncttgtaaaacttactgccacaaacttgattaagtgttagagcaataaaaccaagtggctagatagggagttttgtcaaacacaataaccacaaagatatcaacacagagaggcacaatggtttatcccgtggttcggccaagatcaatacttgcctactccac

SEQ ID NO: 19314 - DNA, 470 bp, Zea mays
  unsure (1)..(470): unsure at all n locations
actaagcttaacggagccaatatgatggcccaaaaattatgcaaaaaaatatccattgtgtttggtcaaattagaaaatatgatgatgatgatctttntctgagaaaaagaaatagcatgatgaccatggcataaaggacttagcagaatacataccactcaaatggaaaatataaaacagagaaggttgaggaaaccaaatccagttagatatgtgaagcaatgtttacatcatcaaatgacagtggaagctaataatagaataccatcagagactaatttaccaatacctcagtatgagacaaatattgcagttatcattntagaggatgtttccagaagatatgagtcaagagttgaccatacctcaatatagtcaattgttatgtggcccgttccctgatcataccactggccgtcattggttaaacgatatactntgacacgctggacatttgtttgaacatcac

SEQ ID NO: 19315 - DNA, 355 bp, Zea mays
  unsure (1)..(355): unsure at all n locations
agcttgtnctaactacagcatactacgacngcagatcncnctcggaaacctgaatcgacctctgtcatcaagccccagcagattcaaaatgcggccgacctcaaccggaactgctgcgacgactgaggctgcttgaagccttccacgctccctacaggggctgtcgttgccggaacatttctcatctgggcaagagcaacggcctgtggcctgtccgcgttctcatggcaccgccgccagaagcagaagatcggcagcagctcggtcgagcatctggaaagccggcctatcctgtaccggtcgaaggaagcatacgagagacgcgccctgtctgcactgatcaacgtctagtact

SEQ ID NO: 19316 - DNA, 456 bp, Zea mays
  unsure (1)..(456): unsure at all n locations
ngcatacacatcaatccttcaactggttttggtgctattctacttcgatgtgggcttattactcttcccccagtgctgaatacagactcagatgcaacagttgtgactggaattgccatgatatctcgagcaatctttctcaaagtggggtacttgatccctgcatattgccaccaattaattatgtctagctcttgagttcttggcagtgttggctcctccaaatataaatccaactcagtgcgcacaaaagatgaacaatcaggttcttccgacaagaatttatcaaagattccaaacatcaagtcatctccttcgttgggggccctacagcccctactagatgcacctacagcatctgttggtgccatgccctccatagattcttgatattctaacaccaactcatacaacaaatttttgactctacacacttcatcgtctgtagttggactt

SEQ ID NO: 19317 - DNA, 450 bp, Zea mays
  unsure (1)..(450): unsure at all n locations
cagcttcttctgtggccatgtctagcagaaatttatctatatcagcaaccatgctttctaaattaatatcttcggctctagtagcttcggcatctgtggcctccgaaggtgcagcttcagtagttgtcgaacttttagcagctggcgccttcgaagctgaagctcctggtggtgtcttttccatgacttctgtcaccgngatgattctttgctnttttgctctagctgcttccttcgatttcgcaggctccttttccttctgaanaagcttcgtcagttgtggccccagtggacttagcttgacaggcaaagattcagtcattacctttaaaatttcctctacttcggtagtagagggtgttgcaggagttccttcttcttcgtcaactgctttttgcttcagagtcgaagcttttctcttcttcgaaacaccntgtttcggctcatact

SEQ ID NO: 19318 - DNA, 425 bp, Zea mays
  unsure (1)..(425): unsure at all n locations
atgattagtctcanaagttcaagttntagactatcctacccctaaatgtgttcatacaagtgtcgaatattnttttagctcatgcacttggacttgtagggtccgatgatgattntctacaatttgaaccttggtacaagcaagatataaataaatggatttgcaccaattggaagagtaattgttgatcaaaggtatagtaagtaagcaatgtgtgcaatatttcgatccatgttgtaaaaaccagaaatatccagttcactcctaagctcacaaaattgtttttcatctaacgacttggtgaagatatcagctaattgtttatgggtgctcacatttgagtgctctctcaaaaaagtgacatcgtatgtctatgttcatagtgtggtcgtggtcaatagtgttattagccactaagatagcac

SEQ ID NO: 19319 - DNA, 437 bp, Zea mays
  unsure (1)..(437): unsure at all n locations
agcttaacaagtgcgaaaacgactacaccaaattgttcgcgcttagaccgactacatgcgcaccagaccaacatatataatacaccagatcaagttcgtaacgccttcgtgagcatagccgaaagcacacaacttcatcatacaagccattacatatgtacaagcgagggcatcacactntacatcggctcaaccttcggaataatccccatctccctatagttaaatagcattatcctcagctcctcacccacaaaaagacttcgcagctccctctcacctgaactcacagcggctggcagggacagcagntcctgcctgccaaccctactcactcaaagccgaccaccgtccgcctcactcactctacgcttcgcgaccgcccttcgcttgctacgcccagcactcgaaccaggcacaacttcagcatccgcagc

SEQ ID NO: 19320 - DNA, 445 bp, Zea mays
  unsure (1)..(445): unsure at all n locations
tctccgccagtctgagcagttcgaacaagagaaacaagatctttatgtcatacttgaagccgaagctcagcaaaattcggatttgagaaaactactgacaaatcttcaagaaaaatgcctagaatttagcaacaagtgcattcagcgactaagaaagatttttcattcagttggagctagcagcgaaaaatttacccnctcagctgaagacctaccacaaaccttcgaacacattgagggggaaattgacgagctcgacgaagtcatagctgggcatggtgacttctgtgcctgggtggcttctcgagggactgctgctgcatttctgaaagccggctgcgaacatggaaaggttgtcaacaggcccaatttcaccttatcttcatcaattcttgatgatatgcccgacctcgcccgaagtatttccaatagatttatataaatg

SEQ ID NO: 19321 - DNA, 379 bp, Zea mays
agcttaccatataattggtccctcgtcacaacctctgaaggatattatgaggaacattaaactactggaagggtggaaagtgggctgcagagctcaatgaattcaccattaactacgtgcacaggtcttcaattcaatcccaggcgctagcagacttcatcgctgactgtacgccacgggctcacgaagaagggacaagcaaggataccgaagcttggacggtgttctgcgatgggtcttggggaaccttcggtgcaggagcagctgcggtcctagtggcaccttcaaaagtcaaaacatgtttcgcaatcaaactgggattcagctgcacaaataatattgctgagtacgaagcaaatctattgtggcttccgaaact

SEQ ID NO: 19322 - DNA, 421 bp, Zea mays
  unsure (1)..(421): unsure at all n locations
tagcgcaccccggaacccgggnggnttcccctnttctcaacttctctacccggttcgcgctcaacctctcccctgcgcaggttggagctcgccgccgccgcaattcttcgacgtccggctaaccggagccccctcgtgccgtgccaagctgcgccaagcgccatctctgggtaagtgacctttccccgtccctattttgcgccaattctgctttattgtgggggatattggctcgccggagtcgcccctcgtcaggtcgccacgtcttcatggcgttcgacaactgcaagtccctccccgagctcgaacttaagcctagggcacccaccctctccccggagcctatgctggccgtagagcgtcggattaacccccaccgcgatgggaattgctcactggagtaaccttgggttcgcccgac

SEQ ID NO: 19323 - DNA, 315 bp, Zea mays
  unsure (1)..(315): unsure at all n locations
tgcagcttacataagctcttcattntgtgatagacaccgacagaacggctgtttaaagaagctaaaagtagcattagattgtaccataagacatgtatgatgaatggaaaacaagtagtgtaagctttgctttggtgcaaagagtcacctttttttcgtaacaatccaaagagatgagccgtcatcaaaggcttattgccactcctcacctgtgntacggtatgcggctatgcgaatcggcgatagagcctggaaacgtatacaaagcaacgttattcagtcaggttgcaacgtcgtcatctcgacgtacgtaat

SEQ ID NO: 19324 - DNA, 489 bp, Zea mays
  unsure (1)..(489): unsure at all n locations
actcagcttatgcaactgctgccaganatgagaggtgaactgtgttcctctgtctgactctgacactatcttctttggcacaccatgaagacaaacgatccgagacatatacaattctgccaatacggcgctgctatagttggtcttgacaggtatgaagtgggctgacttggtcaagcggtccactactacccaaatggaatcgtagtcggctcgagtgcgaggcaatccgactatgaaatccataccgatttcatcccatttccactgagggatctgcaacggttgcaacaatccagcaggtctctggtgttctgccttaattcttcgacaactatcgcacatagccacatgctctgcgatttccctcttcattccgtaccaccagaatttcttcttcagatcctgatacatcttctcacttgcagggtgaatcgaataagctgtctcatgagcttccttaagaatcaaactccgaatggactggac

SEQ ID NO: 19325 - DNA, 439 bp, Zea mays
  unsure (1)..(439): unsure at all n locations
cacctgaggcatcaagcttgacccaaggacatgacaattcgtcctggtccaggattttgtctaataatcacaaaggacattgtgcatcttatccttggtgtaccaaatcatggcgatggaaaaccattggagattgacgaagcagttgcagcaagcaacttgagggcagagcttggtttggctaaagacgagttcaatgtgacattgctacatgatcgtttaaggaaaggcgaggatgatgaccttaccatcagatgtttcttcctcatcttattcaaccgtctattgtttccaactgctagctggggcataacaaaccatgaagtgcttctgacagaagaaatgcaccgtttccacgagaaccgatggtgccagcttatntttaatgatctttgtgaagccgcgaacaagtggcataactgaagcaccacaaatgtct

SEQ ID NO: 19326 - DNA, 422 bp, Zea mays
  unsure (1)..(422): unsure at all n locations
ctaagcttcagaaaagatagtgctnggcaacgatgatgagctatcaattagatgtnttttctctcattctattcaatcgacttctgtttccttctgcttcttggggcattacaaacaatgaggtactcatgacttcaaacatggcccgaatggctgatattgactggtgtcaactagtttacacggatttgtgtgatgctgctgcacgttggcataaaaggaacaaaacaaacatcacagcaacaatatatggatgctcactcattgttttagtaagtaattttctcttgtttactgtgcatatatatcggatccaaatatatgatatgtactaatgttatatatttgtgcagttccttttttcagatttactatcttgatcacctacatcaccctgctgctccggataacaaatatggtac

SEQ ID NO: 19327 - DNA, 502 bp, Zea mays
  unsure (1)..(502): unsure at all n locations
gatcttaagtcacctgcngcatgcaagcttgacagacatgtaagactgagtatgatacctttcagtttcttataactcaagttcatttaaatgtgcttgtcatgtgttgacaaaaaaatatttgattacagacgcctggcatataataatttgtccggtcagatacctgggttgctgtttcaagtagcacgttacaagtatatgaagctttctcttattttttttctttcattctatgtttttgttagtgaatgatnggaatctctttttccacgatcagctnttctggcaatcacttanactgtggacctaacttcccgcactattgtgcatcgaacacattcctatccgagtaagtgcattttgactaatgtantttttattntaccaatgcatagnacttttgtatggggttctttgattttatgagatcactaattncataattatcatcttacatacaggtggatcccataactcanaaattggcttaatactttga

SEQ ID NO: 19328 - DNA, 445 bp, Zea mays
  unsure (1)..(445): unsure at all n locations
ctttacagaagaagaaggagccctcgacagtgaagatgntctgttggccgtaaaaaagaaggattattactgtgactggagctattgaagaaacaccaccgctggcctcagtgtcaaaacactagctgtcgatagcgctacagctgccgaagctgcacctcccgaagctgcaactgccaaagctgcaactgccgaagctgcaacgaccgaagatacaaatctagagagcacattttctgatattgataaaatgcttctggatatggccgtggaagaagctgctatagccaccgaagagaccctggccacagtgcctggaaaagagaaggagacagccgaagatacttcggaggaaaaggacttcgattttcaaaacataattggtcaggagttatctaaagctgagaaggaagagttgagagaatatgctatatcctgtgggtac

SEQ ID NO: 19329 - DNA, 443 bp, Zea mays
  unsure (1)..(443): unsure at all n locations
agcttagcanaagaaatttctagaatcaagaatattgagctcatgcctaagtctggtaaaagattggtcatcaagtggcttggtaaagatatcggctaattgatctttagtattaatgtaagaaatctcgatatcccccttttgttggtgatccctaagaaaatgataccgaatggctatgtgcttagtgcggctatgctcgacgggattgtcggccatcttaattgcactctcattatcacatagcaaagggactttggttaatttgtaaccgtagtcccgcagggtttgcctcatccaaagcaattgcgcgcaacaatgtcctgcggcaatgtactcggcttcggcggtggaaagagcgaaccgaatttgcttctttgaagcccaagacaccaaggatcnttccaagaactggcaagtccccgatgtgctcttcctattga

SEQ ID NO: 19330 - DNA, 451 bp, Zea mays
  unsure (1)..(451): unsure at all n locations
tcagcttgatcagttatatgtgggttttctagtttgtacaaggaaatctgacatatagaattgatttctaaatatatattgatatatgttgtcttccaaatagacgaagtatcttgtgtgggttgggcttctcgtgtagcctaatntgtgtacctcatttcctttggattatttttcatgtggtaaggtactctacatatatatcaatgatatatctgatcctcaatggactaaacataattntgttgagcccaaaaaatgtttgttatttggttgtagtccaaatttgttagttcaaagaaagcttactaagatcaagcgataatgagacgaatgaagttntcacttgtggatgagagatttgttggccacaacttcgcatggccagtgagccactcaaggatgttgtgatatgccaccattangatcacatagatcaggattctaagat

SEQ ID NO: 19331 - DNA, 404 bp, Zea mays
agcttgagacattattacttaatggtcatgtgttgtccgaaggacacacttgaggtcatcatatagatgcaccaaataaccatataaaaccttcaatgtccatacaactctgtaatggaccacacttgtgagagcacctagagggggggggggtgaataggtgatcctgtaaaacttcaaaacttaagccacaaaaacttgtcaagtgttagcacaattatgttcaagtggctggagaggagtcaaaacacaataaccacaagaattcaatcacagagatgacacggtggttatcccgtggttcggccaagtacataaacttgctactccacgttgtggcgtcccaacggacgagaagtgcactcaactcctctcaagtgatccaatgatcaacttgaatacca

SEQ ID NO: 19332 - DNA, 503 bp, Zea mays
  unsure (1)..(503): unsure at all n locations
ntatcaaatggacgtgaagagtgccttcctcaatggaccaatcaatgaggaggtctatgttgagcaacctcccatctttgaagatagtgagtatcctaaccatgtatataaactctctaagacgctttatgggctcaagcaagccccaagagcatggtatgaatgcctaagagattttcttatcgctaatggcttcaaagtcggaaaagccgatcctactctctttactaaaacacttgcaaatgatttgtttgtatgccaaatttatgttgatgatatcatatttgggtctactaacgaatctacatgtgaagagtttagtangatcatgactaanaaattcgagatgtctatgatgggagagttgaagtatttcttaggatttcaagtcaagcaactccaagagggcaccttcattagccaaactaaatacattcaagacattcttgcanagttngggatgaaggatgccaagcccatcaagacacccatgggaactaatg

SEQ ID NO: 19333 - DNA, 476 bp, Zea mays
  unsure (1)..(476): unsure at all n locations
agcttgaaccgaggacccgagtcaccggactagctcaatcgtgctcgccggagttcanaaacccgccggcgcacgtggaccgggtaagcctctgcaccatttcccgattcgttgcacgcatggcctctacgtcaccccgcagagctcctcgtgcactctgattgaactataccgccgtggtttggccggaacaggagtcgccgatgacccccgccgcctgtactcgtggccagggtagctccgaccacctccgacgccgacccgcacaccgacgtgaccggcgtgacctcccggacgtcactgaccactccgccggagctctactggccgcggtaagcctcgccgccgtaatctatgccgcgggtactgtttaagtcagtcagggagcgcgggtagaattcggttagggtcanggggttttgtgcaatgtcagtgacccatgccaattgtagaccgaggactggtttgtgagaaaa

SEQ ID NO: 19334 - DNA, 477 bp, Zea mays
tcaccacgtcgcagtaagccgctctagatagctggttcgtcgctggtaatcctaccacggggaaagccacgcatctcttgcgccagtgctcttcctcctctccgtccgccagcgtgccattccaaattcaagagccaccaccctcgggtcctataaattgagcataccgctagctccgttgggttatcacgaagccagagcacccgctcctgcctccgattagccaccatagctatctaattcttcattctccccaaaccagttttccgcaccgtgaacacctcaccgtggccagacatctacatgttagcttgtgttcttctgtgggatgttctagcctccctcatgttccctgttgctcacagcaccatcccgatgaattagaccgccttgaatcacctagaacacgttaagttatctttgggttccatcgccaccatggacagaacgattgtgagctggaatcttggaataatg

SEQ ID NO: 19335 - DNA, 474 bp, Zea mays
  unsure (1)..(474): unsure at all n locations
agcttcattcttatnaataatagcatagngagatttatactgagtcttcttagcatgaattctcctaatcttatcctcaggataaccagcaggatataaaatatagccctcgttatcctgaggcatggcagtcttgcccttaacaaaattagacaatcttttaggggcattgagcttgacattgcctccctgttggaagccaatgccatccttaatgccagggtgtctcccactatagagcatgcttctagcaaatttaaatttttcattttctaagtcatgctcattaatcttagcactaagtngagctatgtgatcattntgttgtttaattaaagctaggtgatcatggatagcatcaacattaatatctctacatctagtacaaatagtaacatgatcaacactagatgtagagggtttgcatgcatttaattcatcaatcttagcatctaaaatagcattntcattctt

SEQ ID NO: 19336 - DNA, 473 bp, Zea mays
  unsure (1)..(473): unsure at all n locations
tatgaagattcttcattccaacatgggctagtcggtggtgcctgatccaacccatgttagtcttagcaattaagcaagtgtcgagttcagctctatcaaaatctaccaagtatagctgaccctctaacactcccttaaatgctattgaatcatcacttcgtctaaagacagtgacacctacatcagtaaatagacagttgtagcccatttgacataattgagacacggaaagcaaattgtaatctagtgaattaacaagaaaaacattggaaatggaatggtcaggagatatagcaattttacccaaacctttgaccaaaccttggtttccatccccgaatgtgatagctcgttggggatcttggttnttctcgtaggaggagaacatcttcttctcccctgtcatgtggtttgtgcacccgctatcgatgatccaacttgagcccccggacgcataaaccctacaaacaagt

SEQ ID NO: 19337 - DNA, 429 bp, Zea mays
  unsure (1)..(429): unsure at all n locations
agcttctaagggagaaccttgatatgtctaaccaatgttcaattcgaaaaagatagaccttgtgcagcttgtcaagcaaggaaacaggtgggaggagcgcatcacagcaagaatgtgatgaccacttcaagacccctggagctgctgcatatggacctcttcggacccgtcgcctatctaagcataggggggagtaagtatggcttagttattgttgatgattttctccgcttcacttgggtggtctttttgcaggataagtctganacccaagggaccctcaaacgctttctcangagagctcanaatgagtttgagctcatagtgaataagataagaagcgacaacgggtccgagttcaagaaccctcaagtggaggagttccttgagaggaatggacaagcacgagttcttcgctcctacacacac

SEQ ID NO: 19338 - DNA, 426 bp, Zea mays
  unsure (1)..(426): unsure at all n locations
tctanagggagaacacgtgataggtttgactaacgttcaattctaataagatagaccttgtgcagcttgtcaggcaggtaaacaggtgggaggagcgcatcacagcaagaatgtgatgaccacatcaaggcctctggagctgctacatatggacctcttcggacccgtcgcctatctgagcatatgaggaagtaagtatggtctagttattgttgatgacttttcccgcttcacttgggtgctctttttgcaggataagtctgaaacccaagggaccctcaagcgcttcctcaggagagctcanaatgagtttgagctcaaggtgaagaagataaggagcgacaacgggtccgagttcaagaatcttcaagtggaggagttccttgaggaggaagggatcaagcacgagttctccgctcctacaca

SEQ ID NO: 19339 - DNA, 484 bp, Zea mays
  unsure (1)..(484): unsure at all n locations
agcttaaagaattgcgatagcaagaaggaccttctgattatcaaaaatttatttntaaagaaaaaagaggcacggtatgaattcttcgaagcaacaaaaagtcgttctaaggaacgcagagtgagtttgctgaagttacaaaaagtcattccaaagggagcgcagtgtaagttttctgctccaaagtcgttccaaagggaatgcagagcttacagcgaanaataaacgctgataccgcctaagtaaaaggcgaagcgcgaaaagtcaacgcgaataccgctgaaagtaaaaggcgaagaagctcttaagggaggcttacnagcgaaaataaacgctgattccgctgaagtaaaaggcgaagaagctcctaagggaggcttacatcgaaaagtcaacgttgatttaaaaagaatatgtgttttatcgcgggatgtgtgcgtatcttcggaatgaataccatttcacatagcataacatcatcaca

SEQ ID NO: 19340 - DNA, 492 bp, Zea mays
  unsure (1)..(492): unsure at all n locations
ntaccanatggacgtaaagagtgccttcctcaatggaccaatctaagaggaggtctatgttgagcaacctcccggctntgaagacagtgagtaccctaaccatgtctataagctctctaaggcgctttatgggctcaagcaagccccaagagcatggtatgaatgccttagagacttccttattgcaaatggcttcaaagtcggcaaggtcgatcctactttattcactaaaactcttgacaatgatttgtttgtatgccaaatttatgttgatgatatcatatttgggtctactaacgaatctacatgtgaagaatttagtaggatcatgacacanaaattcgagatgtctatgatgggggagttgaagtattttctaggattccaagtcaagcaactccaagagggcaccttcattngccaaatgaagtacactcaagacattctaaccaagtttggaatgaaggatgccaagcccatcaagacacccat

SEQ ID NO: 19341 - DNA, 354 bp, Zea mays
  unsure (1)..(354): unsure at all n locations
gcttctagatatgtcgaggtgacaaatgatgatggtgaattggtagttacgaaggtcgcagcttagcaacttcgtcgggtgcccatcattcctcggctttcaagctgttcctcaacaaggaaatagctctgcatatgacgtggccaaagaatggtgtacgtctcgtcactgatccagacataatggtccatccgtcggacggtgatgcgtggaaggcatttgacgaagttgatcccgaatttgcaacgaccctangagtgtacggcttggtctatcgacggacggattcacacctttcaataccagtgcaagcccttactcatgttggcctgtcttcattgtgccatataatct

SEQ ID NO: 19342 - DNA, 443 bp, Zea mays
  unsure (1)..(443): unsure at all n locations
acactatgatactcagctnttagcttatgtaaattgtaagatatgtacaattggtgtaaaagaggagtagaccccataccacccctgccttgtacaagaaataaggaaataaaaatatgacgcgtttccttttccactacttgccctatgactttaaatctctggacgagattcttttatgggggaaggatgtaacacccctggtgttactatcactaaaacttgagcataacattatgagcattagcatatcatgtgtttgtcacacctagagtgcattcactatgtaaaaatttcaaatatgttgtactaatatgaattaatgtgtggttaaccctangttagagtgctaaaccctagatttgggcttatggatacaagggaagcccaaacatgtgaagacttcanaagatatgagaaatgatcatatgatgtcacattta

SEQ ID NO: 19343 - DNA, 391 bp, Zea mays
  unsure (1)..(391): unsure at all n locations
tgcaagctgaatcactttatacccctgagataccagaaaccctaattggaaccctggaaaaccctaaatcaaaccctaggggcttatgtgcaaaattagcccacttttgggctaaagtgcaaaaaccaagccaaatagggttcttaagtcccttggttcacaaaaatgtggacttgaaaggaaaaaccaaagatttggacttaaatgcaaaatggacctcatttgagttntgctctaagtctgaaaatcagtgaatgggctcaacttttgggctttgtaacttacaaagcatagggtttttgccctangtcaccacataaaagttgaagaccaattataggagaacaactntgctaaagagtgtgagcttatgttgtatgagaaatttgga

SEQ ID NO: 19344 - DNA, 440 bp, Zea mays
  unsure (1)..(440): unsure at all n locations
tggacgtgaagagtgccttcctcaatggaccaatcaaggaagaggtctatgttgagcaacctcccggctntgaagatagtgagtaccctaaccatgtctataggctctctaaggcgctttatgggctcaagcaagccccgagagcatggtatgaatgccttagagatttccttattgctaatggcttcaaagtcggcaaggccgatcctactttgttcactaaaactcttgacaatgatttgttcgtatgccaaatttatgttgatgatattatatttgggtctactaacgaatctacatgtgaagaatttagtaggatcatgacaaagaaattcgagatgtctatgatggnggagttgaagtattttctaggattccaagtcaagcaacttcaagagggcaccttcattagccaaactaagtacactcaagacattcta

SEQ ID NO: 19345 - DNA, 479 bp, Zea mays
  unsure (1)..(479): unsure at all n locations
agcgcctacgcangcacaaaaatccccctgaaagttagaacttcgttaaatgcttcgatttcaccctcaatttatttaaccacacnctcgggatcaccacgaataaaatttcgctcaaccaagaatgtgccaacactagtataagtattttttagcttgtgagggcattgcatagcaacgacgtagcattcctccttcgtttgacgaagctcttcaacattcttttgaaccctggaccgctcagtgtcggatatctcacgcttcgattgctcaacattgaagttnttagtaacttcatcaagtttcttttcagtcctgccacttcagatttgtgcaatcccacttggatagataaagcatattctaggtcagccatacgttttgcatccgcttctttttcttctcacatttgaaatcttttggtccacttcagagagtctggcgcaaatatgttttctcatctttaccttcgactaaac

SEQ ID NO: 19346 - DNA, 420 bp, Zea mays
  unsure (1)..(420): unsure at all n locations
tangaatgaactcaatatcctcgattctcggaaccttgattgatatcttgcacacattgctcatttatatatctttgatcatgtctctttcattnggtacaaatgcatatttcttattcttcttgtgcctcagctaagactaatgtgtttccaagagtatttctatgcttagtcttagattgaaagggaaatgaagtatttggcaaaggcaaggcttccactatgactctgtcggtatcatatatcctttgccctactcatgaactttcattcatatctttntcaaagggggaaaattcatcaaggcctctaattcttcattnttggcgcttaatgccaaagggggagaaatttatatatgcccaaagcaaaaggaccgcaccaacaaaattaatatgcattttgcaaaccctcttgaca

SEQ ID NO: 19347 - DNA, 383 bp, Zea mays
  unsure (1)..(383): unsure at all n locations
gcttgctccctcgcgcctgagaaatggaagccaccggccgctgacggagtcngagaagcacccagtccccaacggcatatgagacctggcggtgagctttgtcgtantaacgcttctggattgcctgggcctgctctangcggtgacggacgtcngccaagaattcttcacgttcggccatttgttgggccacagcagccacgcgtgtgtcccctacttcatatgatctgatggtgggcgggtcgcggccgtataccacccgaaatggtgtttcctgtagagaagactggtatgctgtgttgtatgtatattctgcccaaggcagccaccgcaaccagtcccgcggtcggtcgccggagaaacaacngaggtacatggtgatg

SEQ ID NO: 19348 - DNA, 401 bp, Zea mays
  unsure (1)..(401): unsure at all n locations
tctcgataagggatgagtacagtgcaccgcgcagcacgggctcactgtttatgcaacggactggacaggtgcgccgtctgcagggtggccctggcgccgcctgccagtggaatggacaggacgcaataaatgccgtgggagcacatcgcctgtcagaagggtggtcagccggcgtgtcctctccgtaataaatgcggaggccgcgcggcccagagcccttacgtcatgctccgctcgctggcctacgtcacggtcaataagccacgtggtagcattataccgagtggggagcgaaggtgctctggatagagcctatacacgcgtcaataccagacccatgcctatgtcacggcacttcctctcctgngaccttgttatgggtggtccggagctcacttggt

SEQ ID NO: 19349 - DNA, 468 bp, Zea mays
  unsure (1)..(468): unsure at all n locations
agcttgtaacatggaagggttataataaacaactacaattaaatagtaatttcactataattctcaggtgttaaatcggttggcgatcagattaagaagtctttgatgtcatctattctgagttgtgctcctctatctatatctgcaaggtgacatgtttctatggcatgtggaggagcatgcaggaagcaaattctaagacagaaatagaagataagtggtcagaagatgaattcgcatggccttgaatgcatcaccctaacggcgaccaaatggattgtggttggtacctatagtcaatgtctcaatcgtcatgtttcagtaatttgagttgctccgatgactntatgtcgtacgtgggcagtgggggtgcaaggtagtagcggtgctccttaagttgtttgtctttatttcgttccgcttatattacttcttgaaaaggtctcatagtctttctagaagtcaccc

SEQ ID NO: 19350 - DNA, 464 bp, Zea mays
  unsure (1)..(464): unsure at all n locations
tggcacggaataatgtagtaggcagtgtcatcgaattccgttttggaaacggcgccgggttaagcatgggagggaggaggatccggtgcaggtgtggagccacngcgttcacagggccacatgtgaccggcgaaaactatggtggggatttggcccgcttccttcagtctaggccttcggatggaatatatatcttgcatgagttcaacctgatgctacttatcctggctccgttagggcatcctggttagattgatacggcaaccaatcagacgcactctgactccgttacggngcgactgatcctcgcactaaacaaaagcgagagcatccactcccgtgactgatctccagcctgataataagaaaatactacgcggtacagtcctcatcaccatgagcacgggagtagtactagtttctagtgactcgcatgtactagttatgtatctattactaatctc

SEQ ID NO: 19351 - DNA, 487 bp, Zea mays
  unsure (1)..(487): unsure at all n locations
gcttctaaagggagagcacattntatgactaatttatgttcattttgagaaagacaggatttgtagcgcatgtcaagcagggaagcaagttggaactcatcatccacacaagaacatcattgcgaccgaaaggccacttgagctactccacatggatctattcggcccgatcgcttacataagcatcggcaggagtaagtactgtgacggaacctccaagtcattaggcccacctacagttgtccttgtccaatggacctcagacaaccctgcaggtgcccctgaatcacttgacaagttcagtatctgctttcatttcctttcccaagagcgtttcacctgtcatgtagacatcacaaagcatcggaggtacgaaaatgcggaagcaattacaataacttacattttatataagagtagagagagttataatattacagaccagaaacaaatataggagtgctgagtatattattattacaacagg

SEQ ID NO: 19352 - DNA, 451 bp, Zea mays
  unsure (1)..(451): unsure at all n locations
acataaaatactcaagcttncaccggaaaacctcttaatctatcaagtggttcattccatattcggnatcatttaaatgtcttctccaattgtgagtagactatgtcatttcttatcttgtacccccatgttgccacttatgcatatgcctttaaattcttcttttggtatcgctagaatatcctttaccatttaactatgcatatgcgagcacctagagggggtgaataggtgatcctacaaaaataacactaaaacacatacttggtctaaaaatgaagttagtgaaaactaaaaccaagtttgagtagagagaagaagaaagcaaatcctcttcacttgattgctctttcaagatatagaatagattaagagcaatattacaagtgaatttgagagacttangatgatgggagaaaatcgcatgcatatgagcacatgtaacaccctg

SEQ ID NO: 19353 - DNA, 445 bp, Zea mays
  unsure (1)..(445): unsure at all n locations
atccttgagtcacctgcggctgcagcttaaggccacgttggaaattttgaatccacactcatcccctgcagtgtagaaccactggaaaaagccccagaanaagctaaacatgaagtacttgcccaacgtctttacttgcttcctgaaatatatcattgcaaatggagttgcacaacatggaccgggtggtgaaaaatgatggatatagttttcgcaaggttaaagtagccaaaacaagaacccaacggtacatacttntgcagcttggctccctcanngtgtgtgaaaaccgtgatgagatatgcagtggctgtgccacttggataggtcagcttgtagtcaacaatcataatctgaaacaaaattaagctgataatttcaagtttccttccatacagtaattcagtaagaacataatggaggaaagaagtggagacataccttt

SEQ ID NO: 19354 - DNA, 497 bp, Zea mays
  unsure (1)..(497): unsure at all n locations
tactcagcttacctgtacaggatagctccttgttgcaaggtggatggttcttaagtctctttgaaattcttaaggtcccgtttgtttcgttggaattgaattccatttcaataattataatttagacaaaactaattaagtntatatatttatatatgtaatatatttgtatattattctaaattatatgagagagatagttatatattacatttatgtcatagcaaagtaagtagaataatgtgctataagttgtccatcggaaacatagcatgtaaatctatagaagcaatttccatctctcacctcatgaatnttagataggcttatataataactttggaaagtggtggaatgtcacattcgataaaatagcctattccattagtaagattccaattcctcanaatgaaaggaaacaaacgggacctaanggtaaatgcttaanatganntccacacgctttcataagtgcatagtctgtcatgagcatcaca

SEQ ID NO: 19355 - DNA, 425 bp, Zea mays
  unsure (1)..(425): unsure at all n locations
agctngagacgggaacaaccgnggcatgcactacatcccttgaagaanatgtcaaggattngaggattgccaagaggaataaacaaaagaagaaattcaacacctcctccaaaagcctcaaccacgtctccacaaaaggtaacatccaaggtaatgatcaagccacacttcacattaagaggtgtagtgaatgctntgaaatggggcacttgattaggtcatgtccctatattaatggcttgattattaacaaggatgatagactntgttttaaatgctctaagaagggacacttgcttagatcttgtccccatttaaaacaaaaaggcatagggttagaaaagaaaaattttactaaccatgtagcaggcaacaagcaaggaaagaagaanacttcaaaacttgaaaaacgcctatgctacaca

SEQ ID NO: 19356 - DNA, 494 bp, Zea mays
  unsure (1)..(494): unsure at all n locations
ttgggttcaattatctagtcaacgcatctgntttgtgtgtgcaagctatacggtntctggatcaaaatccaaagctactctatatcacaagagctatcaagtaagctactcanaatacatatattataccatacactctttctctaaatccaccatgtcatatgaaaaaaccatgcatgccaactatgttctatataatcctttctttctgaactataagctgttatgactgttctatatacacactcttatgtagatataagtaatacgtttagctgtagaaatctcatatcagttacaatcgatgtgaaatagatttttgaaaactttccacaatgaagacacgagatgcagccaacttaaatgcatgaaggcattcatcattaaatgtatgtcatattcatgatgggtgtgtctcatattttntcgtttgacaacaaatgcaagcctattagatagatatataacgcgttagaattttgacacatcgatat

SEQ ID NO: 19357 - DNA, 481 bp, Zea mays
  unsure (1)..(481): unsure at all n locations
agcttctaaagggagaacacattntatgattaacaaatgttcattntgagaaagacaggatttgtagcgcatgccaagcagggaagcaagttggtgctcatcatacgcataagaacataatgacgaccgacagaccactagagctcctgcacatggatctattcggcccgatcgcttacataagcatcggcgggagtaagtactgtctagttattgtggatgattattctcgcttcacttgggtattctttntacaggaaaaatctcaaacccaagagaccttanagggattcttgagacgggctcaaaatgagttcggcttaaggatcaagaaaataagaagcgacaacgggacggagttcaagaattctcaaattgaaggcttccttgaggaggagggcatcaagcatgagttctcttctccctacacgccacaacaaaatggtgtagtggagaggaagaatcgaactctattggacat

SEQ ID NO: 19358 - DNA, 446 bp, Zea mays
  unsure (1)..(446): unsure at all n locations
tcggatacaccactattttcatcatttctcggcatttatagatctctttttatctggtagacaataaaggaaatcatctgtgtcctcaccaccatacaccaaggatcctcatgggtacttcagatccttggtatattgttttgcttcggcaatatgctcctctgataactgcttccccgaagcatgtcgcacaatgaattccaactctttagcaagagctttatgagcaggagatttggatttttcagaagcgctctctctttccaggattatcggtgcgctttccgaaggtttagcttcagtgggaacttctgagggcccagcttcaaaaatagtttgcaccatgtcggcctcgtcagatttctttgaaactttaccctccgtgatagatgcttcagcagaagcangagttgatgttttcacagactccataacagcatctagca

SEQ ID NO: 19359 - DNA, 480 bp, Zea mays
  unsure (1)..(480): unsure at all n locations
agctntgctactagagacatgttctttgctggattacaagaccctcttaactctaaaatattatattatagcctgtaaaacatttaataatgttcaaatgtacttctaaatagtatgttgaaccggtaggacactatatcccaccacacaagcataaggccccgtttggtttagagtcactaaactttaatcatttttagaccctaaaaaacatgtgacctccaactaaagtttagtcctccagtcaccaaaaatggatatttgcattccttatcctctctctctntaatgcatggnggcatggcgtgagcacttgggactgcattaattaaggttgctacggtcaatatgcacaataattaatgctctntaatcaggtttagtcattgaaaccaaacaatatattnntagtaactaaactaaagttagtcagataactaaaggaaccaaacgagacctaagcacatgtngtgtgaccac

SEQ ID NO: 19360 - DNA, 447 bp, Zea mays
  unsure (1)..(447): unsure at all n locations
tctaaagggagaacacattntaggactaaccaatgttcattntgagagagacagggtttgtagcgcatgtcaagcagganagcaagttggcacccatcatccacataagaacctaatgacgaccgataggccactggagctcctgcacatggatctattcggcccgatcgcttacataagcatcggcgggagtaagtactgtcttgttattgtggatgattattctcgcttcacttgggtattctttntacagganaaatctcaaacccaagagaccttanagggattcttgagacgggctcaaaatgagttcggcttaaggatcaagaaaataagaagcgacaacgggacggagttcaagaactctcanattgaaggcttccttgaggaggagggcatcaagcatgagttctcttctccctacacgccacaacaaaatggtgtagt

SEQ ID NO: 19361 - DNA, 420 bp, Zea mays
  unsure (1)..(420): unsure at all n locations
agctttataaggggcatacttgtaattcctcacaggctgcgttctgtgcctattaatagtgaacaagattccgttactgttcacgcattctggtaattgcaatcgcatcttttggaatccaacctttngccaaggcagaggtattattgtattcaataactcaatatattaagtaaatataatgtaattcgtctatgatttatttatcccttttataccttttattttatgttatcttataatttctactgaaattntattacgaagatttaagcttcgtaattatgctcttatcagccttcgtccaaggcccattatcttcaagggaataatgtttcatggacgaaggacgttgacatttaacacttcatgttgccttgttcttaattcatagcatttgagaacaagtccccaacattg

SEQ ID NO: 19362 - DNA, 486 bp, Zea mays
  unsure (1)..(486): unsure at all n locations
tattacggacctatgaaactaagctttgaaagatcctagtgatcgggggacatttgtgcctttgtcggcgcgggaggggttgcagcaattctggagaaggctggttgtgacaatgttaaagctgcggcacagaccgaagccgccttctccacagacgacacgaaagacccctcggccgaagccactttggtgggtgggaagttttattccaatgtctgggtgaatggtggccgagaaatggccaacaaaattataaataaaaatgaaaaagaaacccatgatgctcgggaagaaactaagcgagccgaagaagctgccgagcgcgcaaggcatataggtattatttttggaatttagcttcagtgtttgttttctggcttcggagtaacggttntttgtttactatagctgaactctcacctgtatccgagccatacgacccccaggctgatcccattatgaaagaggcgctggatgtgatgagtg

SEQ ID NO: 19363 - DNA, 473 bp, Zea mays
  unsure (1)..(473): unsure at all n locations
agcttcgtcatctgaaaggaacttaccctggatggtagagattatttcagttctccaatcttcgctgtaaacaggagatatgttgaggactgctctttcaaggagctncactgaaggtgcctttattgtttcgaagaacacatccgaaggtaacggcagcccctgtgccgcagacttagctagcaaatcagcatgctcattntgtcctcgaggaatattcttgacagagaatccttcgaaggatgcttcgatccttcggaccgtatctagatatttttcaagcttcggatctttagccttgcaacttttgtcaacatgacccgaaaccacttgggaatcagttntaagaattgcccttctgattcccattgcctttaatttccaaaggcccagaagcagggcttcatactcagcaatattgttcgtgcagctgaaatcaagtcttgctgcataacaangtttgaccttggatg

SEQ ID NO: 19364 - DNA, 423 bp, Zea mays
  unsure (1)..(423): unsure at all n locations
cttcagtagacacttcagaaagttcaacagttntctttggagttatgcttgaagatntaattgtctccaaaacatctaacacattaactgtcctttntctttttggggtcactattggacccttctggctttttcctgtctcaatctttgctgaaggacttanaacttctgatgtttttgcttcctcagtccttggttcttccgtcttttctgttgctggctcttcggccaactcttcgatttctggcagcagagttgattctttagcttcggtggccgaagaggtctcaccggcgaactcangcactgtggccagttcaatataatgtggccggtgtgtgagaacctttacccttttcctcttcggcgccggctcactangagcggctgaagtagtctcctttgcagaggaaatattctttc

SEQ ID NO: 19365 - DNA, 222 bp, Zea mays
  unsure (1)..(222): unsure at all n locations
catcaagtcctctccatctctatggcacaatcgtctgggtcatccatcattgcagatcattcannanatagccaataataatcagattatatgttctagtgagtcaagtagtctcngttgttgcgacgcttgtcaacaaggcaagagtcaccacataccttatccaatgtcaacaaagatctcttctaccaagcctttacaagctcgtttctctgatgtatg

SEQ ID NO: 19366 - DNA, 193 bp, Zea mays
  unsure (1)..(193): unsure at all n locations
cacacctactcgtctgttatatagtgccacatgtgggaaggtaaatcatcaagttttccgcaccggacaaatagtcgcncgcacccactgaatggtgggccacagagcccgagaatgtgaaatcccaggacacgtgtaactgctgcatggcggggccacctcgcgctcgattatattaatcgttctcgacatg

SEQ ID NO: 19367 - DNA, 59 bp, Zea mays
  unsure (1)..(59): unsure at all n locations
tcactggctgttctgggtgtgcttacacatctctncgcatcacctttggaaagggtcta

SEQ ID NO: 19368 - DNA, 212 bp, Zea mays
  unsure (1)..(212): unsure at all n locations
taccgacttcagntacccgaaaccttgtctgcagtacataatgtgttccacatgtctcaattgaagaaatgtcttccggttcccaatcaaaccattgaagtaattgatggttgcttagaaccagactcgacatatntagagcaccctattcgagtcttatatcanaaggacagaattatccgaagganaactctcaagttntacaagatact

SEQ ID NO: 19369 - DNA, 230 bp, Zea mays
  unsure (1)..(230): unsure at all n locations
acgtcaactaagctactgagctactgagctactaagctactatgctcagcccacataacccactagctacaagtacacnactctagctcatactacacagggataggatacctcacggccaacacttaaccttgggtttggtagctcctacagaagcaacctagccactattagattagcgtgcatccaccgcgaatcttcacgtgtctagcaccaacttatatatataa

SEQ ID NO: 19370 - DNA, 175 bp, Zea mays
  unsure (1)..(175): unsure at all n locations
tgttcatgcagtggaggatccgtgggaatggtagacatgcaanggttacgagaaacatatgtcgtgtggttagagatcctcacgtgagtaaatcgattcggatcaccgttatattccgaagagtggagacttgatctctgacctacaacctaagtcaggatgtgaacctcatgaa

SEQ ID NO: 19371 - DNA, 284 bp, Zea mays
ctggcaccacaaccactaattctgtttaccaactacctatgttatggactgttccgggcctctgtcataatcatatctgtactggtacctattatacttgacattttacgatgatgtagtatgacaatgcggtcaacggggctaccacagaagtccctcccaccaatgcatgcagcaccaagggaatagggcaatgctaaaggaacccgctcgtctcgccagtgggctctaggtcactcacgaagacacgctacacctgcgcttccccgcactttaagctgctc

SEQ ID NO: 19372 - DNA, 263 bp, Zea mays
  unsure (1)..(263): unsure at all n locations
ccggatcttaagcacctgngctgcagctctcttctgagtcttgccactgaatatgaacctcttcctcatgcatcttcnttgcttcgatctgatccctgcatgtncagtcaaatatatatcanaatcctgctctaatagacatatgcttcaattcagtagaaatctttgcgattaatattacctttntgtgctgtaacactntacatcgacggcatggtattggtatcatcagcatcttcctcgaccctttcgtgcttcatatt

SEQ ID NO: 19373 - DNA, 184 bp, Zea mays
  unsure (1)..(184): unsure at all n locations
ctctcacaatntcccctttactntctattatgcttattattgagtgctcttgaactaccatgtcaatttagaaatttccaaaatgttgcanaaaatcatagtgggtaaacattgatctctgtggtttattctaacattttgaggttagaattaattcacataacccttgngcaanaatgacaaa

SEQ ID NO: 19374 - DNA, 204 bp, Zea mays
  unsure (1)..(204): unsure at all n locations
tcatcgagttagtttcatttttcagagaaccgtccattgagtcanaaaatgacatgtacatgtaatggatgtacacatttaatgcgaaaagctggaactcttgtttccattataaaanaaggtgagtgctcataanatttccaaaatgtggatggatactcttcatagaatcatatgaagataggacagntcctgcatactatg

SEQ ID NO: 19375 - DNA, 276 bp, Zea mays
agacattatatcccttcggacataatgaattccggacaaagggtatgatggagaaaaccttcgtaagctcgatagacaataaagaagaattcatatatcaaatacgaagaataatttagatactattatcaacttatatttatttgcattatcatattcaaaataacaaattataaatgtaccttcggattgacggaaagtaaaggtacaggcgtgatgcgaaaagcggatgctgagtcagcgtgaacagtacgggagtactggtcatctatttat

SEQ ID NO: 19376 - DNA, 304 bp, Zea mays
  unsure (1)..(304): unsure at all n locations
ctaagctnccgtgcggcgagctccccagtcgacgcgttactgcgttgcnctgcccatgtgtcaagcgccccttcttataaccacctgctcctccattgtgtttctgctcgcataaccctcagccgcccacggtgctagaaaccggaaccgtcatcgcgcagtctacagcgtctttcgcgccgtcttcaccgtccacctcgccggagcccatcccggcacctgcgctcgaatccacagaggtgagaactctntgccgtttagctcccttctttntcccttccttccctttagcgcatccgctcat

SEQ ID NO: 19377 - DNA, 378 bp, Zea mays
  unsure (1)..(378): unsure at all n locations
ctctctcctcgcatggagatcgcaggtctntagcgtttttaattctgattgtgttgatgttagagaatgtgatgcgggtgaattcttaactcgctcccttgtcctccacagagaanannaatttatctggaatttcgttaacgtttatggggctgcccanaatgagcacaaatctcgctntctcagtgaattgtctgctgtttgctcgagaagccaggtccccatgcttattggtggtgatgtcaatattctcanganagctgatgataataataaacctggtaccctcagcacatggaagtttatgttcaatagcattatagatcataatggtctagctgaatttgatctgaagataaactatacacgtggtctaac

SEQ ID NO: 19378 - DNA, 214 bp, Zea mays
  unsure (1)..(214): unsure at all n locations
atggaagatgtataaagagatgctgcatantgatgaagaaacccggtggaaaatatttttccaatntgcacaaaaacaccggtgcctctttcttcagctgntccatcacatctcttctgatttctttagcacacaactgtctgtagaaatagctaacttcagctaacgttttccacacagcttccgaaatgacccacgaaacattacaagcatg

SEQ ID NO: 19379 - DNA, 131 bp, Zea mays
  unsure (1)..(131): unsure at all n locations
gattgagctgacgcttcctggctagtctgctcgctgtcatttcgaccttagcaccgtctcgaatctttngatgatgagggccatctcttcatcattaagaccggccggctcaatttgcgccaccttgctgg

SEQ ID NO: 19380 - DNA, 443 bp, Zea mays
  unsure (1)..(443): unsure at all n locations
agctcattttagcctctcactttcttctttgagctcttgatatgtatcatcttttgntcctgcacattctagctcaaaggaagatatgcttgtcgacagacaacaagcattagcacatggtaatatagtttcaattngaatatatgtgcatgagtgacggttgtgcgaatttaagttctctattacaatctcatgagcaatggtntgtatgatatgatcatccataagaatttcatgagaatatagaagcatatcatatttttcttgacaagtagatttcatctttagctttctacttggtcttaagcaggcatcctattactaatnagcgatcaatgtaagagtatctgctcattgaatagttcatcctttgaccaatcacatgaagcattagctctatgtcttagtcactatcaagctacatttcatgaagacatcttaca

SEQ ID NO: 19381 - DNA, 132 bp, Zea mays
  unsure (1)..(132): unsure at all n locations
taccttcatcagctgacccctaatgctatncgtagattatagcgttatatttgggcccttcgtagccagtgagtggaaccgttcggtgaaagtttctgccgagttcatgaattacactaccagactaaagct

SEQ ID NO: 19382 - DNA, 418 bp, Zea mays
  unsure (1)..(418): unsure at all n locations
tcaatccgttctactccttcagtccttctagcagcttcttgactgccatgtacagtaatgggcccttgttccgaatgtatcttcatgcatagatatgtggatgaagatngcttcaaggcgtggcgtcctcgaccataattcattgatggatttcatatacgatgcaagacacatgtctgtcttgattgggacataccaatgtatggcatgtatttgcactgcacattgcttctcgaagccaaagaggtggtgatatgatctattttgctctgattgctgaaccttgcaaatattccgtgactgctgtgctacagacatggaccaaatcctgagaccgattacatgatgtggagtatctactgagctctgaaaagatgaataacctgactgtaggtctgcccactagaccgctggcttt

SEQ ID NO: 19383 - DNA, 498 bp, Zea mays
  unsure (1)..(498): unsure at all n locations
tgcagcttgctcatagctactctgactgaacaccttcgtagaaacatttttatgaaataaaaagtagagggagaatgggttaccttganatnggaataaaacaaactaccgacgatgtgctgtcgtcggtagcggctaatatcggcttcgagcttcnggaaaccgatactctttgatagagtaccgataacctttgctncggtctgatctcggatgcagcctagcttctcatcatcaacacctncgaagaanagtgcccctggccgatagccgcaagaaatggcatactctnttaattcttctttttcggctnttgtaantcttgacaaccaagtttgaaattgaaattcatcttcagtgttcttcgcaattcttcttttctcggctctaggcgaacctttcgtggtcagcagtttttgcgcatgttacagaattattattagagccccttcaatgaatctcgttagagctcgattgtgctcgagggcagtagactgt

SEQ ID NO: 19384 - DNA, 213 bp, Zea mays
  unsure (1)..(213): unsure at all n locations
ctaaattctatatagataagctntggctattgtaaatacttcataatttcctaattggacctaaaatcatgctaactattttattaaatactatagaaaattaggaacctagcanaattggtctcaatattttatcaattgtctacaattttctagaaattctctaatcctggcagaaaaagaaaaagagctaacaataatgggctgaatctg

SEQ ID NO: 19385 - DNA, 158 bp, Zea mays
  unsure (1)..(158): unsure at all n locations
ggagctcatcatccatacaagaacatcatgactactgacacgccaatngagctactccacatggatctatttggcccgatcgcttacataagcatcggcaggagtaagtactggcttattattatggatgaatattctcgcttcacttgggtattctt

SEQ ID NO: 19386 - DNA, 336 bp, Zea mays
  unsure (1)..(336): unsure at all n locations
ggacctaagcactgngctgcagctgtgtgagagacccactgaaaccttactattatacttaaatggacttgtcacaacagaatgattgttagaaaaatctcctgctactctgacccttcctttttttgggctcttcnaaattgctcattttttaattatttataccttgtgaacaagcacaaaaactgctttactcacactattctagataacttaactcctttctagtgcaagtcctgcagcgaaaaacctgcggtctgcttacaagataccattagtaaactctgcctctggcccacattggtgatttgtagctcacacattctgacctaaatc

SEQ ID NO: 19387 - DNA, 269 bp, Zea mays
  unsure (1)..(269): unsure at all n locations
acttgtgagtataccttggccacaagtcgagctttgttccttgtcaccacaccatgctcatcttgcttggtgcggaaaacccacttggttcctacaacattnntggtatgacgtggaactaaatgccatacctcattcctagtgagagtgttgagctcctcttgcattgcaccacccaancgaatcttgagtgctttcttacctgtgggctcatagaggaacaaagaatatgctacaaatgtgcacanagatcagtggtaccccttata

SEQ ID NO: 19388 - DNA, 406 bp, Zea mays
  unsure (1)..(406): unsure at all n locations
ctcagctcggaaccatctcttgatgagaccgataccttcctctgtttgatcccgacgcacctacctttatcgtnacaccgtcaagagaatgccctggtgatatccaggaatggcgattctctaactcttcttttcagcttcgcaattcttgcccaataagtttataaattaaagtttcttcttccnagcatcttagctatttcttatccttctaggtactgtggcatggttcttagcagctgagcagcttttctgtggcatgtcagaagatctatcgatgtaaaagtggcttctggttacacttataagtcacttcgagtgcagctcgcgtgcactcatagctgacgttcatactgggctttaagcgagctgtcgtgtgccttcatactctgcacatataatcttg

SEQ ID NO: 19389 - DNA, 186 bp, Zea mays
gagaagccttgtagtgagaccctagccattcacctcggaagtgaatacgagtctagctaacccaggatagaagggaatcttgacacatgggtaaagatgtgccacctctacagagtgtaaaactgatatatcaaccgtgctcacgattatgagcagcctgtactcgtcacatgataatttgacttg

SEQ ID NO: 19390 - DNA, 370 bp, Zea mays
  unsure (1)..(370): unsure at all n locations
tcttcgagttctacgaagctgaagacnctgatctatctgttggtgaaggcaagtgtcctctgacctattatgntccaattactttataattcatcaacccgcataccatgatcaacctaaggatngactagctntgtatctaccttgtccttgttaccttntgggtattattgttagcttatgctattgctaactctaataatgaacatagagaatatcaatgatacgtgttccttcttatatatgtgatctgggattcaggggtcagcgttctcagtgcttcgaagactgtcgtgataccgccgatacaggcacatagtgatggatgctactaataataagaccggtgattgtaccgcgccgtatgact

SEQ ID NO: 19391 - DNA, 190 bp, Zea mays
tgatctgcgtggaactcatggctaaactatgatctttacgtgtagagtgcagacaaagaactagtttctcgtctgacatctctgccccttgattaacatatacatgcctctcgtatttttggggaatatattctgtgttatcgtgctattctctcagaggagtagagccctattgacccttgtgagacac

SEQ ID NO: 19392 - DNA, 341 bp, Zea mays
  unsure (1)..(341): unsure at all n locations
cttttcttctgccgagctttacatagtgatagtctgctagaggggngggtgaatagggcgaaactgaaattttacaaaactacnaagccgggttagcgttagtaataataaatgagtccgcaagagagggcgcaaaacatatcgcaagcaagtaaagagagtgacacgtggatntgtttaccgaagttcggttcttgcanacctactccccgttgaggaggccacaaaggccgggtctctttcaaccctttcctctctcanacggtccctcggaccgagtgagctntccttcttctcaatcaaccgagaacaaaactttcccgcagggccaccacacaatc

SEQ ID NO: 19393 - DNA, 347 bp, Zea mays
  unsure (1)..(347): unsure at all n locations
tgctcttgctcattctgggaatatataaggatatcatctatgaacacaactacgaatntgtcgaggtagtccatgaacacactngtcatcagatacatgaagtaagctggcgcattcgtcaatctgaatgacataaccatgaactcatatagtccatacttggtgatgaatgctgtcttcggtatatctgcaggtcggattctgagctgatggtaacctaaccttagatctatctttgagaacacacttgcttctctcaactgatcaaataagtcttcaattctgggtanggggtacttgntcttgacagtaacttcattcaaagctctgtaatcaatagcacatct

SEQ ID NO: 19394 - DNA, 101 bp, Zea mays
  unsure (1)..(101): unsure at all n locations
caggtgggaagctctcatcatgccaaanatgtgatgaccacatcaagacccctggagttacttcatatggacctcttcggacccgtcgcctatcaaagcat

SEQ ID NO: 19395 - DNA, 328 bp, Zea mays
  unsure (1)..(328): unsure at all n locations
tcagcttcgattcagcaatattatttgacaactaaagtcaagtntcactgcatagcatgttctgactntggaatggtgcaattaaacggcagctgcacctgccccgaatgttccccaggaaccatcgcagaatactgtccaagcttcggcatctttagttgcttcttctttctgagcccctggcgtccagtcagcgatgaaatctgctagcgcctgtgactgaatcgagatctatgacataatcatgcagaactattgagttccgcagccacttttcatccttcagtacttcttgttctatatatcttcaaggcttgaaaaggacaat

SEQ ID NO: 19396 - DNA, 158 bp, Zea mays
attacgcgcataatgtctatacaaagagggcactgtcctgacgtgcctgccatgagcggatggtaccttccttttgtcggctactgaaaaactgtaccgcgacttacgctgtaacacattagacttacggacgttccctcagcctacaaacaactaac

SEQ ID NO: 19397 - DNA, 368 bp, Zea mays
  unsure (1)..(368): unsure at all n locations
ttatgctactgcccgcatgaatgttttgatcagttcagagggaaaagaagactataaagcaagggcagccatctgcaggatgtgatcgatgatctctcgactcacatgaagatcccgcacgcttaacagcatcctttccaacagcgccacatgctatggagggaaaaagatgactcaacttactatgctttcagtgagacatctatgagagatgaaaaatatcatgttgttatgcctaatnaaccaagtaataataataatgattgagctgatgaaaatatgcttaaaacagagactgtgatgagacataaattgaaaccaaactatgcttaagtaagaataaagttttggatattttgctgacattt

SEQ ID NO: 19398 - DNA, 170 bp, Zea mays
  unsure (1)..(170): unsure at all n locations
gatattggctaattgatctttagtattaatgtaagaaatctcgatatcccccttttggtggtgatccctaagaanatgataccgaatggctatgtgcttagtgcggctatgctcgacgggattgtcggccattntaattgcactctcattatcacatagcanagggactt

SEQ ID NO: 19399 - DNA, 204 bp, Zea mays
cagtcctatggtggcgtgcatatggaggactggcatatgaactacacagcctagccaaaagggttataagcctctcgtgtgcagcttctggttgtgagagaaattggtcagactttgcagcagtaagtaactaaactaagcactgtattacacaaagcctatcataaatggatggcttgatgattgatcattatgtggctatgt

SEQ ID NO: 19400 - DNA, 243 bp, Zea mays
  unsure (1)..(243): unsure at all n locations
ttaacatggagttgttaccactcccanatgttataagaatcgagatatggaataatgaaagagatgatgctgtctgtgggatctcacattgatctaagccttatcggaaaagttntcaacaaggattctattggccgaggcagcttcagatgcggtagaattagtccaaaagtgcgaatgttgtcaaagatgtgcaagagatcagaagcaaccttcatctctcactcaattaatacaacccac

SEQ ID NO: 19401 - DNA, 351 bp, Zea mays
  unsure (1)..(351): unsure at all n locations
cgtcagcaccacgtagtccggggtgtgccagcgcagcacgtatctcggcgctatagcctatggcgctgagatgtgtaccttggcccatagactatacccgagcnagggccaaaatctctactactattaagaagcaatatagtctgctctgacatgtctgcatcactgtgtctgcatagtgtgtctgcatttcattcaattcaattcatcttcattctacgggccatgcatacctcaaattggacctcgcagctagccacagccgccaaaaatgccaagtacacagcagtagacactgaccactgttcttaactgaaagtatangtgactgacgtggctggcgatggacat

SEQ ID NO: 19402 - DNA, 180 bp, Zea mays
  unsure (1)..(180): unsure at all n locations
aagttggagcccatcatccacacatgaacatcatgacgaccgacaggccactggagctcctacacatggatctatttggcccgatggcttacataatcatcggcgggagtaagtactgtctagtaattagggatgattattctcgcttcactcgggtattcttcttacaggangaatctc

SEQ ID NO: 19403 - DNA, 209 bp, Zea mays
  unsure (1)..(209): unsure at all n locations
gctngccccccggtggttgtatcataatctctcaaaaaacaatttcatatatgtattggtgttgcgaccaaagagacagatcacagtcaataatctgtcatcattgcacacaccacgttcacaaagaactgcatatgtacatntagcagtcgatgtggccattctcgtatgcatcatatagtggtgctagtcacatactaccacagctc

SEQ ID NO: 19404 - DNA, 355 bp, Zea mays
  unsure (1)..(355): unsure at all n locations
cttgagcactgngctgcagctgacccttgatgccgcatgaaacctagcatggacacggctcagtgttgtgatcgtgaaactatatgcgacgacgcttgcaatggtgaagcaattaccttagccattggttttggaagaactattctgatacattaatttatttcaaaaagattctaattgatcatcatttttgtggagtaggatttttctgaataatcaatatgttgtagttctgaatactttgaggagaccctacttgccgcctatatgccaaaaacctgtatgtgactggctgtagattctgcaaataaatgttcctcatttacactctcagatgaattgaatgtaatgtctc

SEQ ID NO: 19405 - DNA, 208 bp, Zea mays
  unsure (1)..(208): unsure at all n locations
tacaagtntcacgaaccacatgatgcggcttanaatcaatcacagactggtttgttcggattaaagctagttattcaggctgctgcatctacaattcatagagtcaaaacaccacacaaaggctntangatttanggcgtttcggattaaagccaatcaaacaacttgataaatgaaccacggttgctggattgctgtcatgctcaac

SEQ ID NO: 19406 - DNA, 150 bp, Zea mays
tgtgatgaccacgtctatacctctggagctgctacatatggacctcttctgacccgtcgcctatctatagcatatgaggaaagtagtatggactagttattgttgatgacttttcccgcttcacttgtgtattcttttgcaggaaaatct

SEQ ID NO: 19407 - DNA, 226 bp, Zea mays
  unsure (1)..(226): unsure at all n locations
ttgatgatagtgagtaccctaaccatgtgtataaactctctaaggcgctttatgggctcaagcaagccccaagagcatggtatgaatgcctaagagattntcttattactaatggcttcaaagtcggcaaagccgatcctactctctttactataaacaatggcaaatgattgtttgatgccaaattatgttgatatatcatatttggatctacaacaaatctact

SEQ ID NO: 19408 - DNA, 155 bp, Zea mays
  unsure (1)..(155): unsure at all n locations
gaacagcaagatcatcgtcatcggacttcgacctgccgncaccgcgtgtagaccgagctatccggtgagccattcttcaatttctcgtgcccattgccttcctagcacctagtgaagctcactaactagtttaaattgaactctaccgcctggat

SEQ ID NO: 19409 - DNA, 436 bp, Zea mays
  unsure (1)..(436): unsure at all n locations
catgcagtaccttctccaattctgtataatttctctttgatanactaagaacctcggatacaaaatatattgtggcctgcctcttaacttggccttcaagcctcttctggacaagtgctgcacttaccgctgagtgcgaagctgccacatataataacaaatgagcccatggcgtaggtggagttaatgtngttaaatctatcaaatactgcttcagctcttcgaaagctntctactggattggccccattgaagacttctgtgacttcacacttcaagaatgagtagttctttctgctgactgatatgaactgtgagaatgcagcttctgcaatcttgacccccttttgacttgtggtcatcgagatacttcatttactaggtgcccattccttgtgaataaaacaaaaattccttctactcaaccattttgata

SEQ ID NO: 19410 - DNA, 251 bp, Zea mays
  unsure (1)..(251): unsure at all n locations
ctctagaggcaactacgtcgtcttgaatgcccaacgcgacagggctatgtgataaaccgttcacgctggacagatcctgatgaggagacccgacgtcgtggtgcctgacgatattggtgcttgatgtatggccgcgcctgatgccgcaagtcgtncctcttctttcgctatacctgcgaaagacactatttgcaaagaatgtttgacgcagtgatgtcctgcaaaacacctttntttatcgagtaacatct

SEQ ID NO: 19411 - DNA, 329 bp, Zea mays
  unsure (1)..(329): unsure at all n locations
actatatcactatcgcacnntaagagaatgtgngtagaactcttgaatcttggggatttcaactccttgaaatacctcataacatgggtgttatggggcttcttctgtcgctgctgcttgagcaagttgcggagagatagctgacacaaggttgatcttgtggtaaccttcttctcatcttcngtatcttattgtctctattcactacctctatctttctctttgctcttcccactgaanggctctatcaaagagtattaccatcacatataagaggaaaccaaagagtatgaaccatgtagcacagaaatcaaccccatgaatcacca

SEQ ID NO: 19412 - DNA, 260 bp, Zea mays
gatcttagcgacgagctgactttctgtgttaccagtaggcccgactgtttggaagccaggggttgctgcgtacctgtgttgagaatggcacttaaagtatcctatggctacaggtgtttaaaaaaggttggggctgccacagaacacatgggtcccatatcaaaatgggcacacaagagcatggacttttacatgactttcgactggctacatacatgtgggagagatgatatcatgtgagattttgatcaccggttctt

SEQ ID NO: 19413 - DNA, 324 bp, Zea mays
  unsure (1)..(324): unsure at all n locations
aagcttcganactacactcttcatagagtgtcgataccttcgcctcggtactgtcgcgaacgcatnccaaggcctcttcgtcgaccccgccaaagagcatggctcctggctggtagccacagganatgtcgtattcttgtagntccttctcttcggcctcagatagatcttgtctgatcaggttccgaagctcgaaatctttttcttccgaagcagcatcgacaattgtcttccttttgtcaggcactggggccatgacctgttctacagctgcaactgtttcttctgtaggcatatccaatagcaatttatcaattccagata

SEQ ID NO: 19414 - DNA, 231 bp, Zea mays
  unsure (1)..(231): unsure at all n locations
gatctaggaacccanacgtnctttgtgctagcactangtaaactcattacctttctagcacaagttgcaattttggngtgcctagttacatgagaattaattgacacgctatgagtgtgattgttaccaatgggacaatccttgcattgatgtcccttctttcggcatatgtagcataggcgatcctcacgtcttgaagaattcttctttccttggttctttcttgctaca

SEQ ID NO: 19415 - DNA, 461 bp, Zea mays
  unsure (1)..(461): unsure at all n locations
atctctgagtcacctgaggcatgcagctgacaaagtgctgctgttgctctatgaagntntngataactttttgaacgtagaggagattatcgtgaatggaacgtttctgaatgaacagcgtttgtgctgtggagacgatctcgttcattcttggcgcaagtctatntgctaanatcttggttaagattntcataaaactgttgatgagactgatcggtctaaacatgtcaatcctgtcagccccttccctcttttgcanaagcgtgatatttgcctcattaacaagatgcaggcttttgcatctatgaatatagaaatcatgaatagcattggatagatcatccttaatcagctcaaaagcacacttatagaataaccctatgaacctcatctggacccggcgcctttcagagtgcatccncataaccacattntttaatctcatcatcgtgatcatagag

SEQ ID NO: 19416 - DNA, 259 bp, Zea mays
  unsure (1)..(259): unsure at all n locations
gtgatttagtactgctatcaccctcagactgatggacagactgaaaggataatcaagtattagaggacatgttgagagcttgtgcccttcagtatggtagtagttgggacaagaatctaccttatactgagttctcatgtaataatagttatcaggccagtctgaagatagttaccgttgaggctctatatggcaggaagtgcaggattcctttatattgngatcatactggagaaagaacagtcttttggacctgatt

SEQ ID NO: 19417 - DNA, 228 bp, Zea mays
  unsure (1)..(228): unsure at all n locations
ccttactggaacanctacctcacttaaatgaatgagggtagaactctngaatctcggggattggaactcctttgagtacctcataacaagggtgttatagggccttcttcttgctgtgctgcttgagcangctgcagagagatgactgacacaggtttgatttgggagaaccttcttctcatcttctcttcgcttatttcctttcacttttcactgcctctttctttc

SEQ ID NO: 19418 - DNA, 120 bp, Zea mays
  unsure (1)..(120): unsure at all n locations
gcttctctcggngagatacctgatgatgaacggcagatttattttgaagtgcccctgaaccctagtgatgcagacatatatgacatgcttgatctgctagctgaggattcatctgatgct

SEQ ID NO: 19419 - DNA, 230 bp, Zea mays
cacacaacacatcatgaacataggctcataataaatgttcgaaacgctacatagcatctgttaacttaataaatacaagaagtgtgtgctaactcgtgtatgaaaagggaaccaatgtctcaacaatatcatagaggacttaatatgttgatcatttggatcatggtgatatggaatatagaaatggattatctttgtggggcagaggacatttctaattgaatcaataa

SEQ ID NO: 19420 - DNA, 357 bp, Zea mays
  unsure (1)..(357): unsure at all n locations
acatgcttatgtccaagcagatggaactcttcgaagcatttggagaaacgatatacgaagttctacagcatgaagatgctaatagttatgcttctttttcacttacattattctgctcaccaataatgtataataaagttcatttatgattatattttgtactaggtgagtgcccgtgccgtgcaacgganatcgataataacacgataacttatgtatatatanatgtgcgctgatattgtataangaaaatggttcagaatctatntgtgatcctacccatacatangatttggtattgtaatttagctatttcaccattacattggaccatcagtacatatatacttcttatat

SEQ ID NO: 19421 - DNA, 160 bp, Zea mays
  unsure (1)..(160): unsure at all n locations
tatgctgatctattagccaagtcagcagcacatgggttgcccttaccttcggaagtatttntcanaacaataaaagcaccttcggtcgagcttcttgaaagagcagtcctcaacatatcccctgtctatagtgaagaatggagaactgagatcatttctt

SEQ ID NO: 19422 - DNA, 355 bp, Zea mays
  unsure (1)..(355): unsure at all n locations
attagtaacacaagcaatatgttnctatnttagcacctctagtatatgaatgactagaatgttactaanataacgatacctcatgatatgaactaaaatactccttacaagcatcatgcataacatcaattgtaaaagatgaagtactgatattaataagttactggcagctaatctagcaggcagtgatatgttagactcnaccaattaatgaatgatcatccatattggtaatcttttgacgtgaagccactcattggaacacattatgttggaatactaatactaataaacatatctacacttagatataagatacctttgtagtgcttagattgattctactacactttta

SEQ ID NO: 19423 - DNA, 162 bp, Zea mays
  unsure (1)..(162): unsure at all n locations
caagtgggaggagcgcatcacagcaagaacgtgatgaccacttcaagacccctggagctgctacatatggacctcttcggacctgtcgcctatctgagcatanggnggagtaagtatgggctagttattggtgatgaattttcccgcttcacttgggtgttc

SEQ ID NO: 19424 - DNA, 417 bp, Zea mays
ttctcaatggacctatcaaagaatatgtctatgttgagcaacctccgcgctgtgaagatagtgagtactctaaccatgtgtataaactctctaaggcgctttatgggctcaagcaagccccaagagcatggtatgaatgccttatggaattccttatcactaatggattcaaagtcggaaaggccgatcctactcatgttactagaactcttgaatatgacttgtttgtatgcacaaattatgtagatgatattatattcgggtctactaacgaatctacttgtgaagaattaataggatatgacacgatattcgagatgctatgatggggagttgaagattcttaggatataagtgaacaactccaagatggcacttctaagcaaacaagttactcagatttctacctagttggat

SEQ ID NO: 19425 - DNA, 389 bp, Zea mays
  unsure (1)..(389): unsure at all n locations
ttttggagctgaccaacactacattattgtcatgacaattataaagtataatatcatacaagattcacttttctatatctcattntcatttctcttcgggagtattctctatatctcgttctctatatatagaaacctatattacggacataatttgctctagaattttgaagtacatattctccatacactcaaatattntataccatattttggctttgttaatatggtgttggaatctcaanntcaatacgtagtggagagagatcgatattagagcnttatttagatatgtttaaggaaccgtgaggatgacaaagaaacaaatcctctatttatagcgatggtcggaccatatagagacccacactctaatacggtgtaacacc

SEQ ID NO: 19426 - DNA, 352 bp, Zea mays
  unsure (1)..(352): unsure at all n locations
gcttcaacacgttctcgagtagaaatgcttatgctgagacctagatgggggcatgtgccatatcactcaacgtctaccactaaatcgttgatgacgcggaggttgagcccctaacctttaacagagctatccagaacctcgtcgcagtagcaatctactccaatgatctggagcatcactaccgaatggcgccaaccacgacagatangggctactgaatgcctattgtcagcaagccaangttctgctctcgacttgagagcccgctcgaacaccgagtgggccctcctcaagagaggaacctggccatctgagcacaaaacaagccatgcgctgaacgctctcacaccgc

SEQ ID NO: 19427 - DNA, 148 bp, Zea mays
  unsure (1)..(148): unsure at all n locations
tatacgaagtcatcttcgtttgtcccattgaacactagtgcccncttcggatatttcaattctctggcatagtgattagcttcaaaaatatcttctctcggataattttttccccgaagcgtgtncaacgatataatcgtatattctg

SEQ ID NO: 19428 - DNA, 349 bp, Zea mays
  unsure (1)..(349): unsure at all n locations
cctgatgaaccgtggtcggtggtttccactccacaatgtacttgactntgctgngatctaccgcaatccccctggcagacagtacatgtgccaganactgaagtgtctcagccanaacgcgcattngctgaacttggcatataactgatgttctctcaagcacgttgacacgatccgtanatgttgggcgtgctcctcttcattcttggaatatnataaaatatctgcaatgaagaccaccacaaactcgtccaactccggcatgaataccgagttcatcaaatacgtgaagtggacaggagcatgngtcaatctgaaagacatactaagtattcaaataatccatatc

SEQ ID NO: 19429 - DNA, 111 bp, Zea mays
actcactgtgcgatgacaactctctgacctgcttggaatatttaagtccagtctagtaaggcaagtcgctaccttggtgacggagggacaactgacttcgaactgcctatt

SEQ ID NO: 19430 - DNA, 514 bp, Zea mays
  unsure (1)..(514): unsure at all n locations
ctcattattgatgtgctcgtagtcctnatcgtgccagntatactcttgatgttgcctcttatgctcattgcaacatcattgcttcttgaatccanagcaactnnctcttgttgtgcttcattgactgctacatcctacatccagagatatcaataaggacactcctttntagctntgacctatctagagtcaatcattccattanatatggagtacctataacacaagcaattcagaacatcanatntatacttgtaatacataacttgagaaaatacantaataatacctttatcttttcacttcactagcgtgcacactaanggtcaactatagcacttgctattgtatcctgtccaatcgatgacatttctgacctatacattatagtagaacaactaagtagctatataaactcatatataatanaaggtaacactcacatcagttatcatactgctgacactctctgattgagatgtcctatgctacatataacctgattctaactctt

SEQ ID NO: 19431 - DNA, 325 bp, Zea mays
  unsure (1)..(325): unsure at all n locations
gtggcttcttctcgatgactcgccttncttgattatagaatngattcttntgagacagtagatgaataactngcgcatcacactgacgcttccagaagtagctgccgagtaatcttatagtcggtatcggcgttttagaagcaacgccgagcgattgaaggttgacgtcagcattntagaagtaatacagagcaatcgaacacgagatcaacattntagaggtaacgccgagtggttgaaggtcgacgtcgacatttcagtggtaatgccgagcgatcgaacacaagatccagcgtntagaggcaacaccgagtaactgaacact

SEQ ID NO: 19432 - DNA, 395 bp, Zea mays
  unsure (1)..(395): unsure at all n locations
tgctctggattntggccgactccgtttgggttattcttgtctgaagcgcattcagagcagcctcatttcataatgcggaggctactaccatattaacgagtngcaatcatgcaataagcctctgttcaagttcgatgaaagaagcaagtccggaaaagctctncttgatgctctttgtacatattacccaagcattgccggtatattgcaagccatgggcaacgtgtgnctatgtatccagtccattcatgggtctgtaataagtacttctttttggcataattgttgtgttgcggagatagcaaaatatcctgtcatgtctgttggtcttgttccttggagtgaccaatggagctatcagatgatatgctggttatatgcatcatatcttgttt

SEQ ID NO: 19433 - DNA, 186 bp, Zea mays
  unsure (1)..(186): unsure at all n locations
tcttctcgaactgtctggtcattcttcacataanaccattctgtcatccagtcgccgggccatctcttccgaaagggtggcacgagacagcttgacccggatcgagaaacgaagctgtagcagccaaaattattgtgatactgntccttaccccaaggttntcgttcgtatgataattcgtgtata

SEQ ID NO: 19434 - DNA, 154 bp, Zea mays
  unsure (1)..(154): unsure at all n locations
gcaagttggtgcacatcatccacacaagaacatcatgacgaccgacagggccgcttgagctactccacatggatctattcngcccgatagcttacataagcatcggcgggagtaagtattgtcttataattgtggatgattattctcgcttcac

SEQ ID NO: 19435 - DNA, 115 bp, Zea mays
ctaaatagaacctggtcgctaatatacctctaaaagctaatgaaccatcacttctctaaatacaaatacatcaatatttgcggataaacaattattgaccatatgacataattga

SEQ ID NO: 19436 - DNA, 156 bp, Zea mays
  unsure (1)..(156): unsure at all n locations
gtatagctgaccctcgagtccctccttatatgctatngaatcatcacttcttctaaaggcagtaacacctatatcctgtaaaagacaattgtagcccattttgcataattgagaaactgaaagcaagttgtaatctatagaatctacaagaaaaac

SEQ ID NO: 19437 - DNA, 217 bp, Zea mays
  unsure (1)..(217): unsure at all n locations
agaacgagaagctcaacattatgcccataaactgatatacccgacaagggcactagttgttaatggcatcgcngaagaagattatttgtactgtctcccggataacaaagagatatccgtcagccgggagataggaagaagcttccgatntncgaagctagaagatggcctctcagtattgtcacaagatgaattggctgacacggtagcatataat

SEQ ID NO: 19438 - DNA, 211 bp, Zea mays
  unsure (1)..(211): unsure at all n locations
agtcttagncaataagcatgtgtcgagttcagctctatcaaaatctaccaagtatagctgaccctctaacacaccctngaatgctattgaatcatcacttcttctaaagacagtgacacctacatcagtgaatagacagtntgtagcccatttgcataatngagaaacggaaagcaaattgtaatctaatgaatctacaagaaaaacattg

SEQ ID NO: 19439 - DNA, 211 bp, Zea mays
  unsure (1)..(211): unsure at all n locations
tcgcgcctttatactatattcaccttcatctcaaagctgaagcttaatattatactgaanaatatgttagtcgtgtctttgagaaccttctgaagacgaaggcccncaacacgctcagcaccttctatgcaaccaaggaggacagcatgctcgcacaagaagaggcggcaccacgttacaagcgtctaccggtgtgacacacaaacttgga

SEQ ID NO: 19440 - DNA, 83 bp, Zea mays
agttcatgcatcgtaaagaaatgagtaacaaagatagatatattacattcggcgttacaaaatggtacaccatattacatttc

SEQ ID NO: 19441 - DNA, 264 bp, Zea mays
  unsure (1)..(264): unsure at all n locations
gtgtgaatctttccaagtctggcatcactgtctgtgatatactctttgcacacagctggcagaagagatagctgaactctcgtagcgctagccatacatgctcanggacatagcctcgaaccatcgccggaagaatctattcaatccatatgtggaagtcatgactcttcattcctaagactcgcagagtacataagtacaccctctactctggttagctgcatacccatcanggaacatcaacatcttgatccactaaagtac

SEQ ID NO: 19442 - DNA, 222 bp, Zea mays
  unsure (1)..(222): unsure at all n locations
tcttagccattaagcatgcatctagaccggcctcttcttttgcaaaatcaactaagtaaagcttgccgtctagaatacccttaanagctagtgaaccatcacatcttctaaagacagacacatctacatttgtaaacaaacaattatatcccatatngcataattgactaacagatagcannatatatccaagagactctatctaaaacacattagagatag

SEQ ID NO: 19443 - DNA, 312 bp, Zea mays
  unsure (1)..(312): unsure at all n locations
cacattcatgagaagataaaggccgganaagccaactgcttcagaagagatgatcaacgtgttgtatgtgttaacaaccgcatagttgtgcctaagaaggatgagatccgccagcanattctagatgaagcacatcttagtcgatattctattcatcccggaagcactaagatgtatcatgatctanaacagcattattggtggacaaagatgnnnaatgaaatcgcacgctatgtggcangatgtgacacttgcnaacgtgtcaaggccatacacatganagctgctagtccattacaatctntacatata

SEQ ID NO: 19444 - DNA, 259 bp, Zea mays
agaaagttatgtacaactccgctgaaatgtggacctaacatttataaccttagccttatggctaacaacccaaagatggataatgcctaggattcctatactatggctcaagcggaaagcgatctcttatcactaactctgaaatactgtcgatgcaattatgtatgaattaattgggcactacgagctcatggagaattatagacataccaaattgaagctatataggatgagattctagattaagaagactcagaag

SEQ ID NO: 19445 - DNA, 274 bp, Zea mays
  unsure (1)..(274): unsure at all n locations
aattcaccttcaccaacttacccncgaagcaatcataaggatgaacatcttcgtatgggccgtgaggagccaaggcttggaacctgatgcanaaagcttctgcaacatacacgaattgttatacgagacanaaccctgnggtaaggaacaatatcacaacaactttggctggtacagcttcggctctcgatctgggtcaagctgcccagtgccgacctttcagaagagatggcctagcgactggatgacagaatgtgtctacgtgaagaatgac

SEQ ID NO: 19446 - DNA, 190 bp, Zea mays
accaccggctactgcatatctttcaaactgatgaactatttgctctatagggcttgacacttcggaatggaccgaccggcttactcatacaatctactcttcttgtgagcccgcaatttcggaaacattgaactactactacgaatctgactcgtcaggttattatttacaacttgctgattgttggatg

SEQ ID NO: 19447 - DNA, 304 bp, Zea mays
  unsure (1)..(304): unsure at all n locations
agcttctattctagtgattctttaagaggtctatttaagcanactatcacggctaccgattgagaactcatctattatcatagcgtcatgacattaaagataagcatctagtatcaccaaataatatagagcatgagcaatctataaatatgcaattacttacgacttaagataccaacttcttgacttacagaggtacccangtcatgagtgctccatttcttgctcatcttctctntaccgtcttgagactatacaagatcgctcaagaaacaggtagtctcgaaagacacaagttatgtgt

SEQ ID NO: 19448 - DNA, 205 bp, Zea mays
  unsure (1)..(205): unsure at all n locations
cggatatgtatgaagatagctgcattaacctattattcttatctttgctaagaagataagaatgaatttcaaaatgctgcaactttttggcgagattcgttccaatttaaataagcgcaattggctccatatatctatntggactacctagattcaatggtctaaacacgtactggaactagatagtacagcttgctcttaattt

SEQ ID NO: 19449 - DNA, 420 bp, Zea mays
ctgcagctttctgacaatctgactaccgtggtgcgaactgccatatattcatagagccctgcgctgtggagtaatgtagtaatctatcaaatgcttcattctcaagctttgtggtggcctatgaactcgtgttacctcaaaagtaatctttgaactgaataatatgaaatccgctctgcacttggccctttgagtggggtcatcaagttagcttatttacttgataactgattccttgtgaaccacatcagaatgcccttttctcgagaccttttgatcacttagcactgttagctgcaagctctgaacacatggattcctgtggcttacatgttatactaataccatctgctttggactgaacttcagatcctaactctcacgtctgacctagcatcagacattgtccaagtataatgc

SEQ ID NO: 19450 - DNA, 193 bp, Zea mays
  unsure (1)..(193): unsure at all n locations
cgtgatgagcgaaaccaataatatataatccattattcatacggtcggtgtgtgtgcgtgcgtntacgttacgtaccttctncaggatggagcactggtcatcgaaccgcaccgatgcgtgctctttcttcaccttgttcttggcagggctgccgatcctgaccccagtcctcacgaagtggctggatataca

SEQ ID NO: 19451 - DNA, 118 bp, Zea mays
gcttaacatcctgtcattgctaccgaattatccttcaatgctccgttgacacacgcaaaccactaaattcctgtattaccaagcgtcatacacctatggacactatttccggggcact

SEQ ID NO: 19452 - DNA, 309 bp, Zea mays
  unsure (1)..(309): unsure at all n locations
ctcagctatcagantcgagactcttctgcagaaaagctactatgagtggatccttaagaatttcatttacttgtcaggctaagtagtaacctgcatctagatttctttctattctagatcaagcacttggcctatactagccatcttntatcacccctncagttcacttgtcgctacgtgtagggtagtgaccaagtcttaatatccgagaagtaagaacgatccgaatcgattaatactcagctggggatctccaaccacacgacatatgtagcacttaacccttgcatatgtcaactcacacccgag

SEQ ID NO: 19453 - DNA, 139 bp, Zea mays
  unsure (1)..(139): unsure at all n locations
acaagtgggaggagcgcatcacagcaagaatgtgatgaccacttcaagacccctggagctgcttcatatggacctcttccgacccgtcgcctatctgagcatangagggagtaagtatggtctagttattattgatgac

SEQ ID NO: 19454 - DNA, 225 bp, Zea mays
  unsure (1)..(225): unsure at all n locations
tcttgtgtgatagaaatatcactaatttcttgaaattctagctcaatggaagaatggctttcttgagagcaacattttgtagcacatgataatatnagttctacttgagtacatgtacatatgtganggtggtatgattntaanatagntaacacaacctcatgagccatttctaacatgatatgtgaatccattaaattattatgagagcacacaagcatatca

SEQ ID NO: 19455 - DNA, 365 bp, Zea mays
tcattgttttttttgatactaaacttggaacaaattactggtgctgctttgacaggcatctgctttcttgacaacgtgcactgactgaagtgaaactgctcattaaagcaaggagcctggcgaagggagtaatgtgtcagtcacaagattgtttactttcaaagcttgtgaccgacccatgatactcactactcagatctaagaagcgaattttctgtgacaatataacattatgtgcagcttctccatcgtggcccttttgattgggtcatcgagaactcattattggtctcatcctcgtgacagagcagactgcccttctcaacacctttgataattaacattgtgagtgcaatgtctgagca

SEQ ID NO: 19456 - DNA, 195 bp, Zea mays
  unsure (1)..(195): unsure at all n locations
catcggcgcttatcacatgtggtgatgaagaaccttcacaagcttctaaatggagaacacgtgatatgtctgactaacgtacaattcgtaatagatagaccttgtgcagcttgcatgcangtaacaggtgggaggagcgcatcacagcaagaatgtgatgaccacatctagacccctcgagctgctacatatgga

SEQ ID NO: 19457 - DNA, 182 bp, Zea mays
  unsure (1)..(182): unsure at all n locations
gggtgcacccttaggcgacttctgcacagatagtctgcgnggaagactacgattnttcgcacttgntgtgctagtccggctgcacccttaggtgactnttgcacggatagtcttcgcggaagactttcgattttcgcacttgttgtgctagtccggctgcacccttaggcgagttctgcacg

SEQ ID NO: 19458 - DNA, 339 bp, Zea mays
  unsure (1)..(339): unsure at all n locations
ctacactacctgcatacctaacatccgacacctgccagtgatactntattgatatggtggcgcgatgaaaggagaggagagagcagataggatcgacacttacacaatactagccgaaaagattcatgttcgtcgctatagcgggtagattgtgttcagcgggtacctctaaatnntctccacttacgtgccacggcaagcgtctgttccacctatatcttcactctgtacagcgggtgcgcctaaatcctttcctatactgcacgtacaccataagatagtattgtctatacctacttttcacgctctaccaantgttcatcaactaataantaatcg

SEQ ID NO: 19459 - DNA, 119 bp, Zea mays
  unsure (1)..(119): unsure at all n locations
cacaccttacgatgttcttctcacttgaaaaatgcgccaacgctggcgaagctggntcttatnttcgtaacacattctatggatttttcgtagcactttctcttggatgcacgaagctc

SEQ ID NO: 19460 - DNA, 190 bp, Zea mays
atgctgatgggaaattcctatggattttgtgaaataccaaacctaaattgaaacaagatcttgataattaacaagacggtaatcatgagactaggagtactattttctccacacaggggagaaaatttgtgagctctgtgaaacacttggaaaaaccttctagtttctattaaaagtacttaaacgttta

SEQ ID NO: 19461 - DNA, 85 bp, Zea mays
ctctataatatatatacgcaggatgttactacgagcttaacgatggaactttacaatgatatgggcctatttactcaactttctg

SEQ ID NO: 19462 - DNA, 214 bp, Zea mays
  unsure (1)..(214): unsure at all n locations
caatgtatntcacgtatctcagctgcgaagatgtgtcccgctacccactgaagtgctacctgaactagatctcgagatagaaccagacttatcttatcaagagtacccactcaagatattggatcagaaggagagatcaacacgggcaaggtcaatcagaatgtatatagttcagtggagtcaccattcagcagaagaagctacatgggagact

SEQ ID NO: 19463 - DNA, 273 bp, Zea mays
  unsure (1)..(273): unsure at all n locations
atattagtcttagtaattaagcaagtatcgagttcagctctattaaaatctactaagtatagatgaccctctaatactgccttaaatgctactgaatcatcacttcttctaaagatagtaacacatatatctggtaaaagatagttgtaacccattntgcataactgagatacagaaagcanattgtaatctanagaatctacnagaaaaatattggaaatggaatagtcaggtgatatagcacatttacaaagtcctttgaccaaaccttga

SEQ ID NO: 19464 - DNA, 163 bp, Zea mays
ccggatctagcacgcgtgcacttactcgtgagctgttccttcaaaaaatgttaacaaaacgtgtgaaaactacaaagaaactctgagaaacatggttatgatatgcaaacaatcgaaaatctaaaatctaagctgtaaattgtatacacagttatgggaagga

SEQ ID NO: 19465 - DNA, 353 bp, Zea mays
cttaccggctttgttccccatctacttgaagtcctgttcatattttttgaaacttgcaatatgtttgagacctcgaccaaagcccacataccctccaatatattatgtaaataattgatgcaacgacaagcttaccaagtcaaaacactcttttaaaacacgcatgcacggactcatttactacgggataatgctaccagtatttgccattgcatgttgcgtaaactttgccaaattacgcttaattactaacaaactttaagactcagagtagaaaatggcgatactactctagaatggtttatatccacatcaaatctaaatgagtttaacggagaactactccggagtca

SEQ ID NO: 19466 - DNA, 110 bp, Zea mays
  unsure (1)..(110): unsure at all n locations
ttggagcctttgatcatcaattctaagctcacacacttccctataacctcttcgggagacattagcttatattaattgaacttgcgtaggattgaganaaatgagtgatc

SEQ ID NO: 19467 - DNA, 414 bp, Zea mays
  unsure (1)..(414): unsure at all n locations
cagtatgcagcagtctgactgtacatatacttatgcatatatgtatgtgaaacctgcgtaactatgcgtngtgtaatgcataagatggtaagcctgtgaaccatgactgtacaaaanatgactctgcgttgtgtaatgcacactggcataaatgtctgtgtaattngtcataagctttaacagntatgcagcaaactgactgtacatatactacggtcaataattatatcgtaaacatgcatacgtccagataggttatgcagttatgcagcaatctgactggtacagtatgcaacaatcngactgtacatatgcagcaatctgactgtacaaacatgcataagcctttcaatanatatatcgtanactccggtcaagaaacatgcatacttcgagggtattgacataacaata

SEQ ID NO: 19468 - DNA, 131 bp, Zea mays
tcttgagatttctcaaactcgcttctaattccaaatggattttaaatttcatttcaaaattgttggttgcgagttgatatcaacaaataaaatatagtggtctatattctcttcagaatccttctccaaat

SEQ ID NO: 19469 - DNA, 376 bp, Zea mays
  unsure (1)..(376): unsure at all n locations
tgcacacatagctcatttgaatacctttgatcatatctcttctatatgctatgactaatggggtttcaagtctatttcaaaccaagtcatatgtatatcgaaagggaattggagtcttcggcgaagaaaaaggcttccactccgtaactcatacttcgccaccactccgagcaactctctcttctttgggggagaaatgagcctcaaggaaaaggactttcatccttgnggagagagtaaaagctcaaacgcaaaaggaccggatttcggctttggtataatcctaactcattcatttatgaccaaagaggaggaacttacttcaagggctctaatgattccgttttggcgattcatgccaaaagggggagaaatg

SEQ ID NO: 19470 - DNA, 477 bp, Zea mays
  unsure (1)..(477): unsure at all n locations
gacctatgatactcagcttcgcaaatgtcagacgaaaagacagaggccgccaaggcggaagtgcatcgccttctggaggctaaattcatcgagccagtggcttaccccacgtggctctccaatggtgtgatggtgcaaaaaaaaagcggaaaatggcgcatgtgcatagacttcaccagtctcaataaaggctggccaaaagacaatttcccgttgccgcggatcgacanaataatcgatagcgcagccggatgcgaggtcatgtccctcctcgactgcttctccggctaccatcagatatacatgaaggaggaagataaggctagcaccagctttataacacccttcggcacttattgctttgtcagaatgccggagggtctcaagaatgccggatccaccttctccagactcaccaaaacagtgctcgangggcaggtcggcagaaatatattcacatatgtggacgacatcgtc

SEQ ID NO: 19471 - DNA, 424 bp, Zea mays
  unsure (1)..(424): unsure at all n locations
tcttcattcgtagcttcggaactagttcattcttctcccagaccgcgccttttataccgtgcacaccttcatctcaaggccgaagggtcctgtgacaatatattatacttggaaagcatgttagtcgtgtttttgaagactttcggaagacgaagggccccaacaatcaccattccatccttgggagctcccttcatgccaccacgttcacgaccggtggaagcacgtccatgaccatgaacacattttttagaaaagggaataacttgattattccagcctctacatgacaatatgcatatagttgtccagttcaccccaaattccgggttcaaacaggaacatagccacactcgaaacacatatgccaccaccacatgacagattacanacactatcaattactaaaagtctagcgatttta

SEQ ID NO: 19472 - DNA, 468 bp, Zea mays
  unsure (1)..(468): unsure at all n locations
tcggagccgaagcaactccagctttggacgaagccatcatctcttattgtggaagngagttcatcggaggtgggcgccaatgttggggacttgttctcaaatgcttcaaattaagaacaaggcaacacacagatgttaagtataaacgcccttcgtccgctgaagcattatctccctaaggatttaatgagcttcggacgaaggtcataagtaaaggatcacgaagatttcaccttcgtgattatatttgtaagacaacaatcaatgagaaatgaaatataaagtataaaatattttcatatgtttttattatatgaatatacaagtatcaaaacataatatttaagcacatttataccttcgccttggcggaaagcaataattcaagcgtaacgtgtccgtgattacatgatcgcgtgaacagtgccgggatactgttcacctatntataggcacaggatacaacct

SEQ ID NO: 19473 - DNA, 458 bp, Zea mays
  unsure (1)..(458): unsure at all n locations
tcaagtagaccatgtccccaacatgcaaatacgcgctcagatcgattcttgtccgactggtgtttcatacgctcttgagcacgaagaagatgatgatgctggatggtccctatcaacggatccctttgcgacaaccaggagcgtagatcatcatgagatactgaatcatccactgacagaccaaaatgtctgggagaacgaccataaagggcttcgaatggagatcggcctatggaagtatggaagcaacaattgtaccaaaattcggtgcaaaaagccagtacgacaacttcgaagcattggttcactgaaagtctccaagcaccggttcactgaaagttccctttgtccggaaactagatctagatgtcgcctagagggggtgaatatgcgaataanaattaacacttaanaactggaaattcttactctactcgaagactggatcgcatgtaatg

SEQ ID NO: 19474 - DNA, 476 bp, Zea mays
  unsure (1)..(476): unsure at all n locations
actcagcttcgcttaacctgttcttgatactcgcaatctggcttctaatgtcctggtcacatatttctcttggaaaacatagtcaaattacgtttttgaggaccttcggaagcccaaggcccccaacagcgctcttcaacccttgcaccttggtatactcctctcgacttaaagaggccaggaatatagtagtggcttgggagttgaagtgcttgatttgggctacttcgtccgagtcatagccttcatcccccacggatggttcctgcgcaccaaactcaacaatatcccaaatgctagcgtggagtgaggttagatggtgcctcattntatcactccacatacaataatcttcaccgtcaaaaaccggtggtttgcctagtgggacggaaagtaaaggggtgtgnttggaaatgcgaggatagcgtaaggggatcttactaaacttcttgcgctcatggcgcttagaagtgacg

SEQ ID NO: 19475 - DNA, 442 bp, Zea mays
  unsure (1)..(442): unsure at all n locations
tatcgctgacgctatcgttgagaagcgagctgccaaagagcgcatgatgaatgtgaagaacgaccctagagcaggagcaagtattttttggtgcatatatgataatattattggttgcaagcacccaccatacaagttgcaatttgcccaaacacatcaatatggtgttaccatcattttttaaatttggatgccggagcaggaactagttcaattgcaccggaggaccaatctagaggaggtgatggtgaagaaattataccgagtcccgttgcaattgaccctagagctggagcaggtattttttattgcatacagtataatattattggtgaaccacccaccatacaagttgcaattntacccatatacatcactttgtgctttcaatcanttttttaaattngtatggaggatcaggaactacttcanatgtaccgga

SEQ ID NO: 19476 - DNA, 479 bp, Zea mays
  unsure (1)..(479): unsure at all n locations
tgtganaccaatcacaagtttattgaagaatgataccaaatttaattggtcttcaagctgtaatgaagcctttgagcagctgaaagtattactgaccactgctccggtattagctcaaccggacattgaaaagccctttgatgtgtattgtgacacatcaggcagtggtctaggctgtgttttaatgcaagagggccgagagatagcttatgcttcaaggcatttgcgtcgacatgaggaacattatccaactcatgacctggaatcagctgttgtggttcatgcccttaaaatatggcgtcattatctgctggggaatatctgtcatatttatacagatcataaaagtctgaaatacatctttacccagtttgagctaaatatgaggcagaggagatggctctagctgattaagggatatgaatnggagattcactatcaccgangcanagctaatgtagtggcagatgcgttaagtc

SEQ ID NO: 19477 - DNA, 431 bp, Zea mays
  unsure (1)..(431): unsure at all n locations
atggacgacgatgtcgtactccgctaaattggtctgaacctgtggaaaggtacttctttatgcctgatatggtgaaagaggccgaggaaaaggttcaaaaaattattcataatatgaagaaagcacaagctcgtcagaagggttatgcagacaaacggcgaatgcccttgtattttcatgaaggggactatgtctacctgaagtttcaccaatgaagggagtatcgcgtttcggggttaaagggaagcttgcacctaggtacattggtccattcccggtacttgagcaatgtggaccagtggcgtatcgactgcagctccccgaaactntgtctgctatacataatgtgttccatgtgtcacaattgaagaagtgtcttcggattcctgatcgacaccgtgaagtaacagatgttgtccttgaaccggact

SEQ ID NO: 19478 - DNA, 298 bp, Zea mays
  unsure (1)..(298): unsure at all n locations
tgtgcaaagatgagttcccattgccaaggatagattctctagtatttgcgacagcttcgtaagagctcatgagtctactagattggtactcaagctaccaccaaaatgctggaggaagcttcaaaagaatgatgccagagtccttcattctcaaataggcaggaatgtggtaacttatggtgatgatatcatagntaaaagcacgaagcaagaaaatcacattgctgatttgcaagagacatttaccaacttcaggcaagctggtttgaagttgaatccagaaaaatgtgtttttggg

SEQ ID NO: 19479 - DNA, 272 bp, Zea mays
tgaagattcttcatcccaacatgtgctagtcgacgatgccatatcctttccatgttagtcttagcaattaagcgagtgtcaagttcagctctatcaaagtctaccaaggataactgaccctctaacactcctttaaatgctattgaatcatcacttcttctaaagacagtgacacctacatcagtgaatagacaggtgtagcccaatttgcataattgagatacagaaagcaaattggtatctaatgaatctacaagaaaaacattggaaat

SEQ ID NO: 19480 - DNA, 378 bp, Zea mays
  unsure (1)..(378): unsure at all n locations
tcgncatctgataggaatttgccctgaaggtaagaaattatttcatttctccaatcttcactgtacacaggagaaatagtaagaactgctctttcaagtaactccactgaaggtgcctttattggttcgaagaatacatccgaaggtagcggcagcccctgtgctgcagacctggctaacaaatcagcatgttcattttgccctcgagggatattcttaacagaagaatccttcgaaggaagcttcgatccttcggactgtgtctaggtatttttcaagcttcgggtctttagccttgcaacttttgtcaatatgacccgaaacaatctgagaatcagttntaaggatcgccctcctgatccccatcgcctttagttt

SEQ ID NO: 19481 - DNA, 476 bp, Zea mays
  unsure (1)..(476): unsure at all n locations
tgatagttgctacaatattctntcctgcaaaaattctagagagacttttgtaatatcattatggaaaaactcatgtaaatttgtacataccttgtaatatattttgtttccgctatctgtgtacaaactgctttgttgtggacgaaacttcttttttgagccgaaggcaaaaaacaccttcccttcttttcgtacacaacgaagcatanaaaatttctcctttttcaaagtctttcctcattgccgaagcacctatcttttttgtgtggtatgatgatgattctatatatgtctagatgaatgtttatgaatgcaaatgacatgatgaaatgtattgtggagatgaatattangaatgattcanatctntttacttttcagcttcatcngttacttttcggtgtatcggcgttgacttttcgctgtaaagcctccttatgagcttcttcgccttttactttcagncggaatcagcg

SEQ ID NO: 19482 - DNA, 390 bp, Zea mays
  unsure (1)..(390): unsure at all n locations
tatcttcgaatgccctataggtctatatccttactatgttaatggcgaccgcggggagcccaccgcgcctctgggtctacataagtgtgggtgtttggatattattatgttgtctccctacccactggcttgggttttgtggggcattaatgcttgccctatgcggctcatatgaacatccctttccgggcttctaagaggtgaaagtattcgcccccacatgtatggnggtgtatattaccatttagttgtgtgcgcggactgtccggccgcatggcaggatcgtccggtgatgtactcggactatccggcgctttgtacggatggtctgaatttgtcgtttaagggttgtgcangacaaggtggctcaagcatgggtctcgataattc

SEQ ID NO: 19483 - DNA, 448 bp, Zea mays
  unsure (1)..(448): unsure at all n locations
ctgngaactatgcccgtatccaatctgcctgagctggaatataatcgctngccagatgcccncgttcgggtcgaccacgaccagcacccaacataagacttccctagttatttagccaagaccagagccatgatagttctcatggtagcactgttttcccgggtggtcactccatgttccaattaatatgcaataatcttgtttaaccatagggttaaccacaataatgtaaacttaccatttggaacattaatatcataaacgggagtgactgcataaatgtaagttgtagcaatagcatagcttcgaaggtaaagtataatacccaagtntgatcaaggaatatggtagaaaagggtaagtgtatcagaatacgtaacccgtcaaatatgcatatatatctaagaaataaacttattagatgtattgtttggatcanacagagtat

SEQ ID NO: 19484 - DNA, 483 bp, Zea mays
  unsure (1)..(483): unsure at all n locations
tatgaagattcttcatcccaacatgggctagtcggcgatgtcagagcctacccatgttagncttagcaatcaagcaagtgtcgagttcagctctatcaaaatccaccaagtatagctgaccctctaacactcccttaaatgctattgaatcatcacttcttctaaagacagtgacacctacatcagtgaatagacacgtgtagcccatttgacataattgggaaacagaaagcaagttggtatctaatgaatcaacaagaaaaacgttggaaatagaatggtcaggagatatagcaattttaccaagacctttgaccaaaccttgatttccatccccgaatgtgattgctctttggggatctttggttttctcatatgaggagaacatnctttntctccctgtcatgtggttggtgcacccgctgtcgagtatccaacttgagcccccggatgcataaacnnctacaaacaagttagttcttg

SEQ ID NO: 19485 - DNA, 412 bp, Zea mays
  unsure (1)..(412): unsure at all n locations
taaatactaagcttggcgttctntgaaaggctaagccatacaatgtgaatggtggacattatgcatcttgactagntagctagtgacctatattgtctttctgacagcaatatggcgaaaaaaaaaagaagcattaccagctctgcagtctgcagcatgtcatttgggtggcctctagagcttatggctcgcgaaaataccatcagttcccttgatgcatctggctccacgatcactgaaatcgctgctgctccagaccaaaatgctctgtgaatcaagaaatgtataccaagatgatcaacatgtacctatatccagatactgatagtattggataagatgtgctcttgcttcaggaatgggtgtttttccttctcattcattcaacaacattcattttcctacatttcat

SEQ ID NO: 19486 - DNA, 419 bp, Zea mays
  unsure (1)..(419): unsure at all n locations
actaagcntttggaaaacaggccaagcgcggaccgtccgggcccttgcggttgaccgtccgttacatcggaatacccctcggacagaaccaatgcaaaaacacaagtttcgactacagactgtccggaggaaaagcanagaccgtccgagccctcgcgcggaccgtccggcctcaggcgcggaccgtccggtcggtaagaaaccgcaaaacccgaaggtgaccggttcggagaaatgaattatagggggcctcgcggaccgtcctgggtgcacgaccggaccgtccgcgactggctctgtctgacatctgacgacacattaaatgcaatatagccgntgatatagcccgtactgctgaccgttgcattatcagccgttgatctacaagggcggatccgtctcaccaggagggcggaccg

SEQ ID NO: 19487 - DNA, 482 bp, Zea mays
  unsure (1)..(482): unsure at all n locations
ntaggttgaactagttgtccagctatggggttcttcaagctgtgcatgtgtaattntcgagggtaaacacacgagggctagaaacaccaaaacaagcacgtgatttgattttttttaaggtttcaatagggaaccactagattatttggggaagggggtcttttcataagcaggacagacaacagtttttttggttagaggcaaaatggactgaacaactatcgtaccttctagaaagcaaggcaagagaaacacatatcacggcctagtcaagacttaccaatccgacacaaggtaaagcttttcttatagttcctaacatagcagnacatcacattattcacctgttattattggaataaaggtgagagaagcatgttgaggcacaagagacaattataatgcgacaatcatgatgcatgctcattctagtcgncttctcagacctatactaatttttggatgcttctacagcatcctgc

SEQ ID NO: 19488 - DNA, 181 bp, Zea mays
  unsure (1)..(181): unsure at all n locations
tctaaagggagatcatatgttaggactaaccgatgtctgttntgataaagacagaccttgcgcagcatgtcagacagagaaataggtgggaagcacttatcacaacaagaatgtgatgacgacatcaagaccactcgatcttcttcacatggatctcttcagacccggtggctacatcaac

SEQ ID NO: 19489 - DNA, 465 bp, Zea mays
  unsure (1)..(465): unsure at all n locations
ttaaattggtagtgtacgcatcatgcgtggtaattagtttctttcttgtgtcaacgatatatatacatatgagacgtacatgtgcaggctggagacgttgacgatggtggcgttgggcgcgccggcgtcaacctcgtggaagtagaagtggaggtgggtcaacttggacgagacgacgccccagcatgacagtagcagcataaggacaacggaacggcaccgagcaactatcggccatggctttttgtttcccctttctacgtgcgcgctctttatgtgtgacaaagttgtgtttggagatgagaggaggagaagataatataattcgagagacaaacaagggtacgagtacgagagcagtcgctccaacagaattcagttaaacatactagctccattatcgaatatttgtccgtccgatagtttattttanactataattaacaacaatactaactagtacat

SEQ ID NO: 19490 - DNA, 413 bp, Zea mays
tagaaaaatctggtatgaatctgcgataatacccagctagtcctagaaaactccggacttggtgaacagatggtgggggtttccactccagaatatctttgaccttgctaggatctaccgcaattcctttaactgataacacgtgccccaaaaattgaatttcttccagccagaacgcgcacttgctgaacttggcatatagctgatgttccctgaggcgcgtcaatacaatcccgaaatgctgagcatgggcctcttcattcttagaatatatcaagatatcgtcgatgaagactaccacgaacttatccaactcgggcatgaacaccgagttcatcaaataagtgaaatgggcaggagcatttgtgagcccgaaagacattaccaggtattcgaacaatccataccgcgta

SEQ ID NO: 19491 - DNA, 455 bp, Zea mays
  unsure (1)..(455): unsure at all n locations
nttgaacgtactaagcacatgtcgggaaatatggtaactcgttattcctagtacatgagtgaagctgggcgcgaactntatccctcacttgtcctgagactgggtctcccatgctagctatggtgggtacaagtgcggtcactgcacgacggcagccggggtcagtggagcattgtatgccaaggtggtgagccctggccgcgaatggngaatcgatggggacggttgacatgtgtggngatggagtgccctgacatgtcgcgtgtttaggtttaccttgcaaggataaaaactcaattcgaatcgtctgcttctcgcagctaatgagactgcttgacccctngtactacattgagtaagaagtgatatgaggtttacatgagataacttgttgattgtgctaaatgtttgttaccatgtatgcttagaaagagcanacatagctaatctaatga

SEQ ID NO: 19492 - DNA, 350 bp, Zea mays
acactatggaatagtcggacttggcgacggccttgtagacctgtggaggcagcactgcatgtccgtatgtgctctgcgacgagctccgatgctctcttctctttgacgcggtccatagcgtgcgcattgggctgccatcttcatgcgcacgagccttgtggtgtggaactacgtgagggactctggggttgatctgggcgccgaataccacgacggcgccgtcatgccgctgagctcagcgcacacctagagccaaagctgtcgcgttagacgctactgaccgagcatgaatacttgtgcgctgagactacaggggttggcgacgatgcggtaatgacctcatacatgat

SEQ ID NO: 19493 - DNA, 445 bp, Zea mays
  unsure (1)..(445): unsure at all n locations
ntacaaaacacttagagagtttagagagagatgaagaatgtctcttttaggaaaccaagcaacaagagcaacaaatgaaacacgaatcactctctctcaagtcactaatcactaatgatcacttgtctcaactgtggaacttggaaagattggaagctttgaatgtgtcttggaatgaattgctagttcttgtattgaatgtgtatgagtggagtgcttggatgtagtgaatggagggtggtgaggttgtatttatagcctccaaccacttcctagccattgcttcaattctgccaaccgcggacggtccgcgcccctggtccagatggtccgcccctgtacatcaacgactganatcgcaacggtcagcaataacggctatatcaacggctatagagcatntaatgtgtcgtcagatatcagataaagcagtcgtgaacgatct

SEQ ID NO: 19494 - DNA, 339 bp, Zea mays
  unsure (1)..(339): unsure at all n locations
tcgacaaaagcaagtccatcctttcctcgaggcattatttacctatttctctctaccactgcctaagcctggaatatgggatgggaatctaattgcatggtgagcatgagagagcccgcatttacaatcacctttgattacaagatatgggataatgtaaaaggtgcaagtaacattgtttccaaaaagagtgcgatgaagggtattcaccctcatcacctggtgagtaggatgatcatggactccctggtttangggatggcctaangtgatggctcanctggtttaagcgtgagcagaatgattgtcctctcgataaagactggttgtcatctttca

SEQ ID NO: 19495 - DNA, 421 bp, Zea mays
  unsure (1)..(421): unsure at all n locations
ctggtgattatccaatttaaaacaagcaccatctcttaacatagattttctagggataaactcgacacaagagatggcattagtagcacaagcactagtttcttatttagcaaccccttatatatggaagacaagcgtgttgctaaaatagagaaacatcataatatggactaaatttccttgaaccctcatgcacaatatattttgaatgacatggataatatgcatggttattcaatgaagtctaaagggatgacttaatccatattatggtgagtgtctaatacagaagaatcaaatccagattaactagatagagaatacatcacatagatttggattgttcaccatatgataatattcattcaacttccaattagagctttatntcataatcaacaactgatgtatatcctcaagt

SEQ ID NO: 19496 - DNA, 339 bp, Zea mays
ctaagcttcacgcctttcgccttgagacatcggaatgtcacttcaaggtcttaaatgaggtctgaggctttcctcgccttgactatgatgtcatcgacgtatgcctcgaccgtccggccaatgtgttcgcccaacgcatggttcatgcaccgctggtacgtcgcgcccgcattccttaagccgaacggcatggtgacatatcagtacatgcccaaaggtgtgatgaaagaagtcgtgagctggtcggactctttcatcctgatttggtgatacccttagtaggcatcgaggaaagacagggtttcgcacccagcagtggaatccacgatttgatcgatg

SEQ ID NO: 19497 - DNA, 263 bp, Zea mays
  unsure (1)..(263): unsure at all n locations
tctaaagggagagcacattntgngactaacaaatgttcattntgagaaagacaggatttatatcgcttgtcaagcagggaagcaagttggtgttcatcatccacacaagaacatcatgacgactgacaggtcgcttgagctactccacatggacctattcngctcgatagcttacataagcatcggcgggagtaagtactgtctagttattgtggatgattattctcgcttcacttgggtgttctttttgcaggaaaaatctc

SEQ ID NO: 19498 - DNA, 455 bp, Zea mays
  unsure (1)..(455): unsure at all n locations
tattctagntattaccaaaagataccaattgaagcactctttatattccaattactcaacttgtggaggggcccaagtcctgattgctccatttcctttttccaccttgagactatataagatcactcaagaaacaggtagactcaaaagacacaagttatgtgtgctccccctaaagttgtgcatcaagtattcgaatgacttgcatcttgcacattggagcgtnctcagagctagaggggatcacaacataccttggtctaggcataatatatcaatttcatcacaaaaagataccaattggatatacgacataatacaacttatgactagtggaagcaatgcatgcctcaagatatataaccttttaaaagcaatctaggcacgcttcacacatgatgatcattgcaacacatataccaattgaaaaatgacaagatcatgcatataaagca

SEQ ID NO: 19499 - DNA, 259 bp, Zea mays
ttatcaagaaaaccttccaaattggagaagtggtggtggtgtttaatggcctcttaaagcttcgaattattttaaacataccattaattggtccttcacacagcccttgaaagatttatgagaaaccgagaagctactggaaggattggaaagtgggctgtggaactcaatgagttcagcattgattatttgcatagatcttcgattcagtcccaagcgctagcatatttcatcgccgactggacgccaggggctcatg

SEQ ID NO: 19500 - DNA, 396 bp, Zea mays
  unsure (1)..(396): unsure at all n locations
ccacatgtgctaagcgacgatgccattgtctgcccatgctagtcttaactattaagcatgcatctagaccggcctcttcttttgcaaaatcaactaaataaaggttggcgtctaatgcacccttaaaagctagtgaaccatcacttcttctaaagacagacacatctacatttgtaaatagacaggtatatcccatgttgcataattgactaacagatagcaaattataaccaagagactctactaaaaacacattagagatagagtgctcattagaaattgcaattttacctaacccttttaccttgccttgattcccatcaccgaatacaattgaatcttgggaatccttaattttgacgtaggaggtgaacatcttcttctcccncgtcatat

SEQ ID NO: 19501 - DNA, 477 bp, Zea mays
  unsure (1)..(477): unsure at all n locations
tctaaagggagaacacgtgataggtgtgactaacgtacaattcgtaaaagatagaccttgtgcagcttgtcaggcaggtaaacaggtgggaggagcgcatcacagcaagaatgtgatgaccacatcaagacctctcgagctgctacatatggacctcttcggacccatcgcctatctaagcataggaggaagtaagtatgggctagntattggtgatgacttttcccgcttcacttgggtgttctttntgcaggataagtctgaaacccaagggaccctcaagagctttctcaggagagctcanaatgangttgagctcaaggtgaagaagataaggagcgacaacgggtccgagttcaagaaccttcaagtggaggagttccttgaggaggaagggatcaagcacgagttctccgctccctacacaccacagcanaatggtgtggtagagaggaagaacaggacgctaatcgatat

SEQ ID NO: 19502 - DNA, 343 bp, Zea mays
  unsure (1)..(343): unsure at all n locations
ggggctgaacctgagatatttctgcagacactggaccatctgggctggtttaaatggtctgacagagcaatttgcaggtcgatttgcttcacatttcatgtaatgacttgaccacctcttttgatcaaaggtgtagccctttaatccagttacaatcttgctataataaccatgcttaaacactcactggattatcttcaaaagagctnccaaaagtcaccccatgtcacttgcagtaaaagttcagactctgagctgactgacagncagacttcgagtccatttaaactnccacttngtacaacacttatgccctgatgtcctaaacaaagtatactccttt

SEQ ID NO: 19503 - DNA, 271 bp, Zea mays
  unsure (1)..(271): unsure at all n locations
cttcactgggtactggagaaatagtaagcactgctctctccatgagctcaaccgaaggtgcttttattacttcaaaaaatactttggagggaaagggaagcccttgagccgctgatttggctagtaaatctgcatgctcattttcgcctcttagaatatttttgacggaaaaaccttcgaaggaagctttcaaccttcggactgcatccagatattnttcaagcttcggatctcgtgccttgctgctcttatccacatggccagcaatgac

SEQ ID NO: 19504 - DNA, 416 bp, Zea mays
  unsure (1)..(416): unsure at all n locations
tggacgattcgcgatgataacgggcgaggagccaacccaaacatacattctgctcaagtcccttatcaacaaaataaggagctacggaagcacgcgatggacggaccacgacgtcttccgattgatgctaaggttctttaccgntcttgatcctcatttggtgaataatattcgtgagaatcccaggtacaccaaaatgtcgcccgaagaagtccttggaaaattcgtaagcgggcgaatgatgatcaaggaggcgaggtacgtggacgacgcactaaatggtccaatcaatgagcctcaacccgttgctctcaaggcaacgagaagcaaggaggcgttacctagcaaggtggcgcaagttgaggcggcaggtctcaatgatgaagagatggccctcatcatcaagcgtttcaaga

SEQ ID NO: 19505 - DNA, 238 bp, Zea mays
  unsure (1)..(238): unsure at all n locations
ctcagctttggggcaattgacctttcaggcccactccctctatgatgttggtcgatgagnggactcctacgcccgacagcgaatctaccaggagcaacatgatataggaatagtatagtatataagtagtactatcgggtaataaggggtgtaatcctattgcaagtagagtctgtacattaccttctaagtaatgcgacatgaatggtttgtatggcatatcatattgcttccaatg

SEQ ID NO: 19506 - DNA, 480 bp, Zea mays
  unsure (1)..(480): unsure at all n locations
tgagacgggaacaaccgnggcatgcactaaatcccttgaagaatatgtctatgacttgaggattgtcaagaggaaggaacaaaagaagaaaatcaatacctcttccaaaagcctcaaccacgccttcataaaaggtaatatccaaggtaataatcaagtcacacttcacactaagagaagtaaaaagtgtagtgaatgcttttaaaaggggcactctattaggtcatgtccctatattaaaaatgacttgattattaacaaggatgataaactcttgtttaaatgctccaagaacggacgctttgttaggtctttgtcccatttaaaacaaaaaggcataatgttagaaaagaaaatattcactaaccatgtagcaagaaagaaacaaggaaacaagaaatcttcangacttgangatcgcctatgctacatatgccgaaagaaaggacatcaatgcaaagattgtccattgtaacaatc

SEQ ID NO: 19507 - DNA, 157 bp, Zea mays
tgaaggtcgcctagaggggggggtgattaggcggaacctgggaattaaaccttaatcccccacctagatccttggattagttgttgaaccagaatttccaaatttcggagattataaactaagttcttgctttgaaaggagaattactaaataatgc

SEQ ID NO: 19508 - DNA, 338 bp, Zea mays
  unsure (1)..(338): unsure at all n locations
tcgatctgcggccagcgcagaacaccagagagatggcggtgttctacgttgaataccgaggggagggcgcgacgcggcaccagagagaatctcggcgagcagagaagaccagagggagctcggcgagcatggcaagggcccgcggccaagggaagatgagcaggggcatcctggcgagctcgcagcaggcgctggggcagggaaatcgcgactggngagggactccgagcagcgcgcggttggngaagatggagcagagggcgcgacggtgaaactccacggcgcgcagggaataagccgaacgcgacgagcttggagaatcccgagcgcgccatgga

SEQ ID NO: 19509 - DNA, 300 bp, Zea mays
actaagcttacgagatggttaccctatggtgattgcgttcacattagaccatattttcatgcctgaacttctgcgactggttaatagaatggcaatactatcattggaactatgttaatcttggtaaaaaaaaaactttaggtcgatagctatggtccctatgggctaagtgtaacagtatggggatgggggggcattgggaggaagaaacacggattgggcttcattcctatgggctctgtgagggaccaaacctttctttatattctcttatacactgacttgcaactcttctgagta

SEQ ID NO: 19510 - DNA, 467 bp, Zea mays
  unsure (1)..(467): unsure at all n locations
actaagctgcctacagctgcaatctcgagcctcggagtactttctctaagtgttcttcatgctntngctcattctgggaatatatgaggatatcatcaatgaacaccactacaaacttgtcgagatagtccatgaacactgaaagtcgcctataggggggtggataggtggaaactgaaatttacaactttaaacacactacatgtcggggttagcgttagaataaaatccgagtccgagagagagagggggataacanatcaaccaagaaataaagcggatgacacggtgatttgtttaccgaggttcagttctaaagaacctagtccccgttgaggtggtcacaaagatcgggtctctttcaaccctttccctctctcanacggtcacttagactgagtgaggcttcttccttaatctcatggttcacttagacccccacaggatcaccacacaataggtgtctc

SEQ ID NO: 19511 - DNA, 429 bp, Zea mays
  unsure (1)..(429): unsure at all n locations
cggctcgaagcagccaagagtctgctcagtctgggtgctccggactgtctggnggngcaccagacagtgtggtgcgccaggctggcgtctgtcaactggctgctctcgggttttgtcggcggcgtacggctataaatcaccggactgtccggtggtgcactggactgtctggtgagccaacagtcagccgggccaacggtcggccgcgtaatccgtgcgcgacgcgtggcagagccaacggtcagaatggggcaccagactgtccggtgtgcaccggacagtgtccggcgcgccaatggctntgaatttccaacggtcggcttcaccaaagaaggaaagatatctgcatcggacagtgtccggtggtgcaccggactgtccggtgcgccaggcgacagaaggcaaaaattgccttcctggagtgctctc

SEQ ID NO: 19512 - DNA, 476 bp, Zea mays
  unsure (1)..(476): unsure at all n locations
tctaaagggggaacacattntgngactaaccaatgttgattnttataatgacaggatttgtancgcatgccaagccgggaagcaagttggcactcatcatccacacaagaacatcatgactagtgacaggccactggagctcttacacatggatttattcggcccgattgcttacataagcatcggcgggagtaagtactgtctagctattgtggacgattattctcgcttcacttgggtgatctttttgcaggacaaatctcatacccaagaaaccttatagggattcttgagacgggctcaaaatgagttcggcttaaggatcaagaaaattacaagcgacaatgggacggagttcaagaactctcacatagaaggctttcttgaggaggacggcatcaagcatgagttctcttctccctacactccacaacaaaatggtgtactggagaagaagaatcgaactctattggaca

SEQ ID NO: 19513 - DNA, 323 bp, Zea mays
  unsure (1)..(323): unsure at all n locations
tctattccttcgcagaccgaggtccacgacggcgctccgttcggtagagctccggcgagcatctgcactggccgattaaggcgacgaccggcgctcctgagcggcggacatcacatcggacctacctcgagtgtttcccctaacctaattgcacaaatggtgagctagcaagctctgtccgcgtgaaccgaatgggtggcggacagttaatcgtgttcccagtgattggtgagcccgcagttcaaattggtggttcagcaagcatcgtaggcatgtgagaaagcttaaacgaggaagcangggatggggactgaccggaaaag

SEQ ID NO: 19514 - DNA, 256 bp, Zea mays
tcctttttatgtgttagagaaaatttattataaatcctatccgaattccttggggtgagagataatattctttcccacttctctcttctttcccttttctcttataggttaaggggggtttggaccaccatctaattttattcatttccaaaattctggtaaacctacacgatcttctcactggtgtattactctctggctcaaaaattggggcttaaaaaggttaggggtctctctgtgccaaattatcaaatct

SEQ ID NO: 19515 - DNA, 440 bp, Zea mays
  unsure (1)..(440): unsure at all n locations
tctaaagggagaacacgtgataggtttgactaacgtgcaattcgaaaaagatagaccttgtgcaacttgtcaagcaggtaaacaagtgggaggagcgcatcacagcaagaatgtgatgaccacttcaagacccctggagctgctgcatatggacctcttcggacctgtcgcctatctgagcataggagggagtaagtatgggctaggtattgttgatgacttttcccgcttcacttgngtgttctttttgcaggataagtctgaaacccaagggaccctcaagcgcttcctcaggagagctcanaatgagtttgagctcaaggtgaagaagataaggagcgacaacgggtccgagttcaagaaccttcaagtggaggagttccttgaggaggaagggatcaagcacgagttcttcgctccctacacaccacagcaaaatg

SEQ ID NO: 19516 - DNA, 448 bp, Zea mays
tcacggcacgacactggagtcgtggcaacgacgaacacgcatgtcaatggcgctgctcgattctttctctctccgattgatgaatatgaggcgaccagctcaataggatggccaatagggggagagaacctggattttaaattaccatggccgagagtccggatgagaacgatcctgggaggattcacgcggccatcggtgttctgttgggattcagttgagggagcaccgtgaggaccacgcaacttctgtttcgcccgccgttaggaactgaaatcccgattggtacggtgaggaaggataccagatcagatcatggggaaagagggaaggtttgttatcggtgatgccgctgccctattttcgcaccgaatgaagtcgcggtagtgatttctgtgcatcacgggcgcgcgacattcatctgccaagcgcctgtcgcgcgtgttca

SEQ ID NO: 19517 - DNA, 474 bp, Zea mays
  unsure (1)..(474): unsure at all n locations
cgttggaatttagtgttgattnttacaggatcacctattcaccctcctctatgtgctctcaccttcatctctagaatatctgaagcaggcaccaaagttagctcgtgggctacatgccctacgacaatctctgaggaagcagagtttgcttgacactagctaaggctggttttgtggcgagaaagcgttcaaatcaatcttcgaatgcaaagcangctttgttggcaggaagcgtgacacaacatatgtcgtgttgatgctcgcgggcattgcaccttttatatgagtattttttaaaagttaattggttcactcgatgagcacttgaccccaccaatcaaagttatcaaaaagtaacttttcataacgagctttcgagaagtgctttttggaccttcagcgcgaggcctncaaatcatattntatgcggtctaagctcgttatgaaaatgaactcattccacaaggatctact

SEQ ID NO: 19518 - DNA, 430 bp, Zea mays
  unsure (1)..(430): unsure at all n locations
tggccaaaccacgggaaanatcgttgtgtcttggtaatacccaatgtgtttataattaaaatagagntaaattctttattntgtgtgagtcctattagcacatgagaaccctcacacttaaattgagcaattaattagtgacacttaaagtaaattgtgcatcatggccgttgttattttgttgtgcattcactcatgaagataatgataaaagaaatatacaaatagtagaagaggcattaaacctaattttggaaaccaagaatttgagaagagaagatcttaattataaagaatgaagaggaggaaaataataataataataataataataataataataataataataataataataataataataataataataataataataataataagtgtccctattcacactgaagtcttgtataattac

SEQ ID NO: 19519 - DNA, 428 bp, Zea mays
  unsure (1)..(428): unsure at all n locations
taccgcatttgaagcatgatcgcttccccttgggcttagtcttgctctgctgtccattgcgaccctttagcaccggcttgaagcgcttaatgatgagagccatttcttcatcattaagcccggccgcctcaatttgcgccaccttgcttggtagtgccttcttgctcctcgatgccttgagagcaatgggttgaggctcgtggattggaccgttcaacgcgtcatcgacgtaccttgcctccttgatcatcatccgcccgctcacgaaatttccaagtacttcttcgggcgtcatcatcgtgtacctggggttctcacgaatattgttcacgagatgaggatcaagaacggtaaatgacctgagcattaggcggacgacgtcgtgatccgtccaacgcgtgcttncgtagctccttatcttgttgata

SEQ ID NO: 19520 - DNA, 79 bp, Zea mays
  unsure (1)..(79): unsure at all n locations
tagcggcgcaactggtgatggctcatggacttgcggccagcgcttggggtactgcgtggnggagacaaaagaggggcac

SEQ ID NO: 19521 - DNA, 401 bp, Zea mays
gtgctacaagccttcttctttttctccatagcaggaaccttactggaacactaccccacttaaaaagaatgagggtagaactcttgaatcttggggaattgatctccttgaagtacctcataacaaaggtgttacagggccctcttctgttgttgctgcttgatcaagctacggagaaataactgacacacggttgattctgggacaaccttcttctcatcgtctcttcactatcttcttttcacttctcacttttcacttttcactgcctctttctttctctttgctcttcccactcgaggattctatcaaagagtattaccatcatatagaggaggaaaccgaagatgttgaaccatgtgcaacagtcttcaacccaagaatcaccaagcattgtgatc

SEQ ID NO: 19522 - DNA, 461 bp, Zea mays
  unsure (1)..(461): unsure at all n locations
tgtgatactctangggactcgggatgttctccgagtgcttcttttaatgacctgttcgctagatgaccaccctggaaaacagtgcgaccatgaggatggtaagaaacaccgttagctgattaattggagaacttggggtgtagttggcttcgtcgtanggccgttaatgggggtcggngtatagtgcttgctctgctaaaggtgggtgccgagggtcctttgatttgnngtttgtagtcacctaccttatggaggagtattgtgtttgtacgactgacaaaacctaacggacgactacacaccaggggaatctttgtaaaggctatgtagtgtatccctggccattcacctgngtagtgaagatcgggtcttgcaaacctagtatgggaagggatcatggctcatgggtaaagtgtgtgacctctgcagaggaatgaaactgatatatcagtcgtgctcat

SEQ ID NO: 19523 - DNA, 325 bp, Zea mays
  unsure (1)..(325): unsure at all n locations
tcatctttattggttgaatctaagtctagctcctcacataataccgtttggtaacattgngtaaaatatcatgcttcttgttgtttgactaaccatgcanggaagaaaagctcacaggttaaggtcaaagaaatactgaagaaatgttctagcaatgatgggttaaagaaagttgaacccaagtacaagtccttgaagcccaacaatgggagaaaggggcttaggtataacttatataaggaaaaccctagcatagtgcataaggggtggagatccnccaagttcatagagggaaccaccctatatgatgccttggggaggatca

SEQ ID NO: 19524 - DNA, 466 bp, Zea mays
  unsure (1)..(466): unsure at all n locations
tcttcaccatgttatcacgggtatcgtgagaatgttgagcatgacattgncccttcaaaagaagtaagctccttcttagccttccaacttcttccttgagctctttattttcttgtgtgatagaaatatcactaattcctganatttctagctcaatggaagattggcttgcttgataacaacaattgttagcacatggtaatatagtttcaatttcaacacatgtgcacatgtgaggttggtatgatttcaaattagttaacacaacctcatgagccatttctaacatgatatgtgaatccataaatntattatgagagcatacaagcatatcatgtttttcttgcaaagctagattttcaatggttagctnttctaccgtgttcttgagcatagcatttntattttctaattgagccatatatgatgaatgaataatagcttaattgctcaattgaatgtctca

SEQ ID NO: 19525 - DNA, 222 bp, Zea mays
  unsure (1)..(222): unsure at all n locations
actaagcttgggcaacagncacagatgcaagcctcgcgtcgcgttgcaaggcttgttctttctaaccgatcgagctcacacgattcgaggaataaaagctaggcacaatgatccggtaagaatcgaggcatggagtttggcgaagctgaaacccccattgaaaggaagttaacgtggcattcctcgtgagaagaaaacaagagcagaggcagcagattccaa

SEQ ID NO: 19526 - DNA, 111 bp, Zea mays
ctcatcatccacacaagaacatcatgacgactgcaggcctctggagctcctacacatggatctattccgccgatatcttatataaccatcggctggaagcagtactgtcta

SEQ ID NO: 19527 - DNA, 307 bp, Zea mays
gacctatgatactcagcttctaagggagaacatgtgttaggactaaccgatgtttgttttgatatttacagaccttgtgcagcatgtcaggcagggaaacacgtgggaagcactcatcacggcaagaatgtgatgacaacgtcaagaccactatagcttcttcacatggacctctttggaaccggtgcctacctcaacatcgagggaaagaagtatgggcatgtaattgttgatgacttttcccgcctcactttggtgttctttttgcaggacaaatcagaaattcaagggaccctataagcgtttc

SEQ ID NO: 19528 - DNA, 407 bp, Zea mays
  unsure (1)..(407): unsure at all n locations
gcatattctagttgatcctttccacagacatccatgttacttcagctgctgaacgatagtttccgatatctcttcgggtttcctttccattaactttatacggatcaaaggtcctgacttccttcatcggctcgtcattgtgattagaatcaactgaaggactccgtagcattgagggcattatggatgaatctgagaaagatgctaacgtggagcctgatagacgctccacggaggaagatgaacaatcagaagatgtcttcggcgatatcttcaaggattcagacaagcgtaggaaaatgtttctcatgcagcgaaccatctcctcagagagctcatttgggttgctccanagattccctccttttatgctagttatctttagaatagactggtcaaaggataac

SEQ ID NO: 19529 - DNA, 366 bp, Zea mays
  unsure (1)..(366): unsure at all n locations
cttntgggaaaacacgccaagcgcggaccggtcgggctcttgcngttgatcttctccgacatcaggatacccctcggacagaaccaatgcaaaaacacaagtttccactacagactgtccggaggaaaagcgaagaccggtcgagccctcacgcggaccgtccggcctcatgcgcggaccgttcagtcagtaagaaaccgaaaaaccccaaggggacnggttctgagaaatgaattataaggggcctcgcggaccgtccggggtgcacgaacggaccgtccggcactggctctgtctgacatctgacgtcacattaaatgcaatatagcccggtgtataacccgtactgctgaccgatgcattttc

SEQ ID NO: 19530 - DNA, 445 bp, Zea mays
  unsure (1)..(445): unsure at all n locations
aacttcttcgcctttacttcggcggtattatcgttgacttttcgctgtaagcctcccttaggagcnttcttcgcctttactacggcggtatcaacgttgacttttcgctgtaagcctcccttaggagcttcttcgccttctatttcggcggtatcagcgttgacttttcactgtaagctctgcattcccttgggaacgacttttgagcagaaaacttacgttgcgctcccttaggaacgactttttgtagcttcgttgtgctctgcatccccttagggacgtctttcgagcttctccctgttttttcttttctctttgcacacgatggtgcatgctcagctnntacatntacatctttggnggatattgcccttgtagagctaanataagaaaaagagaaattacatgctatggcccccattaaaaccttttctccnctttggaa

SEQ ID NO: 19531 - DNA, 385 bp, Zea mays
  unsure (1)..(385): unsure at all n locations
tgctttgcctntgcttgcttgcactattatttcatgcatctagtctctgtccgcaacagcaacacacgacgatcgagagaccggaaccggcggatcatgatgccagtaaccgggaccaaaaaatactctgggcgcgcgacaagaacgccatggggtcgtattttctcttgcggcggaggaaagtgtcccacctgccgctgccggcggggcccaaatggcgcgccgcccaatccgcctgcgtggcgtaagatggcaggtactgcgtgcatgggatgcccgcggcctcacagaagcgcgccacctcggcgttctgctacttcatgcggcgcangtcgccgtcccgcacggacgaccgcatgatccccaccgtgtagaacacctcgtc

SEQ ID NO: 19532 - DNA, 398 bp, Zea mays
  unsure (1)..(398): unsure at all n locations
ctatcaaatggacgtgaaaagtgccttcctcaatggaccaatctatgtagaggtctatgttgagcaacactccggctttgaagactatgagtaccctaaccatgtctataaactctctaaggcgctttatgggcttaagcaagccccaagagcatggtatgaatgccttaaagactttcttattgcttatggattcaaagtcggaaaggccgatcctactctattcactaaaactcttgagaatgacttgtttgtatgccaaatttatgttgatgatattatatttgggtctactaacgaatctacatgtgaagagtttagtaggatcatgacacaaaaattcgagatgtctatgatggnggagttgaagtattttctaggattccaagtcaagcaac

SEQ ID NO: 19533 - DNA, 431 bp, Zea mays
  unsure (1)..(431): unsure at all n locations
tgaagccatggtaagtagcataggcaagtaatatatgaattgacttaagcctagctacgggtgcataggtttcagcgaaatccaaaccttcaacttgtgaatagcccttgccacagtcatgctatgttcttatcaccacaccatgctcatcttgcttgatgcggaaaacccacttggttcctacaacattntaattacgacatggaacccaatgccatacctcatttcttgagaagttgttgagttacttttgcattgccaatacccaatccgaatctcttaatgcatcttccaccctgtatggctcaatagaagacacataagagtaatggtcacaaaaatgagcgactcgagatcgagttgttacccccttatgaatgtcgccgaagatggagttcacggggtgatctctttgaatcgcttgatggact

SEQ ID NO: 19534 - DNA, 389 bp, Zea mays
  unsure (1)..(389): unsure at all n locations
agctttgtaaccacatagcagcatcaactcttatatcaagctgtctcagctcttacactcatgacgacgcataggtctagaaccaagttggacaaaacatggagcatcaactgtcgtagaagtgtgttgacgccttttcggagcgccaaacactcaacaagaaccgtggcggtgctctctggtcaagcgcggacggtccacagnctagggccttactgttcgcgacctgtcgcaggggctatgtatttttgtctgactgtcggacggtgcgctcatacgcaaaggtggtagaagtcctccgcggcggtctggatcttactcccggacggaccccgtcggtgaggagagatcttatgttatatgtacgctcagcatgcctacctagactt

SEQ ID NO: 19535 - DNA, 386 bp, Zea mays
  unsure (1)..(386): unsure at all n locations
accatagaacaactttctcctacttggtgtcaaaaaatatacatttttttcttcngatttgatcgggggaattgtaaacccgcagatcgcagattgcaaggcagtcgatacaagaagagctacaatcataactgtgttaaaaaattcctgatgaaaattaantaatagacatccactattggacctgaaaaggacgatgacacttttgatgacctggatgggaacaagaagttcaagaatccaagatctggtgatgtggtatctttcagtaatagatcgctttgaaacgcttagtctcaaatcctanggaagctgagcttatacgtctgcatgctgaagatcacaagctgaataacgaacagattctacacccatgttgatgcatc

SEQ ID NO: 19536 - DNA, 419 bp, Zea mays
  unsure (1)..(419): unsure at all n locations
agcttgtgaaagttcttcatccccacatgtgctaagcggcgatgccacagccagcccatgctagtcttagctattaagcatgcatctagaccggcctcttcttttgcaaaatcaactaaataaagtttgccgtctaatacacccttaaaagctaatgaaccatcgcttcttctaaagacagacacatctatatttgtaaatagacaattatatcccatatgacantaatgactcacagatagcagatggtatccaagactctctactaaaaatacattagagatagaatgctcattagaaatcgcaatnttacctaaaccttntaccttgccttgattcccatcaccgaatacaattgaatcttgggaatctttattcttgacgtaggaggtgaacatcttctctctccccgtcatatg

SEQ ID NO: 19537 - DNA, 465 bp, Zea mays
  unsure (1)..(465): unsure at all n locations
tcgaagggtgccatcttgatgctttcttgatagctattattatatgttaattccgctaacggcaaacattcatcccatttctgtaggaattccagcacacatgcccgcagcatatcttccagtatttgattgaccctctcagtttgtccactcgtttgaggatgataggccgaactgtggagcaatttattacccagagatttatgaagttcttcccaaaatttggatacgaattgaggtccacgatccgacactatagtcttcggaataccgtgcaaactgagaatgcgagcaatgtataattccgcataggtaagaactgtgtaatatgttttaactggcagaaagtgagccaattttgtgagccgatcaacaataacccagatagagtcatatccctttgcggtcctgcgcaatcccataatanagtccatacttatatcttgccatttccatgttgggatt

SEQ ID NO: 19538 - DNA, 277 bp, Zea mays
agcttgccattatacttcgtcacgtctcattgtggtttactctatgggtggtaatagacgacgatctacatgtttctttacaataagttaggacccttaaataattttaggtcaaaaataaataggaatagaggccaatcctaattcgattgattcttaaatcttatagtgtaaaatctagagctcattatcgcccctaggtttacccggtggtctttggtgacttcccaactacggagtggttgagccggtcaaggacgaaactatattcagctta

SEQ ID NO: 19539 - DNA, 498 bp, Zea mays
  unsure (1)..(498): unsure at all n locations
actcagcttaaaggttaatcttcacctaanagatagattaggaatgctcattgcttatgtatggaactaattgcttcaattggtagttgatcaatagtagttcctttcaagtggcatactttcaattagtaataatctattttatgaaaagaaatgtcaatatgaaggttaaattccttttggattaaatttgtaaattggtgcatattgttaattcactcatccatgtgcattaacttaaaagggaattaatttatgccgttatgcctcataaatgatgatttatctgacattcatatataaatatcatcattcattagatacttcattgtactactaatacctcttttcaaagtgctattgttactatgtttaagaggaagagagataacaagctaaagaaggaagtctccacaattgaagaaaagaagaatacttagatgacaccatctcatatagtaagatctttcattgatataacacatgggacattctata

SEQ ID NO: 19540 - DNA, 437 bp, Zea mays
  unsure (1)..(437): unsure at all n locations
agctntatcttgttgatttcacaacaagtaaagtgacgcctgatacttgtttagtggcaaagtccgacaagggttggctatggcatcgccggctagcccatgtcggtttgaggaatttggccaaacttcaaaaggataatcacatcattggactaacaaatgttgtatttgagaaagatagggtttgtggcgcatgccaagcaggaaagcaacatggagtcccacatcaatcaaagaatgtggtcacaacaaagaggccattggagcttcttcacatggacctcttcggacctgtggcttacattagcattggtggtagtaagtatggtttagtcatntgtgatgaattttctcgattcacctgngttntctttttgagtgataaaggtgaaactcaagagatattgaagaaattcatgaggagagctcataatgag

SEQ ID NO: 19541 - DNA, 455 bp, Zea mays
  unsure (1)..(455): unsure at all n locations
agcttcacaacccattntccaatccttccagtagcttctatgttcctcattatgtccttcagaggctgtggcgaaggaacaattatgtgatacgcttggaaataatgtcgaagcttcctggaggccattagcacagcatacaacaccttttccaactctgtgtaatttttctttgatgagcttaaaacttcggagacaaagtatactggagactgctttttgacttgaccatctaacttctcctgcacaagtgctgcactaagtgcagagtgcgaagctgccacatataagagcaatggagcccctagcgaaggtggagttagtgctgtcaaatcaatcaagtattgtttcaactcttcgaaagctttntgctgagccgggccccattgaaaaacttcggatgacttcagtatttaaagaatggcaatttctttctgtgattggatataatctgt

SEQ ID NO: 19542 - DNA, 479 bp, Zea mays
  unsure (1)..(479): unsure at all n locations
tctccttgtcgtcatcaaccttgacatagaaccactctgacttccatcctgctgcccatttgcttcggtagctgattacaggaaactttgtggttttccgataagcaaaattatagcaaccaaaattgtcatgcaatccatcttttctagccttcgtctgatagtgcaattcgtgaactcgacaaaagctgtccgcaaacggctccaccgcttggcttcgcagagcccagatataaacgctaagcctaacgatagcgttaggagtcaactgataaaagtagataccaaatctcttcagtacctctgcaataatcccatgtagggggaatcttaatccaacctttagaaagctcttgaaaataactatttcatccttctccggctntagggtagtttcttctccccccgaagcgtaataacttcttctgatttcactganaagcccgactcaccatcttgagagatcaccttcgaacagt

SEQ ID NO: 19543 - DNA, 431 bp, Zea mays
  unsure (1)..(431): unsure at all n locations
tgcaagcttataacaagaggatagattcaagagctctttcatatgtcatgatagaaggggagttgttcaaacatggagtttgtgctccgctgctcaaatgtttatccagaaccgaaggtatatagttaatgaaagaaatacatgcaggcctgtgtggatctcacatcggatctacgccgttacttggaaaaattttccgacaagggttttattggccgaatgcagcttctgatgtagcagaattggttcaaaagtgtgaaggttgtcagaaatgtgcaagagatcaaaaacaaccttcgtccttaacacagctcatacaacccacttggccattgcaaaggtggagccttgacttagtaggtccgttaccaccggcccaagggaacctgagatatgttgtagtagctgtggaatattnttctaaatggatt

SEQ ID NO: 19544 - DNA, 476 bp, Zea mays
tcacgggctactggcggagctagccgaagcactggttgtgcttgttggtggctggagtgggctggccacggtggccgtagctctggcggcaatggcgggcggaaatgagctcgccggagctaaagaacggtggctggccggtgagggtgagtgcggtgcaaagagaggtgcgcccggggaggttttataagcgcgggcgagcactgtcgacggcgtgggcgcgcggcggacttgaccggacgccggggcgagcgcgcgcgcgggttgtgcgagctctggcgtgccgaccagagtcgaacacgtgtgcccgtgcgttctgcccaagctctggcgcgtgtggtcgctcatccgagcctgctctcgccttggtcagtgcacgaaacctcttcttcttcctacatgctaccattcttgtgtgggtgcatatgatattgctactggttgcgagatatggagccaggaatctggtctgtctc

SEQ ID NO: 19545 - DNA, 344 bp, Zea mays
caacctttatacagaaacgtgtggccgccctgatcgcctaactggaccctgaccgtgtctctgatgcatgtcgtgaccatgccctgaccgcgtctctggttggccggcctgaccggcttcacaagcggggataaaagaggggaaagaagagagtgcatggccttaccgtgggaaggcggtagagagagtctccgtcaactttgcgctccgccgccacatagttacttcacgtcgccttcttccgtcgtagggttgcgccacatctcgctcttgcatcgtcgccatgatccgatccggaagatagttgaccggggttcgaactgggccgtgaaagatgggaaaac

SEQ ID NO: 19546 - DNA, 476 bp, Zea mays
  unsure (1)..(476): unsure at all n locations
ctgtggaagccaatgtcatccttaatgccagtgcatctcccattatagagcatgctcctagcaaatttaaatttctcattttctatttcatgctcattgattttagcagttagttgagctatgtgatcattttgttggttaattaaagcaaggtgatcatggatatcatcaacattaacatctctacatctagtgcaaatagaaatatgtttaacagtagaagtagagggtttgcaagatcttatttcctctatcttagcatataaaagagcattctcatttctaagacaggaaatgaaatcattgcaaacatttaaatccttagccttaacaattaatttaccaatttcagtcttaaggctggaannatgattcattcaattgtcaatcttagcaattaaacttgcattatcanttttaagaatggcaattgaatcatcacagacatttttcttctcaaccttaacaaatcaaat

SEQ ID NO: 19547 - DNA, 415 bp, Zea mays
  unsure (1)..(415): unsure at all n locations
agcttgtgaagggagcacatgtgatatgccttaccactgttcattacaaagcagatataccttgtgcaggtnggcgcgcacggaaacaggtgggaggctctcatcacgccaagtgtgtgatgaccgcctccacacgccttggagctggtacatatggacctcttctgacctgtcggctatctgaccctaggaggaggtatctatggcctaagaatggacgaggacttttcccgcttcactagtgtgtacattgtggctgataagtctgaaacccgaaggaccctcccgcgcttcctacagagagctcagcatgagtgtgtgctgcaggtgaagaaaatatggatcgacaacttgtccgagatgaggaaccttcgcgtggatggttccttgaggaagatgggatcactcacgagtt

SEQ ID NO: 19548 - DNA, 327 bp, Zea mays
ctagcactcgaggacgactacactatctaccttatcacgactgtgcatatacacactacatctggagagacatgatacaagaatgggaccagaagaacgagaactgggacagctcacttgaggagcctaactgctgattatggccagcaagcgacacacaacattccggtggtcgcagccgacagcggtacacaccatagtcatattgcgctgccaaccgagcactgtgcttggctgctcgcacccaggctgtctagcacaagcgcagctgtcacatcagactgtgctagaccatgtagcactgcatcttgtccgcgaggatctcac

SEQ ID NO: 19549 - DNA, 446 bp, Zea mays
  unsure (1)..(446): unsure at all n locations
agcttctaaagggagatcatgtgttaagactattcaatgtctngtttgaaaaagacagaccttgtgcagcatgtcaagcaggaaaacaggtgggaagcactcatcacagcaagaatgtgatgacaacatcaagaccactggatcttcttcacatggatctttttagacccgttgcctaccttagcatcggaggaagtaagtatggtcttgttattgttgatgatttttcccgcttcacttgggtgttctttntgcaggacaaatcagatacccaagggaccctaaagcgctttttaaagagggctcaaaatgaatttgagctcaaggtgaaaaagataataagcgacaacgggtgcgagttcaagaatctgcaagtggaggagtatcttgaggaggaaggcatcaagcacaagttctccgctctctacacaccacaacaaaacagt

SEQ ID NO: 19550 - DNA, 342 bp, Zea mays
  unsure (1)..(342): unsure at all n locations
tggttganaagtgcanagtcttggatgcgcggaccgtcctatccttgatggcggaccgtccgcgatcctctagtgtggtccgaagtctgtccacttcggacatgtcctgttcatttgcactgcggaccgtccgggccttggggccggaccgtttgcagttctgaccagtggaggcttctctcggtacagtccctgaattatagtgcgaacagtccggccttgaggggcggacagtctgcaggtgccaaatttggtttgggcagggactgtgtggtttatgggatttgtactactgattgtccggaggataagcccgaacagtactggtctcaggtctcggac

SEQ ID NO: 19551 - DNA, 443 bp, Zea mays
agcttctaaagggagaacatattttaggactatcaaatgttcattttgagaaagacaggatttgtagcgcatgccaagccgggaagcaagttggcactcatcatccacacaagaacatcatgacaagtgacaggccactggagctcctacacatggatttattcggcccgatcgcttacataagcatcggcgggagtaagtactgtctagttattgtggatgattattctcgcttcacttgggtgttctttttgcaggaaaaatctcatacccaagagaccttaaagggattcttgagacgggctcaaaatgagttcggcttaaggatcaagaaaattagaagcgacaatgggtcggagttcaagaactcacaaatagaaggcttccttgaggaggagggcatcaagcatgagttctcttctccctacaccccacaacaaaat

SEQ ID NO: 19552 - DNA, 487 bp, Zea mays
  unsure (1)..(487): unsure at all n locations
tanagccatggtaagtagcataggccaataatatacgaattgacttaagcctagctacgggtgcataggtttcaccgaaatccaaaccttcgacttgggaatatcctttggccacaagtcgagctttgttccttgtcaccacaccatgctcatctttcttgttgcggaagacccatttggttcctacaacattttgattaggacgtggaactaaatgccatacctcattcctagtgaagttgttgagctcctcttgcatcgccaccacccaatccgaatcttgtagtgcttcctctaccctgtgtggctcaatagaggaaacaaaagagtaatgctcacaaaaatgtgcaacacgagatctagtggttacccccttatgtatgtcaccgaggatggtgtcgacgggatgatctcgttggattgcttggtggactcttgggtgtggcggcctttgtcttcatcctcctttgctngatcatttgcatct

SEQ ID NO: 19553 - DNA, 388 bp, Zea mays
actaaccttcgctcattatgtgggatgctttgaattgtcttttcttcaccttttagcagcttctgatgcatgaatagcaatgggccttgtccgaagtatcttcatgcatagatatgctggataagtattgttcaaagcgtgagtgtccacgacaatgattgcattgtagggtattccatgtaacaatatcaaacacaactgttagtccttggtgtaacaatcaaggtactagcttgtgatcttgcaaggctacactgcttctcaagcacaagaggtggacatataatttgccttactctgcttgctaagcctacaaatgagtcgtgctgctgttaacaaaatgggacaaaatctatgaccgattacatacttttgagtatctgactga

SEQ ID NO: 19554 - DNA, 409 bp, Zea mays
gctttcagaactttgcattcaatacaagagctatatacttcactccaagacacaaatcaaagggatcgatccactcaaagtctccaactcaattctagtgcattaagacttgtgagaggatacacttgtgtttcttggtgctcttatttgcttgagtggctttcttttctttctcacttcttactctcaaaagctttgtaagcaaggcaagagacaccaattgtgtggtggtccttgtggggtctaagtgacccgtgagattaaagaagaaggctcactcggtctaagtgaacgtttgagagagggaaagggttgaaagagacccggtctttgtgaccacatcaaaggggaatatgttctttatgaccaaacctcggtaaaacaaatcaccatattcatccgctttatt

SEQ ID NO: 19555 - DNA, 504 bp, Zea mays
  unsure (1)..(504): unsure at all n locations
attacgcgacacttagaaactcagcttgttgcaatctatcagagaatacccacatttttcttcctctcttggtctctaatgattnttgtgtcgtacaacaaccagacaaacaataagaaatgacgaaatgcggcatacctacattggaatgaatgggaggtgagaatgaattacgaggggatcatcggggagtttcttggacatgatcttaaggaaggcgacgtggaacaccctgtagccttgctcgaagctggtgaaggctgagcaagaggcccctcctcatcatcatctgtctcagggtgggagagggcctactcgtcatcaccatggaggatgtggccctgcggtgattcaatgtgtgctctcgctgctgatcgtcgtgaccttcctcctcgagtcttcgtccgtcgagttgtagacgcgggcccatgggtgctttcagtgctatggaagttgtnttttaataatactcagatgttacactcactctcgtacacatcttga

SEQ ID NO: 19556 - DNA, 429 bp, Zea mays
  unsure (1)..(429): unsure at all n locations
agcttctacgtggtctaaccactggtatgtactcgaccccatcctcggtgttcacttagcttcgtgtagccctagctaagattaaagaagatcactgctcgccggcgatggtgtcactgtaaggcgtatgcgccgccacatccagctttggggaaggaaacggtgtgtccgttggattcaagatgtanggatgagattagatctggggattgatggcttcgagccgttggtagtttgatgaggggctgagattagatcgcgctggtttaaaatctctattattgataggaaatccggtggccaggatcgcataccgcttcgattgggggttgtttaatatggtgcgttggatcaaaatccatgggtcggcatccaaccatacctcctcngctgcgcaatcttacaaaaacgccccttgtcttagcacaa

SEQ ID NO: 19557 - DNA, 382 bp, Zea mays
  unsure (1)..(382): unsure at all n locations
tcgcagtgcttctgtatagtctaggtacaaagaatctattacaaagtgtactcgagcgtgaaagagaaactgttttcacataattcatccatggcgaatcttggttctaaagtgagaagagaagttaatgcttgaattgcatccgtatcacgaatgatggagcatctagaaactagtggaaatagcagaacaagtgatagactgacaacatccacttatgaagttcctcctgctacaaaataatccaatgaaagtgttacagagagcaactatgatgctgctactgctggtggtggtactaccactacgagtaccagtgctagcaacatttctgccccttgtgttgcgatgtccggttcanattagcacatgtaagggtctc

SEQ ID NO: 19558 - DNA, 445 bp, Zea mays
agcttctgccatgatgtaattgtccctggccgtatagaagaatatcaagtttgtgcgacacttttgactgtcatgacgaaagatttcgccatgactgcggtgttgcccccatatgaagatatggttgcctcgtagctcatcatacataggaagctggggtggcttgtatgacgggggccatggggtagcctgcaattctgctactagaggagaagcatcatcaaaagcaaaatttccatgatggaaatcatcataccattcatcatcggtgtacgaattgtcttgacgaagttctctatgttgaggccttcggtcttggtcatcttgggtgagatgacgcatttcttcagcggcctcatcaatcttcctctgaagatcggcgagacgaagcatcttttctttcttcttctggaccttgtgatgaatggcttcgaagtccctaatt

SEQ ID NO: 19559 - DNA, 369 bp, Zea mays
  unsure (1)..(369): unsure at all n locations
aactcgagcaatattgctgccacatgggctacacggcgatgcctcagtttttccatctcacacgtagcaatgaagcgagctttgagttcagctctattaacatcaactaagtatagctgaccctctaatactcccttaaatgctacagcatgatcacttccttctaagagagtaacacctaactctgtaaaaagacagttgcaccccatttgcataattgaaaaactgacagcacgtatacgctaaggatctacatcacaaacatggaatagaatggcaggatgtgtctccagtctacaacgagcttaaccaaacctngatttccatccacgaatgcgatagctcgttggcgatcttcgttttctcgta

SEQ ID NO: 19560 - DNA, 436 bp, Zea mays
agcttgacaaggaccgcaaggcgctcctcgaccgcaaggcccggggccgcgccgccgacaaggctaaaggcaagtttactgccgacgacgtcgccgccgctgctggtggcgccgccgccactggcgcgtctctccaggagatcgactaagcgcttcgcggggatctgatggtggtcctaccgcctattactccttatcgctctagtttttgctatcaatgattatgtgctaggagttttatgttacttataaactgctctgagcctcgatgggagttgaacttaatgtggagtgtatctgagatatgaagaactcattatatggctaatatctcttgttgtgttctgctaaatggttgccgagttgtggctttactatattgcttattacatgcatctagtgggttatgttttcagtctaaaatttcttacctatt

SEQ ID NO: 19561 - DNA, 473 bp, Zea mays
  unsure (1)..(473): unsure at all n locations
taccgcattgaagcatgatcgcttccncttggtcttagtcttgctcggctgtccattgcgaccctttagcaccgtcttgaatctcttgataatgagggccatttcttcttcattaagaccggccgcctcaatttgcgccaccttgctaggtagcgactccttgctccttgttgcctttagagcaatgggttgagactcgtggagtggaccattcaacgcgtcgtcgacgtatcttgcctccttgatcatcatccgcccgctcacgaattttccaagtacttcttcgggcgtcatcatcgtgtacctgggattctcacgaatattgttcacgagatgaggatcaagaacggtaaatgacctgagcattatgcggacgacgtcgtgatccgttcaacgcgtgcttccgtagcttcttatncttgtgacaaaggtcttgagccgtgtgtaatgttgagttggctcttcgcccttat

SEQ ID NO: 19562 - DNA, 424 bp, Zea mays
agcttaaaggatactattcaactaaagtaagaagaaattgattagaggccaaggtatgaaaacttcctctccttcagttgttttagtattctatccttagtgggatgtaccataatataggttaaatttccttgcaatataaaatgttcaatagtgcatataactttgacatcaactttatgtgtgcactaatttaaaagaatttaatctatctttttgggtttcaagaatgattattcattttccatccacatataaagattatcatttgtgaaaccctcccttgtgtttctaatgctctcttttctaagtgtttcaataaggtctttccaagtgctttcaagatggattcaaaatctacggatataagagtcttggttctttcaatcattgagtttcaatgggtctcatatcaagtatgatc

SEQ ID NO: 19563 - DNA, 480 bp, Zea mays
  unsure (1)..(480): unsure at all n locations
tcattctgatgggctnttaacttcgtttgattntgaatcatacgagacatgtgaagcttgcttacttggtaagatgaccaaggcgcccttcatgggtttaccggagaggacgttagatttattggaactcatacatactgatgtgtgcggaccaatgagtacgacagctaggggaggattccaatacttcataaccttcactgatgattntagtagatatgggtatgtctacttaatgaaacacaagtccgaatccttagaaaagttcaaagagtttcagaatgaagtagaaaatcagcgtggcaagaaaattaaagcactgcgatcagatcgtggtggtgaatatttgagtcatgagtttagcaatcatctaaagagttgtggaattgttccacagcttacgccgcctggaacgcctcagaggaatggcgtgtctgagcgacgtaatcggactttattggatatnggtcgatcaatgat

SEQ ID NO: 19564 - DNA, 294 bp, Zea mays
  unsure (1)..(294): unsure at all n locations
agcttctaaagggagaacacgtgatagggttgactaacgtgcaattcgaaaaagatagaccttatgcagcttgtcaaacaggtaaacaagtgggaggagcacatcacagcaagaatgtgatgaccacctcaagaccgctggagctgatgcatatggacctcttcggacccgtcgcctatctgagcatangagggagtaagtatggtctagttattggtgatgacttttcccgcttcacttgggtgttctttttacaggatcacctattcaccccccctctaggtgctctcaatt

SEQ ID NO: 19565 - DNA, 468 bp, Zea mays
  unsure (1)..(468): unsure at all n locations
tggtgggaaaatggtaaaatggttaaaggtcggaggccatattttctttagagaatcatgttttcaccaatctggagattccaaaaggaaggtgaacccaacacactatcgagaaccaaggttttataccaaggtaccaaagagctaggttttatcttccatatatacaatcggttggtcactaataaaccatactctatcattgttttccagtagctaatatttttgtgcacacaggtatttaaagagggccattcatttgatcaagatggaggttcgtttgaactttctctagtgacctgtaaatgcattgnggcttatgtcaaaaacaagaagaatcaaaaccaggtacttctgtgcttgaatgcgctngttaaatcttgtgttgcagttaaatngaaattactgactgacataagtaaataatatctacagatatgctggntatgggaaaaggtaaaatcaaca

SEQ ID NO: 19566 - DNA, 233 bp, Zea mays
cacccacctatattgtacatggccaccaaccatggcctcatatggaatgagaataaatagatgctccatcggattgaagaatccaggtgggaatattttttctaacttgcataacaacactgggatgtgtttcaccaaccggcacatcatacatgtacttatatctttggcacacacctgccagtacaaataactgaactgaaatattgcctgccacatcgcgtaccgcttat

SEQ ID NO: 19567 - DNA, 340 bp, Zea mays
tctgtaatgttcatgaattattatatgaaacaaagccttgttgcatagaacagtaccataacaactgtggctgctacagcttcgtctctcggtccggggcaagctgtcccgtaccaacctttcggaagagatggcccggggattggatgacagaatggttttatgtgaagaatgacttatcagcacgagaagacatcaaaggtataattatgcgttctatttggcgagcttcggccttcggaggccataggttgaaatgaacgataccgccgaagagtgccaaagagccttccgcgttgtctgctctcttatacgaacaagggacttagtcaagagcata

SEQ ID NO: 19568 - DNA, 450 bp, Zea mays
  unsure (1)..(450): unsure at all n locations
agcttgagacaggaacaactgtggcatgcactacatcccttgaagaaaatgtcaaagatttgaggattgcaatgaggagggaacaaaatatgaaattcaacaccttctccaaaagcctcaaccacgcctccacaaaaggtaacatccaaggtaatggtcaagccacacttcacattaagaggtgtagtgaatgctttaaagaggggcacttgattaggtcgtgtccctacattaaaaatggcttgattattagcaaggatgatagactttgttttaaatgctccaagaaaggacacttgcttagatcttgtccccatttaaaacaaagaggcatatggttagaaaagaaaaatnttactaaccatgtagcaggcaataaacaaagaaagaagaaaatcttcaaatttggaaaacgcctatgctacacatgccgaaagaaggacatcaatg

SEQ ID NO: 19569 - DNA, 490 bp, Zea mays
  unsure (1)..(490): unsure at all n locations
tataatgctgacttattgcgctcaggaagttgcgccactattttcaagcgcacagggttgtggtggtgacctcctacctggtaaaggccatcctccacaactctaacgccatgggcaacattgccaagtgggcggtggagcttgccgagttccaactagagttctagcctcgcaccacggtcaagagtcaggtcctggctgacttcatcgtggagtggactccttccccgagcgctcttggnggtccggatcccgattcggaccccacacctgcggagcctagggctccggtcttcaccgagccccactggaccctcttcttcgacggatccgcccgacaacagggtggcggtgccggagtggtcctcatcgacccaagcggagatcaagtgaagtacatggtgcaccttgagttcaaggccaccaacaacatggcggagtatgaagcactgatcttcgggttgactgcggccctatccctagggatctg

SEQ ID NO: 19570 - DNA, 447 bp, Zea mays
  unsure (1)..(447): unsure at all n locations
agcttaaactcctcttatacactagctcatataaacaattgttactnttaataaattatagcttatacatactcaaaactatatagttaattagaacattaataacacttcataaaaacataataatataatctctactatataaagcactaattttcattcttcaacggtttttatagtcatcgtgctctctaatattatatacaatgaatttgcaagtacggttatatgagactcttgattggttatcctaaccctccatcttaaaactataacttcaacttgagtggttatcctaaacttcatcttagaactacaacttcaacttatataatgtgttgttcctcaccatgctggtatgctcatatagcgagtgaggggaggagtctttttataggctatgagggctcatangatagtgacatgtgtccctcattctagattatc

SEQ ID NO: 19571 - DNA, 400 bp, Zea mays
  unsure (1)..(400): unsure at all n locations
tgaagccatggtaagtagcataggctaataatatgcgaattttctcaagcctagctacaggtgcataggtttcaccaaaatccaaaccttcgacttgtgaataccccttggccacgagtcgagctntgttccttgtcaccacaccatgctcgtcttgcttgttgcagaagacccacttggttcctacaacattttggttaggacgtggaactaaatgccatacctcgttcctagtgaagatgttgagctcctcttgcatcgccatcacccaatccgaatcttggagtgcttcctctaccttgtgtggctcaatagaggaaacaaaagagtaatgctcacaaaaatgtgcaacacgagatctagtggttacccccttatgaatgtcgccgagaatggtgtc

SEQ ID NO: 19572 - DNA, 448 bp, Zea mays
agctttcagtagttcatacacgaaacattatctatccacttgcttttggtgatattgtatgttcatacacaaagaatgatatagaaccaccaaagagttgattgtatattgatcctttttctgcttcatatatctgaactctacaatgtgaggtaggtagcatttgagaattctttttctaattgttcaagcaaactggatgtgcacacagtaactgcattagtagacgtgatgccttcattctctatgtggttcttttcagaatttcgaacaccacgatcttaccaaaaatgaggttcagtatcagagtggttagacctgatctgttatcttggaagagatatgtgaacacaagcatatgaataagtttatgtataaacaatctatacgagaaacgagtaaccattgtggtagataaaaaataaatattatagagtccctcttctat

SEQ ID NO: 19573 - DNA, 490 bp, Zea mays
ctataagactagccagaggatgaatgaatcaatcgtatttgtttgagcagatcaacaaagttgctagatcgctccaccgtcgacatagttaatgtgacgatcgataaaaagattgctaggttggatccaacgttacctcgctaataataagtggctgtcatccatgtgaaactaaaactagctggtagcccctagctaatacatattacatagtagttatttagttacttggttggtctacttgcatgcactagtattgtagcaacgatttttaacctctaatgccctgtttgggaacaaagtttttgaaaactacagcttttgaaatactatactatactttagttatgacaataccgtagtttataataccgcagttttgaaaactgaggtccagagctaagtttataatgcctctaaacaactatagtatttgcaatacttcagttttgaaaacagagagtttacccagctttgccaacaccattat

SEQ ID NO: 19574 - DNA, 451 bp, Zea mays
  unsure (1)..(451): unsure at all n locations
agctntatcaaatggacgtgaagagtgccttcctcaatggaccaatcaaagaggaggtctatgttgagcaacctcccggctttgaagatagtgagtatcctaaccatgtatataaactctctaaggcgctttatgggctcaagcaagccccaagagaatggtatgaatgtctaagagatttttttatcactaatggcttcaaagtcggaaaagccgatcctactctctttactaaaacacttgcaaatgatttgtttgtatgccaaatttatgttgatgatatcatatttgggtctactaacgaatctacatgtaaagaatttagtaggatcatgactcanaaattcgagatgtttatgatggngggagtgaagtatttcttatgaattcaagtaaaacaactccaagagggcaccttcattatccaaacgaagtacattcaagacatact

SEQ ID NO: 19575 - DNA, 413 bp, Zea mays
  unsure (1)..(413): unsure at all n locations
tcggtgatggttaaaaaatttggcaggataacagtgcatatatcaatgaatgctgtggtaacttcacacctactcgtctgtttatatagtgctgcaggtaagaaggcgaagcgccagaattnttacaccaggcgcacacccgcttgcgctcgctgcgcagtggaccgcagggacaaacagtanaccctgcaaggtgggaccgctacgtgctgggaaattaaatcgtttctcggcaacgagctcagggaaggtgttttttggaccttcggctccccgaagcttaagagacttttttcacggatcaagctcgttacgataaacgatctatcaccgcgaaaggggctactgttgggtctatgcttcgtcgccgaaggtcttcaagggagaagctcaaaagatacaanaggtgacac

SEQ ID NO: 19576 - DNA, 442 bp, Zea mays
  unsure (1)..(442): unsure at all n locations
agctttatcttcctgcatccttcagtcaccaatacagccctcatggtgagtatcataaaaattccagctactcccaagatgtaaggccaacaataggaaaaattccctgtttcaaagaaaataacacaaactaaaactcgcaacgtgcacataaagaaggtacaggccaaagttgaaggtataacagtgtggtttcaggataattccttaaaaacatgttccagaacactagaaagaaacaaggcaagacaaaatgaacaccaaacaaagtcatattaaaaaagcattacagaaagttacaagctcaagttcagacagctaacctgaaaactgagttatcatcttgtgtagtgtatctgtgtagccagtcaaaattcccacacagataatcaaagatgagccatgtcctacaaataanaatatagaaaaaacaatgaacatg

SEQ ID NO: 19577 - DNA, 479 bp, Zea mays
  unsure (1)..(479): unsure at all n locations
ntcctcacaatntcattcttatctttgaccaatctattatctctaganaatnacctctattcaaagatgttgaagactcatcatgtccacgaaaagccatgccttgtgcaattagaaactttgaacattctagagatgaagtcaagcggattcgatacaattcctctgcttcttcagtagcacgatgtaacaccctgattttggggatataaaatttctttctaattatcacccaaaatcatgtgttactcttctttttctcactctaggttttctctctctagattcattctcctttttcctttttgattaaagatagcctaaactagtggaggttaattacttattttcgccaaaaccttatgagtcatgacatgttgcatcatgctgagtttaanatattctttgaagtgttgcacaagcttgaatttatnttgaattgaaacctactctgacattggatttgaaaaaccctatat

SEQ ID NO: 19578 - DNA, 385 bp, Zea mays
agctagcacttacgaccaaactgcacccgcatccatatcacattcaatggcttaacaatagtggtaaggtcaaggtaaccaagctggtacgaattaattttgctattgattcatatcgtgatgttgttgactgtgatgttgtgcctatggatgcttgtaatattctgctaggtagaccatggcaatttgattcagattgtatgcatcatggtagatcaaatcaatattctctcatacaccatgataagaaaattattttgcttcccatgtcccctgaggctattgtgcgtgatgatgttgctaaagctaccaaagctaaaactgagaacaacaagaatattaaagctgttggtaataacaaagatgggataaaattgaaaggaca

SEQ ID NO: 19579 - DNA, 149 bp, Zea mays
  unsure (1)..(149): unsure at all n locations
tctanagggagaacacgtgataggtttaactaatgtgcaattcgaataagatagaccttgtgcagcttgtcaagcaggcaaacaggtgggaagctctcatcacaccaaanatgtgatgaccacatcaagacctttggagatgcttcaca

SEQ ID NO: 19580 - DNA, 346 bp, Zea mays
agcttcagctgtgcagcacaacagtgtaatagcagtaaatgttgtggttacttcacacctacccgtctgtttatatagtgctaatggtgggaaggggaatcgtcaagccgctcgcaccctttgaacaatcgcccgcacccactgaacggtggaccatagtgcccaagaatgtcaatcaccaaatcgcgcgtacccgttgtatggtgggaccacctttcactcggaatatttaaatcgtttctcgacaacgagctcagggaaggtgtttttcggacctttggcattccgaagcctgagaaaaaatttcacgggtcgagctcgttacaaaaaacgatctggcaccatg

SEQ ID NO: 19581 - DNA, 463 bp, Zea mays
  unsure (1)..(463): unsure at all n locations
tccctgacacaccaatacaccgtgacgcgaatntacgtgcattatgcatgcgcccagggatggcaacgggtacatacccgtcgggtagtaccattccatacctgtacccattaaaaaattctacccgtcgggttacccatatatgcttgcggctataaaatcttacccgtatcagtacccgcgcgggtattattacccgtcggataacccgtacccgctaaaaaatcttaaattccaatataccaatcactcaaaatattaaataaacataaaaaaatgtcaacttcacatataacaaatcatattatcacataacttggtatctagacaaatgatagctagagaagggtttattttagctaagattggctctattaaatggttataatgatattgatgtgcggtatatttacttatgggtagacagatatggatagtaccaactcgtacgcgtattcgtcta

SEQ ID NO: 19582 - DNA, 461 bp, Zea mays
  unsure (1)..(461): unsure at all n locations
agcttatcttgntgaggggactcgaatgctatctcgaatgatgacaatgatacatcttccaagctcaacgccaacattgctatcaaggaggccccttcactattctcatctccacattgcctcatggcaaaaggtagctcaaaggtaaaagttattcatgacttgaatgatattgatgatgatgatgatgatgatgatgatgagaatgttgaagatggtagttattcttatgatgacttaattaaaatgttgggtgaggtcgacgactacatgcacaaggaaagagaaaagtttaaagcctcgaaagaattgtataaaaccttcaagtgtatttgaggagctaaatacctctcgcaataatctaaaaaagaagtgtgagaagcttgtggaagcttanaactcctctcatgtgcatgaagtcgtggtggtcaccatggatagtggagtcacttgtgacttac

SEQ ID NO: 19583 - DNA, 393 bp, Zea mays
  unsure (1)..(393): unsure at all n locations
acatgtgctaagcggcgatgccacaaccagcccatgctagtcttagcgattaagcatgcatctagaccggcctcctcttttgcaaaatcaactaaataaagtttgccgtctagtacacccttaaatgctagtgaaccatcacttcttctaaagacagacacatctacatttgtaaatagacaattatatcccatattacataattgactgacagatagtaaattatatccaagagactcaactaaaaacacattagagatagagtgctcattggatattgcaatcttgcctaaacccttcaccttgccttggntcccatcaccgaatatgattgaatcttgggaatccttattcttgacgtaggaggtgaacatcttcttctcnccatcatat

SEQ ID NO: 19584 - DNA, 421 bp, Zea mays
  unsure (1)..(421): unsure at all n locations
agcttagtcgactgagacctatctggctgggtcgtgtctagtttatgtttgctgaagtagtcggatgagttcaaccaatagagtcctggttgactaaggtttgaccagccaacttgctgatattatttggtttggagtttttcagaaaacccagacttggtacccaatggatgtgtatgtcgtcttgtccgcagagcagtttcttaagctgataagacgcaatgatacgtgtgagcagttcaattattgacctcttatgccgtgttacgatatgttttgcaagaagtgtgagtcgattatggtttatcacgcaggggagcgctcgtcagcacaacagtgaaagagctccttctcgtcttcacttgangccacacctagtctaaccaccgccggatccttcaccatncggtcgatctacata

SEQ ID NO: 19585 - DNA, 407 bp, Zea mays
ggccttcgcttcagtctatcacccgcagtccaacggggtcgtatatcgcgccaatgggaaaatcttcacagctgtcaagaaaatgctcctcgatgaaaaaaaggcagatggaccgatttgttaccggaggcagtctgggtgctaaacacaaccgagtgcagggcgactcggttcactccattccgccttctatacggatcggaggccatgaccccgcaagaaataaagcatgggtccccgcgtacagttccgtcagccgtccccgacgtggacgagccaacttcaaaagatctcattgacggagaccgggtcttcgccctacaggccctaaacaaataccaagcccagaccaaagcatggcgcgaccacgcagtcatcccgagggagttcagcgaaggggacctcgt

SEQ ID NO: 19586 - DNA, 338 bp, Zea mays
agctagtgcacacctctgggaggctccccgagcaaggaatcggagttttcttcgccggagaagccagtccacgctcgccggagctctcacccccgccggagcacgtggaccgggtaagccactccaccatccttcgattccttgtgcacacaagtcgtgcgtgaccccgtgatgctaaccgtgccctcggattgcgccagttcgccgtagtttggccggtatactcgtcgccgacgaggacacccgcctgcacgcgtggaccgggcgattccggccacctccgacgccgagccgtacctcgacgtgaccgccagagtctccccaagccgaccccaccc

SEQ ID NO: 19587 - DNA, 414 bp, Zea mays
  unsure (1)..(414): unsure at all n locations
tgtgaaggttcttcatccncacatgtgctaagcggcgatgccacagccagcccatgctagtcttagctattaagcatgcatctagaccggcctcttcttttgcaaaatcaactaaataaagtttgccgtctaatacacccttaaaagctagtgaaccatcacttcttctaaagacatacacatctacatttgtaaatagacagttatatcccatatgacataattgactaacagatagcaaattatatccaagactctctactaaaaatacattagagatagaatgctcattagaaattgcaattttacctaacccttttaccttgccttgattcccatcaccgaatataattgaatcttgggaatccttattcttgacgtaggaggtgaacatcttcttctcccncgtcatat

SEQ ID NO: 19588 - DNA, 368 bp, Zea mays
  unsure (1)..(368): unsure at all n locations
gagcatatgccaatttattcgaantgactcaagcctagctacgggtgcataggtttcaccgaaatccaaaccttcgacttgggagtatcccttggccacaagtcgagctttggtccttgtcaccacaccatgctcatcttgcttgttgcggaagacccatttggttcctacaacattntggttaggacgtggaactaaatgccatacctcattcctagtgaagttgttgagctcctcttgcatagccaccacccaatccgaatcttgtagtgcttcctctaccctgtgtggctcaatagaggaaacaaaagagtaatgctcacaaaaatgtgcaacacgagatctagtagttacccccttatgaatgt

SEQ ID NO: 19589 - DNA, 477 bp, Zea mays
  unsure (1)..(477): unsure at all n locations
tctanagggagaacacgtgataggtctaaccaatgttactttctaataagatagaccttgtgcagcttgtcaagcaggtaaacaagtaggaggagcgcatcacagcaagaatgtgatgaccatattaagacctctggagctgctacatatggacctcttcggacccgtcacctatctaagcataggaggaagtaagtatggactagttattgttgatgacttttcccacttcacttgggtactctttntgcaggataaatctgaaacccaagggaccctcaagcgcttcctaaggagagctcanaacgagtttgagctcaaggtgaagaagataaggagcgacaatgggtccgagttcaagaaccttcaagtggaggagtaccttgaggaggaagggatcaaacacgagttctccgctccctacacaccacagcataatggtgtggtagagaggaagaacangacacttatagacat

SEQ ID NO: 19590 - DNA, 395 bp, Zea mays
agcttctgtgcctaatatcacagaaagttcattgttggttatttagtcatgatcctctaatggttaatgccaaaaaggcactttctactgtcttgttatttcaaacagcagatttcatattttttttctatgtttttaataacaaaacataaattttcccaaggtttggggtgttttcaccttgaggttatttttctagggtatttctaagttttccttgttttcttaaaataaaaggtgtgacggaacctcccaagtaattatgcccacctacagttgtccttgtctaacagacatcagacatcatgtagatgctcctaagtcacttgacaagttcggtatctttccttacctcaccaggaacgtttcacttgtcttgcagacattacagaaca

SEQ ID NO: 19591 - DNA, 405 bp, Zea mays
  unsure (1)..(405): unsure at all n locations
tcatgacagccggactntcgttcccgttggacaaattggtggtctaaagtctgaaaacttttgaaatttaccttcatcaacttactcctgaagctatgattaaagcgggatcctcatatgggccatgaggagccgaggactggaaccagatgcaagatgctttngcaacatntcgtgagttatcacagtatttctgtgccgagagccctgctctcggtaaatacggtcattaccgagagcaggactttgtccagtgcccgacaaaaagcactcgacaaagcgccgagcactcagcatagagccggattccggtagtggatgttagaaagtcgaagcatagaaccaagattaagatgacatagacgtgagtgccaaacattgacatcactctcatgagactgggac

SEQ ID NO: 19592 - DNA, 444 bp, Zea mays
  unsure (1)..(444): unsure at all n locations
agcttctaaagggagaacacgttataagtctgacttatgtaactttcgaaaaagataaaccttgtgcagcttgtccagcaggtaaacaagtgggaagctctcatcatgccaaaaatgtgatgactacatcaagacctttggagatgcttcatatggacctcttcggacccgtcggctatctaagcataggaggaagtaagtatggtcttgttatagttgatgatttttcccgcttcacttgggtattctttttgcaggataaatctgaaacccaaaggaccctcaagcgtttcctaaagagagctcaaaatgagtttgagctcaaggtgaagaagataaggagcgacaacgggtccgagttcaagaaccttcaagtggaggagtaccttgaggaggaanggatcaagcacgagttctccgctccctacacaccacagcanaacg

SEQ ID NO: 19593 - DNA, 458 bp, Zea mays
  unsure (1)..(458): unsure at all n locations
ntatcaaatggacgtgaagagtgccttcctcaatggaccaatcaaggaagaggtctatgttgagcaacctcccggctttgaagatagtaagtaccctaaccatgtctataaactctctaaggcgctttatgggctaaagcaagccccacgagcatggtatgaatgccttagagatttccttatcactaatggattcaaagtcggaaaggccgatcctacactctttaccaaaacacttgaaaatgatttgtttgtatgccaaatttatgttgatgatattatatttgggtctactaacgaatctacatgtgaagagtttagtaggattgtcggggaccataattaggggtaccctcaaggctcctaattctcagctggtaacccccatcagcatgaagctgcaaaggcctgatgggcgcgattaagtcanggatcagtccattcgagggactcgatca

SEQ ID NO: 19594 - DNA, 454 bp, Zea mays
  unsure (1)..(454): unsure at all n locations
agcttgagttattntattacagaccagactattagtgattgttgagtagtaatattatacaaaccatgggaggcacaaactcctcccgataagctataagcaaaagaacctaagtggaggaccgagtcctcctcccgcacttcagtcttgtttttcttcatttggtaccaccttggcacagaagcagcaaaagtctgctacttcctcacctaaaaacaacaaagggataaaccctgagtatggaatactcagcaagtcttacccgactaaagaaaagactctcaagggtatgctgggtaaataggagtcaaggagaggctttagcaaaaatcaacttatacttttgcagaagtagcttactaaagtgagtccttactttcaatcttttaacgccatgttaagtattaatagactcctgttgcatctagtctaatttcaatcatctcatcaatac

SEQ ID NO: 19595 - DNA, 430 bp, Zea mays
  unsure (1)..(430): unsure at all n locations
ctaganatatgtagaacaatgctataatcgtgaaactaattttcctatgcttgatattttccctagaatgtaataaaaatagttctgtgattcttagtggaaataagaaattttagggtatttaaagtagttaaaagtattagttatggatttttagaaaataattggtaagtccaataattcccaaactttttgtgggaatttaaaacaatatttacgagccttgggtagagtttgaattgttttggaccttgtttgatcaccaaaccccaaaacacccccctgccctatgaactcctttaccgactccggaaaccctaagttcccggaactccgtgaaggaaagttgtattcaagacataaataataagtttatactatctttgatcctcatgagcattccatggcatccattcttatacctatgtat

SEQ ID NO: 19596 - DNA, 448 bp, Zea mays
  unsure (1)..(448): unsure at all n locations
agcttgtgattgtgtgcttcctcaacatgatgtatataccaaatattgcgcttcttgtcctccttcaccttcacataagcagggcaaccaattctcatcgatgtcttatttgtcataggctcctcattctcttgacttggcttcagaaacccctcacggttgcaaacccagtgtctggtttctttactagtcctctttgtcctgacactaaaaccagccaactttgcatagtcaaggtaaaagaggtaggcttcttcccttgtatcaaatgtttgccgaaccctgtggacaaacacatcaagtatgtttgcatcctgcagaacaacacacaatcatgagttngcaattagcggatacccatagttgcaatcaacaagcaacaaacgttgcaactggagcaacaacacaccatgcaatggtaatcaaagagtaaaaacagagactcaag

SEQ ID NO: 19597 - DNA, 449 bp, Zea mays
  unsure (1)..(449): unsure at all n locations
cttggtcgaacgagtgatcagagctagagaagacagcaggatttcattntttgggccttggatctttaagttgattacttctaaatcaacccaaagatcgggggcttgtgggggatagatatcccctgngtccaccaaagaagtaaaaggcttcacgaaaggcccaggggcccaataattcgtaaggtcattctttcgtgggcctatggaaggacagccaacaaagaaaagaagacgtgagactgattagtgcaaacccagacggcccacaaacgtcgaacgaatgaatcgcaacagagacccgactntcccgcgctgaagcccccatgcaacagagccatgcgaggataagtcggcgagggttacgtatggataaactcaagaagttcactatctnttagctacttttgtgtatcatatccacatgtactgccccacggtcgagtata

SEQ ID NO: 19598 - DNA, 451 bp, Zea mays
  unsure (1)..(451): unsure at all n locations
agcttacatgctattactgactccattaagacttctttcttctgcttctccatcaccatcgttatcatgcagcctgctggaatgccacagcgggacaagagcatggggatgagcaggtaagccttccttacttttttgcaactgatatattcctcttattgtgtctaaataatacattttttgtgtcatagtaaaacacaaatataaatntagtagctttaatttagagaacttcgttcacgcggacaaacatgttaagatcctataaagattcattttttggtgcagcgctcgatagttccacttcagcgcagcagcatggtaaggagaanagtatgtgctacttattaatatgtgttggaaaaaatcataaaactagaatagatctactanagttttggaccctcaatttttggagctcctatgcgagcgcatggctcgcacatgccta

SEQ ID NO: 19599 - DNA, 392 bp, Zea mays
  unsure (1)..(392): unsure at all n locations
ntatccaactctagtatggatgagtatatcatatatataaataacatacgatacaatcaaaccacgagttgcatattaaggcccataccaaaacatctactttatcgcagaaacatgtggaatgaacaatcaaactaatgcttacctttgcaatcttcacaagttggtcatggttgtcatggccataaaagaatggttccttgcgaaatatctgcagccatcagtcagcaaacatatataggtaaaaaacactaaagcactgaccccttggatctcactatggaagggggtggatttatggatggaatggatcgcgtaaagaatggagggcaccgatctcgccctcgaagatggaagggaatctccgagggacacgatgcagatgccatcca

SEQ ID NO: 19600 - DNA, 438 bp, Zea mays
  unsure (1)..(438): unsure at all n locations
agcttcatgcaactctacgctcatctatgcctataagataaagcgggcatgctcaaacttctaaaaagagcgagagagccaagggaagctcgtccaatgctaaaagatattctctccataaaaatgctaagaattgacgagttgactaaagaacatgaggagctaaagtgctctcatgttgatttggtccaaaggtatgaaactatttcaattgagcaagataactctttacattgtatcgctcaattagtaaataggaatgccttgcttaaagaccaagtagaanagctaaaagatgaaaatctagcttttcaagaaaaacatgatatgcttctatgttctcatgaanatcttatggatgatcatatcatgttaaatattgctcatgaggttgtgatagaaaacttaaaatcccaacaacctcactcatgcacatgt

SEQ ID NO: 19601 - DNA, 469 bp, Zea mays
tctaaagggagaaacacatttgggactaaccaatattcattttgagaaagacaggatttgtagcgcatgccaagccgggaagcaagttggcatccatcatccacacaaaaatgtcatgactaccgacagaccgctggagctgctacacatggatttattcggcccgatcgcttacataagcatcggcggtagtaagtatagccttgtaattgtggatgattattctcgcttcacttgggtattctttttacaggaaaaatctcaaacccaagaaactttacaaggattcttgagacgggctcataatgagttcggcttaaggatcaagaaaataagaagcgacaatgggacggagttcaagaactctcaaattgaaagcttccttgaggaggagggcatcaagcatgagttctcttctccctacacgccacaacaaaacggtgttgtggagaggaagaatcgaactcta

SEQ ID NO: 19602 - DNA, 464 bp, Zea mays
  unsure (1)..(464): unsure at all n locations
agctagtgaaggttcttcatccncacatgtgctaagcggcgatgccacagtcagcccatgctagtcttagctattaagcatgcatctagaccggcctcctcttttgcaaaatcaactaaataaagtttgccgtctaatacacccttaaatgctagtgaaccatcacttcttctaaagacagacatatctacatttgtaaatagacagttataccccatgttgcataattgactaacagatagcaaattatatccaagagactctactaaaaacacattagagatagagtgctcattagaaattgcaattntacctaacccttttaccttgccttgattcccatcaccgaatataattgaatcttgggaatctttattcttgacgtaggaggtgaacatcttcttctcccccgtcatatggtttgtgcatccgctatcaataatccagcttgaacccccggatgc

SEQ ID NO: 19603 - DNA, 446 bp, Zea mays
  unsure (1)..(446): unsure at all n locations
tctaaagggagagcacattntgngactaaccaatgttncatttgagaaagacagggtttgtagcgcatgtcaagcaggaaagcaagttggtgttcatcatccacacaaaaacatcatgacgactgacaggcctctcgagctcttccacatggacctattcgacccgatagcttacataagcatcggcgggagtaagtactggctagttattgtggatgattattctcgcttcacttgggtattctttttgcaggaaaaaatacaaacccaagagactttgaaaggattcttgagacgggctcaaaatgagtttggcttgaggatcaagaaaataagaagcgacaacgggatggagttcaagaactgacaaatagaaggctttcttgaggaggagggcatcaagcatgaagtctcttctcctacatgccacaacaaaatggtgtagt

SEQ ID NO: 19604 - DNA, 425 bp, Zea mays
  unsure (1)..(425): unsure at all n locations
agctagcattgcatatttacatttcttgtattgcatctanggcttggctaacctaattgagataaccgccaacaaagcgagtgaaaaagcttaactcgggatcaaacttgacaagtcttagttttaagcttttaatacttaaattcctacttttatgcagttgttggttcttgagatatgcatgaggcattacacttagggggagtattaaaactcaaatatctcatgaaaacccctagtgcaaaaccaaaatgcaaatctcaccattttgcctatttctctaaaattatctagcctatggcaaaatattttgaaaattatgagaaaatatatgagggtgccatacctgtcctaacaagtggtcttttgtgtgattataagttgggatttggttgggtgganactanatagaaaaattgaaaatt

SEQ ID NO: 19605 - DNA, 405 bp, Zea mays
  unsure (1)..(405): unsure at all n locations
ntactctntactagcaagaaccttagtttttatactccgataattgttcatcttgttctaaccactaatcaaaggatctagttgggggataaagttataattttcaggtttcgcctatccaccccccctctaggcgactatcaggagcccttcggggctgcggacggctggcgtgccaatcacatggtagaacacgtcggagggtagggactcgcctctggcggctgccttggccaatgcgtcagcctcctcatttttggcccgatccacatgctgcaaggtgaaacccttgaattgtctctcgaggctaaggatagccgcgaggtattgtataagcgcggggtcctttgctgcatagtctttctcgacttggtctgcgactaccttggagtctggtctgataat

SEQ ID NO: 19606 - DNA, 441 bp, Zea mays
  unsure (1)..(441): unsure at all n locations
agctaggcaaaagcactacataactntaataatcaccaagaattgattctatgttgaactgaatcaaacaattcagttttcgaaatctgttctgtcagtggacagaacacagcaaccaagttgtaaaattcataactcttaaaccgtcaggcctttagttatgaaattntaacacaagccagataagaaaagcatatacaactttcttataatctataaggactgattntaacatcaacttaagtaaacaatgcagtttctgaaatctgtacagaatttggacagattcagttactgaatttgtaaaaatcataactcttaaacgatcagacttatggctggccaaatttagtacaagcaagataatcatgttagagacaacttttctatagcacatatctagagaaaacacanattagttcatcaaacatacatcacacc

SEQ ID NO: 19607 - DNA, 383 bp, Zea mays
  unsure (1)..(383): unsure at all n locations
tactatgagtagatccttannaaatccattttaataggttaagtatttacctgcatctagaattatttatatcctagctcaaccacttggcctatactagccatcttttatcaacccttcagttcactggattgatacgtgtaagtcagtgaccaagtcttcatgtccgagaagtaacggagatccaaatcgattaatacccagctggggatctccaaccacacgacatatgtagcacttaacccttacatatgtcaactcgccaccgggtttctcaaggccagaatgggttcacgccaaccgagagcatagacacaccaccgtccagcctcttgccacggagggtacatgctactctcgccatctcttcactcccattgcgt

SEQ ID NO: 19608 - DNA, 392 bp, Zea mays
agcttattacaaaataggcctgtaacacgcttctccatgtggtgcctgttacagtgggccgaatcccacacgggcctccagaacggttgaggacgtatgatggagagagacttcgtcgtaagccttcgtcttgcggtgaggaggaccgaaggtgggccgcgtcggtcatcttgcctccgttggttgagcgaggtggcgaagtcctgaagcgaaaggtagcgtctttgccttcgccccaacaatgtttatgtgtggatggtgagcaccaacttgctttcctgcttgacatgcgctacaaaccctatctttctcaaaatgaacatttgttagtcccaaaatgtcgtctcccttttagaagttgtggagattcttcattccaacatgggcaagtc

SEQ ID NO: 19609 - DNA, 356 bp, Zea mays
tcagctgacctgggcgcgatgactcctcgtgcacggtggtggtcctttagtctcatgcaatctctatagagcatacgctgacaacgtgtgcaacatgctatcgtaagtgcataatcgtgcttgagcatcacacaggtgatatgacacaatgcacttcactattctatatgcatagacttggtctcattaacctagtgatgagcactctgcctttaaagccaagatgactacttctctcacggcacatattgagggggagaaatctatatcatatccaactatgatcatactcgcttaacacatctcttgatgatatgtctatcgttcaggtacaaacgcatatatcccttgattct

SEQ ID NO: 19610 - DNA, 443 bp, Zea mays
agcttgcgaagatacttcattccaacatgtgctagtcggcgatgccagagccagcccatgttagtcttagcaattaagcaagtgtcgagttcagctctatcaaaatctactaagtatagctgaccctctaacacttccttaaatgctactgaatcatcacttcttctaaagacagtaacacctatatccgtaaaaagacagttgtaacccattttacataattgcgaaactgaaagcaagttgtaatctaaagaatctacaagaaaaacattggaaatggaatggtcaggagatatagcaattttacccaatcctttgaccaaaccttgatttccatccccgaatgtaatagctcgttggggatcttgagttttcccataagagaacatcttcttctcccctgtcatgtgagttgtgcatccgctatcgatgatctaacttga

SEQ ID NO: 19611 - DNA, 382 bp, Zea mays
  unsure (1)..(382): unsure at all n locations
tcgggagcgggagttgcaaccttttcagacgaaatttgctctgtggccttntcttctggtgtcttttcttcaatttcgacaggctttttctcagcgggctctgaaggcccagctttggtttcagtttgaattattgtagcctcgacttctgcatgtttcgtttcagcttcgggttgcgccttagaagcttctgcaatttttctggcaagagcaggactcaaggtttcggttgtttctagcacatccagtacatttaccattctcctcctcttaggagttacgacagaacccatttgtaccttcggtactgttaccttttctgaagggctcanaacctctaccatcnttcgtatttcttcaatttctggcttttcagccttat

SEQ ID NO: 19612 - DNA, 448 bp, Zea mays
  unsure (1)..(448): unsure at all n locations
agcttgtctcgcctttttaaaatataactattattaattgttgctcctaaacaagacttcctttgatcgaatgagtatcatcgagttgtgttgtgctgatatgtttgagttcatgttaattatctttgtgactatgattgatttgattctttgtaatgattgttgttgtattgtgtgacttttgtccacaatgacaacagtcacctatgttaaaccttagatagttgggttctctctactctttatagactgtcttagctcaatctcttcgaaccctccttccttgctatatccatatagatgtcagaacttggaatgtcaactacaagcgatgtcactaagtacaaagaatgcattgtgnttgcaactcctccagctaagtctcagatggaacaattcaagaatgcgcatgcataatttctgcaagcaacatctcaagtggtagcta

SEQ ID NO: 19613 - DNA, 432 bp, Zea mays
  unsure (1)..(432): unsure at all n locations
gacggacctataaaactcagctagagacaggccagccctcctcttgcccttggaatggcattctacagttcagacaccgcggaaggcttgttgttacgaacctatcagacgtctccccggcggatgagcaccttggcggccttccagccatcgatgctggtgtctatgacggtgacatcggtccggctacacctctcaccgtcggcatccgcggcgcgctccgcccggcggcgcttcttggccttggcgatcttgtcctttttgtccttgtggggacgctgtgcaagaagggcagagatcggctggtcctcgtcagttctcgggcggggccgggactgcttgcggaaggctttgcgggccggtgggcccggcggngcggatgacgggaccgcgaagacatcggagatcacgggcacgagctgaagctgtggt

SEQ ID NO: 19614 - DNA, 418 bp, Zea mays
  unsure (1)..(418): unsure at all n locations
agcttctccttaagcctgcctgtatagagcttatgaacattngtattaactttgtagaaaaaactgtaatcgatgattgaacagtgctatgtataattgtccataccttgtaatatatttttaccttttcatccatgtacaaattgctttgttgtggacgaaacttgtattttttgagccgaaggtgaaaaacacctttccttctttttgtacacaacgaaacatgctgttgtgtcacatataatcgtttgaaacgaagcttctttgtattcatcgaagtagtgtcgtcgaagatggagtatttcttgttcgtgcttcatgttatgatgatgatgatcctacaaatgtataaatgaatgtgtattaatgcaatgaatgatgtaatgtaatgtgcaattgaatgtcccgaacacacacg

SEQ ID NO: 19615 - DNA, 475 bp, Zea mays
  unsure (1)..(475): unsure at all n locations
gggaagggtatttgcgatggttcttgggggaccttcagtgcatgggtctctgttgtcctagntgtaccttccaaagtcagaacatgttatgcaataaaattggacttcagctgtacaaataatattgccgagtatgaagctcttctcttggtgcttcgaaagctaaaggcaatgggaataagaagggcaatcctcaagaccgattcacaagttatctcgggtcgtgtggacaaaagctgtaaggctagagacccgaagcttgaaaagtatttagatgcagtctgaaggttggaagcctcttttgaaggattntctgtaaaaaatatcccaaggggagagaacgagcatgtagacttattagctaaatcagcggcacatgggctccctttaccttcggaagntatttttgaaacaataaaagtacctttggtcgagctcatggaaagagcagtgctcacaatttcacctgtacata

SEQ ID NO: 19616 - DNA, 449 bp, Zea mays
  unsure (1)..(449): unsure at all n locations
agctntatatgtgcattgtatgagtggaactgtattttanacttttagaactgtgctcgagacatttcttcaccaaaacatgtttcttgtgtttttttgcacctacctcttagataccaattaagatatgagtcatttaatttatgtgggttgtgttgtacataatagattttttggatcatccttcagaaccctagccgctagatgtacaacaaaaacaaaaatcataccctcacttggtatgccatcatgttcgttggtgaagctctgcgctatggcagcaacggttagaaaagcgacgtcgatgacggtgaagaccgatagtgtacttcccgctgctaatagcccaccctcttcgacagttanggtttgagtgggaaaccttagacagtactttgactcgttgcttggctgtcggcttcccacctctttctatagtgctgcataat

SEQ ID NO: 19617 - DNA, 467 bp, Zea mays
  unsure (1)..(467): unsure at all n locations
tanagccatggtaagtagcataggcaagtaatatgcgaatttactcaagcctagctacgggtgcataggtttcaccaaaatccaaaccttcgacttgtgaataacccttggccacaagtcgtgctttgttccttgtcaccacaccatgctaatcttgcttgttgcggaatacccacttggtacctacaacattttggttaggacgtggaactaaatgtcatacctcattcctcgtgaaattgttgagctcctcttgcatcgccagcacccaatccgaatctttaagtgcatcctctaccctgtgtggctcaatagaggaaacaaaagagtaatgttcacaaaaatgagcgactcgagatcgagtggttacccncttatgaatatcaccgacgatggtgttcatggggtgaatctcttgaatcgcctggtggactcttgggtgtggccgtcctggaccctgatcatct

SEQ ID NO: 19618 - DNA, 438 bp, Zea mays
  unsure (1)..(438): unsure at all n locations
agctaggtgttcatcgacaagcaaatcttcctttgagctataatttgcaggaacaaaagatgatacatatcaaaagctcaaagaagagaatgagaggcttaagatgagcttgacacaacttaaagggaagtgcattgctcaaccttctcaagataaccgtgatcacatggtgaagaagcttgagacgggaacaaccatggcatgcactaaatccctcaaagaaaatgtcaaggacttgaggattgccaagaggagggaacaaaagaagaaaatcaataccacttccaaaggcctcaaccatgccttcatacaaggtaacatccaaggtagtaatcaagtcacacttcatactaagagaagtaagaagtgtagtgaatgctntgaaaagggacactcgattaagtcgtacccctatattaaaaatgacttgattactaa

SEQ ID NO: 19619 - DNA, 459 bp, Zea mays
  unsure (1)..(459): unsure at all n locations
tatgaagatgcttatcccaacatgggctagtgtgtggtgtcatagccaacccatgttagtcttagcaattaagcaagtgtcgagttcagctctatcaaaatctaccaagtatagctgaccctctaacactcccttaaatgctactgaatcatcacttcttctaaagacagtaacacctatatctgtaaaaagacagttgtagcccattttacataattgtgaaactgaaagcaagttataatctaaagaatctacaaaaaaacattgtaaatagaatggtcaggagatatagcaattntacccaatcctttgaccaacccttgatttccatccncgaatgtgatagctctttggggatcttggtttttctcataagaggagaacatcttcttttccctgtcatgtggcttgtgcacccgtatcgatgatccaacttgagcccctcgatgcataaaccta

SEQ ID NO: 19620 - DNA, 463 bp, Zea mays
  unsure (1)..(463): unsure at all n locations
gatcttgagtcacctgcagcatcaagcnttgccttatattatgcaaactagttcatttatgcacttctatattngctttggtttgtgttggcatcaatcaccaaaaagggggagattgaaagggaattatgcttacacctagtttctatataattntggtggttgaattgcccaacacaaatctttggactaactagtttattctagtgtataagttatacaggtgcaaaaggttcacacttagccaataaaaagaccaagtattgagttcaacaaaagagcaaaggagcaaccgaaggctcctctggtctggcgcaccggactgttcggtgtgccaccggacagtgtccggtgcaccaccggacagtgtccggtgcaccagaagacttcaactncaactcgtcatcttcgggaaaatccagaaacggtgcgctataattcaccggattgtccggtgtacacc

SEQ ID NO: 19621 - DNA, 464 bp, Zea mays
  unsure (1)..(464): unsure at all n locations
ggaggctgtgtatagattaccgccctcttaatgcggtaactatcaagaacaagtatcctttgcctcgtattgatgttctttttgaccagttggtcggtgccaaggtgttttccaaaatagaccttcgctctagctaccatcagatcaagatacgagcaagcgatattccgaagacgacattctcaaccagatacgggctatatgaatttttggtgatgtcattcgggctgacaaatgcaccagcatatttcatgtatctgatgaattctgttttcatgcctgaattggacaaattcgtagtggttntcatcgatgatatcttggtgtactcaaggaacgaagaagaacatgtcgggcatttgcatgtagtgcttcaacgtctgcgagagcaccacctttatgccaagttgtccaagtctgatttttggctaaaggaaatcaaattcttgcgtcacactatctct

SEQ ID NO: 19622 - DNA, 408 bp, Zea mays
  unsure (1)..(408): unsure at all n locations
tcctcccttctttggcggaagttgttatcgacccggatgttctcatccattntttgaagcagcttctcaagagtctgagggggtttcctagcaaagtattgagtcgtaggtcctagccgaagacccttgatcatggcctcaatgacgatttcattgggcaccgttggcgcttgtgctctcagacgcaagaaccttcggacatacgcctgaaggtactcctcatggtcttgtgtgcactataacaaggcctgagcggtaactggctttgtctgaaacccttgaaaactggtgaccaacatgtccttaagcttctgccatgacgttgatgttcctggccggagagaagagtaccatgtctgggccacacttctgactgccatgacgaaggactttgccatgacagcagca

SEQ ID NO: 19623 - DNA, 281 bp, Zea mays
  unsure (1)..(281): unsure at all n locations
agcttatatggcatgacgaacgatgccacgacatttctatctatatctatctatctatattatgaaagcagaacaaaaacggcgtcggcttgaccatccacgtcgtctgaaattcaagtggccgtcggatttttcgtggacgctccctagcggctcggtgtcttcatgtgccgtgaaggttcgagaacccacgaaagcaagagcgccttcctagtgttgtgcccagaatctccattntaatgaacctgcatcttggtgttcggccgcaccccacgcacacg

SEQ ID NO: 19624 - DNA, 470 bp, Zea mays
  unsure (1)..(470): unsure at all n locations
taaaaaagtaataagcctaacccactggaagccccacatattcaagaaaccctaagttactcttgacttagtttcttttagcataatattattaaatcctacataatcatgacatacatgttcattgcattcgatagactgtaaccttgctgacggagagtacatcctcgtgccggagcaaggagctgctcaggaggtagccccagatccagcacccgagcctgcaccagaggacctgcctgccactgctttggaaggcaagccccggttttatgcataacctgttatttaatgctattttaatatacttaatgattgtaggattgattgtgcacttaagtgtaggagtngtttgaaaccctagttgcatgatctcaggaatcccattgagatgaatactagtatgctaagtcgagtagctgctntattaattacgatctctgtagaagtcgagtggattttctagcact

SEQ ID NO: 19625 - DNA, 464 bp, Zea mays
  unsure (1)..(464): unsure at all n locations
agctntaagctctntgacaataaaactacttcatccagttttaacaaagatgcaagaatgaatgtttaagaagttaaactatgtatgaagcagggctaatgcatgaacatgctttctcttccttttatacaagatatgcaaggaatgtataggtaaaaggaagatttaggtacaagtttaaaacgaaaggaagttgttttacccttttgtaccttcacatagagatgctctcttcattgtgctttgtccttagtcttagttgcttaagacctatactcaagacaatatatggaaatattttgcacaagagagagttctacaactagtgatccttttctaagtcattgtcagcatatatcanatggatcacaaattgcatagaagtgtcatgaattcttcttttaacttagtgcatatcaagagatattgatngatagaatatgcggcactaagaaacataagtg

SEQ ID NO: 19626 - DNA, 433 bp, Zea mays
  unsure (1)..(433): unsure at all n locations
tctaagggagaacacgtgataggtctgactaacgtgcaattcgaaaaagatagaccttgtgtagcttgtcaagcagggtaacaagtgggaggagcacatcacagcaagaatgtgatgaccacctcaagacctctggagctgctgcatatggacctcttcggacccgtcgcctatctgagcatangaggaagtaagtatggtttagtcattggtgatgacttttcccgcttcacttgggtgttctttttgcaggataactctgaaacccaagggaccctgaagcgcttcctcaggagagctcaaaatgagtttgagctcaaggtgaagaagataaggagcgacaacgggtccgagttcaagaacctttcagtggaggagttccttgaggaggangggatcaagcatgagtttctcgcttcctacacaccacaac

SEQ ID NO: 19627 - DNA, 408 bp, Zea mays
  unsure (1)..(408): unsure at all n locations
agcttctttgccgaatgctgtggctntggcactcggcaaagatacaagcttagcaagctntgccgagtgcctcctagagcactcgacaaagaagctgacaaagggcccagctggtgaaccctttgccgagtgtcngctggtagaggctcggcaaagaggtaatctctataccgagtgtattaggtgacactcggcaaaagcgccgtctccattaccaagcgctgtgacggtcgcttttctttgccgagtgcccgataaaaagtactcggcaaagaagtcgttgccgatgtactggtcaccgagatctctttgtcgagtgtcacactcggcanatactttgtcgagtgtcacacttctgcaaaactttgacgagtngttttanggtttgtcgagtgtcacacttggcaa

SEQ ID NO: 19628 - DNA, 441 bp, Zea mays
  unsure (1)..(441): unsure at all n locations
gacactaaaaactaagctgactgcgctgactgccttcggtgcacgtctttagcacttattctgcattcgtctctgcanaaaataaaaaagtaattttgatttacacggtcgacaataatggtttatgaagtgagatttgaaatagaagatgtgataacgagacagcttgatcagcactcccatggccggtatgtaaagcaatgacgtacgactgggagtctcttccccggcgcaccctctttcttgtgctagataggcgaccccggctgacggacaaaaggccgggagagccgctatccaacggctccagcggtctgactaaaaccaaaagcagccatgcttgcattggggaatttgcgcttgcagaagaggacagcataacgacccgctaattgaataccaagagatttctcctcatgggtctctccaatcccttatcta

SEQ ID NO: 19629 - DNA, 361 bp, Zea mays
  unsure (1)..(361): unsure at all n locations
gaccctagatcctcagagacacctgcggcatgcaagcttgtgaagattcttcattccaacatgggctattcggcgatgcccacaccaacccatattagtcttagcaattaagcaagtatcgagttcagctttgttaaaatgaactaagtatagctgaccctctaatacttccttaaatgctattgaatcatcacttcttctaaagacagtaacacctatatccgtaaaaagacaattgtaacccattttgcataattgagaaactgaaagcaagttataatctaaagaatctacaagaaaaatattggaaatagaatggtcaggtgatatatcaatnttacaaagttctttgaccaaacct

SEQ ID NO: 19630 - DNA, 457 bp, Zea mays
  unsure (1)..(457): unsure at all n locations
tctatagggagaacacgtgatatgtctaactaatggtcaattcgaataagatatgaccttgtgcagcttgtcaagcatggaaacaggtgggaggctctcatcacaccaaaaatgtgatgacgacatcaagacccttggagatgctgcatatggacctttttggacccgtcgcctatctgagcataggaggaagtaagtatggtttagttattgttgatgactnttcccgcttcacttgggtgttctttttgcaggaaaagtccgaaacccaagggaccctcaaacgcttcctcaggagatctcanaatgagtntgagctcaaagtgaagaagataaggagcgacaacgggtccgagttcataaatctttcagtggaggatatccttgaataagaagggatcaagcatgagttcttcgctcctacacaccacagcaaatggtgtgtagagaggaaaac

SEQ ID NO: 19631 - DNA, 472 bp, Zea mays
  unsure (1)..(472): unsure at all n locations
acctgaggcatgcaagcttgaccgncaatccctcgaagctcagaatttatatcctatctattcgcgacgcancggcggatcgagcaggaacaaacaaaccaacatatatatacgcataagaacattacaccatacaaaataaaatgttataaaacatgcgagactcaatggaacgcggttctacggtcacgcgaggaaaagaattgtcgaactcgaagctacggtcgggaagatatcacgtctacactaaacgagtattagtcataacgtttagcttgatctgaatatattaatcgatatttatttaaaatgaagatagagctatcacacaattttaatttgctgacagcaataacaattcttagttaaataagtaatttaatcacattagcgactctaagcgggacgaattaccggagcgagacgatatacgtatcgcgagataagcatgatcgcacgcgacacagcgcgc

SEQ ID NO: 19632 - DNA, 413 bp, Zea mays
  unsure (1)..(413): unsure at all n locations
tgtgaaggttcttcatccncacatgtgctaaacggcgatgccacagttagtccatgctagtcttagcaattaagcatgcatctagaccgacctcctcttttgcaaaatcaactaaataaagcttgtcgtctagtacacccttaaaagctaatgaaccatcacttcttctaaagacagacacatctacatttgtgaataaacagttatatcccatattacaaagttgacttacagacaacaagttatatccaagcgactcaactaagaacacattagaaatagattgctcggatgaaatagcaatttttcctaaccctttcaccttgccttggttcccatcatcgaatatgattgaatcttgtggatccttattcttgacgtaggaagagaacatcctctctctccccgttatg

SEQ ID NO: 19633 - DNA, 471 bp, Zea mays
ctgcaagctgcaagcttaaggcacgtggccatcgcatggcaggtgttcaacttctttatggctatctggaccagtcgtgaggcaagtgggtacggcggccatcacctggtctcatccatggagaagatcttttcaccccgatgtgttatccgggcaccaccgggcacaaatcgcatcgccggtgcgaatccaggcgcggaggtcaccggtggcaaagtgcactgcaccacgatcttcatcaattactatacaatcaaaactctattcagtctgtctgacagagccattcgcagggcattaatctccgatttctatgtggctactcggtaatccctctataacaaagttcttggcctataatccagctctaatcttgctatagcaatcaacctcaaatactcactggatcatgctcaaaatagcctccaaacatgtgtctgattcactatcactcacaattcagtattctga

SEQ ID NO: 19634 - DNA, 391 bp, Zea mays
  unsure (1)..(391): unsure at all n locations
accgtgtctaaatacttttcaagcttcggatctttatctttacaactctagttgatatgacccgtaacaacctgngaatcagttataagaatggcccttctgattcccattgcttctaacttccgaaggcccaaaagcagggcttcgtactcagtaataatgattgtacaactaaaatcgagtcttgccgcataacaagttataactgtggatggtgagatcaacacaacggctgctcctgcttcgaaggttccccaagacccatcgcaaaacactgtccatacttcggcatctttatttgtttcttcatcctgagcccctggcgtccagtcagcaatgaaatctgccaacgcttgagactggatcgaagacctatgcacataatcaatgc

SEQ ID NO: 19635 - DNA, 321 bp, Zea mays
cgagaccctgaggcgtgcagcgcatgctctctgcaaaaaactacatattccctctttatccccacgctaacgcgtggcggctgacaccgacgaagcatgcagcgacgctactgcataaccccgtctcttgcagcgtagctacaaccattgcaccaaatgtatacgtcccagggagcatcaggtgcttccgttccatcaacggaaatgatgtgacacttctgctccgtcacatcaaagatgctctcttcaatgcccaccgcagctactggtacttcctcgctacctattctctctacacgcgccgagcgccctctgcttgat

SEQ ID NO: 19636 - DNA, 402 bp, Zea mays
  unsure (1)..(402): unsure at all n locations
tcgacattgtcgccaggacagatggtggcggagcatctccttcggttatgacgttgacgacacgaggtatggggagaatcgtgtccgctggaggggcgttgatgatggtgttcacgacgaccggtgccccacagaagngagtcacgccctcgttggctatagctgagaagatggccttcgctgaaacctgtcagcgcatagtacaattataaaagaacagtcagttgcgaattacaacaaactcctattaattagatgaataaacctgctcgtcgtaggggtcttgtgtgcatgcagaagaacaactcttttatcacgtgttttggaattcttcattacttcagacacaaaccttatatcagacgccataccctccatgactcataattacaaataagaata

SEQ ID NO: 19637 - DNA, 443 bp, Zea mays
  unsure (1)..(443): unsure at all n locations
agctnttaaagggagagcacattttaagactatcaaatgtttattttgagaaaggcaggatttgtagcgcatgccaagcaagaaagcaagttggagctcatcatccacacaagaacaccatgacgaccgataggccgcttgagctactccacatggatctattcggtccaattgcttacataagcatcagcgggagtaagtattgtcttattattgtggatgattattctcgcttcacttgggtattctttttgcaggaaaaatctcaaacccaagagaccctaaagagattcttgagacgagctcaaaatgagttcggattgataataaaaaagattagaagcgacaatggaacagagttcaagaattcttcaaatgaaagatttcttgaagaggagggcatcaagcatgaagtctcttctccatacacacctcaacaaaat

SEQ ID NO: 19638 - DNA, 475 bp, Zea mays
  unsure (1)..(475): unsure at all n locations
ntngngcttcatctncagccaattcacgctcgcccttagcccatatttgggtaataaacctattccctatgcttcgggcttcggttggaacgtcaaccagatcgaatgatgaaagattgaaatttggcctgttgacaactctcacgtgattgcatccgacttttatgaaggcggcagctgtaccacgagaagctaccagcgcacagaagtctccatggtcggttataacttcgtcaagctcatcaacctccttttcaatatattcgagtgccccgggtatatcttcggcagcgaggctagtttcctctgatgcagctccaactgaattgaaaatgcttctcaaccgagtggtgtattggcttgcanactcgaaacatctctccttcanatccctgagcgcatcactaagcttcgtatttntctcagtctcaaccttaaaagttgtttcaaaagcttccgttctgggtgatctact

SEQ ID NO: 19639 - DNA, 420 bp, Zea mays
  unsure (1)..(420): unsure at all n locations
agcttctccttgtcgtcatcaatcttgacatataaccactccgacttccagcctgctgcccatttgctccggtagctgattacaagaaactttgtggttttccgataggcgaaattatagcaaccaaaattgtcatgcaatccatctttcctagccttcgtctgatagtgcagttcgtgaactcggcaaaaactgtccgcaaatggctccactgcttggcttcggagtgcctagatataaacactaagcctaacgatagcgttaggagtcagctggtgaaaatagatactgaacctcttcagtacctctgcaataatcccatgtaggggggatcttaatccagcctttagaaagcttttgaaaataacaatttcatccttctccggctttagagtagtctcttctnccccgaagcgtaat

SEQ ID NO: 19640 - DNA, 465 bp, Zea mays
tgaagccatggtaagtagcataggccaataatatatgaattgactcaagcctagctacgggtgcataggtttcaccgaaatccaaaccttcaacttgggagtatcctttggccacaagtcgagttttgttccttgtcaccacaccatgctcatcttgcttgttgcggaaaacccacttggttcctacaacattttggttaggacgtggaactaaatgccatacctcattcctagtgaagttgttgagctcctcttgcatcgccactacccaatccgagtcttgaagtgcttcctctatcctgtgtggctcaatagtagaaacaaaagagtaatgctcacaaaaatgtgcaacacgagatctagtggttacccccttatgaatgtcgccgaagatggtgtcgacggggtgatctcgttggattgcttggtggactcttgggtgtggcggtcttggttcatcatcct

SEQ ID NO: 19641 - DNA, 401 bp, Zea mays
agcttccctttaatcccgaaactcgatacactctttattggtgaaacttttaagtagacataatcgcctaccagaaagcataagaggtgtcgtcatcggtctgcataactcttttgtcgagtctgagctttcttcatattatgaataattctctgaaccttttcttcaacctctttcaccatatcaggcctaaagaagtatctttctccaggttcagaccaatttagcggagttcgacaccgtcgtccatataaagcttcaaaaggtgccatcttgatactttcttgatagctattattatatgaaaactctgctaaaggcaaatattcatctcatttctgtgggaattccagaacacatgcccgtagcatatcttccagtacttggtttaccctctcagt

SEQ ID NO: 19642 - DNA, 483 bp, Zea mays
  unsure (1)..(483): unsure at all n locations
ctaagcttgcttcggccgaagggtccttcgtatcatcaatagatatagtttcttttgtctgcgccaaagttttaacatgttcgcaccctgctttctccaaaatagctgcaactcccctcgcaccagagaatgcgcagacgtccccgcggtcgctcataatttcttcaaaagctttggcttcgctgctgatccactcaattacgccctcacgatcgcctcttatgaagttgtcttcgctcgagtacgcgcccacattggcgaagctagtatttatccttttgacgcattctacagatttctcaaaacatctttattttgatgagcgaagctctgcaacttttttccaaaataaatatttcaggactcactggcatctcggtcaacttcagcaatagcgcattncaacttggcttccgccagctgttttggaggatttcatctcattctttggattcaaatgaccttgagtagctccgctccttt

SEQ ID NO: 19643 - DNA, 438 bp, Zea mays
  unsure (1)..(438): unsure at all n locations
agcttagatctatatctaattntccattcccctccaattttgtctggtgcttgccgcagaaatacaagaatgaagggcatgacactattatcctggctggtgccgagtacgggagtggaagctctcgggattgggctgcaaagggcccaatgctgcaagtaaatttgcttccacaatagtttcttcagcctaaactagccttctgagtttaactaatgggcaatgggctgcaaggagtgaaagctgtgatagcaaagagcttcgagaggattcaccgcagcaatcttgctggcatgggaatcatccctctatgctacaaagcaggggaggatgcagacaccctgggcctaaccggccatgagcgctacacggtccacctttcaaccaatgtgagtgagatcaagcctggccaagatgttaccgtgacaactgataatg

SEQ ID NO: 19644 - DNA, 444 bp, Zea mays
  unsure (1)..(444): unsure at all n locations
ntgacgggctctaccgtgctagatggttagttccgttccatgcggcgcggngaagtccgagctcgccaatagaggctcaatgggcctcgttttggttacacgtaacaagggccccttgcgacagcaacgagcaggccaagaaagaccggcccaatataaactttgacctttgacctctgaccgagcaccaccacgaagagagagaaacttctcttccagaagggggcaaagctcgcggcctcgcgccggtcgttccggtccaacgcggcgacgcccaaggctgccgtccctgggcttcctcctccccctcaccccttcccctcgccaaaccacaggaagaagcgagcagggcaccgagttntctcgagcgatggcatcggcgcctgccgattcctacgggtgcgcggcgtgcggcgcgcccctgaacctgtcggcgcgcacctg

SEQ ID NO: 19645 - DNA, 429 bp, Zea mays
  unsure (1)..(429): unsure at all n locations
agctgccgaagtggtcgaatgagttacctttgtgggcgccaatntggttacttgttctcaaatgctataaatcaagaacaaggcaacacaagtgttaatagttaaagaccttcgcccttcgaagcattatctcccttacgatataatgatcttcagacgaaggtcatgaaggacaaagcttctttatttcaataggcaaggatgtaaacaaaggcatatgaaacacagagggaatatgaatgatcatttcaaatcattagactatccatattctcattaaataaatataaacaaacatcaacaatatttgaattacacttgtaccttcggttcgacagaaggtgaaaaagcaggagtgacgtgtgagtgattacaagtcagcgtgaacagtacggttttactggtcatctatntataggcacaggacgt

SEQ ID NO: 19646 - DNA, 400 bp, Zea mays
tccgcttagtagcacaaaaaggaaccgacttaaaggggaaaatgctatctagtcctcgctggattggtcttaagtcaatagtgaacataaatggcatgaatgtaattttacacaagctgcgccctgtgcctataaatagatgaacagtaccctcgtactgttcatgctcacttgtattcattcgtgcgtcacgcttggacttttaccttctgtcaagccgaaagtacaaatgtaattcaatattgttcatgttcattcatgatgatacaataaagatatattaacgatatcatatgattatttatggtatttttcatggttcatatgcttcttctctcattaatatatgttgcgatgatgaacgtatgtccttcatgaccttcgtctgaagatcattatt

SEQ ID NO: 19647 - DNA, 436 bp, Zea mays
  unsure (1)..(436): unsure at all n locations
agctttggatacctcatgttatccatcatctctcggcaaacattgatctctttactgtcaggtagacaagtaaggaagtcatcttctttgtctcctctttataccaaagacccttgggggtatttcagctccttggcatagtgttgcacttcaacaatttgatctgctgataactgctttcccgaagcatgtcgaacaatatagttcaaatcacccagaagaggtgcttcaagagcatgtgacgtgggtttttctggaagactctcttccaccagctntactggcgcagctcccgaaggttccacttcaacatgagtagaacaagcgcttgtagtgaccacttctctagcatcttcaattttctcgccagaagcttcggtagaagcaagagttagcattntcatggattccaaaacagcatccaaaacactagtca

SEQ ID NO: 19648 - DNA, 438 bp, Zea mays
  unsure (1)..(438): unsure at all n locations
nggtctttagaatnntagaanttcattggtagttccataaattattaaactttntgtataagcttaatttgataattagagcccttcggtaaaatttggtatgttttggactttgtttgatcccaaaaccccaaaaccctagcttcttagaagagaactgcctaacccttctagggtattgactcagaaaatcctagttacttagatgtaccatgaaggaaagttgtatttaagatacaacttgatgtatctctattataactgcatattcatagcatcacatgagcattcatgtatatgtatggttatgtatagaaaacgaagaagaagtaattgtcaaagaagaagaagaaactgcaccaccagctgagactccacctgccgggaagtaattttattttgatatatgtggaacatatcctgaatccnctacaacac

SEQ ID NO: 19649 - DNA, 438 bp, Zea mays
  unsure (1)..(438): unsure at all n locations
agcttacccatgatgaggcatgtggccagnttattggtcctatatcatttatttaacaatcagaacgggcttatgcgacacagatgggcgacctttcctcctcgacgtctggtgtagatttatttagaccattttcctcattttggtacctgtcctgaggactcttgatcgaaagacgaacgcacttaaggacgaagggaattatcccataaggtttgctttgatttttgaaacaaaaaacccataacagtgttccacatcattctttctaaaagaaacaactcttagtgcttatatgcaaggctaagccacacttagtttctttatgaaacacgaatgcacgaagataatcacatatcgaggaatggcaatgcatcaactgttcattactcactcctatcaacaatgagaaaagtgtaaaccactagagggggaatg

SEQ ID NO: 19650 - DNA, 464 bp, Zea mays
  unsure (1)..(464): unsure at all n locations
gacactatgaaactcagctngcacacatagctctttgaatacctttgatcatatctcttttatatgctatgactaatgtgttttcaagtttatttcaaaccaagtcataggtatattgaaaggggaatggagtcttcggcgaagacaaaggcttccactccgtaactcatacttcgccatcactccgagcaactctctcgtctttgggggagaaatgagcatcaaggaaaaggacttcatccttgggggagagagtaaaagctcaaacgcaaaagggacttcgtctttggtataatcttaactcacttatntatgaccaaaggggaagttngcacttcgagggctctaatgattccgttttttggcgattcatgccagacaggtggagaaatgagcccaaagcanatgaccgcaccaccaccaccananntcanaaacttagtgctntccaaaagtctttatca

SEQ ID NO: 19651 - DNA, 397 bp, Zea mays
agcttcgacttcatctatattatgaatagccttctaatccgttcaactaccttcagcccttctggcagcttcttgactcccgtgtacaggaatgggcccttgttctgaaggtatcttcatgcaaagatatgctggatgaagtatttcttcgaaggcattaagcgttcctcgaccaatgaatgcattgtatggatattccatatcgacaatgtcaaagacaacctgctccgctcttgtgttgtgaacatagccgaaagtaaccggcattgttatcttttcaagtgccacaatctgtctttctttgaagccaaaaagagggtgtgttgcatcatgtatctcgtcctctagctcttgcattttgcctgaaagcctttgcaaagatgatatccactacact

SEQ ID NO: 19652 - DNA, 477 bp, Zea mays
  unsure (1)..(477): unsure at all n locations
ggacacttaaaactaagcttgaagatcagntctgatatgtgattgcattctgcagatgtcttatttcatgcgcagaggaagaaggcgtgctcagcangagcangcaaccccacaggacgaggcaccccgtcagcagctgccaccccccaatgtccgtcaaacagatgtttctaatgcagactcaggcagtttaagccattggtcagactctggccgccattcagcagcagcaaccaccacctcaccctcagatgcctcagatgcctagggacaagcgtgctgaattcatgagaggtcatccctcaatgttcgctcactcttctgaccgcatggatgcttaaaggtggctgcacactgtggagcgagagttgcacacctctttatgtgatgacagggagatagttctgtatcgtccccgtatgttgagaggagcaactcagtcttggtgggatgtttatcttgccacccatgacaact

SEQ ID NO: 19653 - DNA, 456 bp, Zea mays
  unsure (1)..(456): unsure at all n locations
agcttcttcggccaccgaagctgaacagccaatcttgctgttagaaactgcagagatggccgaagcaccatccacagaaaaaatggaagaagcgaataagccgactaatgaaaaaacattataagttttgagtcctgcagtaaatattgaaacagcaaaaaaccaaaaggggccatcagtgaccccaaaaaggaaaagaatggtaaatgtactagacgtcttggagacaattaagtcttcaagcacaattccaaaaaagagtgttgaagttgctgaagcttctactgaagcttccgctcaacaagctgaatctgaaactgggccttcagagccctacaaagagcaaccttntgaagccgaagcaataaaaattccagaaccagtattagttgaagaaactgacaccgtcatccccgaagcacctgccagcatgcgtgaatacatgatacgacatgc

SEQ ID NO: 19654 - DNA, 402 bp, Zea mays
  unsure (1)..(402): unsure at all n locations
ttcaaactcagcttaggaagagcgccggtntntttgcttgcgtagtcttctatctactttatgcacataaaggaagctgtcttgtatacatcttttctggatgaaggcactttgggacttggagataagagtgttgaggatgggggctagccggttagcaagcagtttggagaagtattttgcgatgttgtgtatcatactgatggggcggtagtcacccactgtcaaagcttctgacttcttggggataagcacgatgttggcagagttgagtaaacgataatccgccccattcatgctatgaagttggtgaacagcctcaagatcgttctgcttgatgatatcccagcatactttgaagaataaacctgtaagccattctggcctggcgctgtgtcgctc

SEQ ID NO: 19655 - DNA, 457 bp, Zea mays
agcttgaccaagataatcctctctctttaccttcttacatctaccagaacgttcttaaagctcttatcaatcaaaattcctacttcatttctatttgtaattgtccatgtgtaccaaagcttgaagcatgtattgtccacctccttcgccttctaaactttccatttaggccatgtttgggacagctccagctctagaaaatttggtggagttggtggagcaagtcattagatgctcgagaaaatcgtggagttggagttgtaagcatttagaagacatttagataagtcatttcgtttattatttagattaaaaatatttttaaaactattgaaaatggtattataactacaactccacactagaacgggaacctagagtcatcccaaacacccctttagtctcttggacacataagatatgtacacgtcttctagtcgtagtctcaactaactac

SEQ ID NO: 19656 - DNA, 384 bp, Zea mays
  unsure (1)..(384): unsure at all n locations
tacggacctataaaactaagcttacatgtctcgtatgattcanaatcaaacgaagttaanagcccatcataatgaagcttcttcatgcgattctcacttacatgacccaaacgacagtgccacatgtatgtaggacttaaatcattaggccgaggccttttagcactaatattacagataggtgcatcatcaagatttaaaatgaataacccattcataatggatgcaaaagccacaaacatgccattcttagagatcacacaaccattgttttcactcgcaaatgaataaccatccttcatcaaacatgaaggagacataatgtttcgactcatactangaactagataacaattatttaacttcaaaataaatcttgatggg

SEQ ID NO: 19657 - DNA, 457 bp, Zea mays
  unsure (1)..(457): unsure at all n locations
agcttgcttacttggtaagatgaccaaagcgctcttcacggttttactcggagaggacgttagatttattggaactcatacatactgatgtgtgcggaccaatgagtacgacagctaggggaggattccaatacttcataaccttcactgatgattttagtagatatgggtatgtctacttaatgaaacacaagtctgaatccttagaaaagttcaaagagtttcagaatgaagtagaaaatcagcgtggcaagaaaattaaagcactgcgatcagatcgtggtggtgaatatttgagtcatgagtttagcaatcatctaaagagttgtggaattgttccacagcttacgccgcctggaacgcctcagaggaatggcgtgtctgagcgacgtaatcgaactttattggatatggntcgatcaatgatgagccagtcggacctacctttgtccgtttg

SEQ ID NO: 19658 - DNA, 489 bp, Zea mays
  unsure (1)..(489): unsure at all n locations
cgatggtcaagtcaaaaggcaggtcccaatatattttgcttctgaggtccttagtttatcaaagaaaaattatacagagttggagaagatactgtatgctgttttgatggcctccaggaagcttcggcactactttcaagcttacaacataattgttccttcatcacaacctctgaaggatattatgaggaaccgagaagctactggaaggattggaaagtgggctgcagagctcaatgaattctgtattgaatatgttcatagatcttcgattcagtcacaggcactggcagactntattgctgattggacgccaggggctcaggagggggaaatgaatacagataacgaagcctggacatgtgtttgtgatggatcttggngaaccttcggagcangagcggctgttgtgttggtttcaccttccaaagtcaatacttggtatgctgcatagcttgatnttaatngcacaaataacatggctgatac

SEQ ID NO: 19659 - DNA, 406 bp, Zea mays
agcttgccaatacctgtcgaagttcatctcatgccagcgcagcagctacaaaccataccagtaacttggccttttgcatgctggggattggatatgattggacctcttaagaaggctcaaagaggatacacccatgtattggtggcaattgacaaattcactaagtggatagagttccagcccattgcctctttgacctctgctaaagccgtggaattcatacaaagcataatattcagatttgggataccaaacagtatcatcactgacttgggatccaactttaccagttcagaattctttgacttctgcgagcaaaaaagcattcagatcaagtatgcatctgtatcccatccgatagccaacgggcaggttgagcgagccaacggaatgatattggaggcac

SEQ ID NO: 19660 - DNA, 444 bp, Zea mays
  unsure (1)..(444): unsure at all n locations
cgattaanaagatattagcgcgagttaatcaagtctatgatgtgagctcttgcagatacaaacaatcacagagaggagcaacacaagatacacgcgatttttatcccgtggttcggccaagtaacacttgcctacttccacgttgtggcgtcccaatggacgagggttgcactcaacccctttcaagcgatctaatgatcaacttgaataccacgactttctttcttatagtctttctcccgtttgcgaggaatctccacaatttggagcctctcgcccttacaattgagatcacaaaaggcacacagaagtaatggagggaagcaacacatacaatagtcaaatgcgcagcacacacacgcacacaagccaagacttgagctcgaaatgtagcacagtgagttcactactcaaacggagctcanatcacttacacaatcgatc

SEQ ID NO: 19661 - DNA, 444 bp, Zea mays
  unsure (1)..(444): unsure at all n locations
agcttaagagactnttttcacggatcaagctcgttacgaaaaacgatctagcaccgcgaaaggggctactgttgggtctatgcttcctcgccgaaggtcttataaaaagaagtgatcctcggatgaagctgtttgtataaaatagccgaaggttcctcttcgtaaagcttcggcattgcaaaccgacttaaaggtagaatgaccttttagtccataaaggtctgagtcaatgttgtaagtttttataaagggcatacttgtaattcctcacaggctgcgtcctgtgcctataaatagtgaacagtattccgttactgttcacgcattctggtattcgcaattgcatctctcggaataccaacctttgccaaggcataagtatcattatgtttattgattcaatatattaagtgaatatcatatgatacatctgtgattcattca

SEQ ID NO: 19662 - DNA, 368 bp, Zea mays
  unsure (1)..(368): unsure at all n locations
ngaagccatggtaagtagcataggcaagtaatatacgaattgactcaagcctagctacgggtgcataggtttcaccaaaatccaaaccttcgacttgggagtatcccttggccacaaatcgagctttgttccttgtcaccacaccatgctcatcttgcttggtgccgaaaacccatttggttcctacaacattttggttaggacgtggaactaaatgccatacctcattcctcgtgaagttgntgagctcctcttgcatcgccagcacccaatccgaatcttgaagtgcttcctctatcctgtgtggctcaatagaggaaacaaaagagtaatgttcaccaaaatgagcaacacgagatcgagtggta

SEQ ID NO: 19663 - DNA, 451 bp, Zea mays
  unsure (1)..(451): unsure at all n locations
tgcaagcttggctccatctatgttgtggatagctttngagtcccgccaatttccttcagcctttctggcagcttcctgactttcatgaatagcaatgggcccttgatccacaggtatcttcatgcataaatatgctggatgaagaattgcttcgaatgcattgagtgttccacgaccaataattgcattgtaggggtattccatgtcaacaatatcaaacacaacttgttcagttcttgtattgtggacaaatccgaaggtcactggcattgtgatcttgccaagtgctacaatctgccttcctccgaaaccacagagagggtgtgtagcatcatggatcttatcctctggctctagcatctgtctgaaggccttagcaaatatgatatccgctgcattgcctgtatcaaccagaacattgtggactagaaatccttgatgaacaagatat

SEQ ID NO: 19664 - DNA, 437 bp, Zea mays
  unsure (1)..(437): unsure at all n locations
cttcataactcctagtggaacctattgtcggagaccataattatgggtacccccaagactcctaatctcagctggtaactcccatcagcacaaagctgcaaaggcctgatgggcgcgattcangtcaaggctccgtccactcaagggacacgatcccgcctcgcccgagcccagccttgggcaaaggcagctgacccaggaggattcacgtctcgcctgagggtcccctcaagcaacggacgcaccttcggctcgcccgaggcccaggcttcacggagaagcaaccttggcctgatcgccacgccaaccgaccgtattgcaggagcatttaatgcaaggatcgattgacaccttatcctgacgcgcgctcctcactcgacagggccgaagtgaccgcagtcacttcgctgctccactgaccgacctgacaggaaaac

SEQ ID NO: 19665 - DNA, 439 bp, Zea mays
  unsure (1)..(439): unsure at all n locations
agcttggacctctggggggagtttttatggtttagctctctggngacgntcttgcttgtgtgctccgaagacctggaactttctcttgatgcgccctttttctttctctgttgctctttccacttgaatagctttgttggaaaggtgagaaaagctgtggaagtcctggctggcgaggatggtcttaagctcgggtcttaaccctctcagaaaacgagccatctttctggcctcggtgctgacatcctcaagagcatagcgggccagctctgtgaacttgtgcacatactcactgactgtcctcccgccttgagttagctctcggaactcatccttcttgagttgaactatcccctgaagtacgtggtgctcacggaaggctgcttcaaatctgcccatgtggcgtctctgatggcttcactgaaagtgtcccaccatg

SEQ ID NO: 19666 - DNA, 468 bp, Zea mays
tgccaattcctatcaaagcagcagcatataccagcacatcttctgcttaccataccggtgacatggccatttgcgtgctacggattggacatgattggacccttcaagaaagctcacggagggtatactcacgtattgttttccatcgacaaattcactaaatggatagagtacaaacccattgcttctctgacttcagccaatgtagtggaattcatacaagatataatattcacgtttgagataccaaatagtatcataaccgatctggggtccaatttcactagctctgaattcttcgatttctgcgaacaacggtgcatacagatcaagtatgcgtcaatggcacattcaagagccaacggtcatgtataaagggctaatggaatgatattggaagcactcatgaagaaagtcttctacatgaatgaaatgttacacgaaagtggatcacagagtcgtcgtatg

SEQ ID NO: 19667 - DNA, 434 bp, Zea mays
  unsure (1)..(434): unsure at all n locations
agcttctaaagggagaacacgtgatatgtctatcttatgtaactntcgaaaaagatagaccgtgtgcatcttgttcagcaggtaaacaggtgagaagctctcaccataccaaaaatgtgatgaccacatcaagacctttggagctgcttcatatggacctcttcggacccatcgcctatctaagcataagaggaagtaagtatggtcttgttatagttgatgatttttcccgcttcacttgggtattctttttgcaagataaatctgaaacccaagggaccctcaagcgcttcctaagaagagctcanaatgagtttgagctcaaagtgaagaagataagaagcgacaatgggtccgagttcaagaaccttcaagtggaggagtacctcgaggangaanggatcaagcacgagttctccgttcctacacaccac

SEQ ID NO: 19668 - DNA, 389 bp, Zea mays
  unsure (1)..(389): unsure at all n locations
tcggcttcatctatattatggatggccttcaaatctatccatctttcttggctctcttggtagcttcttgactcccatgtacatcaatgggcccttgtttcgaatgtatcttcatgcaaagatatgttgggtggagtattgcttcgaaggcattgagcgtccctcgaccaacgattgcattgtatggatactccatatcaacaatgcaaagacctgtttcgaccaacgtagccgaaggtgaccagcatggttatcttgccgagtgccacaatctgtcttccttcgataccacanagagggtgtgttgcatcatgtatcttgtcatctggctcttgcatttgtctgaaagccttcgcgaaaatgatatncgctgcactaacttgtgtcac

SEQ ID NO: 19669 - DNA, 440 bp, Zea mays
  unsure (1)..(440): unsure at all n locations
agcttctgcatcaaactgagttccgttgtccatagttatagccttcggcacgccgaagcgataaacaatgttttgccagaaaaaattctggactgtgaccgaagttattgtggccaaaggcttcgctttaatccatttggaaaaatattctacagccaccacaacatatcttaaattgccttgtgctggtggaagtggacctaacaaatccaggccccatctttgcaatgaccacgttggctgtattaactgggttagtgacgaaggttgtttctggtctcttgcacatttttgacaatttcgcacttttgaaccagatctgctgcatccgaagctgccttcggccaataaaatccttgtgtgaagaccttccccagcaaaggcctagacccaatgtgagatccacacanacctgcatgtatttccttatcagctctaca

SEQ ID NO: 19670 - DNA, 376 bp, Zea mays
ttaaagatcaagcgctgccaactggattggctttgcagagcttgacgatgatccagatctttatgtgctgaagcctttgaagtatattggaattgaagtttggcaggtagtaaatatatagtattttgctttcaaaaaggatttctttggcataattttagcttattgctgccttcttgactgatgtaagcaccgtgtagacttatatctcaaacgtatgcatgtaaaagctggttcaattttcgacaacattctgatttatgatgaccctgagtatgcaagatagaatgttgaggaaacttcggggtgcaaatacggaggtaattgcagatgaaaatttaccaaattgaactgggcttcttctgcgaacactatc

SEQ ID NO: 19671 - DNA, 410 bp, Zea mays
  unsure (1)..(410): unsure at all n locations
agctttagtcttttgggtagattaagctcacttggtctcattcaatgatttcccaagttaaaatatgaggaagaatttgtatgtcacccttatcatcattgaaatatgggtgttgcttcacatcccccggtcactaaggcgatgatcaagcaacctgatgagttattacacatgaacacatttggtttagattaagttcactctcttggggaatatggtatgttttagtgtgtgtagatactcaacatagatagactataaagataacatagcaacaagaagaagcgaaaccctagctctatntaatctgatttggtgtggccgatagattgcttatataggtatttctaattcaacctcatatcacgctcatgatctaaaccatttanggctcctatctgcaaactgga

SEQ ID NO: 19672 - DNA, 443 bp, Zea mays
tgtacttcaccggctatattaggctttcctttgatccttgctgttatctcacttttgtcttgaggtattcattgcatgcgctgcacggatgtgatagttttgaaaaatatactgataattcctgtgcgtcccccccaatgggtgtgggcaagggacggcttggtacgcttatgtgttggagaactgcttctgagtagtaatttgatgtgaccgcgggtgtaatcatatcactcgtgcggttgactggagtcccaatgggtgtgatccatctgtcgctgatcccaatgggtgtgctgtctgtgttgctgatgaaaacgagaaggaggaagaagatgagatccctttgactcagaagaacagtcggcgatacgtatccagtggggaaaagagtggagttccttctcctgctctgtctgccctcatttgtctacaagaattgtctc

SEQ ID NO: 19673 - DNA, 428 bp, Zea mays
  unsure (1)..(428): unsure at all n locations
agctntgagagtaagaatgagaganagaagaaagcaatccaatatcaagagctcaaagaacacgaacaaaacactctatctagttactatttgtttggagtggatttgggacttggagagactttgattctattgaattgtgtcttgtattgattgcactagctcttgtattgaatgagatgtctaaaaaacttggatggttgagatggtggtggttgtggagtatttatagcctcaaccaccaattcaaccgttggggcaagctgctgtctatggacgcaccgaacagtacggtgcaccaccggacactgtccggtgcgccagtcacgtcacccaaccgttatggttctaacagtttcgaccgttggagctctgtccttatgggggcaccgacagttcggtgccgcaccggacaggtactgtgcact

SEQ ID NO: 19674 - DNA, 442 bp, Zea mays
  unsure (1)..(442): unsure at all n locations
agccaatacttgtcaaagcaacagcacgtgcccgcacagcaactacaaaccataccagtaacctggcctttcgcatgctggggactggatatgattggacctttcaagaaagctcaagggggatatacacatgtattggtggcgattgacaaattcactaaatggatagagttcaagcccattgcttctttaacctctgctaaggccgtggaattcatacaggacataatattcagattcgggataccgaacagcatcatcactgacttangatccaacttcaccagttcagaattcttcgatttctgcgagccaaagagcattcagatcaagtacgcatctgtagcacatccaagagccaacgggcaggttgagccggccaacagaatgatattggaagcactcanganaaaagtcttcgataagaatgaaaaattcgcgg

SEQ ID NO: 19675 - DNA, 318 bp, Zea mays
cagcttgcttcgctcttgttgtgatataccgattcttttctagtatccaagctcctataatattcagcaacatgttgaaagcaaatgggttgccgtggttttgaagaccttttaaagaggtatgcccccaacattagtgtcggtgttttgggtcccaccgcgcacccggggttgccccttgaggtgctttttggagtaggacggtgttaccgactgtagctcgattggtcgcgctatatgcacgagagatagtggacgattttgtatatgttccaagccgttcgagatgcataacactctacgtcctggcgtgagtac

SEQ ID NO: 19676 - DNA, 400 bp, Zea mays
taagatgatggcgatcaagttcaagacaatgagcatactcaatatggtggcatggatggcagaacaagaagaacaagagctagagaaggacgatgactatgagattcaagctcaaagcccaccgcacctaagagtccatcaagcaattcaacgagaccaccccgtcgacttcattctcggtgatattcaaaaggggggtaccactcgctctcgaaattgctaattctaggaaaattactcttttggtcttctattgagcctttaagggataaagactcacttagagatctggactgataggatacgaaggcacgatcttccgtggggacgataacttgattgtggagatctcgatgttatgatccaggcttcatcgacggatctccaatactacccattg

SEQ ID NO: 19677 - DNA, 444 bp, Zea mays
  unsure (1)..(444): unsure at all n locations
agcttctaaagggagaacacattntgagactaacatatgttcattttgataaagacaggatttgtagcgcatgccaagcagggaagcaagttggcgttcatcatccacataagaatatcatgacgactgacaggccactcgagctcctccacatggacctattcggcccgatagcttacataagcatcggcgggagtaagtactatctagttattgtggatgattattcttgcttcacttgggtattctttttacaggataaatatcacacccaagagactttgaaaggattcttgagacgggctcaaaatgagttcagcttgaggattaagaagataagaagcgacaacgggacggagttcaagaactcacaaatagaaagctttcttgaggaggaaggcatcaagcatgagttctctttctcctacacgccacaacaaaatg

SEQ ID NO: 19678 - DNA, 371 bp, Zea mays
  unsure (1)..(371): unsure at all n locations
agcttctaagggagagcacattntgggactaaccaatgtttattttgagaaagacaggatttgtagcgcatgccaagcagggaagcaagttggtgttcatcatccacacaagaacattatgacgactgacaggccactcgagctcctccacatggacatatttggcccgatagcttacataagcatcgacgggagtaagtactgtctagttattgtggatgattattctcgcttcacttgagtattcttgttacagaanaaatctcaaacccaagagattttgagaggattcttgagacggactcaaaatgagttcggcttgaggatcaagaaaataagaagcgaanatggaacggagttcaagaactcac

SEQ ID NO: 19679 - DNA, 295 bp, Zea mays
  unsure (1)..(295): unsure at all n locations
cttggttaaaatttggagcaaacaggcacatgcaatgtatgttgggaacttgaccctactgcggtgttatatagtactgcacgtaagaaggcgaatcgccaggattcttacaccatgcggacagccgcttgcactcgctgtgtggtggaccgcatagaccaaacagtaactctgcgaggtgggaccgttacgcgctgggaaactgtatcgcttctcgacaacgagctcaaggtatgtgtttnttggaccttcggcttcccgaagcttaagagactgttttcacggatcaagctcg

SEQ ID NO: 19680 - DNA, 436 bp, Zea mays
  unsure (1)..(436): unsure at all n locations
agcttgctacaagccttattctttttctccatatcatgaaccttattggaatactaccccacttaaaaagaatgagggtagaactcttgaatcttgggggttttgaactccttgaagtaccacataacaagggtgttacgggtccttctgctactagtgctgcttgagctggctgcggagggatgactggcataaggttgattctgggagaaccttcttcttatcttctcttcactatcttcttttctcttctcatttttcacttttcactgcctctttctttctctttgctcttcccactggagaagtctatcgatgagtattactatcatacagaggaggaaaccaaagactatgaaccatgtgcaacagtcttcaacccanaaatcaccaagcattgtgatcttatgggcgagggagtggaaaatggagttgc

SEQ ID NO: 19681 - DNA, 406 bp, Zea mays
  unsure (1)..(406): unsure at all n locations
ntgaccatatgtgtttatgcttttatgtcatatgcaatggaatntattggaagtgtttggtcataattcttgtcgacacgaattaatagtctggaggcacaaggtggcaaggagaggcctgcctcaccctcaatgatgtctgttatgtgaccaggaggaagaaactatgaatcatctgctagtttcctgtgtattctcaagggaagtctggtttaatatcctgaaaacggtcggtttgcagcacctctctcccagtctcaactctacttcctttgatgattggtgggagaatgtaaacatgacccttattagcccctccaataagaagctgcgcaaggggctgaactcccttaccattttangagctngggccatttggattcatcgcaatcaatgtgtcttcaac

SEQ ID NO: 19682 - DNA, 445 bp, Zea mays
  unsure (1)..(445): unsure at all n locations
ttggcatgctttggattccgtggcttcagcacgaattctttaaatgagcccgtttgctttcctgaaaagacaccctgcctacattttatctgaagaatagggaaataatgcgactatattcctacattgacaggtactttgtgtaacatggagcatctcattcccatttctcaagatatggtggtgatgtgtggttcccacagccagcaccaaaggatcacccctggcgctacatgcctaaccatgccatggcccctcacatctctgggactacaattgatgcgcangtcangttctgagttttgttacctgagtttgaaaatctatctaattctaatacctcatangacactangtctctgcttcatgcattagcagaactcaatagaatggcaatcaccttaaggctttactggattaaaatcgtactgagaactggaacaat

SEQ ID NO: 19683 - DNA, 428 bp, Zea mays
  unsure (1)..(428): unsure at all n locations
tgcagcttgagttagaaggaataacactaacgcatganatggattggtggacatacatttggggttctcacatttacacatcagctcgggcttataagtatctaattgggcatactgaaatacatccagttttcaagtggctatggaaatcctcttgccagcacaagcacaaagttttcttttggctgctcttaaaagagagactgagtactagaaatgttcttaggagaaaaaacatggatctcccctcctatgactgtatcctatgtacccagtgtgtagaagaaacagtagaccacattntcatcaagtgtgactntgcacagcagcaagatgactccttggctgttcttgagagcttcaaaaggcaattgggagttccattgtacacggaaataaccgtcctcatgtgttggagtatatggact

SEQ ID NO: 19684 - DNA, 427 bp, Zea mays
  unsure (1)..(427): unsure at all n locations
cagctttgtgtgaaattgggagaagatttgatctcttgggtgtgtctacaattgaatgatggagctcttgttagtagttggaaggtggaaaactttgatgacttgaatgtggggtggntggnggntctctcctccttctctccccctcttctcccctctcccctcacncttctcctccctctttctccctcctcctcctcactctactctcaccttcatttcctctctcctctcctccctcttctctcttccactcctctctccccttcacctcccccctcttctcactctttcatcccctaatcctctcttctttctccttctccctccccctcccttcctcctcctctccccctccctctcctccttcctctctctccctttcctctctcccatccctcttcctcctcccccccctctctccttc

SEQ ID NO: 19685 - DNA, 410 bp, Zea mays
  unsure (1)..(410): unsure at all n locations
tcacataaatgaacgaaaatggagattcgcaggatatatttttgattcacatgggtcaagttaagatggtagatatcaaggaggccgcggaaaaagggagaaatgggaagaccgacgccgcggagaatgaagggagcataaatcacggactcatgggtatccttagttgggacagtaaccccatggcaaatccgccaagaacagagttccctcggagggagaaccccgatggacacaaggtggagaagttcgggctcagagatgatggacatgtggttacctgcgaaaggcaactggctgttggggtcgattggaggaatcaccacggcagacgaactcgaggctntcctcttgggcgccatctcgattctattcgcgagcaaagtacgaggcgaattgctgaggggatt

SEQ ID NO: 19686 - DNA, 446 bp, Zea mays
  unsure (1)..(446): unsure at all n locations
agcttgaagccatggtaagtagcttatgcaagttatatatgaattgactcaagcctagcaacgggtgcatatgtttctccaaaatccaaaccttcgacttgtgaatatcccttggccataagtcgagctttgttccttatcaccacaccatgctcatcttgcttgttgcggaaaacccacttggtttctacaacattttggttaggacgtggaactaagtgtcatacctcattcctcgtgaagttgttgagctcctcttgcattgccaacacacaatccgagtctcttactgcatcctccaccctgtatggctcaatagaggacacaaaagagtaatgttcacaaaaatgagagactcgagatcgagttgttaccctcttatggatatcaccaagaatggagttgacggggtgatctctntgaatcgcttgatggactcttgggtg

SEQ ID NO: 19687 - DNA, 415 bp, Zea mays
tgtgaaggttcttcatcctcacatgtgctaagcggcgatgctacagccagcccatgctagtcttagctattaagcatgcatctagaccggcctcttcttttgcaaaatcaactaaataaagtttgccgtctaatacacccttaaaagctaatgaaccatcgcttcttctaaagacagacacatctatatttgtaaatagacaattatatcccatatgacataattgactcacagatagcagattgtatccaagactctctactaaaaatacattagagatagaatgctcattagaaatcgcaattttacctaaaccttttaccttgccttgattcccatcaccgaatacaattgaatcttgggaatctttattcttgacgtaggaggtgaacatcttcttctcccccgtcatatg

SEQ ID NO: 19688 - DNA, 407 bp, Zea mays
agcttgatgataaacaattaattttacggtgtgtttatattgatgagtgaaataggggagcgtgaaacaactcagtttagggataaagagtatctccaacagtctctaaacaatttgctaaattttaaatttaagaagtaaacaaaaaatcgcttctccaatagttatctaaaaaacatcaaatatagtgtcggggaccataattaggtgtatcctcaagactcctaattctcagctggtaacccccatcatcataaagctgctaaagcctgatgggtgcgattaagtcaaggatcagtccgttcgagcgactcgatcacgcctcgcccgagcctagcctcggacaagggcagccgaccccggaggatttccgtctcgcccgaggcccccctccgacagtgaacata

SEQ ID NO: 19689 - DNA, 446 bp, Zea mays
  unsure (1)..(446): unsure at all n locations
ntcgccggcaatttccagagcacgtacgtgcgccccgggaattcctgggacctctaaagctgccggcagcagccgggagagtctctccgggactacatccggcgattttcgaagcagcgcaccgagctgcccaacatcaccgactcggatgtcatcggcgcgttcctcgccggcaccacctgccgcgacctggtgagcaagttgggtcgcaagacccccaccagggcgagcgagctgatggacatcgccaccaagttcgcctccggccaggaggcggtcgaggctatcttccgaaaggacaagcagccccagggccgcccatcggaagatgctcccgaggcgtctactcagcgcggcgccaagaagaaaggcaagatgaagtcgcaaggcaaacgcgacgccgccgacgcggacctttgttgccgcgccgagtacaagaaccctcg

SEQ ID NO: 19690 - DNA, 410 bp, Zea mays
  unsure (1)..(410): unsure at all n locations
agcttgtgaagattcttcatcccaacatgggcttttctgcggngccagagccaacccatgttagtcttagcaattaagcatgtgtcgagttcagctctttcaaaatctactaagtatagctgaccctctaacatacccttaaatgctattgaatcatcacttcttctaaagacagtgacacctacatcagtgaaaagacatttgtagcccattttgcataattgagatacagaaagcaaattgtaatccaaagagtctacaagaaaaacactggaaatagaatggtcaggtgatatagcaattttacccaatcctttgaccaaaccttgatttccatccccgaatgtgatagctcgttggggatcttggtttttctcataagaggagaacattntcttctcccctgtcat

SEQ ID NO: 19691 - DNA, 365 bp, Zea mays
  unsure (1)..(365): unsure at all n locations
tctaagggagaacacattntaagactaacaaatgttcattttgagaaagacaggatttgtagcgcatgcgcagcaagaaagcaagttggcacacatcattcacacaagaacataatgacgactgacaggccactggagctcctacacatggatctattcggcccgatcgcttacataagcatcggcgggagtaagtactgtctagttattgtggatgattattctcgcttcacttgggtattctttttacaggaaaaatctcaaacccaagagaccttaaagggattcttgagacgaagctcaaatgagttcggcttaaggatcaagaaaataagaagcgacaatgggacggagttcaagaactc

SEQ ID NO: 19692 - DNA, 444 bp, Zea mays
  unsure (1)..(444): unsure at all n locations
agcttgtgatcttattataacaattataatatgatatcacatcaaactgcatgcacacaagacgctcgcagctaacctcactctggccggctacaaatagaaccccatcgattaatgtgggttacagttttgtttaatgcagatgaatgatggagaaagctaaatcatatttttatggtatattataaactaatattttattgaataatttgtgtgccgtcgcaacgcacgggcattatactatttgttattatcttgcaacggatgtggtactccccctttcctaagaaggtgtcctcgccgatgtgccgccttctaacaagatgtgttcatcctactattattatctgcaatttgctctcatatgagtatattgctccagataattnttttatccttattacagctcgtgtttttagaatattgataccatgttcacaattg

SEQ ID NO: 19693 - DNA, 419 bp, Zea mays
  unsure (1)..(419): unsure at all n locations
tgtgaaggttcttcatccacacatgtgctaagcggctatgctccaaccagcccatgctagtcttagcaattaagcatgcatctagaccggcctcttcttttgcaaaatcaactaagtaaagcttgccgtctaatacacccttaaaggctagtgaaccatcacttcttctaaagacagacacatctacatttgtaaaaagacaattatatcccatattgcatagttgactaacagatagcatattgtaaccaagagactcaactaaaaacacattggagatagagtgctcattagaaattngcaatttacctaacccttttaccttgccctgattcccatcatcgaatataattgaatcttgggaatccttattcttgacgtaggaaggtgaacatcttcttctccccgcatatggtttg

SEQ ID NO: 19694 - DNA, 379 bp, Zea mays
  unsure (1)..(379): unsure at all n locations
gcttgctacaggccttcttctttntctccatatgaaccttactggaacactaccccacttaaaataaatgagggtagaactctcgaattttggggatttgaactccttgaagtacctcataacacgggtgttacggggccttcttctgctgttgatgcttgagcaggcagcagagagatgactggcacggggttgattctgggagaaccttcttcttagcttctcttcactatcttcttttcactgaccctctctttctctttgctcttcccactggaggattctatcgatgagtattaccatcatacagaggaggaagccaaagactatgaaccatgtacaacagtcttcaacccaagaatcaccaagcattgtgatc

SEQ ID NO: 19695 - DNA, 369 bp, Zea mays
  unsure (1)..(369): unsure at all n locations
taatgaagatcagtagaaatgtactataggataagactcacgatacttttgttacaagttntgtgaatacaattgaactgctctcgaggaactttgtacataccttgtaatatattcttacccttcgattgaatcgctttgatgtggacgaaatcagtattttgagccgaaggcgaaaaaacaccttcccttcttttcgtacacaacgaagcctatacggccgcttcctctttttgccaaagcttttcttcatatagcaaaacataaaaaactacttcttctttctgccgaagtttttacatagcaaaacataaaagactacttcttccttctgccgaagcttttacatagcagaacataagagactac

SEQ ID NO: 19696 - DNA, 428 bp, Zea mays
  unsure (1)..(428): unsure at all n locations
agcttactcctncctggaaaggccgttcatcatcgccaacattttgaagcccggaacatacaagctggccaacgatcaaggcgaggtctacagcaatgcttggaacatccaacagctacgtcgcttctacccttaaaatagttcaagtcattcatatacctcgttttctttacatacataaataaagtctaaccgtcaaggaagaattagccttgtctcggcaaagcccgaccctccctcgggggctacaaggagggaaccccctctgcgtcaaaagtttcctcggaaaagtcttttgccagaacgtctttcgcgctnttcgactgcttcgatagcanggtcgtaaaaacgacgagagtacgcctaagcggcaaggccgaccgagccganggactcctacgccctcggatacggatacctcactcatc

SEQ ID NO: 19697 - DNA, 441 bp, Zea mays
  unsure (1)..(441): unsure at all n locations
ntccacccacgataagtacactggaacagatcatatccgcactgctatcggatcaggtatgaacattaaccatatcggccatgctattatttgtacccctactcgtcacttacatctaaataatgttcttcacgttccacaagccaagaaaaatcttgtttccattcatcgtcttgccaaagacaataatgattttcttgaatttcatcttgattcattctttatcaaggatcaggcaactgtagatgccttcagtgctgtcaaagcctctaccacaagatggcacagtcggctaggtcaccctggcttttccatagntcagtgtgtcattagtgaaaataagctgccttgtgctanggaggttcatcaacactccatgtgcaacgccttgtagcaagctaagagtcaccagcttccctaccccaagtcatccaacacctc

SEQ ID NO: 19698 - DNA, 383 bp, Zea mays
agcttgagaaatatctggatacagttcgaaagcttgaagcttctttcgaagggttttctgtcaagaatattccacgaggagaaaatgaacacgctgatctgctagccaagtcagcggcacaggggctgcccttaccttcggaagtattctttgagacaataagagcaccttctgtggaacttcttgaagaacagtgctcaatatatctcctgttcatagtgaagattggagaaccgagattatatcatttctccaaggcaaatgcctttcagatgatgaagcttattgtcggcgtttcggacccggaggaccctcaaccgagccgaccagtgaaattatcgctgtgtgcccctgcccagatgggttggcgcaagatggaacac

SEQ ID NO: 19699 - DNA, 436 bp, Zea mays
  unsure (1)..(436): unsure at all n locations
tgacggcacccctcagtataacatgactgcagagctaactgcattggtttgattnctttgacttcctcctagatgtctaattttataagtagcacattttatcatcagtgaagaacttcagtatcactgcttatgctttcgtctcgtttctctaggccctatctgttgatgaaatccagctccaacatatcttaaatctttgtgagtacttcactatctgtgctttgcgaacaaagtaagctattctagtttagatggctaacaactcctatttgcttattaaatgcattgccatttatntttatacggaaatcatgggttcctttcgtcgttcttcataaaatatactattcctgccatgaagtcattctctgttccactcaccgttgatccttctatctttgaatggatatggtctgtattttatatgtaattt

SEQ ID NO: 19700 - DNA, 395 bp, Zea mays
agctagtcaatacttatcaaaacagcaacatttatcagcacatcaactgtaaaccatacctgtaacatggccattcgcgtgctggggactggatatgattggacccttgaagaaagctcaaggaggatacactcatgtactggttgctatcgataaattcactaagtggatagagtacaagctcattgattctctaactttggccaaggcagtagaattcatacaagacatattattcaagttcggaataccgaacatcatcataactgacctaggatccaatttcactagttcgaagttctttgatttctgcgaacaaaaaaagcatccagatcaaatgcatcagtagcacacccaagagccaacgggcaagtagaaagaccaacggaatgata

SEQ ID NO: 19701 - DNA, 456 bp, Zea mays
  unsure (1)..(456): unsure at all n locations
agctagctcatgccttcttctttctctccatagcaggaactatagtgtatcactaccccacttaagaagaatgatggtagaactcttgaatcttggggatntgaactccttgaagtacctcataacaaggttgttaaagggccttcttctgctgttgctgcttgagcaggctgcggagaaatgactgacacagggttgattctgggacaaccttcttctcatcttctcttcactatcttattttcactgcccctttctttctctttgctcttcccactggaggattctatcaaagagtattaccatcatacagaggaggaaaccaaagactatgaaccatgtacaacagtcttcaacccaagaatcaccaagcattgtgatcttangggcgagggagtggaaaatggagttgcttgctatttggcagatgggattatctggagtcgtgcttgtttg

SEQ ID NO: 19702 - DNA, 445 bp, Zea mays
  unsure (1)..(445): unsure at all n locations
caagcttggaattacaaaccgacatataagtagaatgaccttttagtccataaatgtttaagtcgctgttgtaatcccttatgaggggcataattgtaattcatcacaggctgtgtcccatgtctataaatagtgaacagtattcctttactgttcacacgttcctgtattggcaatcgcatcattcgggaaccaatctttgccaaggaagaggtataactgtattcaatgattaaatataatgagtagatataatatggttcgtttatgattcatttacctttgatactctatattntatgttatcttatacaatctattaaaattcaattacgaagatttaaccttcgtaatcgtattatcatcaaccttcgtccaaggtccattagtcctcagaggaataatgcttcattggacgaaagacattaacatttaacattctatg

SEQ ID NO: 19703 - DNA, 371 bp, Zea mays
  unsure (1)..(371): unsure at all n locations
tcgggaaaccaatactctntgatagagtaccaataaccttctctccagtgtgatcccggacacagcccaacttttcgtcatcgacaccaccaaagagaagtgcccccgaccgatatccgcaagatatggcatactcttttagctcttctttttcagcctttgtcagctcttgtccaactaagttttgaaagttaaaaatttcatcttccgaagtgtcttcggttatttctttcttcttctcgagctccggggccgtagtctcttcggtggctgcagcagctccttctgcggccatgtctagcagtatcttatcaatatcagcaattgtgctctctaagagaatatcttcggctgtggcagcttcggcagct

SEQ ID NO: 19704 - DNA, 433 bp, Zea mays
  unsure (1)..(433): unsure at all n locations
agcttgtggaaagaccagatcatcgaagcttataagtttctagatgagaagtggtcacccaagttttattgatgaagcaccagaagaccaatcaaggaaggaatccatgtgggagttcgcaagaagaaggtttgcgtgttggcatcgatgcttcttcaataagctagttgccaagcgaaagctagaagcctaaagatgatcttgagtagccagaatcagcgtttgcaattagtagccggatgctccgcaagggccagattttgttgaagttccatctcctcgaagagtctacaaagtgaagatatgcagctgaagtgaagctatacccataacccttctaagccgaatctcgaggacgagattcattttaagtgcggtagaattgtagcatcccacaaattcaaatcctgaaattttntctcaaacttgctct

SEQ ID NO: 19705 - DNA, 399 bp, Zea mays
  unsure (1)..(399): unsure at all n locations
ntaccaaatggacgtgaaaagtgccttcctcaatggaccaatcaaggaggaagtctatgttgagcaacctcccgactttaaagatagtgagtaccctaaccacgtttataaactctctaaggcgctttatgggctcaagcaagccccaagagcatggtatgaatgcctaagagattntcttatcgctaatggcttcaaagtcggaaaagcctatcctactctctntactaaaaccattgcaaatgatttgtttgtatgccaaatttatgttgatgatatcatatttgggtctactaacaaatctacttgtgaagagtttagtaggatcatggttcanaaattcgagatgtctatgatgggggaagtgaattatttcctangatttcaagtgaagcaact

SEQ ID NO: 19706 - DNA, 384 bp, Zea mays
agcttagtgcaagcgtgtggaatggaaagacttctaatcttatgtgcatgcatggcttgagtgacaggcaaggtggaacggatggaaaactggatgaggcgcgcggcgactggcggtcaggctgttcagtcttgcgtctgggctgaaaacgaggtgttcgccatggcgcacgggccgaaaacggaggctcgggcacgaactcgaaaataagctaaattcaagcatgtggaaagacaccgaacatacagtgtatgtctttggtgaaaggcacagtggaacggagggaaaacgacacggaggcacgcggctactggcggcatggctgttcggccttgcgtttgggctgaaaacgaagcgttcgccatgtcccgcgggccgaaaaca

SEQ ID NO: 19707 - DNA, 370 bp, Zea mays
  unsure (1)..(370): unsure at all n locations
ntatttcggggtcgtgcccgggcctcagttttcggcccgtgcgccatgggcgaacccctcattttcggcccagacgcaaggccgaacagccatgccgcccgtcgccttgcgcctccgtgccgttttccctccgttccgccatgcccttcacccaagacatacatattaccttcggtgtctttccacacgcttggacttagcttatttccggtgccatgcccgaacctcggttttccgcccctgcgccatgggcgaacccctcgttttcggcccaaacgcaaggccgaacagccatgccgccccgtcgccatcctgcccttcacccaaggcatacgtcgcagcttcagtgtccttgcacacgctnggactt

SEQ ID NO: 19708 - DNA, 450 bp, Zea mays
agcttagcaagtgcgagttctttatcagcgaagttctgttcttgggtcatattataaatcgagatggactagctgtggatccaaagaaggtagcagcgattctagactggaaagcaccaaaagatgtccgaggaatcaagagtttcattggaatggccggttattatcggcgtttcattgaaagtttctccaatattgccagaccaatgatagccttgctagcaaagaaggttgagttcaagtggaccccagcgtgccaagaatcatttgagatgttgaagcagaagttgacaacatcaccggtattggttctgccagatgttcacaatccattctcagtatattgcgatgcttcatgcaccgaactgggatgtgtgttaatacaggaagggaaagtagtggcatactcgtcccgacagttgaaagttcatgagaaagaataccccactc

SEQ ID NO: 19709 - DNA, 448 bp, Zea mays
  unsure (1)..(448): unsure at all n locations
cttagcacttaaattcttatttttcatgcaattattggttcttgaaatatgcatgaggtactgcacttagggggagtattcaaaactcaaatcactcttgaaaacccctagtgcaagcacaaatgcaaatttcaccatttgcctattttctctaaaaattaactagcctatggcaaaatattttgaaaagtatatgagagtgccaatacctatcccaacaagtgttattntgtgtgattataagttgggatttggtttggttaggagttagatagaaaaattcaaaattttccaaactcccctctgtctgggctcaccggacagtccggtgtgcaccggacactgcactgtgcaatgtccggtgcaccggcagccgcgcgcaaaattcctctnttcctgtgcgctgtccggtggttcaccggacagctactgtgcacttgnccggtgt

SEQ ID NO: 19710 - DNA, 447 bp, Zea mays
agcttgaagccatggtaagtagtatatgccagttatatacgaattgactcaagcctagctacgggtgcataggtttcaccgaaatccaaaccttcgacttgggagtatcctttggccacaagtcgagctttgttccttgtcaccacaccatgctcatcttgcttgttgcggaagacccatttggttcctacaacattttgattaggacgtggaactaaatgccatacctcattcctagtgaagttgttgagctcctcttgcatcgccaccacccaatccgaatcttggagtgcttcctctaccctgtgtggctcaatagaggagacaaaagagtaatgttcacaaaaatgtgcaacacgagatctagtagttacccacttatgaatgtcgccgaagatggtgtcgacagggtgatctcgttgaatggcttggtggactcttgggtgt

SEQ ID NO: 19711 - DNA, 446 bp, Zea mays
  unsure (1)..(446): unsure at all n locations
tcggtgttacaaaccgacttaaagatagaatgaccttttagtccataaaggtctgagtcaatgatgtaaacttttataagggggcatactngtaatttctcacaggctgcgtcctgtgcctataaatagtgaacagtatccctttactgttcacgctttctgatttttgcaatcgcatcttttgggaatcaaactgtgccaaggcaaaggtataaatgtattcaatgatataacatgattcatttgtgatttattcacctttttatatcctttattttattttgtcttatgcaactcatcaaaatctaattacgaagacttaaccttcgtaattatatttttattaaccttcgtccgaggctcattatcctcaagggaataatgtttcacggacgaaggacgttaatcattaacattttatgttgccttgttcttaattcatagca

SEQ ID NO: 19712 - DNA, 429 bp, Zea mays
  unsure (1)..(429): unsure at all n locations
agcttggatattcttcatcagaacactacggtatattgttgtgataaatgaaaatccttcttcatgaagcatgaaaagaaaggaaggtgttttttcgtcaaagactcaaaaacggtacgtatgtaaaatttcatgcatcgtaaagaattgaaccataaaagcaagtgtattacattcagggttacaagatgttacacatattacatttcagaagtttttacaatagcacttaatcttctctaagtacaacttccgcagcttcgttcaagagccgattaacaacttcatccatgatagcttcagccatttcgtcgtctcctttcgggtgaaggcccggaggcgctttagtaggatctgaaagaggacaggatacggctacattgctattancaaatgcgaacaaagtttanaaccaaaaattacaacaca

SEQ ID NO: 19713 - DNA, 482 bp, Zea mays
  unsure (1)..(482): unsure at all n locations
tatcaagattcaaagactctgttgcataanagcttactatgagtggatccttaaaaattcattnttagtagccatcttttatcatcctttcagttcacttgttgctacgtgtagggcagtgaccaagttttcatgttcgataagtaacggcgatccgaatcgattaataccaagccggggatctccaatctcacgacatatgtagcacttaaccctcccatatgtcaacttgcacccgggtttctcaagaccagaatgggttcacgccaaccgagagcacagatactccaccatccagcctcttgccacagagggtacacactactctcgtcatctctccactcccattgcgtggtagcctttctagtattagtccgaccgaggcanagcttacccatgacgaggcatgtggccagttaaaaggtcctcgatcatcaagcctacatcggttcttaagcgactcagacggagacactacaccg

SEQ ID NO: 19714 - DNA, 438 bp, Zea mays
  unsure (1)..(438): unsure at all n locations
actcgccagccctgatatcccattcatatgcatctctaccagcagtactggcgacagtatttccacgcagagcaagatcccaaacccagtctgcatgcatgaacttttgcacacactccatctggtctctgtcccaaacacgaacagtcatgtcccaagaaccactataaatcctcagtgaatccagggcaagacaagtcacaggaccttcatgaccccagaggcgaaactccgcattctggtcggtaccacttccagagatgtgaaataattgaccattgccttcaacggccctccaacactgaatataggcattagttcctccactcactaaaagcctcgagtcagctgcaatcgcccggatggtgccaccaagtgcacgggatgtatcaatcaataacccttcctccatcttccacatnctaaccacagaatcgc

SEQ ID NO: 19715 - DNA, 460 bp, Zea mays
  unsure (1)..(460): unsure at all n locations
nttcgcaagcgcgctgacgtcgtccacttgctcgggtttggcgtgtcgcggggagacagcgctcgccttcgtctcaaacgcgaggttgacgcccgacgcgccccccgttggggcgctagggacgtcgactcgctcgacagccgacgaggcgcgacctcctgcttggccttggttgccccgcctcctcctccgttggcgggggagaggacggtgcgagctcgaaagtcgttcttccaccacgcggggaagacgtcgtcgattccgccgccggagggcgggctgtctgccgccattgtcgttgtcgcgcggcggtggaaggagtatcatgtcgtatctaccgtcgaaagacatgaactctaggcttttganacagagcaccgtcctcggttggagaggttgctggagacttgccatctggagcttgacagaaagctggtcattaacacgctacatgccccta

SEQ ID NO: 19716 - DNA, 445 bp, Zea mays
agcttcttgatattttagagactcggaatccattttatatcaactgactaagagactgtgattcaatacaactaataggtagttggttcaaaagttactagtaaaattagttggctaataacggaactattagttatagagtttggatgtcttatactaattttattagtaactattagatctagtatatttgaatggggcataaactttaatcattttattttagtacatgagatccaaacatgttctagtcttcaccgcgcgaacaaccatgagtaattagtctggttagccatagctgggttgaattctttgtattcaatattttcttcctaaaaaatccatgtttacactttggatggtcataaatccaattttaccaaatatttcaatgtggtaacctactacaccgatgtaatatagctcagtgcaatagatcatgaca

SEQ ID NO: 19717 - DNA, 359 bp, Zea mays
  unsure (1)..(359): unsure at all n locations
ctaacgtaagcaatttagatatccatcttgttggtgatctctcaaaaagtgatatcggatgtctatctgcttagtgtggctgtgttcaatgggattatcggccatgcagattgcactctcattatcacaaaggagagggactttgctcaacttttagccatagtccctaagggtttgcctcatccagagtaattgtgcacaacaatgtcctgcaacaatatactcagcctcggtggtggatagagctactgagtcttgtttctttgaagcccaagatatcatagatcttcctagaaactgacaagtccctgatgtgatcttcatgtcaattntacatctggcataatcggcattgaaat

SEQ ID NO: 19718 - DNA, 458 bp, Zea mays
  unsure (1)..(458): unsure at all n locations
agctntatcaaatggacgtgaagagtgccttcctcaatggaccaatcaaggaagaggtctatgttgagcaacctcccggctttgaagatagtgagtaccctaaccatgtctataaactctctaaggtgctttatgggctcaagcaagccccaagagcatggtatgaatgtcttagagattttcttatcactaatggattcaaagtcggaaaggccgatcctacactctttaccaaaacacttgaaaatgatttgttcgtatgccaaatttatgttgatgatattatatttgggtctactaacgaatctacatgtgaagagtttagtacgatcatgacacagaaattcgagatgtctatgatggnggagttgaagtatctcttaggatctcaagtgaagcaactccaagagggcactcttctaagccaaacgaagtatactcaagatattctaagcaag

SEQ ID NO: 19719 - DNA, 443 bp, Zea mays
  unsure (1)..(443): unsure at all n locations
tgacaatgaggagatggcgctcgtcatcaagagcttccgccatatccttatacaaaggagggggaaagactacaagtcccgctccaagaaggtttgctacaaatgtggtaagcccggtcattttattgctaaatgtcctatgtctagtgacagtgaccgaggcgacgactataaggggagaagaaaggagaagagagggtctacaagaagaagggcggcgatgcccatgtttgtccggaatgggattccgaccaaagctcaagcgactcctccgacgacgaggacgccgtcaacatcgccgtcaccaaaggactcctcttccccaacgtcggccacaagtgcctcatggcaaacgacggcaaacggaaaaagttaaatctaactcctncactaaatatgaatcttctagtgatgataatgctaatgatgaggaggataattta

SEQ ID NO: 19720 - DNA, 286 bp, Zea mays
  unsure (1)..(286): unsure at all n locations
agctttgtgtggaaattgggagaggatntgatctctttagtgtgtctagaattgaatgcctagctcttgttagtggttggaagtgtgaaaacttggatgtaatgaatggtgggtggttgggggtatttatagccccaaccaccaaactagccgtttggtggggctgactgtcgtatggtgcaccggacagtctggtgcacaccggacatgtccggtgtgccagccacgtcaccatagccgttgggttccgaccgttggagctctgtcttctgggcccgcctggatg

SEQ ID NO: 19721 - DNA, 452 bp, Zea mays
tgcacagaataattgggatttcagatttcatcttgtgcaataaattttacttcaatgtcctagcacataattgctgaaagaagttaccaagttcagcaattgctatgtacatgtcattatccatgatgcctcggagagcggcaggtaaaatccggtgtagtattatatggcaatcatgagtttttaacccttggaggttacatccatcagcagtaatgcatgtcgctaggttagaagcatatccatctggaaactttacacttcttagaaagtcatagaaagcaagcttctgttttttatccatcgtgtatggagcaggaggagcactatatgaatctccatcacgcttcaagtgcaaatgttttcgtatgcccatgtcttccatgtcaagcctagcattaatactatcctttgtcttcccaggaatacctagtaatgtaccaagaattgac

SEQ ID NO: 19722 - DNA, 335 bp, Zea mays
  unsure (1)..(335): unsure at all n locations
agctttgacatcagttntgtcgcggagtgtgtagttttacataccaaacttggcgccggtctatctcctaacctagggcgtatcctnccttggaactcacatgaaataggtagctctaggtgcatggaagagatctttcacagtcgacatggcgagattcgtacgcttggccgctcagcagagcgaagaacactggcagaagcaacgcgccacgtgttcgacgcgttctgccgcgccagagcacgcccgcgcgcgccctcgcgagccccgcgccgcgcccgagccaaagccagcgccctggtccgcgtccgcgcctataaaagcctcccgagcgt

SEQ ID NO: 19723 - DNA, 430 bp, Zea mays
  unsure (1)..(430): unsure at all n locations
ggcttgaccacacgagagcatccccacccttatcacattcaatgttttaactacagcggtaagttcaaggtaacagaaacagcaagggtgcattnttctattggctcttaccatgactttgctgattttgatgtggtgactatggatgcttgctctcttttattgggacgtccttgggagtttgatactaatgctattcaccatggtagatctaataaatatactttcatgcataagggaaagaaaattgtgttgcttcctatgactcccactgaaattgtccactttgaacatgagaaaaagactaatgctaagcaaaaaggtgttttgaactctgaaaatcagcaacctattaagttaaaaactcctactttgctggccactagatctgatcttgatgagttacatgcctctgttggactttgctatg

SEQ ID NO: 19724 - DNA, 468 bp, Zea mays
  unsure (1)..(468): unsure at all n locations
agcttgtgaagattcttcattccaacgtgggctattcggcgatgccagagccaacccatgttagtcttagcaattaagcaagtatcgagttcagctctattgaaatcaactaagtatagctgacccgctaatactcccttaaaagctactgaatcatcacttcttctaaagacagtaacacatgtatccgtaaaaagacagttgtaacccaatttgcataattgagaaacagaaagcaagttgtaatctaatgaatctacaagaaaaacattggaaatagagtggttaggtgatatagcaattttacccaatcctttgaccaaaccttgatttccatccccgaatgtgatagctctntggggatcttcgtttttcttgtaggaggagaacattcttttctccccagtcatgtggtttgtgcacccgctgtcgatgatccaacttgagcccncggatgcataaacctac

SEQ ID NO: 19725 - DNA, 425 bp, Zea mays
ttggcatggcccactctttcatagttggaaatactttaaaagacataattttctgcaccaagtccctagtgccaatgtgctccgcgataatcctgaattcagctagtgcaatttgggttggaccctctggtgtcatattacattggggtctggtctctccgaagatcagctcttgcgggctctgaaccaacttctccttatcatcgtcaactttgacgtagaaccattccgatttctagcctgcaggccacttgcttcggtagctgatcacaggaaattttgtagtcttccggtaagcaaaattgtaacagccgaagttttcatgtaatccatcttttctggccttggtttggtaatgcagctcgtgcacccggcagataccttcggcaaatggctccacccctttgcttccgagagcccaaatg

SEQ ID NO: 19726 - DNA, 461 bp, Zea mays
  unsure (1)..(461): unsure at all n locations
agctntgaccgaaccataggataaaanatcgatatgtctcttgtgtcatttacttcaccgcgattttttcctcttcctagttctctctactcacttgtattatcgctcttaaaatctttcatatgttcaaagtgtaatcaagtgaagggaacaattatctcttcttctcattcgaacttagtcttaattttctctaacttaattatcggaccaagtttgtcttgtctaagttatttttgtaggatcatatttgtctctctataggtgctctcaattggtgtcagagctcatctcttttgctgggtctaacaacccgaagagatggctagtgtaacacccctggtgttatgagaactaataccttgacatgtcatcatatgcacttgtattatcttgcttgatacacctagagtgtatctactagcgtctaaaaattcgaaacanagatagtgtgttatctt

SEQ ID NO: 19727 - DNA, 448 bp, Zea mays
tgatgtttagaatgacatcagcttctcccaaatctttcatttcgaaatttctcgatagaagagttttaacttcctcaatcacattgagatttgatccaaagatcaagatgtcatcaacataaaggcacagcaaaacagactcacccccaccataccgataatacacacacgtgtcagatttatttacagcaaaaccagcagctataagagtattatcaaacttttcatgccattgcttaagtgcttgttttaggccatacaatgattttatcaacctgcacaccttgttctcttgaccatccgcaatgaacccttctggctgatccatgtagatctcctcatccaactcttcattaaggaaagttgtcttaacatccatctgatgaatgataagaccataagaggctaccacggctattaatgtgcgaattgagtcaatcgagccact

SEQ ID NO: 19728 - DNA, 449 bp, Zea mays
agcttgacaatgaggaaatggcgctcgttatctatagcttccgccaaatcctcaagcaaaggagagggaaagactacaagtcccgctccaagaaagttcgctacaagtgtggtaagcccggtcactttattgcaaaatgtccactatcaagtgacagtgacagggataacgacaagaagggcaagaggagagaaaagaagaggtactacaaaaagaagggcggcgatgcccatgtttgtcgggaatgggattccgacgaaagctcaagcaactcctccgacgacgaggacgccgccaacatcgccgtcaccaagggactcctcttccccaacgtcggccacaagtgtctcatggccaacgacggcaaacagaaaggtaaatctaaatcctccactaaatatgaatcctctagtgatgataatgctagtgatgaggaagataacttgcgc

SEQ ID NO: 19729 - DNA, 422 bp, Zea mays
  unsure (1)..(422): unsure at all n locations
taccgcatttgaagcatgatcgctttcccttggtcttggcctttcttggctgtccctttcgaccttttagcgccgtcttgaagcgtttaatgatgagaaccatttcttcatcattaagcccgggcgcctcaatttgcgccaccttgcttggtagtgcctccttgcttctcgatgccttgagagcaatgggttgaggctcgtggattggaccgttcaacgcgtcatcaacgtacctcgcctccttgatcatcatccgcccgcttacaaattttccaagaatttcttcgggcgacattntggtgtacctgggattctcacgaatattattcaccatatgaggatcaagaacggntaaggaccttatcattatgcggacgacgtcatggtccgtccatcgcgtgcttccatagactcttatcttg

SEQ ID NO: 19730 - DNA, 469 bp, Zea mays
agcttggacaatattttgtgatgggtcattttgaatcttctgcgcaagagcagctgctgttttaatttcactgtctaaaatcaaaacgtgctatgcagcaaggttggacttcaactgcacaaataacattgcaaagtacgaggcccttctcttggggcttcgaaaacttaaggcaatgggaattaaaagggcaattgactcacaagtcatttcaggtcacgttgacaaaagtagtaaagcaagggacccaaagctcgagaagtatctggacacaatctaaaggatggaagcctctttcgaaggtttctcattaaaaacatcccaagaggagaaaatgaacatgcaaacttgttagctatttcagcggcataggggcttccgttaccttcaggggtatttttcgaaacaataaaagcaccttcagtcgagctcatggagagagtagtgcttacaatctcgccagtgcaca

SEQ ID NO: 19731 - DNA, 452 bp, Zea mays
tcctagcccaatctcccactaccaccaccaatgccacctgctcatactctaagccagcagccagaaaggcaccagcacgcccaacaacagcgcgacttcaaggaggagtccgaagctcgtacagtcaatagcactgtaccagaatcgaagcatatatactgaggaatatcctactttggatgtactttcatcttttatgccactttattttttgtgacaaactagtaatttcaatttcttgtaataattatgcgtgcaccagaatgaaatatatcttccccatggatttacggagctcgaaaaacgtctctaaggaaacaaagtaaatttcgatgttcaaaagtcgttcctaaaggaatccagaaccaaaaattacgatcagaagtttcaaaagtcattcctaagggagcgcagtgtaagttttctgctcaaaagtcgttcctaagggaatg

SEQ ID NO: 19732 - DNA, 400 bp, Zea mays
  unsure (1)..(400): unsure at all n locations
tcgcgagagagggtttggccttgaagtgagccgtctgagttatttctttctccccttttgggaaggccctgagcatccccttttatagatacaaggagatgatccagctgtacatatgggggtgtagcttcgtgctaacgtggccggcggagaagtgcttgaccccttgtagaagcgtagctggcaatgcggccccaggtcctgctgacgtttctttgccttcgtagagagctgagaacaatcgacatcatggacgcatgcaaggaatcatcattacctgttaccggagtaatttagatgtgacaccggtcttgttccttcgtagcctgaggtggctagctaggggtagggtaatgatgtatccnctgtagcgtattcngtccgaggccgatgtcgggcg

SEQ ID NO: 19733 - DNA, 372 bp, Zea mays
  unsure (1)..(372): unsure at all n locations
ctttggacaaaatcttatgccaatgcttatgattatctgaaatcttctttttatcaagttaaacaatgtcctattactagactcggcctgagcataatatanagatgaattaagccatttaatcctatataaatcaacagactcacgtacctcctttgacataaaaaaaggtccttgatctgtaatcaagggctggggaatgctgaatctgtgaataatatgctcagttacaaactcaattacctccttgtgccgtatgttcttcacaacaaccacttcagtccatttggtgaaataatcagtggcaactaacacgaactgatgcctctttgatgatgaaggatgaatttcttcaataaagtctaatccccg

SEQ ID NO: 19734 - DNA, 425 bp, Zea mays
  unsure (1)..(425): unsure at all n locations
agctntagtgactagtgagagagatttgtttgtgttctttcgagctcttgcgcttggattgcttccttccttcttgattctttattgcaatcaaactcacttgtaaattgaggcaagagacaccaatcttgtggtggtccttgtaggaactttgtgttccaagtgattgagaagagaaagctcactcggtccgagggaccgtttgagagaaggaaagggttgaaagagacccggtctttgtgaccacctcaacggtgagtaagtttgccagaaccgaacctcggtaaaacaaattcatgtgtcacactctttattcgcttgcgatttgttttgcaccctctctcgcggacttgattatatttctaacgctaacccggcttgtagttgtgattattttgagaatttcaatttcgccgtattcaccc

SEQ ID NO: 19735 - DNA, 444 bp, Zea mays
tatgaagattcttcatcccaacatgggctagtcggcggtgcctttattcacccatgttagtcttagcaattaagcaagtgtcgagttcagctctatcaaaatctaccaagtatagctgaccctctaacactcccttaaatgctattgaatcatcacttcttctaaagacagtgacacctacatcagtgaatagacagttgtagcccattttgcataattgagatacagaaagcaaattgtaatctaatgaatcaacaagaaaaacattggaaatggaatggtcaggggatatagctattttacccaaacctttgaccaaaccttgatttccatccccgaatgtgatggctcgttggggatcctggtttttctcgtaggaggagaacatcttcttctcccctgtcatatggtttgtgcacccgctgtcgagtatccaacttgagc

SEQ ID NO: 19736 - DNA, 449 bp, Zea mays
  unsure (1)..(449): unsure at all n locations
agcttcaatatctgtctatgggagcttattttatacaaaaggatgctaatccgctctggctcagccttacaggatcattcatgtttcttttctacagcttctgtataatcgaaggtccagagacgatcgaggactttgctcaaatgcaatcgcaggagattgaagacaacatcatgagccgacgcaacaaaattttccttctgatggaagaggttntcagttttgaacactgtgtgtttcatttgtccagttctagctatctatttgtagctttgctaagacaccatggtgacagtttctgtatggaacaattaatcacgttagacggttgcgagtgcagcatcgtatccgaacttctgaagccaagatgccacactgaacgaaataaatgcctgagatccatcaactattctttatcctgatgcgggaccacagcactcattattttt

SEQ ID NO: 19737 - DNA, 384 bp, Zea mays
aaacccgccggtggggttaaatgcaatatacagatgctctgtgtttgattaagtactgtactatgcacgacgctgatggttcttgtgctggtcgttcttatgtccggtcgtcgcaaagctttgttctgatatgcatggcggtggtttcttcctctctctttctctctctggccttgctggcggttctgacgattgctgggacgacggcgaaactcatcggctgctgaccccaacggtacgcctttcttgtacccggctccgtcttgttgttgcagatatcttcttcatgtgttgtgctgcctgttagatctgcagtgtgtatgtctgcaagtattctcaagtactctccaccgttctaaatatctggcgtgttagtatttctat

SEQ ID NO: 19738 - DNA, 429 bp, Zea mays
  unsure (1)..(429): unsure at all n locations
agcttaaatactcttaactaagcatatagtgtttatatacatagntctagggtgtatagtccttgtccaaagagatcaaatttatcttcctttatacaattagagaactatctatgttctagttggtaaattcactgtttaacactatgtatggctcaagtttcatctaaccctaatttagtatcaaaatttagggtcttaaatacttatacttagctagtttctggtcctctaggtaaatcaactccaaataggctcaaanttttatcaggagctattctaagggtatataatctttccacaaatttgtatgatttttggatttatggttttattctaaaattctaaaaggcttggtttgagcatctttaaatgctaaaataatcccaggcttgggataaaaatcttgaaactatatttactaattac

SEQ ID NO: 19739 - DNA, 433 bp, Zea mays
tcattcctattgtggtgtttcaagaaatggaggcagcatgctgctgtactagcgattacttatggagcagaagattgctcttgctggtgcagcattgtgttctctatcacttggcccaccagttcataaaagtacaacggtaagacatgtcatagttttttttcccagtatcagtaaattgagggatcacttttcttctctcgctgcattataaatatcactttctgcaagataaaaattaaattggatggacttgtgtacctatattattaattgataaatcatcgaactttggtgaaatttctgtgtgaactgatgttttagtgattttttatagtgttgttaaaaagtgataatgattaagacttgtgtactatactatgaaggtgtctaagctagcagttgaagaactagatattggccacgcctttaa

SEQ ID NO: 19740 - DNA, 464 bp, Zea mays
  unsure (1)..(464): unsure at all n locations
agctntagttattaatccttccttaacctagtatactgatgagtttaacatttttaaacagggtagttagtagtcaagtatgtctctaatttttcttatccttagtccaagagtatttctatttttcctctatttatttagttttgggcagtatagttatttaaattaaaactgaaaaagtattgcaggaataagggtgtttattatttttcctaaatagttcataatatttaggacctagcaaaactagtttgaccaaatttggttgggtaaaacttgagttatgaatttttcaagttctgtacttatttaaaagaataaatcttaaaggtttaaggaaaaaaggttngcaccggggcccctgnggttgntttaatcaaatccttaaatctgcgcccctagaaactattcactagagtcactgacattntcacaaacncccttggcgtttctctttctaatac

SEQ ID NO: 19741 - DNA, 430 bp, Zea mays
  unsure (1)..(430): unsure at all n locations
tgctcttagataaagtgcttataatcttagccctggcgcggtcgcgaataaatcccacaatttcttcatcaacaccgctgaagagcatcgatccaagttggtagccgcaggatatggcagatatctttaattctgatatgtcctcttcggaaagctattggctgcccaggtgccgaaggtcgaaattcatattttctgaagagttctcttcaattctcttccccttatcagaggctctgcgactacatctttctcaacaaccacatccgaaataagtctgtcgatttctgacagtgtggtttcaagattctcggctttggctatgacggtatcttcggcttcgacgggtatagtagctttgtccgccgacagtagcttcngcggggtctgttcaatagcttccattntattcatcatacgccgcttcttt

SEQ ID NO: 19742 - DNA, 436 bp, Zea mays
  unsure (1)..(436): unsure at all n locations
agcttctaaagggagaacacgtgataggtttttcttacgttcaattcgaaaaagatagaccttgtgcagcttggcaagcaggtaaacaagtgggaggagcacatcacagcaagaatgtgatgaccacctcaagaccgctggagctgctgcatatggacctcttcggacccgtcgcctatctgagcataggaggaagtaagtatggtctagttattggtgatgacctttcccgcttcacttgggtgttctttttgcaggataagtctganacccaagggactctcaagcgcttcctcaggagagctcaaaatgagtttgagctcaaggtgaagaagataaggagcgacaacgggtccgagttcaagaaccttcaagtggaggagttccttgaagaggaagggatcaagcacgagttctccgctccctacacaccaca

SEQ ID NO: 19743 - DNA, 410 bp, Zea mays
tgctatcaatgtggacgtgaaatcattacttctgtactgtttttttttagtcactacagatcacctccgagatgaagctatctcaagcttcagacatggaatatgaacaaaaatgcacagaaacttttaccaataacgtgaagaacaactcatggaacttatcaagtcatgcttgctttggatggggtgatatcggccatccggttcataaatgtcttatgaaagatgtggatgatataagatccacaagaaaagacaacacccttcaactcatgcatcaacaaagaatatacagcggaaaaagtccatgggaaggataagttatgcagtgacaggaaccattccatatgataatacagtatattttggaacatgtggcagaacctcccaagtaattaggcccacctaca

SEQ ID NO: 19744 - DNA, 440 bp, Zea mays
  unsure (1)..(440): unsure at all n locations
agtctttgcatgagtctgttcaagaagacattatttnttcttgctatccctccattgctgtatgagtattgcaaattttatctctcttgagaggaggaaaagacgttacatgacatgagcaccatttgcttcacgtcaacagaatagttgtggagagctctaatagttggattctagtgtaataacaaccatgttttatagtgctagagacgggtatgtcaggtgtttcatacattgtcgatacatggatgtttgaccttagtggcattaacaaatgacgttgctgaattcgttgattgtggtgcttagtgttctaacctattaggtaaagtgttgcttaaaggctttggngagttgcatccccattcggtagtggaaaatcctaatgttggtcgcacctgccaatgcctcgcgttttatcttatattggtttttattat

SEQ ID NO: 19745 - DNA, 439 bp, Zea mays
  unsure (1)..(439): unsure at all n locations
ttcagctaaaacgctgcgagcctctttcccttcggtacacagtggttgttcttacacttactcagntggtacaggctcgcaagactctcgccccacttggtacaattacaatggctcgcgccagaaccgaaggggtgtgtggtttttctaatctcactcaacttacttggattcacctagagcaagcgctaatgtggtctaactaacctaaacacctacgcttatcaccaagtgattctattaagcacttgggtgtttgagcacttggaaatgtctacaatatgccttggtatgttggttgggctcccaccccttcaaatggatggtgggggggtatttatagccttccccacaattataacccgtggacagaagcagcagcttcctgttgacgagcgcaccagatggtccggtgcccacttgacatgctctgttcact

SEQ ID NO: 19746 - DNA, 371 bp, Zea mays
  unsure (1)..(371): unsure at all n locations
agcttctaaagggagagcacattntacgacttatttatgttcactttgagaaagacagggtttgtagcgcatgccaagcgggaaagcaagttggtgcccatcatccacacaagaacatcatgacgaccgacaggccgcttgagctactccacatggatttattccgcccgattgcctacataagcatcggcggaagtaagtattgtcttggaatagtggatgattattctcgcttcacttgggtattctttttgcaggaaaaatctcaaacccaagagaccttaaagggattcttagacgggctcaaaatgagttcggcttaaggatcaagaaccatagaagtgacaatgggacggagttcaagaactctc

SEQ ID NO: 19747 - DNA, 438 bp, Zea mays
tgtgattttaccaattgaaagaacacaatctctacttatgaatttccattaaataacttaaaagagaatggtttagttacacaagcaataatttcctatttagcaacctctaatatatgaatgaaaagaagggtactaaaacaagggaacctcatgatatgaacttaattacccttacaagcatcatgcataacatcaatttgtaaaaagatgaaagtagcatgattatttaatttagtttacatggcaagtttaattcatagcatggtgagtgattaatgtagaagactcaaaaccaatttaaacaagaatgaatacatcacatagtatttggttgatcttctttgaatgttgaatggcacactccatttgggaaacacattctcatgttgtgagactacatgatagaaacattagtctcacaactctagtcatata

SEQ ID NO: 19748 - DNA, 347 bp, Zea mays
  unsure (1)..(347): unsure at all n locations
cctgagctgcagctgaagtccctagagggcgggaatttgttttatctgatattnataaacntaagcacacactataagactgggttagctgtacaaatgaattctactcccagagagaggggaacacaaatcatccaagacgttaagctgatgaacacggtgatttgtcttaccgaggtttggttctaacgaacctagtccccgttgaggaggtcacaaagaccgggtcttttataaccctctccctctctcagacggccacctacaccgagtgagctatcttctttacttctcacaggtcacttagacctcgcaaggaccaccacacaattggtgtctcttgcctt

SEQ ID NO: 19749 - DNA, 132 bp, Zea mays
tgtttgactgttgaaccaccgatggatcgacttgccacctgctctacctcacgacggcgactctgatttgcgctactcagccttggctgtccagcgaactcgtggataattatcgtaatgcgttcgatccct

SEQ ID NO: 19750 - DNA, 331 bp, Zea mays
  unsure (1)..(331): unsure at all n locations
acatcatgacgactgacaggccacttgagcctctacacatggatctattcggcctgataacttacataaacatcgacgggagtaagtactgtctacttaattgggatgaatattctcgcttcacttgggtgctctttttgcaggaaacatctcatacccaatagaccctaacaggattctngagacgggctcaaaacgagttccgcttaacgatcacgaaaataacaagcgatatcaggaccgcacccaagaactctcanattgaaggctttcttgaggaggacggcatcangcatgagttctcttctccctacacgccacaacacaatgg

SEQ ID NO: 19751 - DNA, 429 bp, Zea mays
tgatctcctggatggagaacctctggcctatgcaaattcttttatcttttctaacgggatgaacgcggaggggtgccgcctcttctgctcgtcgccgggcaggtcgaaccgctccggccggaagagctctggctcagggaagttgacggtgtcctttgccagaacccccggtgccatccacacccacgtactctgcacaacaacaagtcggaaacatttcattaaagatccgagctcgtgaaatcaaaacagagctatctgtactgtactgtactgtaccttgggcaggacatagccagcaatgtccaccagctcagaggtctcccgcgcaaccagcggcgagaccatgaaaaatctcatcgattccttcagcacctgcacgtgcatatgcatatgcaaataataatgcgtcaagaatagatcacgtcc

SEQ ID NO: 19752 - DNA, 351 bp, Zea mays
  unsure (1)..(351): unsure at all n locations
agcttggtgccaatggagaagcagaaattcttgaagtcttggctgtcaaattgcttgccggtgtcaactgtgagttcggacgggactccgaagcggcaaacaatgttttgccagaagaatttctgtgcagtctttgatgttattgtggatacagccctcgcctcgatccatttggtaaaatactcgacagcgacgaaggtgaatttgaggttcccctgagccatgggcaggggcccgacaatgtccaggccccagcgctgaagaggccatgtgtgggcgattagttttgtgaattgcgaacggcttcctgatcggngagaaaacttctggcaggcttcgcaggaccttgtg

SEQ ID NO: 19753 - DNA, 443 bp, Zea mays
  unsure (1)..(443): unsure at all n locations
ttgttgagatctgtgaaatcaatacacattctccactttccattgttcttcttcaccataacagtgttagctagccattctggatacttgacttctctgataactcctgcacttaggagtctttttacttcgttgcgagccccttcggccttgtcatcagacattntccgaagcctctgcttgcggggtctgaaggatgggtcaacattgagcgaatgttcaataacatcccgattcactccacaaagatcgttggctgaccatgcaaaaacatctttattggtgaatagaaaccttatcaaggttntctcttgatcttcagataattgcgagcccaatagcaccttctgctctgctatatcctcacacagcagcatgggcttcggctgatcagccgaagctgctttttccctcctgaacttgtactgttcacaagcttcaac

SEQ ID NO: 19754 - DNA, 85 bp, Zea mays
  unsure (1)..(85): unsure at all n locations
agcccatgctcttatgtgatgacatatcaaaccacaacgcgctattgggatctcaattgtnccaagaacaggagaaaaccttaat

SEQ ID NO: 19755 - DNA, 448 bp, Zea mays
  unsure (1)..(448): unsure at all n locations
ccttnaatctcagctgaacgagtacaattagaacaaatcccattcctcgtttgtatttctgtttgatcagatgagaggagctaaagtattctcaaaaatagatctaagattacgctatcatcagttgaagattcgatccgaagatatacctaaaacgaccttcactacaagatatggactatatgagtttttagtcatgtcttttggactgactaatgcaccagcttactttatgaacttgatgaataaagtattcatgtagtatcttgaccagtttgttgtggtcatcgatgacatactggtatactctcagaatgaanaagtacatgaaaatcatatgagattagttctacagaaacatcatgacaatcagttgtatgtgaaaattccaaagtatgatttttggctgaaggaagtcgctttcgtaggtcatattatcaccgatggg

SEQ ID NO: 19756 - DNA, 477 bp, Zea mays
  unsure (1)..(477): unsure at all n locations
accttaagtcacctgcggcatgcaagcttgtaagcctcgttgaagtgaatatcattctttgcggacgatcagatcgcgccatcattattcactgttgtattcaaactccacacaggccgtgccagaccaagttagatagatatatcagatgagctgcctgattcacagaatataattggcttaacatacgaaaggaggtgctgagccacgctagctagctcatccttttctcctatatcacagatattcaaactgtactatgaactctgtaagaatgagcaataaactaagcagacagaagttaaaaatacaagttacacaaatttagaagtggcgccgttgtcggtgatcccggccctcgggtctgccgcgtgacaggcgggagtctcacaccactgcaacgactgggatgcttagggcttatntgggacgaagagtcatggagaggattgaacgggctagaatatcccactattc

SEQ ID NO: 19757 - DNA, 434 bp, Zea mays
tctaaagggagaacacgtgatatgtttgactaacgttcaattcttattatatagaccttgtgaagctcggcaagcaggtgaacaagtgggaggagcacatcacagcaagaatgtgatgaccacatcaaggcccctggagctgctgcatatggacctctttggacccgtcgcctatctaagtataggaggaagtaagtatggtctagttattgttgatgacttttcccgcttcacttgggtgttctttttgcaggataagtctgaaacccaagggaccctcaagcgcttcctcaagagagctcaaaatgagtttgagctcaaagtgaaaaagataacgagcgacaacaggtcccgagtcaataaccttctagtggaggagttccttgaagaggaatggatcaagcacgagttcttcgcttcctacacaccacagc

SEQ ID NO: 19758 - DNA, 444 bp, Zea mays
  unsure (1)..(444): unsure at all n locations
agcttattatgaacaaatgaactaataccatgtatgttctttgctgggagcctatgcttgctgaaggtcctcgaagctctagaatattgatcgtctctaagtttatttcatgtgttccaaaggaatgatagaaccaccttcgtcctgacaacatgcatgaagatggagttagaagcttcacttatgattcgaatatgaagctcttgaccagttggatgaaggaggatttctactagctagctgaagggagatcctaaaagttgttcaacacatctataaggaaaaatacgatgataccctccattgattttgtagtttgtatgtgtacggattgaggacataactttaattccataccgaagtgtacgccagaatatcactatanatagaggcagtgtcatgcacgacggagattagaattgctccatctctaaagctgtaata

SEQ ID NO: 19759 - DNA, 436 bp, Zea mays
tgaaatcgagcacacatgcatacaataaacataacatcgggcttatatgctgtgatataaagcaaactaccaattattgaacgataaagttgttgatcaaccatagtacctccttcatctaagtctagatgaccatttgttgccattggagtcttgataagctttgcattttctaatccaaacttcttaagcatgtccttcaaatattttgattgacttataaaaattccatcttttaattgtttgatttgaaggccaagaaagaagctcaattcttctatcatagacattttaaattcttttgacatcattttttcgaattcctcgcaaaataattcattagtagatccaaaaataatattatcaacatagatttgacaacaaataagtctttgccaattcttttagtgaatagagtagtgtcaaccttcccaat

SEQ ID NO: 19760 - DNA, 239 bp, Zea mays
agcttcgcgagacctatcctttctgatgccgtgaccacactcaccaatgtgacctcatcaaaggccacaccaaccttaagcatgccctttaacatctccaccacctccatccaatctccgttctttaagtacgcccggacgatcgcgcttcacattaacacgccactcttcttcgccgcgttgaacacaaaccgtgccgccgcaacgtccgcacagctcgccgacatatgaatcaagct

SEQ ID NO: 19761 - DNA, 433 bp, Zea mays
ttttcttgtcgtcatcaaccttggcatagaaccactctgttttctatcctgctgcccatttgcttcgggagctaattacaggaaactttgtagatttccgataggcgaagatatagcaaccaaaattgtcgtgcaatccatcctttctagccttcgtttgataatgcaactcgtgaacccggcaaaagctgtccgcaaatggttccaccgcttggcgtctgagtgcccagatataaacactaagcctaacgatagcgttaggggtcagctggtgaaaatagataccgaacctcttcagtacctctgcaataatcccatgtaagggaaatcttaatccagcctttaagaagctcttgaaaataacaatttcatccttctccggctttggggtagtttcttctcctccgaagcgtaatagcttcttctgattttc

SEQ ID NO: 19762 - DNA, 391 bp, Zea mays
agcttctaaagggggaacacgtgatatgttttactaacgtgcaattcgaaaaagatagaccttgtgcagcttgtcaagcaggtaaacaagtgggaggagcgcatcacagcaagaatgtgatgaccacatcaagacccctggagctgctacatatggacctcttcggacccgtcgcctatctaagcataggaggaagtaagtatggtctagttattgttgatgacttttcccgcttcacttgggtattctttttgcaggataagactgaaacccaagggaccctcaagcgcttcctaaggagagctcaaaatgagtttgagctcaaagtgaaaaagataagaagcgacaaccggtccggattcaagaaccttcaagtggaggagtttcttga

SEQ ID NO: 19763 - DNA, 435 bp, Zea mays
ttagtgtttcgtcatcaagcttgaagaagcttattctccccatcataagaggatcaagctttgagctatgcaacaaaagacataagcaaaaagttcaaaggagagtccaacatgttggggtccaagagccctttatcaagtccaaatggtctcatgtctcgaacaccttcacccaagaagatctttagctcaaggattattcacacaacgatgctatgaaaatatcttgcatcatcaaaggcttcgttgtgcacaatgttctagtcgacataggcagtgcagtgcacatcatctttgcaagagctttcaggcaaatgcaagaatcagaggacagactacaagaggttgtgtatccattgtgtggcttcaaaggaaagcaaatagcagcactaaggaaaatagcaatgccagtaaactttgattatatccaaaaca

SEQ ID NO: 19764 - DNA, 255 bp, Zea mays
gcatgccaagcacggaagacagtgcggtgcccatcatccacacaagaacatcatgactactgacaggcctctggagcttctaaacatggaactattcagcccgattgcctacatgctcatcagagggagtaagtactggccatttaatgtggcgaatggctcactatttactagtgtattctgatcgcatgacaaatgtctaccccaatacattataggagtcttgagacgggctcagacaagttcggttatgat

SEQ ID NO: 19765 - DNA, 469 bp, Zea mays
agcttcgggttcatctatattatgaatagccttctaatccgtccaactcccttcagccctcctggcagcttcttgactcccatgtacagagatgggcccttattctgaaggtatcttcatgcatagatatgttggatgaagtattgcttcgaaggcattgagtgttcctcgaccaataattgcattgtatggatactccatatcaacaatgtcaaagacaacctgttttgttcttgtgttatggacatagccgaaggtaactgacattgttatcttgccaagtgccacaatatgtcttcctccgaagccataaagagggtgtgttgcatcatgtatctaatcctttggctcttgcatttgcctgaaagcctttgtaaagatgatgcctgctgcacttcctgtgtcaaccaggacattatggaccagaaataccttgatgacacaatatataatcattgcatcattgtga

SEQ ID NO: 19766 - DNA, 436 bp, Zea mays
  unsure (1)..(436): unsure at all n locations
attgtagcttatttagtggattttaatgtttattattggtctaagccatgaatttatggtttccatggtctttcatcccttttctacttctctacttaaatggcttatttaaggttggcattaaggtttcaacatttccccattttgaaaacctcaattgttctgaacatgattcttttagatattaatttagtggatcttttattctcaagttaatatggtgcttcttgctcaaatttgcttacatgaaatgatggntcttgggttagcactgagaaaaccctaagtgacactggggtgtcacaactacgggttcatcgcccgctctaatgcaagttacctggtgccgacataccagaaaaagtggcccggggcctggatagaggagtggttntatgttaaaaattatctgattaacagagaagatatcaaggat

SEQ ID NO: 19767 - DNA, 467 bp, Zea mays
  unsure (1)..(467): unsure at all n locations
agctntacgcgacacaattatttgtcaaacatgaacacagttgcaacaatgcatgtaacaaggcattttatcaaacatataataaaaccacaatgtgcctgtgctacagacaagatattcgtcacataattttgcatcaaaattctagacctcaacccctaactccactactttataattctaaaaataattatatcaccacaaaacagcacaccgacacaacaacggatctagccataatcactaagcgcacctatgctaaataaaaggatcatcgcactaacccattaatttattcaatgatctaattatcacgaataacccatccgctcaacatgaccaaaacgacttgataacccatccgctcagaataacccattcggtacaaattagacgaanatgactcagtttggttaaatgtcatgtagattatatttagacatttaacaaatgannacaacacatac

SEQ ID NO: 19768 - DNA, 435 bp, Zea mays
  unsure (1)..(435): unsure at all n locations
ttttgcatttggctctagaccctgactcttcacagcccagacgaatattcccattcttattattgcttcaagggtgaaggtgatggaggtaaacctgatatattttcagaacttctaccacgaatctgcttaaagggaatcgtagcccagcttttaaaaagcttcgaaagataacaacttcatcatcttcgggagtcggcacagttctttctccggcatctgctctcacaatggacatatctcgacagtatctccccttcatgttttcaaggtgactntgcccaatagttgattttccgaagactgaatggcttggtcgccatggccgatcttcggaatcttcacccccgctgtctgcatcgtaactgtcactctcaccagtatctttagataaaccttctaaaatctcccttgtaatcttcttcgtatttgtct

SEQ ID NO: 19769 - DNA, 455 bp, Zea mays
  unsure (1)..(455): unsure at all n locations
agcttgagccaagctcacggtctcaccaggaatctttcttgggcttgaatccaacggagggggactggagaggggttggccaccgccgtggctcttggtccgcgcttgccggtcgcggggaggtcccccgaggcaatggctggctcgggcgaatccggccaagtacggaggaggtaacggggaaggcaaccgagtgctggggcaggttttataggcgccgacgccgacggggcgccggctccatcgtttggcgcgacgcgggcacgctgggcgcgcgcgcgggcgtgctctggcgagctcagagcgcgtcgaacacgtggtgcgttgcttctgcccgtgttcttcgctctgctgagcggccaggcgtacgaatcttgccctaccgcctgtgggagaattctttcctgcacctanggctacctagttcatgtaagttccaacggtagatgtggtct

SEQ ID NO: 19770 - DNA, 401 bp, Zea mays
tgaagctgtgtatagattaccgccctcttaatgcggtaactatcaatttcatgtattctttgcctcgtattgatgttctctttgaccagttggtccgagccaaagtgtttttcaagatagaccttcgctctggctaccatcagatcaaaatacgagcaagtgatattccgaaaacggcattctcaaccaaatattggctatatgaattcttggtgatgtcattcgggctgacaaatgcaccaacatatttcatgtgtctgatgaattatgttttcatgccggaattggacaagttcgtggtaagtttcatcgatgatattctggtgtactcaaagaacaaagaagaacatgccgggcatttgcatgtagtgcttcaacgtctgcgagagcaccacctttat

SEQ ID NO: 19771 - DNA, 418 bp, Zea mays
  unsure (1)..(418): unsure at all n locations
agcttatcaagtctactgtcatatggatccggaattatattcttatccgctctgaggccgccgtaatcattgttttcttaccgagacatttcctgccttctctgcccatggtgctgcgtcaccctattttggcccaatgggtcgtgtatcaagttaggtccattagggacgcatcctagggttgcagcacgaccccaatacccttgtggtcganctcccatgtctataaaccccctagccgccaccaagaacagcgggttttgtttagatcaagtntagctctcgctacttgcttgcaagcgcgcgtgctacttcagccgcccgtcttctcgtcttcggaaccacaccatattggaggttgatctttaaacctacatttagatctggtaatcaggcctcgtctacttgtcttgctatt

SEQ ID NO: 19772 - DNA, 445 bp, Zea mays
  unsure (1)..(445): unsure at all n locations
tgctctatgttatttggtagaccatggctatttgtaaggaccctttcttatggtataacaaatcactactcttttatgcataatgagaagaagcttgtattgcaccccatgtcccccgatgctattttgaaggatgaagttgctagagcttgcanagagaaaaataaatctgttcataataaaaatctaagtgctgcaaaggagttggtacaacataagagtgacaattctaaatctgctcaagtgaggaagacagaaatacaactgaaaagtgcttgttttcttgcttccaaatctgatttgcttgaattaaatgatgttgcttcaatctgctatgtatttatttgaaaggatgctttgctctcacttcacaacataccatctactttgccttctactgtcactaatcttatgcaagaatatgctgatgtatttgcaaacgatg

SEQ ID NO: 19773 - DNA, 427 bp, Zea mays
agcttaaagacatggtaagtagcatatgcattttatatgcgaattgactcaagcctagctacgggtgcataggtttcaccgaaatccaaaccttcgacttgtgaatatcccttggccacaagtcgggctttgttccttgtcaccacaccatgctcatcttgcttgttgcggaagacccacttggttcctacaacattttgattagtacgtggaactaaatgccatacctcattccttatgaagttgttgagctcctcttgcatcgccatcacccaatccgaatcttgaagtgcttcctctaccctgtgtggctcaatagaagaaacaaaagagtaatgttcacaaaaatgaacaacacgagatcgagtggttacccccttatgaagaatgtcgccgaggatggtgttcacagggtgatctcgttgga

SEQ ID NO: 19774 - DNA, 454 bp, Zea mays
  unsure (1)..(454): unsure at all n locations
tactcaagcctctggcgccctcgagcgtcttgccgcagccgaagcaccaaatctttacttggaggtctcggggccgaacccctcgggcgtggtaacgtcgcaaagactgctgatatcgcgccgagtgtagcaaggccacgtcccaagcttcttctagctggtccagcgagtcttctcggctggtctggttgctttggtcgtcgtacgcccttgtcctcggngaaccgtattctaagtctgtgggcaagacagcctcggccccatagactagaaagaacgatgagaaacctgtggctcggcttggcgtcgtcctcagactccagaccaccgagggtagttccttcatccaccacctgccgaacttgttgaggtcgttgtagatcctcggcttaagtccctgcagaatcattgccgtggcacactccacctgcccatttgtcatggngtgagccac

SEQ ID NO: 19775 - DNA, 463 bp, Zea mays
  unsure (1)..(463): unsure at all n locations
agcttcctncagcattcttgagcccctatgcatctgcagataacaataggtgccactaggagttataaaccttggtttcggctcatcgtcctttttcatccagatttgatgatagcctgagtagcaattcaataagctcatgagttcctaagtagctatcgcatccacaagggaatctattcttggcaatgggaaatcatcctttggacatgccttgttgagatctgaaaatcaatacacattctccatttctcgttagctttctttaccattacagtgttagccagccactctgggtatgttacttctctgataacgccgacacttagaagtcttttcactttcgtttgtgcaccttcggctttatcaccagacattntccgaagcctctactntcttggtctgaaggacgggtctacattgagtgagtgctcaataatatctctattgacaccacaaagat

SEQ ID NO: 19776 - DNA, 436 bp, Zea mays
aattggcattccatttaaatatccaacttaaacatgttattgtggaatggatttatttatctatggattcattttatttttcatagtatttcttttctattttctaatccaatttcccaacttattattatatttttatccatgttattattgtgttaaatgcacaaacaaaaaatccaacgtgatgcacattttattggggtattatttatttttaaacatgtctcctaataattcttatgaaggaggaggcattacacataattttatttctctctcttatataccaaagttgggtattaaaaatcctacccccttacaaagaatctcgtcctcgagatttaggtacaactgggaaagaggtggggacaatctactcgtagctcttcttccctctcccatgtagcttcatcttctccatggtgactctattgca

SEQ ID NO: 19777 - DNA, 460 bp, Zea mays
  unsure (1)..(460): unsure at all n locations
tgcagcatgcagcttaaatttaaagacaaatcttttcttctattctcacnctttgtggcagaaccaatacatcaagtcacataactactttggcctaacgagtaataattggcatgtacacatagaacaacttaggcacttgttaccaaaaagctacaattttgttgaaaatatacctactatttagggaccacgttctgtgataccaaatgccaaaatagctgaactattattaattattagatgaagagtccaggtgcataacaacaaccaaaaagctcacacgttccactattaattattagatgaagagtctatatataagggtacgtgcaactccgagctagagatgtcaatacgtaacttcgcaacatgttataccatctcatactcatcttcatcatgtctgaactgtctccatacccatccttatacccatcatgagttcatcacgtaccca

SEQ ID NO: 19778 - DNA, 434 bp, Zea mays
  unsure (1)..(434): unsure at all n locations
tctcctggacaagcgctgcacttaccgctgagtgcgaatcttttttattttatatcaaaggagcccctggcgttggtggagtcaatgttgttagatctattaaatactgttttaactcttcaaaagccttctgctggattggtccccattgaaagacttcggctgacttcaacacttcgaagaatggtaagtttctctctgctgatctggatatgaatctattgagagatgcaaatcttcctgtcaatctttgagcccccttctttgtagttggtggctccattcgaagtatagcttcaattttacttggattagcttcaattccctttgttgaaaccaagcatccaagaaatttccccttcttcaccccgaagacgcatttttctggatttaattntaaaccagccttgctgatactggcgaaggtctcctgc

SEQ ID NO: 19779 - DNA, 347 bp, Zea mays
  unsure (1)..(347): unsure at all n locations
ctgcaagctttttagctgttagcatctttatttattttatgttaatataaatagagttgcagtacactagtattctaatctattgcttgtaccattttcgtcggtttagttgtaaaaggtgactttgtaaaaaaaatccggagcagttcacgatcccgtcttccctattcccattcttcttacgattntgccccaccaaaggcttattcgatataactggatccgagagagattgaaggagaataaatctccttctatataaatttatatagaaggaaattaaattctttgaatcttcatcaattcattcttaactgaacaagacctaacgagaaagtctgttcttg

SEQ ID NO: 19780 - DNA, 440 bp, Zea mays
  unsure (1)..(440): unsure at all n locations
tgcaatcgcccaccaatctatcgatgttggaagtgggagcacatgtgtttattccccatgccgncgatgtgggagctgggagcgcatgacgcaggcccaagttcatttacgcgattctgagattggaatcgcccctaatgacgacgatgtgcaagtagcaagtgtccctcccatattagttttgtgttctgcggatttaatgtactcctacaatttaagcatagtatttatgctattgtaggcgtgtgtagattctgatgcagagactaaggatgggagtgttgttgaggtacgacataaggtaacacctactgtgattgaggataatacagaccaagataaggcagaccaagatctggagtactacatgagaattgttcaacgtaatttacatgacctgaatcaaaatatacagaatctagagcatgacatacataagt

SEQ ID NO: 19781 - DNA, 465 bp, Zea mays
  unsure (1)..(465): unsure at all n locations
agcttctaaagggagaacatgtgttaggacttacttatgtctggtntgagaaagatagaccttgtgcagcgtgccaagcacggaagcgggtgggaagtaatcatcaaagcaagaacatgatgtcaacatcaagaccactggaactcctacatatggatctcttcgggcctgttgcttatcacagcatcgggggaagtaagtatggtcttggtgctgtaaatgatttcgcttcacttgggttttctttttgcaggataaatctaaaactcaagggactctaaagcgcttcttaaggagagctcaaaatgaatttgagctaaaggtgaaaaagataaggagcgataatggatctgagttcanaaaccttcaagtcaaagaatatcttgaggaggaaggcatcaagcacgagttctccgctccctacacaccacagcanaatggtgtagtagagaggaagaacatgac

SEQ ID NO: 19782 - DNA, 454 bp, Zea mays
  unsure (1)..(454): unsure at all n locations
gtaagtgcaatatagatacaaactcctgatggcacactaatatttttatttagatatcaagaagcctacaaactctctgattcccgctggagcccaacgcaagggccaagctcccgatcagtgtcggggaccataattaggggtaccctcaaaacgcctaattctcagctggtaacccccatcagcataaagctgcaaaggcctgatgggtacgattaagtcanggatcagtccacacgagtgactcgatcacgcttcacccgagcctagcctcggccaagggcagccgacctcgagagactttcatctcgcccgaggcccccctttttacggcggacacatcaccggctcgcccgaagccttggctttgctcagatacaaccctgactaaatcgccacaccgactgaccgagttgcaggagcatttaacgcataggtggcctgacacctttat

SEQ ID NO: 19783 - DNA, 447 bp, Zea mays
agcttctaaagggagaacacgtgatatgttttactaacgtacaattcgaaaaagatagaccttgtgcagcttgtcaagcaggtaaacaggtgggaggagcgcatcacagcaagaatgtgatgacctcttcaagacctctggagctgctgcatatggacctcttccgacccgtcgcctatctaagcataggaggaagtaagtatggtctagttatcgttgatgacttttcccgcttcacttgggtgttctttttgcaggataagtctgaaacccaagggaccctcaagcgcttcctcaggagagctcaaaatgagtttgagctcaacgtgaagaagataaggagcgacaatgggtccgagttcaagaaccttcatgtggaggagttccttgaggaggaagggatcaagcacgagttcttcgcttcctacacaccacagcataatggtg

SEQ ID NO: 19784 - DNA, 425 bp, Zea mays
  unsure (1)..(425): unsure at all n locations
ataaatggacgtgaaatgccttcctaatggacaatcttgatgaggctatgtgagcaacctgcggctttgaagatgtgagtatcctaatcacgtgtataaactctctaaggcgctttatgggctcaagcaagccccaagagcatggtatgaatgcctaagagattttcttatcactaatggcttcaaagtcggaaaggtcgatcctactttatttactaaaacccttgacaatgatttgtttgtatgccaaatttatgttgatgatattatatttgggtctactaacgaatctacatgtgaggaatttagtatgatcatgacacaaaaattcgagatgtctatgatgggggagttgaagtacttcttatgatttcaagtgaagcaactccaagagggcaccttcattagccaaacanagtatattc

SEQ ID NO: 19785 - DNA, 328 bp, Zea mays
agcctcgagaatatctggatatggttcgaatagttgaagcttccttcgaagggtgttctgtcaaaaatatccctagaggacaaaatgaacatgctgatttgctagctaagtcagcagcacaggggctgcccttaccttcggatgtattctttgaaacaataaaagcttcttcggtagaacttcttgaaagagcagtcctcaacatatctcctgtttatagcgaggtttggagaactgagatcatcttctaccttcagggaaaattcctttcagatgacgaagcttataacaggaggatagaggcaagggctcgaccatatgtcatgat

SEQ ID NO: 19786 - DNA, 435 bp, Zea mays
  unsure (1)..(435): unsure at all n locations
tctaaagggagagcacattntaagattaacaaatgttcattttgttaaagacaggatttgtagcgcatgccacgcagggaagcaagttggagtctatcacccacacaagaacatcatgacgaccgacaggccgtttgagctactccatatggatctattcggcccgattgcttacataagcatcggcgggagtaagtattgtcttgttattggggatgattattctcgcttcacttgggtattctttttacaggaaaaatctcaaacccaagagaccttaaagggattcttgagacgagctcaaaatgagttcggcttaaggatcaagaaaataagaagcgacaacgggacggagttcaagaactctcaaattgaaggcttccttgaggaggagggcatcaagcatgagttctcctctccctacacgccacaaca

SEQ ID NO: 19787 - DNA, 465 bp, Zea mays
  unsure (1)..(465): unsure at all n locations
agctctaaccnctgcgagacctttccccgtttctttctaaccttaacgaatgcgatatcgaatgtcatactttatgcatatttactttatttgtccccttgtgtggtgtactgtttgtttcctaatttgaatgaatggatgtatgtatgcttgcaatcgcatagagaacgatccggttgaagagcccgaggaactcgcaggagaagcccctgagcagcagtcggttggtggaggcaagtgtcccttgacctatctctgtcctattcattatttaattcacctcccgctctacacanttatgcctaaggattgactagcttntgttatccatgtccttgtctacctatctgggttggattattattgnttagctntatgctattgctcacactctaatcaatgaacatgatgagattatctatgatacgctgttctcccttctcttattatgatgttgtacttgtg

SEQ ID NO: 19788 - DNA, 328 bp, Zea mays
gatgatcattatgccatattgggatatatgcttctcatctctcaacatttcattcctgctcttgttagcaaaaaaagggaaaataatctacattggaataacaatgacaaataagagaacgaagaccaacaccttcaatcacctgcatatcacaacatattcgtttacgttcttactcatcttttctcactcatgctgcctgtatgcacggaagtctcgcggtctcattgtgctagaatgaacacctcgcactagccacactgggaaaacatgaaatatgtgcgagctgggaaatataataaactatgaaggttctatgtaccatgaa

SEQ ID NO: 19789 - DNA, 432 bp, Zea mays
  unsure (1)..(432): unsure at all n locations
agcttcgacanaaccaactgagtgtggtntgcagacttcgcttgcggctactcgttntgctgctgttgaaaagaagcccttccatttcttacattgctggtccatattgaaggatcaacctaaatggatggaccagcacatgagcactcaaaatcctccacccaacccaattggtacccaatcaaatactattgactgtgatgctgctgaagaatcagctccttcaagctttacttccaaaaggccgcttggtcgtgattcagcaaatgaaaaggcaaagaagcaaagatcagaaaacacatcatccactgattcggagtacctaacacgaatgggtgagctctctttggaacggttatctgtctacaaatcagtagcttcaactgangagaagaagtggagttcatgaaanaacacgagaggcagaaactg

SEQ ID NO: 19790 - DNA, 452 bp, Zea mays
  unsure (1)..(452): unsure at all n locations
tctcagctttactctcgcgagacctttccccatttctttctaaccaaagttaattcattatcgtatgtgatattctatgcatatttactttatttgttcccttgtatggtgtactggttgtttcctaaattgaatggatggatgtatgtatgtttgcaatcgcataaagaacgatccgggtgaagagcccgaggagcccgcatgagaagcccctgagcagtagtcagttggtggaggcaagtgtcctttgacctatctctgtcctattcattctttaattcacctnccgcattacacatttatacctaaggattgactagctntgttatccatgtnctttgttacctactcgggttggattattattgtttagctttatgctattgctcaactctaatcaatgaacatgatgagattatccatgatacgctgttttcccttctcttattatg

SEQ ID NO: 19791 - DNA, 367 bp, Zea mays
agcttgctgtgaacctgattcccttcccacgcctgctctttttcatggttggctttgcaccgctgacctcgcgtggctcccagcagtaccgctccctgacggtccctgagctgacccagcagatgggggactccaagaacatgatgtgtgccgcagacccacgtcatggccgctacctgacggcctctgccatgttccgtggcaagatgagcaccaaggaggtagacgagcaaatgataaatgtgcagaacaagaactcgttctactttgtggagtggattcctaacaacgtcaaatcgagcgtttgtgacatcccccctcgtggactctccatgtcttccaccttcgtgggtaactccacctccat

SEQ ID NO: 19792 - DNA, 440 bp, Zea mays
  unsure (1)..(440): unsure at all n locations
taaccttgacgccctgaatagctncacgaccaccagcaatgccatttagaggccaagtgtttcctccaacagcaggaatgaagtgcccacggcgtctgaagatcaattggaggacttcaatgatgatgatgatgcgaggtcttgtagtcctgctgggaagtaaagcttaatgcctttcccttgggttgtgcaagtttatctgtgcccttgatgttggaaacttttggtggttatttatgtataactacaagatagccgtctatgatgatgtgcatgtggcacattttttgtttgccacaacaaactttgaaagagcttatggctctttggtttgtggcatggatatttgtgatgtttaagacttatgtcgcttgttctcttggtctctttggaaacgtcatgtatggcttcattggggaattacttcatgcaatctctga

SEQ ID NO: 19793 - DNA, 378 bp, Zea mays
  unsure (1)..(378): unsure at all n locations
agctnttctacgcacagcttcgtgatcgtctatttcttcttcataatcatctttcgtttcgctttatgcttcgtcctgaccatgctcttgtatactcatgacccaattccgaagatacctgttcacatatttcacttggaaaacattgtcaaatcatgtttttgaggaccttcggaagccgaaggcccccaacagaatgaaagaaagaagcaatccaagagcaagagctcaaaagaacacaacaaatctctctcactaatcactaaagccttgtgtggaattgggagaggatttgatcactttggtgtgtcttgtattgaatgcttagctcttgtaagtagttggaaggtggaaaacttggatgacttgaatgtgggg

SEQ ID NO: 19794 - DNA, 442 bp, Zea mays
tactcactttggatgggctggagctcagtaaccacaagcataactctgttctggatatgtccatgatgtggttggaatgccgctatgtactcatctccttccttgatgcgtatctgatggtagcctgaccgatgatccaatttagaacatatggatgcgtcttgcaactcgtccactattatctcaaaaataggcatgggataccggttcttgactgtataagcatttatatttctgtgatccacgcataaacaccattcaccatctttcttcttgactaataaaataggtgatgcaaaaagactgaaactttgttgtatcacgccactgtccaacatttccttaacttgcctctctatctcatttttctactggggagtatcacgataaggtcttagccgtataggttgggcacctggcaagagctcaatagcatgatcaa

SEQ ID NO: 19795 - DNA, 459 bp, Zea mays
  unsure (1)..(459): unsure at all n locations
agcttgtgcactcggcagaagccttcaccatatgtctccatcccttggcttcgaagagcccaaatataaacgctaagtcggacaatagcgttgggagttagctgataatggtagatcccaaacttcttcgatacaacaacaatcatcttgttcaaaggcaatcttaagccagccttaaagaaacttttgaagactaccacttcatcctctcctggctttggagtagtctcttccccaccaaaacaaaccagttctttcttcgcttcactgaaatagcccaatttcaatagcttaggcaagtcatcttcggagatggtggatttcccgaaatccaggtggctgggtttacttggcaccgcgctgtaatcatcttcagactcattctnctcaacatcagcctgttctgtttcagcggcgggtgcattcttngatgctaccagccctgagcgctttatcact

SEQ ID NO: 19796 - DNA, 428 bp, Zea mays
  unsure (1)..(428): unsure at all n locations
tgacgtgccgtccggtcccgtccatcggaggctcatgctcctctgttcttgacgtgcangtcaaatggcagctagcacagtaacagcgcgatcgaacaacagagaanagcagaaccactcaaccacacacagtgctcgttcgcaggctcacctcaacacggccgtccgatggcgacggctactgtgccgtcccctgacaacggtcacgacaaggctaccacgtcatcctcacctcaccggttggctggcgctggccatagccgtcgtcttctctctagctagctaacccctcctcattccttgcgcacctcaaaaccagcgcctctcattcattcctcctctgctttcttcttcccaagcaacgtactaaccgatgcgactggcggttctggtgctcccggcggcggcggcggcgcccatcgtgctct

SEQ ID NO: 19797 - DNA, 441 bp, Zea mays
  unsure (1)..(441): unsure at all n locations
tcccccggatcttaagtcacctgctgcatgcaagctttcaatatgagagttcttgaacttcgttctcgtttcgcttcntatnttcttgatccgtaaggcgaactcattttgagcctgtctcaagaatccctttaatgtctcttgagtttgagaattttcctgtaaaaagaatacctcactgaagcgagaataatcattcactattacaagacaatacttactcccgctgatgcttatgtaaacaatcgggccgaatagatccatgtggagtagctcaagcggcctgtcggtcgtcatgatgttcttgtgtggatgatggactccaacttgctctcccgcctggcatgcgctacaaactcctgtctttctcacaatgaacatttgttaatcctaaaatgtgctctctctttataagcttatgacgattcttcatctccacat

SEQ ID NO: 19798 - DNA, 441 bp, Zea mays
aaactcaagctcggtaatcagaaacctgtcagctgtcgcctgaaacgcccttttctatccaatcaacctgattctcctgctgatgagcataacatgaaaaagagacgtcttctgcgagtatccagcttggatcgggatgttggtcattcggttcctgctgctgacgaagtgcctgtgcttgaatttactgacgctgaccccaatggaggtgatccatctgacctgatccaatgagtgtgctccatctgccgctgatcccaatgggtgagctccatttgccgctgatcccaatgggggtgttagctgagctgctaatgaaaacgacggtgaggaagaagatgacgtccctttgattcggaagaacaggcggcaatatgtctccagtggggaaagtagtggagttctatctcctgcttagactggctccattgtctacaagaa

SEQ ID NO: 19799 - DNA, 456 bp, Zea mays
  unsure (1)..(456): unsure at all n locations
agcttcgccgtgacacatggatggtttccctatcctcgttgaacaggattcatgactaggaactaggaatccctcaccgacaatctgttcatgtcgcagatccgccccgaaccgtggacgagctcgctactccttcaatcgcgggtaagaatctcccttccgtgctcgccatcaccccgtctaggtttagcaccggctaatttcaggttaggggcgtccgggcgacagattgcgcgtccgccggcgatgctccgccgtgggtgggcggcactgctgtccagaccgccgtggggaagatgaacgccgtggtccgttggatccggcgctgacgatcgagattagaggatagggtaacctttgcacaactaaatcgtgtccgtaggattcatggcgggcgggttagattagatcggngtaggatcgaccttcngtccgtgattctggatcggacgatcg

SEQ ID NO: 19800 - DNA, 369 bp, Zea mays
  unsure (1)..(369): unsure at all n locations
atgcaagtaaacaggtgggaagctctcatcatatcaaaaatgggatgaccacatcaagacctttggagctgcttcataccgaccttttcggacccgtcgcctatctaagcatangatgaagtaagtatggtctcgatatagttgatgatctttcccgcttcacttgggtattctttttgcaggataaatctgaaacccaagggaccctcaagcgctttctaaagagacgctcaaatgagtttgagctcaaggtgaagaagataaggagcgacaacgggtccgagttcaagaaccttcaagtagaggagtaccttgaggaggaatgaatcaagcacgagttctctgctccctacacaccacagcaaaatg

SEQ ID NO: 19801 - DNA, 391 bp, Zea mays
  unsure (1)..(391): unsure at all n locations
agcttaacatctctggactaactcggcggtgtcgctctttgctggtggccagnagaaaccagacctaaagaccttcccaaccagagtcctagacgttgcgtgtatcctgcattgcccagcatggatctcatctagcagttgtttcccagtggccgaaagaatgcacttcatgagaactcctgttgcgccccttctgtatagtgtttccccaatgagagtataatgagctgactgtcttgcaatgcgttctgctgcatttttgtcatccgggtcttcctcattttttatgtatctgatgactggctccctccaatcatcagaatatgactctgggtggctcagaatattgcattcttctacccgatctagtgaaatgcttgggtgcaatatt

SEQ ID NO: 19802 - DNA, 439 bp, Zea mays
taccacatttgaagcatgagcgcttcccctttgacctggtcttgcttggctgccccttgcgaccttttagcgccgtcttgaatctcttgatgatgagagccatctcttcatcattaagtccggcagcctcaatttgtgccaccttgctaggtagcgtctccttgcttcttgttgccttgagagcaagaggttgaggctcattgattggaccattcaatgcgtcgtccacgtatcttgcttccttgatcatcattcgcccgctcacgaactttccaagtatcttctcgggcgtcatcttggtgtacctaggattctcacgaatattgtttacaagatgaggatcaaggacagtaaaagaccttagcattaggcggacgacgtcatggtccgtccatcgcgtgctttcatagcttcttatcttgttgacaagggtcttgag

SEQ ID NO: 19803 - DNA, 464 bp, Zea mays
ctgatgcatgcaagcttcttctggtcaaaacattcgtatattatcttttctgtggcaaatttcatccgtgatcataggcaatacactcaatatgaaccaaacacaagttacctttccaaaacatatataatacctcctgcagtcaaggtatagttttgacaatatagcagtctaaaataacaatgcagcagtatcagcatgacagcacagagattagtgtatagatgtcttgtataacatattgtcactgagcaaaaccccttatttaccatagcagatagcagcgctatggaattaatgttgcagtcaagctaaaatttcctgatggggcctattccaaattgcgagatattcaatttatttacggctaagctcaattgactagcttgtgtgcacttctcctctcttggttgcctgttgcatgctgccttttctaaccggcacctatacatgtttgatttcat

SEQ ID NO: 19804 - DNA, 361 bp, Zea mays
  unsure (1)..(361): unsure at all n locations
tataagcttctggatgagaagtggtcacccaagttccgctaatgtttctttatatgactaatcaaggaaggaatccatgtggataagtttgcaagaagaaggtttgcgtgttggcatcgatgcttcttcaataagctagctgccaagcgaaagccagaagcctgaagatgatctttgagtagccagaatcagcgtttgcaatcagcaaccagaggctccgccaggccagatcttgttgaagttccatctcctcgaagagttgcaaagtgaagatatgtagctgaagtaaagctatacccataacccttctaagccgaatctcgaggacgagattctttntaagtggggtagatttgtagca

SEQ ID NO: 19805 - DNA, 440 bp, Zea mays
  unsure (1)..(440): unsure at all n locations
atccttagagacacctgcaggctgcaagcttcttctttattctgatgagaaccaaacttttttaccacttcatcaaaacgaatgttccaacttcgagatgcttgcttcaacccataaatggatttctgaagtttgcatatctttctagcattgatcggatcgacaaaacccttgggctggatcatatacacgtcctcatctagggttccattaaagaaagctggtttgacatccatttgccaaatctcataatcaaaatatgccgcaatagctagaatgattcgaatagaattaagcattgctactggcgagaatgtctcgtcatagtcaactccttgaacttgtcgaaaaccctttgcacaagtcgagcctatagatgnaacatttncaccatgttttcttcttctatagatccattgcatttatggtcaacaccatag

SEQ ID NO: 19806 - DNA, 416 bp, Zea mays
tattattgatgtcttcctgccgaaccataagatgccagagaacttgtattattcttaaaagattgtctaccatctcggcatgaactatgaaaagtttgacgcgtgcgaaaataattgcatgttggtttggagggatcaccaaaatgacacgcattgcatgcactgtaagaagtgaagttattgcacggtggtggatgaagaaggcacttgggtcactacaaaagtccgggtcatgcagctctagtacatgcctattactccgcggcttaaacgctttgttctaaatcaggagacaacgaagcaaatgagatggcataacgaacgggatcgtcaagacaagattcaaatatcatggtgcattcatcatatggcgaggcatttcagtcactggacgggtttgatccagaatttgcatg

SEQ ID NO: 19807 - DNA, 423 bp, Zea mays
agcttacacatgtgtaaatctctaaggttcttcttttatttattcaatcaaataaataaaaatacatctacatcagttcatattcaatcctaaaaattatagtgtgcatacagtaagtgaaaccattttatttagacagagaataattctatgaacattttgcaatttgaatcactaaatttggagttcatatgcaaaagttatgaaataaacaagtttgggaattcaaaatatgaaattaggtataattatgcgaatatttaaaagttcagggttcaatctataagaatacaggggcctgcacgtgaaaaccagggacggggggttgatttccagtaaactgaggatctctttaagaaaactaccgcgcgaaggggtatcaggtgaatctaaccgtcagatctaacaccaaccgctgagatt

SEQ ID NO: 19808 - DNA, 422 bp, Zea mays
tgtggatctcctcgcctatggctctgcgcttctcttcgtcgaattgtctcataggctgcttgacgggtcaagctccggctcggatgtccagcgagtgctcggcgacatccctcggtatgccgggcatgtccgagggactccacgcgaagacgtcggcattcgcgcggagaaagtcgatgagcactgcttcctatttgggatcgagcttggagccgatccggacttgcttggaggcgtcgctgctggggtcgaggggggcggacttaaccgtctctgctggctcgaagttgccggcgtgacgcttcacgtccggcacctccttagagaggctttccaggtcagcgatgagggcctcggactcggcgagggcctcggcgtactccacgcactccacgtcgcattcgaacgcgtgtttgtacgtg

SEQ ID NO: 19809 - DNA, 379 bp, Zea mays
  unsure (1)..(379): unsure at all n locations
gacagaggctcttgcttcgtctgctggtagcccaccaaagcaagcaaaagccactcttggatggatggggaaacgacaggttgcttttctatcatctccatgagcgaaaaatccctaatccaacattttttttgcaaatctcaacattcttgcatcagctaacacctctctctctctctctctcgaaccccttattattactgttcccccgaaccaccaaactggatttctaagcttcttctccatcctccaagaaccaatatatcaccggatccaaaatgaacagacctaccactgatgctaacgctactactgtcttcctaactctgctgctaacaccntacctaacaaaaggtactcggaactattttttaattat

SEQ ID NO: 19810 - DNA, 422 bp, Zea mays
  unsure (1)..(422): unsure at all n locations
tgggttcgccctnttggggaggagtgcggtgcatttaagaaacctaatgggctgttacagcctcggagaatctttgtaaaggctacgtagtggtgccctgctgggccacctangtagtggtcaatggggagtagctctctctgggcagaaagggaatcaccgcttgtgggtaaagtgcacaacctctgcagagtgtttgaaaactgatatatcagccatgctcgcggctatgagcagccaagggagctctagtgattagtggtacttgatcagaggttttcggattgcaggtggcaatgagattgatggttcttggtattgactctggtaatggtaagtggtactctttccgtttggaaaggagtacgtatgtgtcggcgtntcgagaaccgggggtccctaagccgacgagtgaaatgtcg

SEQ ID NO: 19811 - DNA, 459 bp, Zea mays
  unsure (1)..(459): unsure at all n locations
agcttgtgatttatccaatttaaaacaagcatcatctcttaacatagattntctatggttaaactcaacacaagagatggcattagtagcacaagcactagtttttttatttagcaaccctttatatgaggaagacaagcgagttgctaaaacagagaaacctcataatatggactaaatttgccttgaaccctcatgcacaatatattttgactgacatggataatatgcatggttattcaatgaagtctaaagggctgactaaatccatattatggtgagtgtctaatatagaagaatcaaatccaaattaactagagagaatatgtcacatagttttggattgttgaccatatgataatattcattcatcttccaattggacctttatttcataatcaacaagtgatgtatatcctcaagtgcttctttntccttagtggctacacaagtcacaaa

SEQ ID NO: 19812 - DNA, 420 bp, Zea mays
  unsure (1)..(420): unsure at all n locations
ctatcaaatggacgtgaanagtgccttcctaaatgggaccaattgttatatctcttattgttagaaagtgtaaaggagaaaagaggtttcccttacatatgtgtgtgttacctatattcgtcatttcatgtgaaaatcacatttaaacaaataaatagttaacaaaagacactcaaataatacatgcatcatgctgngtatttatttttgtgtgcatttttgtgacaatataaagaaaatgtgacgagaaaaatattaaagtccaaagtgggatttaatcctaagggaaaattcaagaagtagaanaaagggaagaagagaaaatactatgcaatacaaaaataaacttataaatagatanaattattccaataatttattcaaatcatatactcagaaatttgagtacaagttcatcac

SEQ ID NO: 19813 - DNA, 422 bp, Zea mays
  unsure (1)..(422): unsure at all n locations
agcttgaagcanatctcaagactgaggtcgagaaatattcatatttgcaaaaatcattgaaggatctccaagagaaatgcctaaatttcggcagccgatgcgtgcaacggctaaaggacatatttcactctatcggagccagttctgaaaaattttcaccttcagccgaaaacctgcccagcaccttggaacatattgaaggcgaggttgatgctcttgacgaagttattggtgggcatgccgacttctgcaccctggtagcttctcgaggcacagctaccgcttttctgaaggctggctgtacgcacggaaagattgtgaataggccaaacttcagcttgtcagcagcagatttggttgatatcccaagcttagcccgaagcatcggaaatagatntattacccaaatttgggtaaatggc

SEQ ID NO: 19814 - DNA, 425 bp, Zea mays
  unsure (1)..(425): unsure at all n locations
tgcattgcatatttaaatttcttgtattgcatctagggcttgtcttacctagttgagataaccgccaacaaagcgagtgaaaaagcttaactcggatcaaacttgacaagtcttagttttaagcttttagcacttaaattcttactttttatgcaattgttggttcttgaaatatgcatgaggttctgcacttagggggagtattcaaaactcaaatcactcatgaaaacctctagtgcaaggccaaaatgcaaatatcaccatttgcctattttctctaaaaattatctagcctatggcaaaatattttgaaaattatgagaaaatatatgagggtgccaatacctgtcccaacaagtgttattttgtgggattataagttgggatttggtttggttgaaaactagatagaanaattcaaaaaa

SEQ ID NO: 19815 - DNA, 410 bp, Zea mays
agcttatgaagattcttcatcccaacatgggctagtctgttgtgccagagccaacccatgttagtcttagcaattaagcatgtgtcgagttcagctctatcaaaatctactaagtatagctgaccctctaacacacccttaaatgctattgaatcatcacttcttctaaagacagtgacacctacatcaataaagagacagttgtaacccattttgcataattgagatacagaaagcaaattgtaatctaatgaatctacaagaaaacattggaaatagaatggtcaggagatatagcaattttacccaatcctttgaccaaaccttggtttccatccccaaatgtgatagctcgttggggatcctggtttttctcataggaggagaacatcttcttctcccctgtcatg

SEQ ID NO: 19816 - DNA, 441 bp, Zea mays
  unsure (1)..(441): unsure at all n locations
tgcattgcatatttaaattacttgtattgcatctaaggcttgtctaatctagttgaaataaccgccaacaaagcgagtgaaaaagcttaactcggatcaaacttgacaagtcttagttttaagcttttagcacttaaattcttactttttatgcaattgttggttcttgaaatatgcatgaggtactgcacttanggggagtattcaaaactcaaatcactcatgaaaacccctaatgcaagccaaaatgcaaatttcaccatctgcctattttctctaaaaattatctagcctatggcaaaatattttgaaaagtatatgagggtgccaatacctgtcccaacaagtgttattttgtgtgatcataagttgggatttggtttggttgggaactagatagaataattcaaaaaattcaaattntccctctgtctgggctca

SEQ ID NO: 19817 - DNA, 94 bp, Zea mays
ctaatacggtcaatcttgtcctggccgacaaacttttgcaaacttgcgggcgattggtaagttctctataaaaattagcctaactttagtctgc

SEQ ID NO: 19818 - DNA, 441 bp, Zea mays
tcacagaaaaacagaaagaagaaatttttatgcttcgttgcgtactattataatggaaagtgttttttgccttcggctcaaaaatataaattcgtccacagcaaagtagattgtacatggacaaaggcgaatagatatattacaaggtacgcacaaatttacataagtctctttacaatcatattacaaaattttctctagaatcttatgcagcaaagtatttcggaacatttgttaaggcttcagctcgtcattctttagcttcatcatcctatacatattaaaacggaatgaggaaagcgcagagttcaagaagaaggtaaaagtaacaagtataagtttctcactggcttaaagtggctccgagctttgtcaccagccatttttcgcccgccgtttatccaaatctgggtcataaaacctgttcctatgcttcgagct

SEQ ID NO: 19819 - DNA, 465 bp, Zea mays
  unsure (1)..(465): unsure at all n locations
agcttgagcaatgactggctatgtctgtatattttggaaactggngataagcatgtccttcagcttttgccatgatgtgantgttcctggccgaagagaggagtaccaggtgtaacaccccaagtgttaccttggctatggcacacctatacactaatgactgtgatcacatgtggaagaaacttaaggagaagagcataagaaccttggagaccatggattaaccaagaaatgtgaataaccaaaagcattacccaagcttttgtgcacataccaccttgggcaagaggggagtaaaccctagacccctcttgagcccctatcttctaaaaccatggttgaaaagggggggagagattaagtgttggggcgaatgcaaagacgccacccttcgctcgtcgtctctcgctgcagtcgctggtttgacgaagacaaaacgggcagggacacccttcgcttcattca

SEQ ID NO: 19820 - DNA, 432 bp, Zea mays
tcgcacctctgaacttactcggctgcatcattcttcgatgtttttctttataaccctgacctgaaaaccttcccgactaatgtcctggatgttgcatgtattccacattgcccagcatggacctcctccagaaatcgcttcccagcagatgagagaatgcacttcatgaggacgcccgatgcacctcttctgtacagtgtctccccaatgagtgtgtagtgagccgactgtgtggcaatgcgctcggctgagttcttgtcatctggttcttcttcattctttatatacttgatgattggccttctccagtcatcagagtctgactcgggttgatctataatgttgcactcttctgtttgatccattgagatgctcggttgtagtatttcttgcacaaagactccgggtgggacctgagttcgactggatcct

SEQ ID NO: 19821 - DNA, 465 bp, Zea mays
agcttatctgagagatcatcttattctgttctatctcattattacaaccaaacacaccattgaaggtccctgcaccgctgcacccaatgcaaatgtgcaataacgtcatgtcatatcaacgagaaccgaagctgataagaacgtgtgtgacgcattttcaataggaattggatgctgttcgtatattttaacaagttgttttcttccgtgaagattcccgagccagaacaactcttcttcctagtttaaccaatcataattagatcttgcttggttgttcctatttcatatagattaaataaaatggaaagaaattaaagacattttgacttgacaggaatttaaacacactcaatcctgtccaacgtacatggattgagattgagaatgaaacgagcgtggttaattctattccagacccatcctctctgatggacaagccttgcccctaatcttgctagccta

SEQ ID NO: 19822 - DNA, 441 bp, Zea mays
tccagcaagacatactccctctattggtttgcatgtcgcattttatttgttcaagtcaaatgtttctatatttaaccatcaatcaagaaaataaatttgttaacaacaaaatatttcctgtttgaatccaagggactaaattttagtcccgtgactcccgtcatgtttgaatactagttagaagtattaaatatagtctaattataaaactaattacacagatatgaactgaacggtaagacgagtctattaagcctaattagttcataatccgcctatgtgatgctacagtgaacattcactaatcatgggttgcttagtcttaataaatttgtcccgtcatttagtcttcatctatgtaattagttttataattagactatgtttgatacttgtatttggtattcaaacattcgatctgatgtgatacgaactaaattt

SEQ ID NO: 19823 - DNA, 334 bp, Zea mays
aagtcacctgcggcatgcagctatgttgagatgtggcgattaattatttattttcccaaacttcattgaggatctacagctggtcttcaacaacctgaggcagtaccgatggaagctcaatccaaaaaaatgtgtctttggagtgccaaccaggaagttgctctgattcattgttcgccaccgagggattgaagcttacccacagaaaatcgaggctattcttaggatggaagcaccaccatcaccaaaaaaagtaccaaggcttactggatgcatggtagctttaaacagattcatatccagggttagagaaaaaggcttaccattctacaaa

SEQ ID NO: 19824 - DNA, 367 bp, Zea mays
  unsure (1)..(367): unsure at all n locations
gtgggaaagttcttcatccccacatgtgctaagaccgcgatggctcttttcagtccatgccagncttagctattagagctgcgtttagaccggcctcttcttttggcaaataaactaaattaaggtttgccggctaatacacccttaaaagctagtgaaccatcacttcttttaaagacagacacatctacatttgtaaatagacaggtatatcccattttgcattattgactcacagatagcagattatatgcaagagactcaactaagaacacattagatatggagtgctcattagaaatggcaattttcctaaacctttaacctggccttgatcccatcaccgatattaattgaatctgggaat

SEQ ID NO: 19825 - DNA, 450 bp, Zea mays
agcttgcattgcatatttaaattccttgtattgtatttatgacttgtctaacctagttgagataaccgccaacaaagcgagtgaaaaagcttaactcgggtcaaacctgacaagtcttagttttaagctttttgcacttaaattcttatttttttatgcaattattggttcttgaaatatgcatgaggtactgcacttagggggagtattcaaaactcaatctcttgaaaacccctagtgcaaaccaaaatggcaaattcaccatttgccaatttcctctaaacattatctagcctatggcaaaatattttgaaaagtatatgagggtgtcaatacctgtcccaacaagtgttattttgtatgattataagctgggatctgtgttggttaggagttagatagaataattcaaaatcttccaaacctccctctgtctgggctcaccggaca

SEQ ID NO: 19826 - DNA, 441 bp, Zea mays
taatacccctaaaagattgtctaactctgttaagggcaaagctttcattgtttatgataacgagggttacattttataccctgtcggttatcctgaacataaggttaggagaattcattctaggggatgtgtgtcctgaggaatccgaagagcctacacatgcacaagatcaaccatcttcctccatgcaagcatctccaccaactcaaaatgaggatcaagctcaagatgatgaatatgaagatcaagaggagccacctcaagaggaggacaatgatcaagggggacatgctaatgatcaagacaaggaagatgatgagggcacaatgccgccacacccaagagtccaccaagcaatacaacgagatcaccccggtcgaagacgcattaatggattcggattgggtgttggcgatgcaagaggaactcaacaacatcacg

SEQ ID NO: 19827 - DNA, 438 bp, Zea mays
  unsure (1)..(438): unsure at all n locations
ttcttaattctaatttggngagaacccgagtagcagtccacatagctcatgagttctgaagaagctgctgcatctaccagggagtctattcttggtaaagggaacctcgtcttcggacatgccctggtgagaatcgtgaaatctatacacattcttcatatcccattagccttcttcaccataatagtgttggctagccactctggatatgttacttctctgataacaccagcattgagaagtctatctacttcgttccgagcaccttcggctttatcctcagacattttccaaagtctttgctttcttggcctgacagatggatccacattgagtgaatgctcaatgacatctctgttaacaccacagagatcgttagctgtccaagcgaagacatctttgttgttaacaaaaatctacacggtcctttcttgttat

SEQ ID NO: 19828 - DNA, 452 bp, Zea mays
  unsure (1)..(452): unsure at all n locations
tgctaaaagtcttttcatctaggggctcggtaaagatatctcccttttgttggtgatctctcagaaagtgatatcagatgtctatgtgcttagtgtggctgtgttcaacgggattatctgccatatggattgcactctcattgtctcatatgagagggactttgctcaacttgtagccatagtccctaagagtttgcctcatccagagtagctgtgcacaacaatgtccggcaacaacatactcatcttcggtgtagatagagctactgaattntatttctttgaagcccatgacaccaaggatctccccagaaactaacaagtcccagatgtactctttctatcaattttacatccggcatagtcagcatcagaatacccaattagatcaaaggtagatcccttggggtaccatagcccaaacttatgagtgtanactaaatacctcatga

SEQ ID NO: 19829 - DNA, 460 bp, Zea mays
  unsure (1)..(460): unsure at all n locations
agctttggcgaccatgagcttgtccttttttttnttcttaaggctgncactctcttgtcggttacttcatcaatattgtctatcattaaattataataatcaccgacagttagatcattttgcttggcgaacctgacagcatttaaacttatttccacaagcaacactgcttcctgcccatagacaagctcaaaaggagatactttagtagcactgtgtttagatattctgtgagcccacaaagcctcggacaaaatctcatgctagtgcttaggattatcaaatatcttcttttttatcaagctaatcaatgttctattactggactcgacctgtccattggcctgagcataacatgtagatgaattgagcaatntaatcctatataattcggcacattcatgtaccacctttgacataaaagaagccccttggtctgtagtcaaagtctgaggaatgc

SEQ ID NO: 19830 - DNA, 435 bp, Zea mays
ctattgacaatgaaaccttttgtttacaaagtgcggcttgctgtttgtagtttcgatgtactgctacgggtagaatttcctaaggtgctcaatattccatgagtttcccactttggttccgtccatctaggtaagtcggtaggatcctggccgagtgacctctgcaataatgaatggtccttcccatggtggtgacaatttgtgtcgcccttctcccgtcagcacacggtggagcactatgtctcctattgtgaaggatcagtgtcgtactgctttgccgtggtagcgcctcagagtttgttggtacctaatcgattggatgacaacattcagacgttcttcctctaatatgtcaacatcttccagtctggttgcttccgcttcagctatactttcaaatgttagcctgggtgcttcaaaaatcaagtccactgg

SEQ ID NO: 19831 - DNA, 435 bp, Zea mays
  unsure (1)..(435): unsure at all n locations
agcttattcctctaatctcaagcttagtctgttggcaagagtgagtggctttaagttcacctcctagtgatctaattaataatttactcttcaaaggatagtttgatatattatgcttttccacaaacgactttattacgaaagagtgagatgctccagaatcaaataaaactgatgcaagtatggagttaataaggaacataccatacaccacgccgacatcctcacgaactgtttttgctgtcacatgattaactcttcccttactctggttctacggagtcttgttccatgcagttccacgagcaggtgtattctgatcaattctttgattgttgttcctctacggtgtctgtgggttgcgcttanggcaattgttggaaaaatgaccaatttcaccacacttganacatccacgagggtggactagagtag

SEQ ID NO: 19832 - DNA, 440 bp, Zea mays
  unsure (1)..(440): unsure at all n locations
tctaaagggagaacacattntatgactaacaaatgttcattttgagaaagataggatttgtagcgtatgtcaagcaggaaagcaagttggcactcatcatccacacaagaacataatgacaacggacaggccactggagctactccacatggatctattcggcccgatagcttacataatcatcggtgggagtaagtattgtctagtaattgtggatgattattctcacttcacttgggtattctttttacaggaaaaatttcaaacccaagagatcttaaaaggattcttgagacgggctcaaattgagttcggattgagaatcaaaaagataagaagcgacaatgggacagagttcaagaattctcaaattgaaggctttcttgaggatgagggcatcaagcatgagttctcttcttcctacacacctcaacaaaatg

SEQ ID NO: 19833 - DNA, 461 bp, Zea mays
  unsure (1)..(461): unsure at all n locations
agcttcanatctttccaagttccacaattgagacaagtgatctttagtgattagtgacttgagagagagagtgatccatgtgttatttgttgctcttgttgcttggtgtttgcaatcgtgctttcttcttccccattcttattctcaagacacttgtaatcaaagcaagagacaccaagttgtggtggtccttgtaaggggtctaagtgatccgtttgattaaggagaaagctcactcggtctaagtgaccgtttgagagagggaaagggttgaaagagacccggtctttgtgaccacctcaacggggagtacgtttgcaagaaccgaacctcggtaaaacaaatcattgtgtcacactcttcatttgattgtgatttgttttcgccctctctttcggactcgattatatttctaacgctaaccccggcttgtagtgtgcttaaagttataaatttcagat

SEQ ID NO: 19834 - DNA, 443 bp, Zea mays
  unsure (1)..(443): unsure at all n locations
tgcacacatagctcatttgaatacctntgatcatatctcttttatatgctatgactaatggtgtttcaagttatttcaaaccaagtcatatgtatattgaaagggaattggagtcgtcggcgaagacaaaggcttccactccgtaactcatacttcgccaccactccgagcaactctctcttctttgggggagaaatgagcatcaaggaaaaggacttcatccttggggaagagagtaaaagctcaaacgcaaaatgacttcgtctttggtataatcttaactcacttatttatgaccaaaggggaagattgcacttcgagggctctaatgattccgtttttggcgattcatgccaaaaagggggagaaatgagcccaaagcaaaaggaccgcaccaccaccatcaaattcaaaaacttaatgctttccaaaagtctttatca

SEQ ID NO: 19835 - DNA, 445 bp, Zea mays
agcttgtgagcaatacaagtacagaagggatttatctgcttccgctgatcagccgaagcccatgctcttatgtgacgatatagcagagcagaacgtgctattgggatctcaattgtctgaagaacacgaaaaaactctgataaggcttctattcaacaacaaagatgtctttgcatggtcagctaatgatctctgcggagtcaacagagatgttattgaacactcgctcaatgttgatccatccttcagacccagaaagcagaggcttcataagatgtctgatgacaatgctgaaggcgctcggaatgaagtgaaaagacaccttagcgccggagtcatcagagaagcccacactgttatggtaaacaaggccaatggcaaatggacgatgtgtattgactttactgatcctcacaacgcttgctgaagattgagttcattacca

SEQ ID NO: 19836 - DNA, 207 bp, Zea mays
tactgacagtactgctgttaagggttttttattttgaatctaggaaagcttaaggtacaacagcttctaggctaatgagacatacctatctgaccagcactaatatgaaaatagctatacaaattcatgataagcaaatggtcttcatgccactaggacattatgaatacttacagcaatgaaacttgaaattttattgcaggtagg

SEQ ID NO: 19837 - DNA, 441 bp, Zea mays
agcttatcaaatctcaaagactcagtttgcagaatagctttctagtagtggatccttatgccgagaatcgtacttctactaatctaggactttctctgaatctcaattggctgaactagatcattcacttgtcctacactagattcaatttagcagctttaggttcacttgttatctacgatgagggtcgaagatccagtcttcatattcgagaagttcggcgatccgaatcgattaatacccagctggggatctccaaccacacgacatatgtagcacttaacccttgcatatgtcaactcgcccacgggtttctcaagaccagaacgggtcctcgccaaccgagagcacagtactccaccgtccagccattggcctggtggtacacgttaccctcgccatggtgccctgcatgtatccgagagtacagcactccacctt

SEQ ID NO: 19838 - DNA, 445 bp, Zea mays
  unsure (1)..(445): unsure at all n locations
ntgatccatggattgaacattgccatatcgttaggcgtcaaaagattaatggtatatggatactctctggtagtcatcagccagatgaacaaagagtgggattgctcaaatgactcaatgggaaaatactgcactgccgtccgaaagctgttacataaattcgatggtctggaatttcatcatgtagaaagagatcggaacacagcagctgatgtactatccaagctgggatccagtcgaatacaggttccgcccggagtcttcgtacaagaaattccgcagccgagtatctcaatggatcaaacagaagagtgtaatatcatagatcaacccgagtcagactctgatgactagagaaggccgatcattaagtatataaagaatgaagaagaaccagatgacaagaactcgacagagcgcatcgccaggcagtcggctcactaca

SEQ ID NO: 19839 - DNA, 409 bp, Zea mays
  unsure (1)..(409): unsure at all n locations
agcttntgagagctcttcggcgaaagaaattatttgttacccttgcagaggttccagcgtactcaagcttgtcgtacgtcagcacgaactccgctatatgttctcctccagcggcccctgaaatgcagtgcccactggcgctggataacaaggcgtacaagcaagtggccagcatgagtgctgtgcctgctgtatcaagtgacatgggtattatctcagaattctcacatctggcagacttaggctctgaggatattcttggacggccctncgagatgatgcctggtcctgagtctccactgccagactacggtgatgatggcaccaccatgtacaacatcaacgacgatgaggctcaaagccttccatgcctcatacactccatttggtagcacgtcctcgtatgcag

SEQ ID NO: 19840 - DNA, 438 bp, Zea mays
  unsure (1)..(438): unsure at all n locations
tcatatcttggtacccaatttgaattgagtcctttgagataagttgttttattcttgagtacccacacaatccttattgtggcctttctctttgngcaggcaaccacatatacttgacaaccatcttacatggtttcaagtcaatatttaatcacatagataaaaactacagttaagaataggagccttttctccttttattaatacatcaatgagttggcttcttgatgatgaacctaccttgactttgggtgcacctaacttatcaaggttaattgcacaagtattcatatcataaagacaagttatgcatggaatatacaacttattgatccaattcaatgtgaagcatatggataccgattgaaataaatttataagatatcaaaatatatgtttacaagatttagagagtatggatcactaattgtacctttt

SEQ ID NO: 19841 - DNA, 481 bp, Zea mays
  unsure (1)..(481): unsure at all n locations
atcttaagncacctgcggcatgaagctcttcttgtcgtatgaaccttgtcattaatcactctgatttccagcctgctgcccattngcttcggtagctaattacaggaaactctgtagatctccgataggcgaagttatagcaaccaaaattgtcgtgcaatccatcctttctagccttcgtttgataatgcaactcgtgaacctggcaaaagctgtccgcaaatggttccaccgcttggcttcggagtgcccagatataaacactaagcctaacgatagcgttaggcgtcagctggtgaaaatagataccgaaccttctcagtacctctgcaataatcccatgtaagggaaatcttaatccagcctttaggaagctcttgaaaataacaatttcatccttcttcggctttggggtagtttcttctcctccgaagcataatagcttcttctgatttcagtaaaaagcctgacctaccatctt

SEQ ID NO: 19842 - DNA, 430 bp, Zea mays
  unsure (1)..(430): unsure at all n locations
tcgggccagcaacaaagatcttttctgccgccagcgccaatgtttcttattctccaggggcttcngtggaaggtttggagaccagccaagaaaaatttactgcctattctgtggtgaagacaaaggccataccactaggatgtgccacgttaccatccaaaaacagaaggaaatagcagaagcagcagcgcaacaaagtcagccgaagcaggtcatgcatactgcttcgtatcactcgccttatattccagaatacgtaggcaaccactctgcagcttctgttgcttcggtgagccaaccccaagcatcttggcagcagcctccaccgccaccgccgacccagcgagggcagcagccagaagggactcagcacaatcaccttcagagggatgtcagagaggagtctgaagctcgcacagtcaatagtact

SEQ ID NO: 19843 - DNA, 432 bp, Zea mays
agcttgtgaagggtcttcatacccacatgtgttaagtttttatgccacagccagcccatgctagtcttagcaattaaacatgcatctagaccggcctcctcttttgcaaaggcaactaagtaaagtttgccgtctaatacacccttaaaagctagtgaaccatcactttttctaaagacagacacatctacatttggtaatagacaggtatattccatattgcataactgactgaccgatagcaaattatatcccagagactctactaaaacacattagagatagagtgctcattgagattgcaatttacctaacccttttaccttgccttgatcccatcaccaatattattgaacttgggaatcttattttgacgacgaggtgacattttctctcctcgtatatggttgtgcatcgtgcgatatcagctga

SEQ ID NO: 19844 - DNA, 409 bp, Zea mays
  unsure (1)..(409): unsure at all n locations
tggtatgaacatagacatggttgtgaaaaactgtgacatttgttgtttttgtgagatatgtggnctctattatgtatgtgatgattctatgaactctgtgatatatatgtgatgattatgtgatatatgttttgtttgtttggatggaataataataacacataaaaaagaggggttctggtcactttgccgagtgtaacactcggcaaagaattcctttacgagtgcagtggcctaaacactcggcaaagaaggcacacctgggaaccggttaagcttctttcccgagtgttgtggtcttgccactcggcaaagaagcaagctttgccgattgcctcctagtgcactatgcatatgataactgacaaaggggcccgctgatgatcctttgtcgagtgccacctaatac

SEQ ID NO: 19845 - DNA, 458 bp, Zea mays
agcttgctctcggcttcgccaaagtatcctctttttttcatcataaccatgccgtctgccatcacagtatatttaccaaattcaatatggctaggtttcattgggctcacaatggtgttgtcctcttcaccttcattctcacttcctccttcagcaatgatctattcaacttcattagtggaggtaccttcggccatagcctcctctggcacaacaagactcgatcgtctcatcacttctgatattggtgctatttcggtcgcttcagcctcatccccctcatgagacaccctagcagtggatcgaactctagccatttcagtgttcgcactttttaagatgaagctgatctcaagtgacaaagcgtttgtttgaaaatgcaatacagacagcttctgctatcggtaaaatttttaacagcacaacagtgtgatgcaatgaatgttgtggtagcttct

SEQ ID NO: 19846 - DNA, 336 bp, Zea mays
acaacttaattggtaccaacgcaagagacactcattgtgtggtggtccttgcggggaaggttagttcccgattgatttgtaagagaagctaactcggtccaatggactgattgagagaaggtaagggttgaaagagaacctgtctcttgtaccaccctaatcgggagtaagtttgcaataaccgaacctcggtaaaacaaatccttgtgtctcactctttattcacttgcgaattgggttacgccctctctccgattcgtatctatttattacgcttacccatgttgtacttgtgattaagattgtataatttagattctcctattcacccccctc

SEQ ID NO: 19847 - DNA, 415 bp, Zea mays
  unsure (1)..(415): unsure at all n locations
gcatgcaagcttggcncagcgtttgagagaggggtctgctgtatttacaactgaatcatcttaagttttaaaagacactccacctgggagcccccttcgcgtttctcgcggctgttggccaaaccgcttgctgacaccctgngcctgtgaactttgaatcatggaaccattattcattttgcgtactgagctaataccgtgtgtcgcgtgccactcacctctctcaacacatgaanttgctctcgcccgaacaagttggctcccatagagtcacagtgcctccgcatgcttacgctgcctcaactgtctcccctcttcactacctgttggcgcgagcccgcgatgaggcccttcctcaacgcatgtcactccggcgccgatgtaacctgacgctcgctcacgcgacttcacgagt

SEQ ID NO: 19848 - DNA, 386 bp, Zea mays
  unsure (1)..(386): unsure at all n locations
ttatcacgcttgcattatgcccctaatttcctatgaactatctttcattttttctactgatagcagaggaggcatctaaagctccattaagtgcacacggacaatttcttacttttctaggaacatgaacacttttcttcctaggcgcatgatgaatattttttgtaggcatacctctaccatgcatataggacgaactggatgcatacataacataagagtcctatgcatgtgaatcaaaagtattacaactcctatgacactgtcttctatcattgcacataaaagcacggntctttttagtacttcttgccataggggccttacctttcttcttggcggagataggagccttatggcttgtcaagctcttggcttccctcttg

SEQ ID NO: 19849 - DNA, 451 bp, Zea mays
  unsure (1)..(451): unsure at all n locations
agcttgcaccacgatatattggtccttttcttattcttgaaagatatgggccagtggcataccgacttcagttacccgaaaccttgtctgctgtacataatgtgttccacgtgtctcaattgaagaaatgtcttcgggttccagaccaaacaattgaagtaacagatgtcctagagccagacttgacatattcagagcaccctattcgaatcttggatcaaaaggacagggttacccggagaaaaactctcaagttttacaagatacagtggaaccaacattccgaagatgaggctacgtgggaaactcaggaatttttagaaaagaacttcctaggctttctagcctcatgtaacatgtaatatgtgtaataaaggagtgagcnccaaaccacccctgcctttgaccanaactcacgaaataaaaatgtgaagcattttcttttcactac

SEQ ID NO: 19850 - DNA, 447 bp, Zea mays
  unsure (1)..(447): unsure at all n locations
tcgtgaactatcctccgaagcttctcttcactttgattcgtcttgtgccttagcacgattttctcttttccaaaatatgttccaaagattaacattgtatccccttcttgttccagatgcagtatgctgtatgatgcttatgttatgcaaaaatgatgtgatgatgttatgttatgcaaaatgatttttatgccgcagatacatatccctgtaataaagcacacacactntatatatcagcgctgacttttcgctgtaagcctcccttaggagcttcttcgccttttactttcagcggaatcatcgtttatttttcgctgtaagcctcccttangagcttcttcgccttttactttcagcggaatcagcgtttatttttcgctgtaagcctcccttaagagcttcttcgccttttactttcagcggaatcagcgtttaattttcgct

SEQ ID NO: 19851 - DNA, 380 bp, Zea mays
  unsure (1)..(380): unsure at all n locations
gcaagctggatctttcttactttcaggatattntacccgtcttgcagacattacagaacatcggagataaagaaatgcggaagcgattacataacatacatttattaaaaagtaagatcatgttgtttattacagaccaggaatatataacgagtgcagtgtaatattattacacataccaagggaggcaaaaactccttccgatagttattacacaagaagtcttaatggaggatcctttcctcccgcacttcactcttgcttttcttcattaggaaccaccttggtacagaagcaacataactctgctgcttcctcacctaanaacaacaaggggataaaccctgagtatggaattactcaacaagtcttacccgact

SEQ ID NO: 19852 - DNA, 439 bp, Zea mays
  unsure (1)..(439): unsure at all n locations
tctaaagggtgagcacattntatgactaaccaatgttcattntgagaaagacaggatttgtagcgcatgccaagcagggaagcaagttggcagtcatcatccgcataagaacataatgacgaccgacaggccactggagctcctacacatggatctattcggcccgatcgcttacataagcatcggcgggagtaagtactgtcttgttattgtggatgattattctcgcttcacttgggtattctttttacaggaaaaatctcaaacccaagaaaccctaaagggattcttgagaagggctcaaaatgagttcggcttaaggatcaagaaaattagaagcgataacgggacggagttcaagaattctcaaattgaaggcttccttgaggaggagggcatcaagcatgagttctcttctccctacacgccacaacaaaat

SEQ ID NO: 19853 - DNA, 457 bp, Zea mays
  unsure (1)..(457): unsure at all n locations
agcttgatggttttttttgtcctcaaaaacacgagagaactgtgcctcattatattataagaagaaaagaaacaaaggttacaaatagtcgcataaaaagtgctattttacaacgttgctgatcaccatcaggcaacgacaacaaagacagaaagctattaagagtgggaagaggaccacattcttttccggttgaacctatgattgcgtaaattttaatgcttgcaaattatcatcccatttttccaagtgtactgaatcaggaattgggtgatcaacgagaggaccgaanatctgatgataatttgcttaacaggaactaaatgatgtctacgcctctatacgcaacagctcgaaaggcccaaattaccttccactatgcattgaggtctagattgtatcactgtatcaggatgcatggaaccataatatcaaggaaaagactggaacaatntga

SEQ ID NO: 19854 - DNA, 402 bp, Zea mays
ttgttccagtgcacgcaagatcatgaagaataccttcatgcgtatgtccgaaggttcttgcgtctgagggcacaagcgccaacggtgcccaatgaaattgtcattgaggccatgatcaaggggcttcggccaggacctgcggcccaatacttcaccaggaagccccctcagactctggagaaattgcttcagaagatggattgaatacatccacgctgataataactttcggtagagaagggaggaagcttacaggttttccgaaatgaccaggggcttcggaggaagagtccacccaaggcacgtcagatcaattcactctactcagaatgacgacagaggaggtcaacagcagaggccgcaatattcctcccaagcttcggggcagcaacaaagctattc

SEQ ID NO: 19855 - DNA, 455 bp, Zea mays
agcttcaattggtttaaggttccatgttgaatcatccccatgtttaacttctccatttcttggcataatgtgatgtcagaagtctttactgtaagacaatggcaagaagccttacgacttagtgcatttgccacaacgttggccttgcttgggtgatagtgaatttctaattcataatccttaatcagctcaagccatctcctctgcctcatgtttagttctgactgggtaaaaatgtacttcaaacttttatgatctgtacatatatatggcagatatttcccagcagataatgacgccatattttaagggcatgaaccacaacagctaattctaagtcatgagttggataatgttcctcatgccggcacaactgtcttgaatcatatgctataactcagccctcttgcattaagacacattcgaggcaactgcccgatgcgtcacaatacaca

SEQ ID NO: 19856 - DNA, 429 bp, Zea mays
  unsure (1)..(429): unsure at all n locations
ntgctttgctgcgcttcactgttggtagttaacgcctttgccccatcagcctcaggccggaggcggtcctccgatcctcctccatgttggtcctgcttattaccagtaccagctgcacccaggttgatgagtacgtagctacctaatgttaggttgtcttcaacagctttcatatcttatctcccgctctacctcatgtttcagatttcactccgtaaatattactgtctacaacgggaaacagagtgttttccacggctcagggacgtccctacgcaagtgtggcacgtgcgatcgcacagggtcctataagaacacccccccacacacacacaccaaatatattgtcggcgtttcgagacagggggtccctaagccgacgagtgagtgtgctgcgtgccccaccccaaatgggtcgagcacgtgggc

SEQ ID NO: 19857 - DNA, 351 bp, Zea mays
agcttcgataccagctgtggcggaaccgtctgtattatttcaacttaagtgcctaagtcccaccttaaaggctagaccacacttaaataggaagaaaacgtctgtccctcggatctagtccgacgtggtcactaacaggatcaagtaccacgtactcactctaaggtgaggcacagagcaaatacaatacagcataaaaccatacattaaggagtatttaatttattacaacatcatcggagtttatcaaaagtagcgatcattgttcggaatacagcagaatataactaatggttaataatcggagggatggggaagcctggcccatcgcttctcatgctcctcctctgc

SEQ ID NO: 19858 - DNA, 429 bp, Zea mays
  unsure (1)..(429): unsure at all n locations
tagtgctgagcccnctcctgaacctgtctctcttcttctcatccgtgtctgcgtgatatccagcatactggcacaagtcattaaaagcctgtgcatactgcaacactgtcctgttgccctgagtgagtgccagaaactcgttgagctttccgtccataatcccggctggtatgtggtgtcccctgaaagctgccttgaactccctccattccacctctcgatcctctggctgcatggcaagaaaatggtcccaccaagtccttgcgggtccgcgaagctgctgggtggcgaacctgactttggtgacttctgagcaagctccatggagtagtgggaatttggattccaccactcgcaaccacacatctgcatccagtggatcctctgcccttgtgaacaatggtggctgggtgctgangaactcctggt

SEQ ID NO: 19859 - DNA, 280 bp, Zea mays
tggcactctctgacgttattgtagagacagcccgcgcctcaatccattaggtgaagtactcgacagcgacgaaggcgaacttaaggctcccctgagcggtgggcacgggcccgacgatgtccaggccccaacgctggagaggccatgtatgggcgatcagctatgtatactgcgaggggctgcctgaccgaggagaaaactgctggcatgctccgcaggaccgcgtgacccgatttgcggcgaagatcactgcgggccagtaacaacgctgacggatcac

SEQ ID NO: 19860 - DNA, 453 bp, Zea mays
aagccatatcagaaggacgtgaagagtgccttcctcaatggaccaatcttagttgatgtctatgttgagcaaccttccagctttgaagatagtgagtatcttaaccatgtctataaactctcagaggcgatctatgggctcaagcaagccccaaaagcatggtatgaatgcatgcgagatgttcttatcactaatggcttcaaagtcagcaaggccgatcctactctcttgactaaaactgctgcaaatgatatggctgtatgctaaatctatgtagatgatattatatttgggtctactaacaaatctacttgtgaagagtctagtaggatcatggttcaaaaattggacatgtctatgatgggggagttgagatatttcttacgatttcaaatcaagcaactccaggatggcaccttcatcagccataccaagtagattcaagacatactt

SEQ ID NO: 19861 - DNA, 457 bp, Zea mays
  unsure (1)..(457): unsure at all n locations
agctctgccaaataggacgcataattataccttttatgtcttctcgngatgataagtcattcttcacataaaaccattctgtcatccaatccccgggccatctcttacgaaaggttggtacgggacagcttgccccggaccgagaaacgaagctgtagcagccaaagttgttatggtactgttctttgccccaaggctctgtttcatataataattcatgaacattacagaagcttcttgcgtcaggcttcagaccttggctcctcgcggcccacacgaagatatttagccttataattgcctcgggagtaagttgatgaagatagacttcgaagaatttcaacacctccacgacgaagctgctcaaggggaatcgcaatccagctttcataaagcttcggtacaccacaacttcattctcttcaggctgtgggacaagtnntcttcccttcgtccg

SEQ ID NO: 19862 - DNA, 434 bp, Zea mays
tgtgaagattcttcatcccaacatgtgctagtcggcgatgccagattcatcccatgttagtcttagcaattaagcaggtgtcgagttcagctctatcaaaatctaccaagtatagctgaccctctaacagtcccttaaatgctattgaatcatcactttttctaaagacagtgacacctatatcagtgaaaagacagttgtagcccattttgcataattgagatacagaaagcaaattgtaatctaatgagtctacaagaaaaacattggaaatagaatggtcaggagatatagctattttaccaagacctttgaccaaaccttgatttccatccccgaatgtgatagctcgttgtggatcttggtttttctcgtaggaggagaacatcttcttctcccctgtcatgtggtttatgcacccgctgtcgagtatt

SEQ ID NO: 19863 - DNA, 459 bp, Zea mays
  unsure (1)..(459): unsure at all n locations
cacctgcacgcatgcaagctcgacaatgaggagatggcgctcgtcattattatctttcgccaaatcctcaaacaaaggagggggaaagactacaagtcccgctccaagaaggtttgctacaaatgtggtaagcccggtcatttcattgctaaatgtcctatgtctagtgacagtgaccgaggcgacgacaagaaggggagaagaaaggagaagaaaaggtactacaagaagaagggcggcgatgcccatgtttgtcgggaatgggattccgacgaaagctctagcgactcctncgacgacgaggacgccgccaacatcgccgtcaccaatggactcctcttccccaacgtcggccacaagtgcctcatggcaaaggacggcaaacggaanaaggttaaatctaactcctccactaaatatgaatcttctagtgatgataatgctagtgatgaggaggat

SEQ ID NO: 19864 - DNA, 431 bp, Zea mays
taccagaaacgccaacacgcaatgggtattgttatatggcgagagtagcgtgtaccctccatggcatgaggctggatggtggtgtatctatgctctcggctaacgcgaaccccggctggacttgtaaaccccgatggccagctgacatatgcaagggttaagcgctacatatgtcatgtgaatggagatcctcagctgagtattaatccgatcggattgccgctacttctcggacatgaagactcgagcactgacttacacgtagcatcccagtaaactgaaagggtgataaaagacggctaatataggccaagcgcttgaactatggtagaaataactctcactagaggtaatgacttaacttgataataaaactagatttttaggatccactgctttaatcacttctgcatacagagtcttgattcttg

SEQ ID NO: 19865 - DNA, 444 bp, Zea mays
  unsure (1)..(444): unsure at all n locations
ctgagctgcagctgcagctctctaagatgcatttttttnttgagcaatatgctcttttctgtgaaaaaagaggattatttgcaggggaggaagccgaacgttcagcaactaatggacgcatgagtgcacgtgtttacttgactcattattatgcctctttggtggtggccttgcaatttttagtactcttattaaatggctcatgttcattttttgcagctgaatggtggagtgcatatggaggaaagtacaaagaactacaaatgcttgcacgtcggattgtttcacaatgtctatcctctagtggatgcgagcgaaactggagcacatttgcattggtccataccaaactgagaaatcgtttgggttatgagaagctccacaagttggtttatgtccactacnaattgaaattacgaatccaacatttcgagaatgacatgc

SEQ ID NO: 19866 - DNA, 441 bp, Zea mays
  unsure (1)..(441): unsure at all n locations
tcttctcgacaagcgccgcactcactgcagagtgcgaagctgtctcatacatcagtagaggagcccctagcgctggtggagttagcgtcgttagatctatcagatactgcttcagctcttcgaaggctttctgttgagttgatccccattgaaagacttcggccgacttcagcacttcaaagaatggtaaatttctctctgctgatctagatataaatcgattcaaagatgccaatcttcctgtcagccgctgaaccccctttttgtgcttggtggctccatccaaagaatggcttcaattttgtttggattagcttcgatcccttttgttgaaactagacaaccaaggaatttgcccttctttactctgaagacacattnttctggattcaacttcatgccagcttgcctaaagttagcaaatgtttcctgtagatcgac

SEQ ID NO: 19867 - DNA, 473 bp, Zea mays
  unsure (1)..(473): unsure at all n locations
atgcaagcttgtgaaggttcttcatccncacatgtgccaagctttttatgccacagccagcccatgctagtcttagctattaagcatgcatctagaccggcctcttcttttgcaaaatcaactaaataaagtttgccgtctaatacacccttaaaagctagtgaaccatcacttcttctaaagacagacacatctacatttgtaaaaagacaattatatcccatattgcataattgacttacagataataaattatatcccaaagattcaactaaaaacacattagaaattgagtgctcatttgagattgcaattttacctaatccttttaccttgccttgattcccatcaccgaatataattgaatcttgggaatccttattcttgacgtaggaggtgaacattttcttctcccccgtcatatgggttgtgcatccgctatcaataatccaacttgaacccccggatgcata

SEQ ID NO: 19868 - DNA, 438 bp, Zea mays
  unsure (1)..(438): unsure at all n locations
ttaaaatagagtccatatagtcatgttataataaaattctttgtcttatacgacctgtattcccatatatctagggatccaaaatggaagcaatctcaagtcgcaataatgttccacgtttcgatgccttactcacacaaggatgcacatatacattgtatagagtgggattctgtctaaatagggaggggattcaatttcggaatattggacatgggctagagatcggactgataacacatactattgtggagccattcattaagccaatccaatttcctccatttccaaagtatcttatgccattccataaggtgtatcaacaaccgcataagtcgttcgtatgtaatgatcattccttccatatggtntatatatatatatagtactaatggctgatgtataagttattcaaagaatactaatcacatgtgaatt

SEQ ID NO: 19869 - DNA, 454 bp, Zea mays
  unsure (1)..(454): unsure at all n locations
agctttgaaaatgcagcaagatatggaagatttattacacgaagttataattgaaagtttagaaagtaaaataaaagaccaatcagctactcttgaaaagagggacttcgagcttcagacaaccgaaggcttattggcataagctgaagctaaaatagcagaattaaatacgaagcttctctcccagtcagaaagcttcgaacaagaaaagcagaagcttaatgaanaatttgaggccgaagttcagaaaagttcagatttgcaaaaatcattgacaagccttcaaaataaatgtctggagttcagtaatcgatgcgttcaacggctgaagcaggtcttctattcggttggagccagcaacgaanaatttaatccttcgactgaagacctgccagggaccttcgaacatttcgaaggtgaaattgatgaccttgatgaagttattgctggacat

SEQ ID NO: 19870 - DNA, 439 bp, Zea mays
  unsure (1)..(439): unsure at all n locations
tctaaagggagaacacattttatgactaacaaatgtncatttttttatagacaagggttgtagcgcatgccatgcagggaagcaagttggtggtcatcatccgcataagaacatcatgacgactgacaggccactcgagctcctacacatggacttattctgcccgatcgcttacataagcatcggcgggagtaagtactatctagttattgtggatgattattctcgcttcacttgggtattctttntgcaggaaaaatctcaaacccaagagaccttaaagggattcttgagacgagctcaaaacgagtttggcttgagaatcaagaaaataagaagcgacaacgggacggagttcaagaactcacaaatcgaaggcttccttgaagagggcatcaagcatgagttctcttcttcctacacgccacaacaaaatggt

SEQ ID NO: 19871 - DNA, 458 bp, Zea mays
  unsure (1)..(458): unsure at all n locations
agcttcgctgctacgcttagatagacattgtttcattgcgtttgggccgattctgatggatctaatctcgtagtttgtactagcctattatccacatatacttaacttatgcaataaaagaaattgtaatgctttgtatagatataaaatngttggaaatacttgatagttttgattcgtgggagtcataaatgtgcaaaggcttggaattatgctcaagaattccctgttcatttcatttaaccatagcaactacatccagaaagtccttaggctatctccgacagcctttctatcatatttattatctcaattcttatntcaaactccactatgtaatcagtacggtttacaatgcaaaaatatgttttacacggctatatacgtgctccactgaacgcacaaatgtgtttacacaactatacgctctgcgctctgctgagcacgaccttagctta

SEQ ID NO: 19872 - DNA, 423 bp, Zea mays
tcttcaccacgcgtccgtggatatcttgaggaggttgagcaatgtttcttctccttagatgctctgctttcttggtcctttctttattgatgagcaacttttgttttgatcctgcagcttgatgctcattcaaaaattggctttcttttgagcaacaggggttaacacatggtgatatattatctaaatgcgcatgtgtgcaagaatgaggttcacatgaatttaagttcgcaattacaacctcatgagcaacatcaagcatgatatggtcatcaactaattcattatgagaataaggtagcatatcatatttttcacttagagcaagtttttctaaatttatcatttctacttgactcttaagcatagaattctcaatttaagttgacaacatcagatatacatcatgttatttcttgctca

SEQ ID NO: 19873 - DNA, 456 bp, Zea mays
  unsure (1)..(456): unsure at all n locations
agcttatgaagattcttcatcccaacatgtgttagtcggcgatgccagagccagcccatgttagtcttagcaattaagcaagtgtcgagttcagctctatcaaaattcactaagtatagctgaccctctaacactcccttaaatgctattgaatcatcacttcttctaaagacagtgacacctacatcagtgaatagacagttgtagcccattttgcataattgagaaacgaaaagcaaattgtaatctaaagaatctacaagaaaaatattggaaatagaatggtcaggtgatatagcgattttacccaatcccttgaccaaaccttggtttccatcccgaatgtgatagctcgttggggatcctggtttttctcgtaggaggagaacatcttcttctcccctgtcatgtggttnggcacccgctgtcgatacccagcttgagcccccgatgcat

SEQ ID NO: 19874 - DNA, 433 bp, Zea mays
  unsure (1)..(433): unsure at all n locations
tggaattaggcatacatgctcgcccatatctccacaaaagaaatttcttacgttacgaacagcctatcatgcagatgcaggcaaggggatggtatggggtcgcacgctttctgctgtctgaactctcacgggtgcatcttatatacacagtatgtttttacagtattagagctaatttgacaactatattttttaaaagattactattttctcatagaaaattgaagtaatttctcttgaagaaatagcccttagtattagttaaatgctatattgcgctcgtgggcacatgaatatgatacttatacaatggtacactgtactactcatacatagatgtaaggctgtttctgactttgatcggtaacacccacaacagcaacagntaatcattttgggcggccacgaattgccgtagaattttcttattttc

SEQ ID NO: 19875 - DNA, 448 bp, Zea mays
  unsure (1)..(448): unsure at all n locations
agcttgtccctcattcgatcaggtcctcctttatcattatgaanattaaaaggcaatataggacgatcaagtcagagcaataacacaatcggctgttaggggaattataaaaagaaggtatgaattcagcgcattggttggtgatgcgtgacagaaaacctttcaggaagtagacgaggaactggcagctcgtgttgagcgtctgctgcaaaagagggccgaagaccacagctggattgaccgtcacaacatccagcccggtctgcttcgcgtattcaagtgcggcctcttctgacgagatcttggcgacagaataccagttctgcaattaaacagggcgaagtgacgaactcatatttggaaacgaacgagtatatgcaagtttatatagatcatattntgaaaccaggtctttgatctgccaggctctcccttgttttcgtactgc

SEQ ID NO: 19876 - DNA, 429 bp, Zea mays
tgtgagcagtacaagtacaagagggagaaagctgcttctgtcgatcatccgaaaccaatgcttttatgcgaagatatcgcagagcacaaggtgctgttgggatctcaattgtctgaccagcaagagaaaaccctgataaggtttctcttcaacaacaaagatgtctttgcatggtcggctaacgatctcttgggcgtcaacagggatgttattgaacactcgctcaatgttgatccatctttcagacccagaaagcagatgcttcggaagatgtctgatgacaaggccgaaggtgctcgaaatgaagtaaaaagactccacagcgcacgagttattagagaagtgaagtatccagaatggctggctaacactgttatggtaaaaaaggccaatggcacatggaggatgtgtattgattttactgatctc

SEQ ID NO: 19877 - DNA, 383 bp, Zea mays
  unsure (1)..(383): unsure at all n locations
agcttgttagcaatttagcagagaaaacccacattntttcttcctctgcttggtctctaatgatttttgcgtcgtacaacaaccagacaaacaataagaaatgatgaaatgcggcaaacctacattggaatgaatgagaggcgaggatgaattacgaggggatcatcggggagtttcttggacatgatcttaaggaaggcgacgtggaacaccctgtagccttgctcgaagctggtgaaggctgagcaagaggcccctcctcatcatcatctgtctcgggctgggagagggcctaattgtcgtcaccatggaaaatgtggccctgcggngattcaatgtgtgctcttgctgctgatcgtcatgacctttgaaagctctcttgt

SEQ ID NO: 19878 - DNA, 423 bp, Zea mays
  unsure (1)..(423): unsure at all n locations
tcctccggccgccaccacgtcagcaccgacggcggtgttcgcctctctaccaactccgcgccggcaaacacaggccgctccgaagcgcaccagcaggtcctcgctcccgccctcgccacgaaagcgaggaagagggcggaatgttgcatcctagctggactgcaacagtttgccttccccggcatggctggaggacgtctcctccgcagagctggaggatggtttccaccaccagaagctggaagaggaggtggccagccgacccgcgcgggaggtagagccccggctcgcctcgctctccgccccagcaaggatgatgaacatccttgaagctgagggcgggaccaagatcgcaggccggcttgcttctccccatccaggggctggtggtcaccgtctcgggtgaccactcgcgangggatg

SEQ ID NO: 19879 - DNA, 462 bp, Zea mays
  unsure (1)..(462): unsure at all n locations
tgagcctcacgttgaaggacacgttttcgtctttttcgaagagaagatgtctcaagacaagaagacagttgctgagacgaagctaaccgaagaggagaagctccttgaggagaagactgctagatttgttgagtccatagcaaaaaccaatacagagaagattactaaatagatactagaaggcttgtctgaagatactgatgatagcgacagctatgatgtggagagtggaggtgaagactctgaagatcagccctggcgaccaagtcatgcagtcttcgggaaatcaactattaaacaaggtcgttccttgctccgaagaanacgatgttgtgatcttccgaagcttcttcanagctggacttcggttcccgttgagcagatttgtggttgaagttntaaagacataccagattntccttcaccagatcactcccgaagcagttattagaatggngatct

SEQ ID NO: 19880 - DNA, 439 bp, Zea mays
  unsure (1)..(439): unsure at all n locations
tttgaacatgggcagaagaacacctccacgtgttcgacgcgccctgaacgcgccatagcatgcccagcgcccgaacccgcgcgcccaacgccgcgccaagccacgcccgtgtcccctgcccgcgcccgtgcctataaagccagccaaggcttcagccgtacgcccccgcgcgctctcgacctcaccggagtagaagatcgccggagtttgccctgcacacgacgtgccagtggccgcccgagcacccaccaccgtagaccgtncaaccgagccatcccccgccctgtccaaccctcgaggtagactctaagtgcctcggtgaagctcctagagtgaggaatcgagctctgcctcgccggagacgccatatcaaggccaccgaacttcacccgaccgccggcgaacgtagaccgagctncacggtgagttattcttcaat

SEQ ID NO: 19881 - DNA, 364 bp, Zea mays
  unsure (1)..(364): unsure at all n locations
agcttatggaggttcttcatccacacatgtgctaatcggtgatgccacagccagcccatgctagtcttagctattaagcatgcatctagaccggcctcttcttttgcaaaatcaactaaataaagtttgccgtctaatacacccttaaaagctagtgaaccatcacttcttctaaagacagacacatctacatttgtgaatagacagttataccccatattacataattggctgacagatagcaaattataaccaagagactctactaanaacacattagagatagagtgctcattagaaattgcaattttacctaacccttttaccttggcttgattcccatcaccgaatacaattgaatctt

SEQ ID NO: 19882 - DNA, 443 bp, Zea mays
  unsure (1)..(443): unsure at all n locations
tgtcagtttattgaaaagtgatatactaatcatggcggggtttggaatgtatttttctagctatgtttcagaatgttcttcacatgagttacagttagtcaattacaatcaccagtaatatatactccctccgttccaaattacgagaagttttggcggctctagaaacagacccattactatgcacttagatatctgctatgtctagatatatagtaaaaactgtgtatttaaaaaagcctaaacatcctgtaattctgaatgaagggattatttactaatttatgtgtgaagtatatattataatttatgtgttaagtatatattacaaaagtacagaaaacaattgagaaatatgaactaatacaaacacaaaatgaggaaggtcactccagaactgtgatacaggtttntacctatgcacatcaattgtgtaacaccat

SEQ ID NO: 19883 - DNA, 463 bp, Zea mays
agcttgccattgaatttcaatcggtatcttttgatactacatctagtatcatttacatgtcttctccaacatttgattagactatatttcatattatatacttccatgttgctaaaagtgcataagtggttaactcatattaaattacctatgcataagggaagttagtcttttcaactcatgtcttgcacctctaattttcacatgctttttcctaaatgtagaagatctctgacagggggagtttttcttcgtctctaaagggggagaaacttctttctaaaggagaacactcatttagggggagtaaacttttagtgcttctattgatattaatttataattctttagagagggcaagtcttatttgcttcctacatgcttataatgtcttccttttcggtggttgatgccaaaggtggagacagttacggaccatagcaatgaacaatgtatcacacac

SEQ ID NO: 19884 - DNA, 436 bp, Zea mays
tgccaatacttatcatagtagcaacatttaccagcacagcaactgctaaccatacctgtaacatggccatttgcgtgctggggactggacatgattggacccttcaagaaagcttaaggaggatacactcacgtgctgtgtgccattgataaattcactaaatggatagagtgcaaacctattgcttctctgacctcagctaaggcagtagaattcatacaagatataatattcaggtttggaataccaaatagcattataactgacttgggatccaatttcactagctctgaattctttgacttctgcgaacaaagaagcatccagatcaaatatgcgtcagtagcacgcccaagagccaacggtcgggtagaaagggctaatggaatgatattggaagcactcacgaagaaggtcttcgacaagaatgaaaagt

SEQ ID NO: 19885 - DNA, 464 bp, Zea mays
agcttcatgttcaaatctgaaagagtgtgtgatctagcatatccttgagttttggcataagatgcagaaagattactgggaagagttccgctgctcatattctgtgatgcagtcaatctgtgtgacacagtgctctctggtagttgcttataacctccaagaactatcttttctttgatatctgagcattcattcattatctctactccagcatgagatttaacactagctgaagcgaacagatgcgcaggttcctctgggatctggggaactggatggtttctaggaattgtaatgcagctcccttgtgccttttgaaccaaagtaagttttgtgaagcttgttgaagtaccattgacaacttgtcctgttgctttaggcctagtatcgctagaagcaattgacggtctgttaagtacagtaagacgccgcactgatgcaacttgccatgagaactacatcag

SEQ ID NO: 19886 - DNA, 414 bp, Zea mays
  unsure (1)..(414): unsure at all n locations
taaagccatggtaagtagcatatgccaataatatacgaattgactcatgcctagctacgggtgcataggtttcaccgaaatccaaaccttcgacttgggagtatcccttggccacaagtcgagctttgttccttgtcaccacaccatgctcatcttgcttgttgcggaaaacccatttggttcctacaacattttggttaggacgtggaactaagtgccatacctcattcctagtgaagttgttgagctcctcttgcatcgccaccacccaatccgaatcttggagtgcttcctctaccctgtgtggttcaatagaggaaacaaaagagtaatgctcacaaaaatgtgcaacacgagatctagtagttacccncttatgaatgtcgccgaggatggtgtcgacggggtgatctc

SEQ ID NO: 19887 - DNA, 462 bp, Zea mays
  unsure (1)..(462): unsure at all n locations
agctttgaagtatgtgaaaggttcttctatactgaaccgtcgccatgccaaatgggttgagtttatcgaaacatttccatacattgtgaaatataagaaaggtaaggacaatgtggtcgctgatgccttgtctcgaaggaatgtgttgttgaatcaactaaaggtaaaaattttgggtcttgaaaatttgaaagaaatgtataatgatgatcctgaattttcagaaccatacaatcattgtcaagatggaaaaggttgggaaaaatatcatatacacgatggatttttgtttagagctaacaaactttgtgtaccaaattcttcggctagattgcttttattgcangagtcacatggaggaggtctaacaggtcattntggacaacagaagacttatgaactgctcagtgatcatttctattggcccaagataacgagagacgtcatcagacttgtggagcg

SEQ ID NO: 19888 - DNA, 422 bp, Zea mays
agcctgatcaggattatgcgataactattgtggatttcctccctatatgtgcagaacttccactagcgcctaagatgagcataaatagttgcacctagctattggtggaagatgagctctaaggctttctcctatcagcgatagagtccttgagggatgaatgatgccttggcaatgagagactatggaaacatactaaaggggtcctctgatattgagcgggtaaaggaagaagaaagttggtagtaagcctaaatggactccatttgtttaaatgaccacatgtacatgctcaagcggagaagctgaagatcactcatcgtgagcatgggcacaatggaaagagtggagaacatgagtcactgtcaatttcgtagcacatggcatgcttatatttaacataaattaatgacaaataatat

SEQ ID NO: 19889 - DNA, 414 bp, Zea mays
agcttggtccgtctggaactcgggatctattattctttgggtggggacatcactaagccagcaacgcccatttcaacagtcatccgatcggtttcagtccttttagtccagctccacctgtactcgttccagaaatgcctcagccttacgttccatttcacatgcctaccgtgccacaatgttttcacagagttctttttcgtccacgaatctgttccatggtatcgtcctgctgaaacaggtacgtgcatggatggtcaacacccgtgaggtccatgaactagcgatactagcagtcgggggtttctttccgagctgaagtgaaactgtcaaggccacggagtcctcagttggcctgcccactctggttatgtgctagcgcaatacattcgtgtcgtatgaatatgcaaaatt

SEQ ID NO: 19890 - DNA, 404 bp, Zea mays
atatgctaataatatgcgaattgactctatcctaactacgggtgcataggtgtcaccgaaatccaaaccttcgacttgagagtatcccttggccacaagttgagctttgttccttggcaccacaccatgctcatcttgcttgttgcggaagacccatttggttcctacaacattttgaataggacgtggaactaaatgccataccttattcctagtgaaagtgttgagctcctcttgcattgccaccacccaatcccaaacttgtaatgcttcctctaccctgtgtggctcaatagaggaaacaaaagagtaatgctcacaaaaatgtgcaacccgagatcgagtgggtacccccttatgaatgtcgccgagaatggtgtcgacagggtgatctcgttggattg

SEQ ID NO: 19891 - DNA, 457 bp, Zea mays
  unsure (1)..(457): unsure at all n locations
gctgtgtatagattaccgccctcttaatgctgtaactatcaagaacaagtatcctttgcctcgtattgatgttctctatgaccagatggtcggggccaaggtgttttccaagatagaccttcgctctggctaccatcagatcaaaatacgagcaagtgatattccgaagaccgcattctcaaccagatatgagtcatatgaattcttggtgatgtcattcgggctgacaaatgcaccagtatatttcatgtatctgatgaattctgttttcatgccggaattggacaagttcgtggtggttttcatcgatgatattctggtgtactcaaggaacgaagaagaacatgtcgggcatttgcatgtagtgcttcaacgtctgcgagagcaccacctttatngccaagtatccaagtgtgattnttggctaaaggacatcaaattcttgggtacactatct

SEQ ID NO: 19892 - DNA, 433 bp, Zea mays
  unsure (1)..(433): unsure at all n locations
tgactcaagtatccacacattaatccttaattcatttgtcccgtctcatggacaaggcatcctccctggatccaagtccatagaccaacatatatcccattatcaagatgaatacaatcaattcctgacctcgcgcgagtgctagaaaaatcactcgacttctaccgagatcctgattagcaagcagctactcgacctagcatactagtattcatctcaaaaggagtcctaagttcatgcaactagaggtttcaagcaactcctacacttaagtgcacattacagtcctacaagcattaagtgtagtaaagtagcatataataacatggttatgcataaaaccggggcttgccttcgactgctggggctgcggngagatcctcaatagcagcctctgaagcctgctcctggtccttctcttggacaggtcctt

SEQ ID NO: 19893 - DNA, 457 bp, Zea mays
  unsure (1)..(457): unsure at all n locations
agctngntgtctttcttcggggacttcattttctttacaatgagactattacatgaaatatacttgaaaaacgtattagtctcaaagtcttagattatagagtaacctccccctggatgtgtgcatacaagttttgaatgcttgtaggagacatgcactttgatttgatatcaagaggggcaaattatctataatccgagctttgacacatataagttaaatgataccaaatgtaggatgtaagattnttaaagcattagtatcatttacttaggaatgttcaataagctatgtgtcgtgcttaactaaacagtttanaccatgtaggtttgctcaagattatgaaataagaacgagcaatcactacaccanaatagtggaacttctagagcctanaccctangaagttagccctaaactctangaagttagccaaactctcggaagtaagccatcc

SEQ ID NO: 19894 - DNA, 245 bp, Zea mays
tcagccattgaaactagctggtactcatacttggggcacactaaggcttccatgactgacccgacgtcaaaaaaatacaatgtatggcatcacccaggaaaaaagatggatcaccacctcctatcaattattaagaagacgaaggaatcaaaagaaaacccaataaacataggtttgctttagctggtaccacacatatgacgttccaccatacagcaaaccattcaatagtcaaactaaatcat

SEQ ID NO: 19895 - DNA, 461 bp, Zea mays
agcttgtgaagattcttcattccaacgtgggctagtcggtggtgccagagccaacccatgttagtcttagcaattaagcaagtatcgagttcagctctattaaaatcaactaagtatagctggccctctaatactccattaaatgctactgaatcatcacttcttctaaagacaataacacctatatccgtaaaaagacagttgtaaccattttgcataattgagaaacagaaagcaaattgtaatctaaagaatctacaagaaaaacattggaaattgaatgatcaggtgatatagcaattttaccaagtcctttgaccaaaccttgatttccatccccgaatgtgatagctctttggggatcatcatttttctcgtaagaagagaacatccttttctccctagtcatgtggttggtgcacccgctattaatgatccaacttgagcccccggatgcataa

SEQ ID NO: 19896 - DNA, 450 bp, Zea mays
  unsure (1)..(450): unsure at all n locations
tgtgaagattcttcatcccaacatgggctagtcggtgatgtcttatccaacccatgttagtcttagcaattaagcatgtgtcgagttcaactctattaaaatccactaagtatagctgaccctctaacacacccttaaatgctattgaatcatcacttcttctaaagacagtgacacctatatcagtaaatagacagttgtagcccatttgacataattgtgaaacagaaagcaagttgtaatctaatgaatcaacaagaaaaacattggaaatggaatggtcaggtgaaatagcaattntacccacaccttngaccaacccttgatttccatccccgaatgtgatagctcgttggggatcttggtttttctcatatgaggagaacatccttttcttccctgtcatgtggttagtgcacccgctatcgagtatccaacttgagccccccg

SEQ ID NO: 19897 - DNA, 446 bp, Zea mays
  unsure (1)..(446): unsure at all n locations
tggacgtgaaaagtgcctttctcaatggaccaatcaaggaagaggtctatgttgagcaacctcccggctttgaagatagtgagtaccctaaccatgtctataaactctctaaggcgctttatgggctcaagcaagccccaagagcatggtatgaatgcctaagagattttcttatcactaatggcttcaaagtcgaaaaagccgatcctacactctttaccaaaacacttgaaaatgaattgttttgatgccaaatttatgttgatgatattatatttgggtctactaacgagtctacatgtgaagagtttagtaggatcatgactaaaaaattcgagatgtcaatgatgggggagttgaagtacttcttggtatttcaagtaaagcaactccaagagggcaccttnctaagccagatgaagtatactcaagatattctaaagcag

SEQ ID NO: 19898 - DNA, 390 bp, Zea mays
tctaaagggagaacacatgataggtctaactaatgttactttcttaaaagatagaccttgtgtagattgtcaagcaggtaaacacgtgggaagctctcatcatgccaaaaatgtgatgacaacatcaagacccctggagttacttcatatggacctcttcggacccgtcgcctatctaagcataggaggaagtaagtatgggcttgttatagctgatgatttttcccgcttcacttgggtattctttttgcaggataaatctgaaacccaagggaccctcaagcgcttcctaaggagagcccaaaacgagtttgagctcaaagtgaagaagataaggagcgacaatgggtccgagttcaagaacctttaagtggaggagtatcttgagga

SEQ ID NO: 19899 - DNA, 457 bp, Zea mays
  unsure (1)..(457): unsure at all n locations
agcttgtgcaagtatgtttcaaaaccattttacacaatatntttagggttttaaactctgatgctaaattctccttggtgtttgtagtgttaaggttttagtgagttttattctaaaccatagctcctgtgacagtagatggcgaaaatggtagtgtttgctttcatttattcttggtcttgttctctgagctacttcaaaaagtctaaaatgaggtcaaggagaatttagatttaagccaactactccgtactacttatttcattaggtaatggccagtgtcaaagagcgacgtataacagcactaatatttataatggatagtaagtattattagattaacaacgcaacatatgtttataataaatatatcaggatatatatatatatatatatatatacacactgataattatttattaaaaaatagttaaaaataatttcttgaaaacaagat

SEQ ID NO: 19900 - DNA, 441 bp, Zea mays
tcgatgcgatggcagaagggggaaccgactcaaagatgaaaagacttctggggcctcgacagattttcataagccgttaacaaatgtaatgggcatggatgtaattttacgtgggctgcgtcccgcgtctataaatagatgaacagtactcccgtactgttcacgctgacttggcatttgcttttggcatcacgctcgtacttttcaccttctctcaagaccgaaggtacatttgtaatttggaatcatttctgtttttccatgttaataaaatagaaatgattctatggtgatgcttatatcatatttcatgctttatgtaagtccttcgtcattacttgttatgtttacgaaggtatgtctctcatgaccttcgttcgagactcattattttccgaaggaacataatgcttcgaaagacgaatgattttaacacttaat

SEQ ID NO: 19901 - DNA, 336 bp, Zea mays
  unsure (1)..(336): unsure at all n locations
atgaatgttgtgggaacctctcaccaacctgtctatatatattgcgcctgtatgtggacccattagtgctgagaattttatatttggtttttaataacaagctcacggaaggttgtnttcaaacctttgacatttcaaagccctgatacttttcgcccatcgagcttcgtatgataaaacaatctacaaccatgaaagggctacttgtggnggtcttcttctccgccgatggtcctcaagacaaagtcttcattggcaaagttgattttgaggactctctctctacaaagatcctcaagacgaagatactgtctggaagcaacaatggtgaatacc

SEQ ID NO: 19902 - DNA, 454 bp, Zea mays
  unsure (1)..(454): unsure at all n locations
tatctcagcttaattgtgtaacgttccttgttgtctatacccagattcaacttcttcatctcttgacaaaaagtggtgttaggtgttcttattgtaagacaatgacaaatagtcttgcgaatcaaatcatctgccaccacattatctgttcctcggtgataatgaatttccaagtcataatctttgattagctcgagccaccttctttgtctcatgtttagctcggactgcgcgaaaatattcttcaaactgttgtgatccgtatacaaatggcatatattccccatcagataatgatgccaaatcttaatggcatgaactactgcagccaattccagatcatgggttggataatgttcctcatgtcggcgcagctgccttgaagcataagctatgactcatccctcttgcataagacacattcaagttcacagnctgacgcgtacaatacaca

SEQ ID NO: 19903 - DNA, 430 bp, Zea mays
  unsure (1)..(430): unsure at all n locations
agcttgttttgtgctcatcttctctcttcatccanatcttgtgataacccgagnaataatccgacaggctcataagctccgaagcggctgccgcatttatgaaggagtctattcttggaaaggaaattcatccctcggacatgccttaatgagatctgtgaaatcgatgcacattctccactttccattgtgccttcttaccatcacaatgttggcctaccattctgggtatgccacctttttgatcactccagcactaatgaatcttttaactttggttcttgcacctttggctttgtcatctgacatctttcgaagctactgcttcctcatattgaccgttgggtctacattgagagactgctcgatgacatctctgttgacccacaaagattcgtggttgaccaatcatgatatcgttgttattaac

SEQ ID NO: 19904 - DNA, 327 bp, Zea mays
tttctcacaagctgcgtcctgtgcctatatattatgaacaatattccgctattgattcacaccttctgacaattataatcgcattagtccgaattcaaccctttgccatagcatagagatatttgattccataattcatatattaagtaaacataacgcgatttgacatgtatattcggcctctcaaccctttatttatgtttcttataactccgctgaatttattacaagctaagcttgtatctatgctttgtaccctctccaaacaatttctcataaatatgttcatggacaggagttacattaactttatgtgccttgtcttat

SEQ ID NO: 19905 - DNA, 445 bp, Zea mays
agcttgtgaaggttcttcatccacacatgagctaatcggcgatgccacagccagcccatgctagtcttagctattaagcatgcatctataccggcctcttcttttgcaaaatcaactaaataaagtgtgccgtctaatacacccttaaaagccaaggaaccatcacttcttctaaaaacagacacatgtacatttgggaatagacagttatatcccatatgacattattgactaacagatagcagattatatccaagactcttcactaataacacattagagatagaatgctcattagatattgcaatttacctaacccttgtaccttgccttgataccatcaccgaatatatttgaatcttgggaatccttattcttgacgtaggaggtgaacatctacttcttccccgtcatatggtgtgtgcatccgctatcaataatccag

SEQ ID NO: 19906 - DNA, 431 bp, Zea mays
ctcttatacactcaagctggaagttcttatcccacttgctagcaggatgccttttttcctgctttcttacataagctgcattaaccatctcttttttgaaaatcactaaataagttagcgttaatacacccttataagctagtgaaccatcacttcttctatagacagacacatctacatttgtaaatatgacagttgtaccccatgttgcataattgactaactgatagcatattgtttcccaaagactcaacttaaaacacattataaattgagtgctcattagatattgcaattttacctaacccttgtaccttgccttgattcccatcaccgaatataatagaatcctgggaatccctattttgacgtaagatggaacatagtcttttccccgcatatgggtgtgatccgtgtcgatatcagcttga

SEQ ID NO: 19907 - DNA, 362 bp, Zea mays
taactctatcaaaatctactaagttatatgaccctcaacacaccctgtaatgctattgaatcatcacttcttcttaagacagtgacacctacatcaataataaaacagctgttggccatcttgcataatttgagataacaatgcaagttgttatctaaagaatctacagaaaaacatcggaaataaatggcacgaaatatagcatttaccaaaccttgaccaaccctgatttccatcccaatgtgaagctcgtggggatctggttttctcgagaagaaacatctctctccctgcatgtgtgtggcacccctgcgatatcacttgaccccgatgaaaactacaaacaattagtctgatttaga

SEQ ID NO: 19908 - DNA, 395 bp, Zea mays
agcttataatggagaacacatgatatgtgttactatccttcaattccaaaaagatataccctgtgcagctcgtcctgcacgtaaacaagcgggaggatcacatcacagccagaatgtgatgaccaccctcaaaccgctggagctgcttcatatggacctcttcggacccgtcgcctatcttaacataagaagaattaagtatgggctaattattgttgatgacattttccgcttcacttgggtgttctctctgaaggataagtctgaaacccaatggaccctctatcgctttctcatgagagctcaaaatgaattgtagctcaaggtgaagaaataatgtgcacaacggtcccaattcaaaaccttaagtgatgagttcttgatatgatggtcaa

SEQ ID NO: 19909 - DNA, 391 bp, Zea mays
  unsure (1)..(391): unsure at all n locations
tatatttttctcataccacaatactcactgtctgcagcctaataacgcgctttcccaaaaagatgtcccatcggctccttcgaaacatgctgtcttaaaaataaattcaagcaagttgcttctataagaggtaaaatgtatctttaaactcaatggacttttgttatgattcccccttttccctgtgtcaattggatgctttacgtcaagcagtatactatttcgtgttctgcttctcagatatgcccaaattgttatgggtgcagagaaggcatgcattggatgagtggatgcagaagttactctctgacattgacttgtcaagaaatgctcctgtntgtgcttatcttgaacctgaaactgctgcgcgttcatgtatgtgctacctaat

SEQ ID NO: 19910 - DNA, 396 bp, Zea mays
acttacacactttcatccttatgtatgtgaaccagagagagccgatatggcctctcttgctagagttgacacacacatatactgtgatacatgtttaatggacgccattctatcttttataccaatacttatctattagagaccgatgcaattacttgtcaactttacaccgcacaccgtgcaggcgaagaaagcgcaactggtataatggcgagaacaaaaaaccttgggtaattgaactgacctttgtgcatacctttaagtgaccctttcatcacccgaactaactttagagaagcggtatcctttacacttaacaaaacccctgaccttgctaccatagcatactgtgcattgaaacaacgcgataggcggactaactttgcttggatggac

SEQ ID NO: 19911 - DNA, 452 bp, Zea mays
  unsure (1)..(452): unsure at all n locations
cacctgaagctgcagcttttgagctgctgtcaaaatgagatgtgaactatcgtcctcgatctgacactatccttttcggcacaccatgaaaggagactattcgtgacatatataactcaacttacgttgctcccgtgtatgttggcttcacaggtatgaaatgggccacctttgttaaacggtccacaaccacccagatggaatcataacccggcccggtaccatggaggccaactatataatccatcccgatctcattccactttcactgaagaatccgcaaatgctgcaacaatccggcgggcctttgatgctctgctntggttctctgacagctatcacagatggcgacatattctgcgatttctcttttcatgccataccaccaaaaacttctttataaatgctggacatcttctcacttacagggtgatcgagtaggctgtctcatg

SEQ ID NO: 19912 - DNA, 436 bp, Zea mays
tggactctgtgagtctgatagagatgtgggcagaaggtgtcatggctttgggttagcatgcaccatgcatagacagcgactcgcttggtgttgtttctttggatcccacgtactatcgtatccaatgcgctcgctgttcatctcgccgccccgcaagggcggccctgagaatattgtggcccggtgcgatacataatttgtggtccggtacgagataaaaattgaggcctcattgactataaatataagaagattattttttttgaaatacttccatcccatacaaccatcgacaactcctcttgctcctcgatattccttgaaagtactgtagtatgaaaaatattatgaataacatctctctgcgatgtattgaacttctctatatgtgtactcttgtactaccacatatgtatgttttcttaaggacgacatg

SEQ ID NO: 19913 - DNA, 438 bp, Zea mays
  unsure (1)..(438): unsure at all n locations
agcttctaaagggagaacacattctatgattaacaaatgttcattctgagaaagacaagatatgtagcgcatgccaagcatggaagcaagttggtgttcatcatctacacaataacatcatgacgactgacaggccactggagctcctacacatggacctattcgactcgatagcttacataagcatcggcgggagtaagtactggctagttattgtggatgattattctcgcttcacttgggtattctttttgcaggaaaaatctcatacccaagagaccctaaaaggattcttgagacgggctcanaatgagttcggctctatgatcaagaaaattagaagcaacaacgagacggagttcacaaactcacagattgaaagctttcttgaggaggatggcatcaagcatgagttctcttctccctacacgccacaac

SEQ ID NO: 19914 - DNA, 454 bp, Zea mays
ctataagtgagtgcttagtttttatattatacaagccatgggaggcacatactcctcccgataagtttaattaacaaaagatcctaagtggatgaccgagtccttccgcacttcagtcttctttttcctcgtttggtaccaccttggagcagaatcaacaaagtttgtcgcttcctcacctataaacaacaaagggataaaccttgagtatggaatactcagcaagtcttacccgactaaggaaaagactctcaagggtatgctggataattatgagtcatagatagggcttaacaaatattcaacttatacctttgcaaaaatagcttactaaagtgagtacttactttcaatcttttaacgccatgctaagtattaatagactcgtattgcatctagtctaatgtcacatcacatcaagacaacatcatgtttatcgtgttcacatcctgac

SEQ ID NO: 19915 - DNA, 361 bp, Zea mays
  unsure (1)..(361): unsure at all n locations
acctatacaattgtgcacgtacctaattnttaccacaaattcagatcgaatggcaaacttcataggttgcatgtgtatgaaatcgctatgacaatttattgtagatggatcaacgtgcttgtgttactaactatatttctatatgaatatatttgtcgaaagaattaagtctaaacgctatatactcatatattggctgcctctgtaacacgaatcaaaattattatgtctcgatttatttgatctaccatgtcatttgccaaccatgtgttttattagtgtggagtgtattatactcgcgggtatccgatacccgcctgatacccgatttgtacgtgcacacgtacaaaatcctacctac

SEQ ID NO: 19916 - DNA, 414 bp, Zea mays
  unsure (1)..(414): unsure at all n locations
aatgctatatgaagcttcagtagaatgactgccaaggatctccactctcaaataagcaggaatgtgctaacttatgttgatgacatcataggtaatagcacaaaacaagaaaatcatattggcgatttgcaagagacgtttgccaatctatgacaagctggtctcaaattaaatccagaaaagtgggtnttccgagtaaagaacggcaagtttcttggatgtctggtatcaacacagggtattgaagctaacccaagtaagatcgaagctatccttcggatggaacacgccaattcaaagaaggtggctcaacggttggcagaaaggctggcatcgntgaatagaattatatcaaggtcagcagagagaaatttaccattctctgaaatactatagtcagtcgaaagttttcag

SEQ ID NO: 19917 - DNA, 278 bp, Zea mays
  unsure (1)..(278): unsure at all n locations
agtgaacaataatgctggcggtcccgtttcacatacacacttatattcatatgctatatatcacataatgtgaagcttcaaccaaacatcattggcccaaactaagtatcaaccatgcgccatgatttttctgatccacacaccatttatatcgtgtgcattgacgatcctacaaaagatgaaacataatgctcggacacacataacctatattgcacattgggttgacctaacatgaaattaactgngtgcagaggggctggtgtaaactatacatg

SEQ ID NO: 19918 - DNA, 430 bp, Zea mays
tggacgtgattagtgccttcctctatgtaccaatcaaagaagatgtctatgttgatcaacctcccggctttgaagatagtgagtatcctaatcacgtatataaactctgttatgcgctctatgggctccctcgagcccctacattatgagctgtatgcctaagagattttcttatcactaatggcatcaaagtcagaaatgccgatcctactttatttactaaaacttttgacaatgatctgtttggatgccaaatttatgtttatgatattatatttgggtctactaacgaatctacatgtgaggatattagtaggatcatgacacataaattcgagatgtctatgatgggggagatgaagtacttgttaagatttcaagtgaagcagctccaagaggtcaccttcattatccaaatgaagtatattca

SEQ ID NO: 19919 - DNA, 240 bp, Zea mays
gagaacacgtgatatgtgtgactaatgtgcaattcgaaaaagaagaccctgtgcagcttgacaagcatggaaacaagtgggaaactctcatcacaccaaatatgtgatgacaacatcaagacccctggagctgctacatatggacctcttcggccccgtcgcctatctgagcataggaggaagaaagtattggctaattatcggtgatgacttttcccgcttcacttgggtgttcttttt

SEQ ID NO: 19920 - DNA, 371 bp, Zea mays
  unsure (1)..(371): unsure at all n locations
tgcatcgctctccgatcccaatggccatgaaggtgagtgtaaacttctgtgtctaaggtgtggcaggcgccgatggatgcgcacgtgctctgtgatgcggcgttcaattttatatgggcaagcaaaacagactctgcggaatccgcgtggggaaaatccggtcggcgaaagcagcggcgagaatctcgcgatttgttggcgcccgcggaaccatagcagaatacgggagggagaataagaccctggctctctgggcccatctgttatcgaaccctatcggcggacgcgtcaatggggtgagggacttacagaccgntgccaccataccttgactgacggcgcacggaggggaaaaaatgggctgcgcggga

SEQ ID NO: 19921 - DNA, 524 bp, Zea mays
  unsure (1)..(524): unsure at all n locations
ctcgtacacgagatcctcttagtcacctgcggcatgcaagcttggaggcgtctattggttgacgacttggtgtatactcctccttcttttcttccgtcgccttgaatgcaacgggttgagcttcggatgggtcgccaagctcgttgattttcctcgagccttctatcatgcactcaaaacttacaaaatgcccgataacttcctcgggggtcattgtagtatatctaggattaccacgaatcaattgaacttgagtgggatttagaaaaatgagagatcttaaaataacatttaccacttcgtggtcatcccacttcttgctcccgaggttgcgcacttggtttaccaaagtcttgagcgcggtgtacatgtgttgtggctctcccctttgtgaagccggaaccgaccgagctcccnctcgatcgtttcccgcttggtgatcttggtgagttcatactcctcgtgcgcgggtttgagtacattccaaacctncttggcgtcttcaaccttggactttgtatatt

SEQ ID NO: 19922 - DNA, 332 bp, Zea mays
  unsure (1)..(332): unsure at all n locations
tcggctatgatgaaaaatntcngcagcaaaacagtgcatatagcaatgaatgttgtggttacttcacaactacttgtcagtttatatagtgctgcaagtaagaacgcgaagcggctgaattgttacaccatgcgcgcagttactcgtacccgctgcgcagtggaccgtaatgatcaaacagtaactctgcaatgtgggaccgacacgcgctctgaagtctgatcgcttcttcgcaacgagctcaaggaaggtgttttttggaccttctgcttcccgaagctgaatatgctcttttcacgggtcaagctcgttacgaagaacgatctatcacc

SEQ ID NO: 19923 - DNA, 488 bp, Zea mays
agcttcccatacgttttgtgctcatcagaagcatgccatctcataagtctggcatcctcaggattagcgaacaaacacctcaatcgatcgacgacggcgaggtaccacatcaccaaagcaggaatctttttgagcgcataataagccacttctttttctttgctcgcggattttgaagactttttttgggctttctttcgcttcttccctttagacacggatgcaacacactctttcgtctctcgatagtctttattcgtcttgtacctacttgcaccgcactttgggcagctctacaagtctttataatcatcacctcgataaaggatacagcgatttctacacgcgtggatcttctccacacccatagtgagcggactgattagtttctttgcatagtacgtgttagcaggcacatctgtctcctttggaagcatgtctgcgataatactcaagaacgcatcgaagccagcatcagacacaccata

SEQ ID NO: 19924 - DNA, 249 bp, Zea mays
gcttctaaagggagaacacgtgatatgtttgactaacgtgcatctcgtataatatagaccttgtgcagcttgtcaagcatctgaacatgtgggaggagcgcatcacagcaagaacgtgatgaccacttcaagacccctatagctgctgcatatggacctcttcggacccgtcgcctatctgagcataggagggagtaagtatggtctagttattgttgatgacttttcccgcttcacttgggtgttctt

SEQ ID NO: 19925 - DNA, 481 bp, Zea mays
  unsure (1)..(481): unsure at all n locations
tctcgcacccgcgatcctcttagtcacctgctgcatgaagcttctaagggagaacacgtgatagggttgactaacgtgccattcgaaaaagatagaccttgggcagcttgtcaagcaagaaaacaagtgggaggagcgcatcacagcaagaatgtgatgaccacatcaagacccctggagctgctacatatggacctcttcagacccgtcgcctatctgagcataggaggaagtaagtatggactagttattgttgatgacttttcccgcttcacttgnggtattcttttgcaggataagtctgaaacccaagggaccctcaagcgcttcctaaggagagctcaaaatgagtttgagctcaaggtgaagaagataaggagcgacaacgggtccaaattcaagaatcttcaagtggaggagttccttgaggangangggatcaagcacgagttcttcgctccctacacacctcaacaaaatg

SEQ ID NO: 19926 - DNA, 377 bp, Zea mays
gatgtccaaatctcttatatattgtggtgctaaggttaaagccaactttataccacctgatgcatgttatgaataatggtccacatgcaccattctctgtggcgtatcaaaatcgagctcgatgtccttgaagattgatcgagataatattagtcagtactgaatttaattttaatgacaagattgtaatgggtacgataataagggatatgttacatgttgctggattcttggatgaatatgttgctgcatatggttaggtctgaaaggaaaaacagaacagaattggtttttgagctctcctcccctcatctctccatgggataggaatatataacattgtgagtttatatggaaagcaatagatattgtgtatt

SEQ ID NO: 19927 - DNA, 500 bp, Zea mays
ggatcttaattaccgctgctgcagctgcttgatgtaaatttcttgatttttctatggctaggctaacctgggtgagataaccaccaacaaagcgagtgaaaaagcttaactcggatcaaacttgacaagtcttagttttaagctttttgcacttaaattcttactttctatgcaattgttggttcttgaaatatgcatgaggtactgcacttatggggagtattcaaaactcaaatcactcatgaaaacccctagtgcaaggccaaaataaaaaatttcaccatttgcctattttctctaaaaattatctagcctatggcaaaatattgtgaaaattatgtgaaaatatatgagggtgccaatacctgtcccaacaagtgctattctgtgtgattataagttgggatttggctcggttgaacactgaatagaataattaaaaaatttcataacttccttctgtctgggctcaccggacagtccggtgtgctaccgacact

SEQ ID NO: 19928 - DNA, 316 bp, Zea mays
ctctttgacagagtaccgataaccttctctctgtttttatctcacacgcaccccaattttttatcgtctacaccgccgaagagtattgcccctggttgatacccgcaagatatggcgtattctctcaactcttctttctcaacctccgacaagccttgcccaattaagatttgaaagttaaaggtttcttcttccgaaacgtctttagctattttcttctccttctcagggactgtaaccatggcttcttcaacgacttgcggaacttcttatgtggccatgtgcaaaagtatcttatcaatgtttgaaagtgtgc

SEQ ID NO: 19929 - DNA, 393 bp, Zea mays
  unsure (1)..(393): unsure at all n locations
gatctctaagtcacctgctgcatgcaagcttgaagccatggtaagtagcatatgccagtaatacgtgaaatgactcaagcctatctaccggtgcataagtttcaccgaaatccaaaccttcgacttgtgaatatcccttggccacaagtcgggctttgttccttgtcaccacaccatgctcgtcttgtttgttgtggaagacccacttggttcctacaactaaatgccatacctcattcctcgtgaagatggtgagctcctcttgcatcgccatcgcccaatccgaatcttgaagtgcttcctctaccctgtgtggctcaatggaagaaacanaagagtaatgctcacaaaaatgtgcaacacgagatctagtggttacccccttacgaatgt

SEQ ID NO: 19930 - DNA, 370 bp, Zea mays
  unsure (1)..(370): unsure at all n locations
tttggaacaaagggagagaatntcaaatcttgagaatgcttctctatatcttattcatttaccttggaccatcttgcaaaatgacattgaaaagaatctacaaaagaattngcataaacaaaacacaatatccgccaatggatgtgagagcacctagagggggggtgaataggtgatcctgttacacttaaaacttatgccacaaaaacttatttaagtgttatcgcaataaccgccaagtggctagagatgaatcttcaacaaaacacaatttccaacattgatcaatcacagagatgtgacggtggttattccgtggttcggccaagaccaacgcttgtctactccacgttgtggcgtcccaatggac

SEQ ID NO: 19931 - DNA, 248 bp, Zea mays
accggcatgtaaatgtgtccgagtggatattctccttcagttggcacgatgccgaagaaaagagtgtctgattcgtggagccctttgagtgcgactcccaagccttgaagtgtcccggggaagggtgacgtaatgctgctttccccgttcggtaacaccttctttaccctgctctctcggatcaccggatcgacgaggagcgggtactttgccggatgatcgaagttgagccactgatccacccgagt

SEQ ID NO: 19932 - DNA, 363 bp, Zea mays
tcccttgcacgccgatgatacaaagatctcgggcgtcatggcacaataagatcgccccagcagcacacatttgtggctccaagcgctatattctttatgcccctgtgcccacatgtctgtgcccagtacctttgtgcatgcccccttcaactataaaaggggaggcatgcgacgttacacacaatctgaatcttctatacccaactttagcctcacaagttcatacaagctctcaagcaatacatcacacagtggagtagggtgttacgctccggtggcccgaaccactctaaatccttgtgtgttcttgtgttcttcccacttttccaactaacaagcaaaacgcttatacccctcctcatc

SEQ ID NO: 19933 - DNA, 344 bp, Zea mays
  unsure (1)..(344): unsure at all n locations
taccgcatttgaagcatgatcgcttgcncttggtcttattctttctctgatgtccatcgcgaccctttatcaccgtcttgaatctcttgataatgagggccatttcttcttcattaataccgggcgccttaatttgcgccacctttgtgggaagcgcctccttgttccctgtggctttgagagcaaaatgttgcggctcgttgatcggtccattcaatgcgtcgttcacataccttgcctccttgatcatcattcgcccgctgacgaattttactaagacttcttcgggcgacatatttgtgtacctgggattctcacgaatattattcaccaaatgaggatca

SEQ ID NO: 19934 - DNA, 405 bp, Zea mays
ttatgcaacatcgcttgagatgggttggacatattccacgaagacctgaagtgcaccagtggtatcggaataatttgcgtcccgaaaatgtgaagagaggtagaagtccaccaactttgacctggacagaagctgtgaatagagacctgaaagagtggaatattgacaaagagctcgccgcacataagaaggggtggaagtgtgcaatttacgtgccacaaccctgattgatagtttcgcttttcctccctaatcggttgaacttttcttgtgtgcattttagatcttgctggtccttgtggagtttatctcttttatgtgtttccccgtgtcgttgttttcggttctcctttgcctctgtttcccttctctgttctttgggggttgagctctgagggtttcata

SEQ ID NO: 19935 - DNA, 155 bp, Zea mays
tataaatcagctagctgttactcgagtatccacagtgttcttacctctccaagacatgacacactgatcttagatgtaaccctagcacagctcatgtgatcgtcttctccgctaccgacggtggccttcatttgacccctaatcgactgtaaact

SEQ ID NO: 19936 - DNA, 374 bp, Zea mays
acatgagatatattgaggactgctctttcataaagtctaccgacagtgcttttattgtttcaaagaatactcccgaatgtaatggcaccccctgtgccgctgacttggctatgaaaacagcgcgttcattatctccatgtagaatattcttgacagaaaaccctctcaaggaagcttcaagtcttcgaactgtatccaaatatttctcacactcttgatcacttgctttcaacatttgtcacatggccaataaatcttgggaatcaatttgagaaccgccttcttatcctcattccttcaactttctagacccaaagcaatcttcgtatcacaatattatttgtcaactaagtcagttactgctacatgtctac

SEQ ID NO: 19937 - DNA, 301 bp, Zea mays
  unsure (1)..(301): unsure at all n locations
acataagagatggcattagtaacaccaacactaatttcctatttatcaaccattctatatgtgggaagcaagcgagttgctaatatatagaaacctcataatatggactaaatttgcttgaaccctcatgcacaatatattttgaatgacatggataatatgcatggttattcaatgaaacctatagggatgacctaatccatattatggtgtgcggctaatatagaagaatcaaatcccaattaactatatagagaattactcncataattttggattgttcaccatatgataatattca

SEQ ID NO: 19938 - DNA, 471 bp, Zea mays
tgaatgacaaatttataagcaagccacaatatactctgtctcctatgttctttgtttgccaaataataactatacagagttggtagaagtgttgcatgctgtgctaatgtgctccactaatactttgcactattttcaatcataccacataatagttccttcatcacagcctctgaatgatattatgatgaacagataaactactggaaagattggatagagggctgcggagcttaacgaattcactattgactatgttcatagatcctcaattcagtcccaagcattatcagacttcattgttgattggacaccacgggctcacgaagaagaacaaataaagatgtgctaatctggacagtgatctgcgatggctcctgagaatcttccgtgcacgtgtggctgctgtctttattgcaccttccaaagtataacatgctatgcagcaaagcttgtattagctgtacaaaa

SEQ ID NO: 19939 - DNA, 487 bp, Zea mays
  unsure (1)..(487): unsure at all n locations
gcttgacactacataaataaaggtcatatgaatatttagaatgaatggagcacaatgtgtttgtctggatttcaaaaacctactgatattgttaactttagtagagtcggcgaaggtaatgatatgatagcatcaacaaagcgtaggctactgaatatcaagatgttaaatgttattagaaaaatactcgacattcttaatattattaaagaaatattgaacagcgaaagaacttctcccttatggactccttggatttgcaagcacatgcacattatgcattccgaggaacaggaacaagcatgaattgtcagatgatatgtgtgaatccacaatgtccaagaataccttacaaaacataggatatgttacanatgggacatttacagttacatattttggtggtaatgagaaacactatangaggatgatcatattggtctttgactaaagtgaatccactgtgaactattcannatttattcag

SEQ ID NO: 19940 - DNA, 324 bp, Zea mays
  unsure (1)..(324): unsure at all n locations
ctaagcttctaagggagagcacattctatgattaaccaatggtcattntgagaaagacagggtttgtagcgcatgccaagcatgaaagctagttggtgcccatcatccacacatgaacatcatgacgaccgacaggccgcttgagctactccacatggatctattctgcccgattgcttacataagcatcggcgtgagtaagaattggcctgtaataatggatgattattctcgcttcacttgggtattctctttgcaggaaaatctcaaacccaagagaccttaaagggattcttgagacaggctcaaaatgagttcggctta

SEQ ID NO: 19941 - DNA, 421 bp, Zea mays
cttatgagttacatgatagtatggttaggaggctatgccatccacaccactgggtgttgcaaatatgtagacgaattttatacgtcaagtgagacagattggcaacacaaaatcgcaaagatttataaaatatggtacagaaccaaagtcccaaaagatatggcgtgatcattaaaaagtatctctaaatacaaatcccgtgtcatcacttcactaatataaacttctcatgtgattagactaattgtcggtcagagaccaacaaaatttaatgaaaatactgcatgccttacaattcaggacggactgatagaatgccaaacaccgactacataatactgcaatgtgaaaccactagaagctaattcaaagccttggataacttatgtcttgttataagcaatccggttttatcttttac

SEQ ID NO: 19942 - DNA, 149 bp, Zea mays
gtgcaattctataaatatataccttgtgcagcttgtcaagcatgttaacaagtgggaggagcacatcacagcaagaatgtgatgaaccactttataccgctggagctgctgcatatggacctcttctgacccgtcgcctatctgagcat

SEQ ID NO: 19943 - DNA, 424 bp, Zea mays
  unsure (1)..(424): unsure at all n locations
aatactcacttcttgaaggtatctgttaaaatattcctcgtggtttatattaatatgctgacttattagccaagtcagcagcacatgtgctacccttaccttcngatgtatctttctaaacaataaaagcaccttccggtgagcttcttgaaagagcagtcctcaacatattccctgtctatagtgaagattggagaactgagatcatctctttccttcacggtaactttctttcagatgacgaagcttataacacgaagatagatgcaagagctcgaccatatgttataatataaggggaactatacaagcgtggggtctgttctccagtactcaagtggttatccagagccgaatgatataattgatgaggaaaacacgcangcctgtgtggatctacattgatctatgccttgcttggaaa

SEQ ID NO: 19944 - DNA, 383 bp, Zea mays
gcattctgcagatgtcatactaaatgtgcaaaggaagaatgcgtgctcaccataatctacaaccccgctagatgaggcaccccgtcatcatctgtcaccaccgcccccgatgaccattgagcagatgttcttgatgcagacttatgcagttcaagccattggtcagactctgaccgccattcagcatcagcagcagcagccaccacctcatcctcagatgcccagagacaagcgtgctgaattcatgagaggtcatcccccagtgttcgttcactcttctgacctcatggatgctgaagaatggatgtgcactgtggagcgggagttgcacaccgctcagtgcgacgacaaggagaatggtctgtatggtccccgtgtgttga

SEQ ID NO: 19945 - DNA, 314 bp, Zea mays
  unsure (1)..(314): unsure at all n locations
cactttgataaccccactaggattcagaaacaaatgttccaagtccagaatcataccctgnctttgatttgcaccctttgcttggttaacacataaagaggtcaaaacatttgtgttggacactttatcaccaaaacacttatataaatgggccaagggcacatattcctttcagcaatgacctaggtgaacctgctgtgagaatggctcacaatgacaagcatgttgtcttttcatttggatatcggctcattgaattaactttgatatttccagtggcaacaacatctgtggagagaactttctcatctatg

SEQ ID NO: 19946 - DNA, 303 bp, Zea mays
tctggctaccattcaatcatgattctaaccagtgaatatttgaagacgacattctcaaccagatatgggctataatgaatactggtgatgtcattcgggctcacaaatgcaccaccatatttcatggttctgatgaaatcaactttcatgccggaattggacaagtcgtggtggttttatcgatgatatccggtgtactcaagaacgaaaaaacatgcccgcatttgctgttgtgcttaacgtctgaagagcaccaccttatgccagtatgcaacggattttggctatgaaacaaattctcgg

SEQ ID NO: 19947 - DNA, 296 bp, Zea mays
aattttctgaatgtgagagcaattcattctttaatttggcattttcagtttggacttcaaccaaagagccctccatgggctgaataacaaaatccttcttttataatgcaccttcgtgctctttgaccatgatctcaaggtcttggattgccaagtctttctctttcagatttgcttcgtgattttcaactctgtcagccatatctttgatgacggctttgttgttctcttcctccaaatcttgttgcattttcagaaccttgcttaataatatgctctatcgaaatgatctttgg

SEQ ID NO: 19948 - DNA, 343 bp, Zea mays
acattttctttcatatattctacctcgggagcagtttgtacatttagtatcatcttcttttttataaggaacaattattgagatccttattgctgtttgtcgttttccatttcttgtaatagcttcgttttttgcacaataaaaatataccttctccacagaatatcggagttcccgaagcataataatttttggttacaaagagaatatcctaactaacaaaaagtcgatcctaatggagcgtatacgtagttctcttctcaaaagtcgttccgaatggaatgcagaacttacagcgaataataaacgctgataccgctgataggaaatgcgatgaacttct

SEQ ID NO: 19949 - DNA, 448 bp, Zea mays
  unsure (1)..(448): unsure at all n locations
tctcgtacccgngatcctcttagtcacctgctgcatgcaagcttgtggactctgtaattgagtctnttttattctgatgttaatcctttactctggtgttgcagggcttaattaatacttagcaatgccctaagggcgcanaagaatgatgaagatgagagttgcactatagctctcaataaccttcgatcagaggttatcagcctgagaaacgaggccacggaaaaagacaagattctactttcattgtgggataaagtaaaggaggatgaagctagcttcanaaatcaatctgaggcccaaaaatgagattgaataccttcggaaacagctggccgaagccaagggaaaatgtggtctcgcagaggccaaccgagatattagtgagtattggaaaaactatttagaaaaaacagttgaagaacttcgcgcatccaaaggaagatgc

SEQ ID NO: 19950 - DNA, 362 bp, Zea mays
ctaagcttcgcgaggttaaaatttggcggaaaacaggctatatcttgaatgctgtggtaacttcacacctactcgtctgtttatatagtgctgcacgtaataatgcgaagcgccagagtttttacaccaggcgcacacccgcttgcgctcgctgcgcggtggaccgcatggacaaacagtaaactctgcaaagtgggaccgctgcgtgctgggaaattaaatcgtttctcggcaacgagctcacggaaggttgtgtttggaccttctgctccccgaagcttaatagaactttttcacggatcaagctcgttacgaataacgatctatcaccgcgaaatggctactgttgggctatgcttcgt

SEQ ID NO: 19951 - DNA, 435 bp, Zea mays
ttgatgccaaagcgtcttccattgtagaacatacttctagccgatgtcaatctttcattctcttagagatgcgcggcaattgttgcatctaataatgctcttgatcatttcggtgtttaatcaaagtcatgtgatcctgaatagcattaatatcacatctttacatctacacaaacggtaacatgctcaacactagatgtagaggggttgccagaatttaattctacaaccctatcatgcaatatttcatatttacttctaacgtcggatatagtatcatttgcaacatcaaaatctttaaccttagaaagcaaagtctcattttcattgctaaagctagtaagagatatgttaattcttcatcctagcagcaaatcatattagtatctctatgattggcatcgaacattacaacatgcgatcaaccttacattt

SEQ ID NO: 19952 - DNA, 328 bp, Zea mays
tctagaatcaagaatattgatctcatgccttattcttggtaaagattgctcatcaagtggcttggtatacatatcggctaattgatctctactattaatgtaagaaatctcgatatcccccttttggtggtgatccctaagaaaatgataccgtatggctatgtgcttattgacggctatgctcgacgtggattgtcggccatattaattgcactctcattatcacatagccaatggacttcggtttatatgtaaccgtagtcccgcacggtttgcctcatccatatttattgcgcgcaacaatgttctactgctatgtactcggctt

SEQ ID NO: 19953 - DNA, 373 bp, Zea mays
  unsure (1)..(373): unsure at all n locations
agctcttcnnatagtagtgcgcaaaagctctatatttattgagcgggagcacttggccagagagcgagtcaaatgcgcttgcggtatggccgcatatatacaccaagtgcgttgaaaattgtaagaccccgcttgtcagtgaatgttgctattctatcaaagggaaagtggtttttcggaccttcggcgtataatctttcgtcaggtcgcaacctaaatttattatgttgaacacattaatattgcgaagggctactgttggggacctttggcatccgaaagttctcaaaaacagaatttaatatagtttctggagtataatgtgtgaacaggtatcttctgactcaagtcaggcatcacagtggatcagaat

SEQ ID NO: 19954 - DNA, 291 bp, Zea mays
ttttttatttacgcgaaggacgtccggcttttaatttgttttaacgagtgcctgaaggtttgggagtggggaacaacaaagtgggataggatcttaaaataatctgttaccaaactggtaatgaataattataatggtatgaaactttggaaacatgtacaaaaaatccagaaacggatttccgggtcgcaattacatgctctatgtggggtccaggcaggccataaccttcataccaagaaatgaaaacggtgtctttttaatatccgtccagaattcaatgagcttgcc

SEQ ID NO: 19955 - DNA, 406 bp, Zea mays
acgtgttctacgcgccctgaacgcgccagaacacacccatcaccagaacccacgcgccccacgctgcgccaagccacacccgtgttccctgcccgcgcccgcgcctataaaagcacgccaagcgttagtcgtacgcccccacgcgctctcgatctcaccggatgacgaaatcaccgaatgttgtcctgcacactgcgtgccaacggccgcccgagcacctgacaccgtataccggccaaccgagccatcccccgccccgtacaaccctcgagagagactctaagtacctcggagaagctcccagagcaaggaatctagctctgcctcgccggagacgccagatcaatgtcaccggacttcacccgaccgccggcgaacgtagaccgagctccacggtgagttattc

SEQ ID NO: 19956 - DNA, 306 bp, Zea mays
acaagtgggaggagcacatcacaacaagaatgtgatgaccacttcaagacctctggagctgctgcatatggacctcttctgacccgtcgtctatctgagcataggaggaagtaattatggtctaattattggtgatgactattcccgacttacttgggtgttctttttgcacgataagtgtgaaacccataggaccctcaagcgacttctcatgagagctcataatgagtttgagctcaacgtgaataagataagaaacgaccacggtgcgcaattcaagaatattcaagtggaggagttccttga

SEQ ID NO: 19957 - DNA, 230 bp, Zea mays
tctcaagaaacattctacctattggtatgaattaacattgactcaactacaaattcctctatgctcctgcttactttatcgttacactaccacatacatatatatctgtatgctctcgtaagtcatccgtgtaacttcagtgtataaatagaaccttaacccgtgcatgccctgagatgtattgtatggcgctctgaattactcgctggataaaccgggacgggagtatt

SEQ ID NO: 19958 - DNA, 450 bp, Zea mays
  unsure (1)..(450): unsure at all n locations
gcttggatatttcttatcagaacactatggatattgtcgngataaatgataaattcttcttcacgaagcatgaaaagaaaggaaggtgtgttttcgtccaagactcaaaaatggtacgtgtttaaagtttcatgcctcgtaaagaattgaatcattaaacaaatatattacatacaggattgcagaatattacaccaatcatatatcaaatgttttttgcaatagcacttaatcttccctaaatactatctctgcagcttcgttcagcagtcgatcgacaacctgatccatgatagcttcggccatctttttaatttcgtcgtcatctttatgctgaaggcccgaagatgcttgagtaggatctgagtgaggacgggacacgactacattactattacaaatcgcaaacagatcttataagcctaaagattacaacacggtaaaaactat

SEQ ID NO: 19959 - DNA, 332 bp, Zea mays
ggcatcatgcatgtgatggcagttaatgttatctacgctcatccccttggctgcttttatactgtaaaacgcgtgcgaagcggcgcgagtcaatgaatatgttgccgcgcagcacccccagcttctctctccaccgatttgacttccaaaccatctattttcattgaattgaatgcatcttcataacaagcttaaagaagatgtttttcggatcttcgacataaggcctccaaattatattttttgcgatctgagctcgttcaaagaaatgaactcatcctgcaaggggctactgttggggtccttctatgccgaagatcactcgtttaatc

SEQ ID NO: 19960 - DNA, 355 bp, Zea mays
tataactcgtgcaacttgtctagcaagtgaaactagatgggacgacgcgcatcacacgcttgaatgtgatgaccacttcaagacccctgtagctgctgcatatggacctcttctgacctgtctcctatctgagcataagaaggagtaatgatcgcctagttattgttgatgacttttcccgctctacttgggtgttctatttgcacgaataagtctgatacccaagggaccctcaagcgcttcctcaagagagctcaatatgagtatgatctctatgtgaataagataatgagcgactactgatccgacgtcaagaacctctaaatggaggagttccttgaggaggaaaggatca

SEQ ID NO: 19961 - DNA, 283 bp, Zea mays
tctttccaatctttcttgtgaacaaactcacttgtaattgatgcaagagacacctattgtgtggtggaccttgccggaactctgtgtgcctattgcttgtataaaataaactcactcattcctacggatccttctagagatggaataggttgatagatacccggtctttgtgaccacctcaacggtgagtatgtctacaagatccgaacctctgttataccaattcccgtgtcacactctttattcacttgcgatttggtttacaccctctctttccgactta

SEQ ID NO: 19962 - DNA, 451 bp, Zea mays
agctagctacctcgaacctcatgaactcgattctgtatttatccggagtcccaaaggtgaccggcatgtagatgtgtccgagtggatattctccttcagttggtacgattccaaagaaaggagtgtctgactcgtggagctctttgagtgcgactcccaagcctatgagtgtctgggggaaggtgatgttgatgctgctccccccgtccactaacaccttctttaccctactctctcagatcaccagatcgacgaggagcgggtacttgcccggatgatcgaagttgagccactgatccgcccgagtgaaagtgatcgggtgctcggaccatcggtacggagtgggaggaccggtggccgctaccagtatctgacggtcgttgagcttctgctgcctcttgctctcttgagacccgtgtccgccgaagatgacattgacttctccatcgac

SEQ ID NO: 19963 - DNA, 333 bp, Zea mays
gcttctgtaattactatcttattattatccttattattgtatttaatgcacaaacatattatactccaacaacatgcactctgttgtattttagcatcatctggtttaattaatcattcttaattatatgtatgttgttttatgatgcaaatatggcacataaaataaggatacctcgctatattcttggtatacatatttgagtattacaaatcctaccccccttaaaaataatctcgtcctcgagatttatgaagatctatagaaaagatgaggaaaatctatacgaagctcttcttctctttttcaggttgcttcatcttcttcgtggtg

SEQ ID NO: 19964 - DNA, 438 bp, Zea mays
  unsure (1)..(438): unsure at all n locations
gcttggcatacaactagcaatctcgtagcctttgaagtaacttccacaaatggttctcatgctcttggtcattttgggaatatataagaatatcatcaatgaacaccacttccaacttggtgaggtagtccatgaacacactggtcattatatacatgaaagtaagtggcacattcgtcaatctaaatgacattaccatgaacccatataagccatactgggtgatgaatgctgtctttggtatgtctgacggtcngattctcaattgatggtaacctaaccttagatctatctttgagaacacattggctcgtctcaactgatcaaataagtctttcattcgaagcagggggtacttattcttgacagtaacttcattcanagctctataatcgatgcacatcatcttcgtgccatccttcttctccacaaataaca

SEQ ID NO: 19965 - DNA, 340 bp, Zea mays
  unsure (1)..(340): unsure at all n locations
ctctaacaatgtgcctatgtgcttctacaaagaaagatcaaagagaatcgatagaatgtgctatggatgcaacgagaagggtcatgaaattggttcatgcccccacatgaagaaccaataccttgcacaatcaagaaagatgatcatcatgaaagatgaaagcaaaatgcaaatgcattgcaatgacaagcaccgcatttgctacaattgccgtaaaaaggtcatctattaaggtttgtccaaatggtaaaactcctaagcctaacttgtcaatacattcaaatatgcttangagacccaaatttgactcttgtgctataaaggtgatgagttcaccaca

SEQ ID NO: 19966 - DNA, 435 bp, Zea mays
  unsure (1)..(435): unsure at all n locations
cagctttccatgcttgcgcacatgatcggctaagcatgtntgtatatccctatgataagtcgctccagcgcttttgaagccgaacggcatggatgtatatcataaagcaccgaatggagtgatgaacgctgttttttcctcggcttctttcgccaagctaatctgatgattcctacagtatcaatccaagaaggacagcacggaacatctagcggtggaatctaccacctgatctatcctatggagcccaaatggatcctttggacagtgtttgttgagatccgtataatcgacgcacatgcgccaatccactttattctttttgagtcaagaacaaggttggctaaccacttcggatgtaacacctctctaataaatccagccgcgaacaagcgagctagctcagcgcgaatggtctctctcttgtcgggcgtg

SEQ ID NO: 19967 - DNA, 442 bp, Zea mays
agcttattaaaacgataaaacgttggaacgctcatgggtgaaatattgacttttaaacggttaaactttgtttaaacgtagtttttaacaacataggaaaaataccaatatatcataatttcagacaattatatgaagtttaataccaaaacagagaggttagtggcttaccaaaacttcacccatgagctggattgaacccctaaagtaactaatagaccggacccaaaaatagcttatggtctaaaatgcataaaacactgtgttttacaagttagaacgccaaaacgcttaaacgtgatttcaacctctaattagaagtttgacgtttaaacgtaagttatacatcgtttaaacgtagtttaataacactggatacattgattaaatgatggattaatcctaccatgggattgagtgtgaggtatggattcacccaatc

SEQ ID NO: 19968 - DNA, 212 bp, Zea mays
agcgcatcacatctagaatgtgatgactacgtcaagaactctggagctgttacatatggaactcttcggacccatcgcctatctaagcatatgaggaagtaagtatggactatgtattgttgatgactttttccgcttcacttgggtattcttgttgcacgattaatctgaaacccaatggaccctcaagcgctttctaatgagagctcaaa

SEQ ID NO: 19969 - DNA, 113 bp, Zea mays
gctttgtgtggagttgggatgggatctgatctctttggtgtgtcctgtattgaatgctatagctcttgtaaagtgtagaaatgtagaaacttggattccattgaatgttgggt

SEQ ID NO: 19970 - DNA, 381 bp, Zea mays
tcggaagataacgacttcatcatctccgggagtcggcatatatttttcttcggcatctgctcttacaatagatatatcccgtaaatatctcccgctcatgttttcaaagtgactttgcccgatagtcgatttcccgaagactgaatggcttggtcgccatggccgatcttcggaatcttcacccccactatctgcatcataactgtcactatcaccagtatcttcagataaaccttctaaaatctcccttgtaatcttctccgtattcggcttcgctattgactcaagaatacccacatgcatctcttcagataggctcagcttcattttaatagcaaccttcttcttctcagacatctacttcaaattcttgcctctcgt

SEQ ID NO: 19971 - DNA, 349 bp, Zea mays
cttcatccccacatgtgctaagcggcgatgccacagccagcccatgctagtcttatctattaagcatgcatctagaccgggctcttcttttgcaaaatcaactaagtaaaggttggcgtctaatacacccttaaaagctagtgaaccatcacttcttctaaagacagacacatctacatttgtaaatagacagttataccccatatgacataattgactaacagatagcaaattatatccaagactctctactaaaaatacattagagatagaatgctcattagaaattgcaattttacctaacccttttaccttggcttgattcccatcaccgaatataattgaatct

SEQ ID NO: 19972 - DNA, 355 bp, Zea mays
gacacttaagtactcagcctctcgactagtctggacagggcctcatggacgggtgaaagttctcgtaagcggcaaggccgaccgagccgatggattcccacgcctctgtgatacggatacctcactcgttccttccgcgaaaagcaactctcgctcacacaaacattcctgttaccgacagagtccagatgctcgaaacaagatgaaaaaatgcgcagcttctcaagcgtggcgagggtgtgttttttctggcctcggcggacgcagaaagcacacgcttcaagatgatctgatcctgcatgctcgggtcttcacgctgaatggggccgatcaccctcggatcgacgacgtcttc

SEQ ID NO: 19973 - DNA, 393 bp, Zea mays
catacaactcggttgaaatatttgcctagtgaatgcactctacgtgtgtcaaacatattcattgccatgcttgatgctgctcagtttatttataacacagggtgttcaaaaatggagtcttctgcgaagacaaatgcttgcactccggaactcattcttttgcggcggttcgagcaactcttcatctttgaggagagaacactcttcatacttggggtaatcttcactcccttatttatgaccaaagggggagagatgtatttgaagggctctaatgactccgtttttggcgattcatgccacatggggagaaagtttatcccacatcaaaagacgcaccccacctactttaaacgagttttcattggatgatctcaatgataaatggatcta

SEQ ID NO: 19974 - DNA, 449 bp, Zea mays
  unsure (1)..(449): unsure at all n locations
tcatatggatgtaaagagtgccctgcttaatggaccaatctatgatgangtctatgcatgagcaacactcccaggctttgtagatagttagtaccctaaccatctttacaaactctctaatgcgctctatgggctcaagcaagccacaagagcatggtatgaatgcctaagagatattcttatcgctaatggcttcacagtctgaaaagccgatcctactctctttactaaatatattgcaaatgatttgcttgtatgccaaatttatgttgatgatatcatatttgggtctactaacaaatctacttgtgaagagtttatttggatcatgatacataatattcgagatgtcaatgatgggggagctgaaatatattctatgctttcaagtcaagcaactccaagaaggcaccttcatcatgcaaacaaagtacattcaatacatactc

SEQ ID NO: 19975 - DNA, 450 bp, Zea mays
  unsure (1)..(450): unsure at all n locations
agcttggttaaagattgttcatcaagaagcttggttaagatatcggctaattgatctttagtattaatataagaaatctcgatatctcccttttgttggtgatccctaagaaaatgataccgaatggctatgtgcttagtgcggctatgctcgacgggattgtcagccattttgattgcactctcattatcacataacaaaagggacttttggntaaattataatccgtatgtcccgcatgggtttgcctcatccaaaagtatttgcgcgcaacaatgacctgcggcaatgtactcggcttcggcggtggaaagagcgaccgatatttgcttctttgaagcccaagacaccaangatcttccaagaactgggcagtccccgatgtgctcttctattaattttgcccccgcccaatcggcatccgataaccaataaatcaaacgtgatccc

SEQ ID NO: 19976 - DNA, 212 bp, Zea mays
atatcccatattgcatatttgacttacagattgcaaattgtgaccaagagactcaacttaaacacattggaatagagtgctcattagaaattgcaagtttacctataccctttaccttgccttgattcccatcaccgaatataattgaatcttgggaatccttattcttgacgtatgaggtgaacatcttcttctcccccgtcatatgggtt

SEQ ID NO: 19977 - DNA, 426 bp, Zea mays
  unsure (1)..(426): unsure at all n locations
atgtcatattctgacattgaggctgcgagttcatcagctaaagcttctcttttatcttcataatacacaggaatngctgctttcaccgccatagctgaatgcgagcgttgctcaaatgcttgcattatgttcacaatccaaccgttctttgttcctccaaccttctccatagctgaaggcaccttcatcttctataaaaagatagggcagattcgaccctataggacttatcaacttgaatggtgaggaatcagtcattaccttcaaatatctgcacctcgacacaatgggcgacaaaggctcagtgttcttttgggcttcatctactttggacggcaaaggaattcatcaagttgctttctcaggcttcacttggctcgatatatttcacttctcatacatttcgtctgactacagatggcactc

SEQ ID NO: 19978 - DNA, 356 bp, Zea mays
atcacatttatacccctgtgataccagaaacccttattggtaccctgtgaaaccctaaaccaaaccctaagggcttatatgcaaaattagtccacttttggctaaagtgcaaaaccaagtcaaaatgtttctaagttccttggtcacaaaaatgtgtacttgaagcaaaaaccagagtttggacttaactgcaaaatggactcatttgagtttgctctaatctgaaaacagtgaatgggctaacttggggctttgaacttaccagctatgggtttgcctatgcaccacaccaattgaagacatcaagagacaacttgttatagtgaagctattgttaaaaatttgaaaacaaccta

SEQ ID NO: 19979 - DNA, 491 bp, Zea mays
  unsure (1)..(491): unsure at all n locations
gagcttgacattgctttcctattggaaaccaatgccattctttatgccacggcgtctcccattatagagcatgcgtttagcaaatttaatttnttcattctctatctcatgctcattaattttaacagttagttgagctatgtgatcattctgttctttaattaaagctaagtgatcatgaatagcatcaacattaatatctctacatctcatgcaaatataaacatgatcaatagtggatgtagaaggtttgccagaatttaattcctctatcttagcatataaaggagcattctcatttctaagacaggatatagaatcattgcgaacatctaaattcttagccttagcaattaatttatcattctcaatcttaaggctagaaatagatgcattcaatttgtcaatcctatgcaataaactagcattatcattcttaagattgacaattgaatcatcacagacattccttctttcaaccttagtgatca

SEQ ID NO: 19980 - DNA, 426 bp, Zea mays
cgactagtgttctggatgctgcatgtattccacattgcccatcatggacctcctccagaagttgctttccagtggatgggagaatgcacttcatgatgacgccagatgcaccccttctgtataatatctccccaatgagtgtatagtgagccgactgtctggcgatgcgctctaccgagttcttgtcgtctggttcttcttcattctttatatacttaatgatcgaccttctccagtcatcagagtctgactcaagttgatctatgatggtgcactcttctgtttgatccattgagatactcggctgttggaattcttgcaccaatactccgggtgggacctgagttcgactggatcctatcttggacagtacatcatctgctgtgtacgatctcttctcatgatggaatcagaccctcgattatc

SEQ ID NO: 19981 - DNA, 262 bp, Zea mays
gcattcactctaccaggctggggtgagtttgatactttgattatctactgctcatattttggaaacccaaggctgctgtttgaaggatattatatactcccttcgtcctttttatttggcgcttgtttatgcaaaaatgaacttgcgaacgacaaatatgtaaaacggatgtagtattatatactgcacctatactgatatacatatatattatatatgcctgataatcaggacattagacacatgtggcgactatcaccgc

SEQ ID NO: 19982 - DNA, 228 bp, Zea mays
taatatttttaagaatatttttctttataatatcggggtgaagccatcaaataaatttggtggtgtaccaatgttcaaggtaacatcatgtgtgatattgttaaatcccctttagtgccaaaacgtaaactcgccacaattttgtgaaaccatttatcgctatttttcttccgattcctatatgaccagacttaacacattctgtggcaatataaatcaattccgctt

SEQ ID NO: 19983 - DNA, 307 bp, Zea mays
tcttctttggcacaccatgaatacaaacgatccgatacatatacaactctgtcaatactgcactgctgtagttggtcttgacaggcatgaaatgggctgacttggtcatacggtccactactacactaatggaatcgtatacggcttgagtgcgatggaatccgactattaaatccataccaatgtcactccatgtccactgatggatctgcaacggttgcaacaatccaacaagtctctggtgctctgccttaattattctgcaactatcgtacattagcacatgctctgcgatttctctcttcat

SEQ ID NO: 19984 - DNA, 483 bp, Zea mays
  unsure (1)..(483): unsure at all n locations
agcttggntctctatcgactatgctatngtttgtgttgcattntacagncatcgagtctaaaaaaatgtttggtttcaaagattcgaggaagcatccattattgtgttgcatttttcagtcatcaagtctaaaaaaaatatttgttttcaaagtttcgaggaagcatccattagagcgtccgtaagggcgccccatgttctagtgtctttgattgcggagcgaggatcggatatcgagatagctcccaccggctcgttaagctatataagttggttcggtttggcttgttaaatagcagagccagagaattaactcagctcggctcgtttgctatctcgagtctgtctcgttagcacgcgagacacataaaacaatatacatatatacacaataatatagaccaatttaacactatgaagagtaattatactcacaatnttacatatcacatcaatggaacatcanattaacatagttcatca

SEQ ID NO: 19985 - DNA, 457 bp, Zea mays
  unsure (1)..(457): unsure at all n locations
atctcgaccggatcttaagcacctgggctgcagctaatagccaatataataaatagataacaagccatggagcgccgttctatgctcaatccctagacgacccacctctctatgctctccctgcacagcccaaaccttccctgtacgcagcaccacagccgtgtgggcctacatggcagtctgtcaccatgcacgcctggaaatccttgtgccactgactggtggacccgtggcgtcagcttcaccttccatctcggctgtaggctcggaacagaagcatgtgatctccggacgaatcctccctatcaatccgatgagctcgtgcccagccttcctccgcccggagtataaagccgagtcctcctctcgttcaaccacaacccatgggcgccaagcctctgattgaatcgccaccgagagctagaggacatggagacccgccgaccaccgncgatga

SEQ ID NO: 19986 - DNA, 366 bp, Zea mays
  unsure (1)..(366): unsure at all n locations
tctgtgtccctctaanataacttcatcagttctggcgccagcggtcttatcttgatatgcaaaggttcaatcattaccttcataatctcttccacttcggcagcagaaagtgttgcaagagcttcctcctctctggccgatgtctttgtgtttggagatacagcttttcttttccttggagtagctaccttcggctcacggattagttattcaaaaatttctttttcctttttagccaatttggtgctttctttgtgcaatgcgctggcgatactatttctcttcaggccttcngcatcttcgctcagttgctcataatcagggtaatcaaaattcaaggcatctatcacacgattcaatcttcgc

SEQ ID NO: 19987 - DNA, 358 bp, Zea mays
agcttggtgccgatggagaagcacaaatccttgaagtcttgactggcaaattgcttgccattgtcaacttgtgagttcggacgggactccgaaacggcaaacaatgttctggcaaaagaaaatctgggcagacttcgatgttatcgtggatacaaccctcgcctcgatccatttggtaaaatactcgacggcgacgaaggtgaacttgaattcccttgggtcgtgggtaggggcccgacaatgttcaggccccagcgcttgaaatgccacgtgtgtgcgaatagctctgtgaattgcgaaaggcttcccgagcatggagaaaatttctggcaggcttcacaggaccttgtgacccgat

SEQ ID NO: 19988 - DNA, 395 bp, Zea mays
  unsure (1)..(395): unsure at all n locations
atttgtagcgcatgcccagcatggaatctagtnggtgcccatcatccacacaagaacatcatgacgacttgtcaggcactggtgcccctacacatggatctaatccggcccattgcctacattagcatcggcgggaggaagtacctgctaataattgtggatgattattctcgcttcacttgggtattatatttgcaagacaaatctcatacccaagagaccttaaatggattcttgagactggctcaaaatgaattcggcttatggatcaagaaaattagaagcgacaacgggacggagttcaagaactctcatattgaaggctttcttgaggaagatggcatcaagcatgagttctctctctcctacacgccacaacataatggtgtagtgga

SEQ ID NO: 19989 - DNA, 453 bp, Zea mays
attctcccgctttgacatcaaccaccataaccatattcattcattaacatatgatgatgtcaatggacagcatggtgttaatgaggagagacacattatcaacactcccccttacttattgagcatatgcactaccaacatttaatgaaaaatgattactacttccttttgtacctcttccatgttgtagtgtacttcccatcttgaaagtatttaatctcttgagagcttctccacacttgtgccatattctttatcctaaccttctcttgttgctaatacaccaaacttataacaagttatagttttgggcacaagaagaaacttctattcttatgattatcacaagatgtcgattatagcaaactaccatggctaccaattgaaagataccaattgcatgatcatctattatcgtatctccatgatattaaagaataagcatctaatatc

SEQ ID NO: 19990 - DNA, 356 bp, Zea mays
  unsure (1)..(356): unsure at all n locations
atcctctaagtcacctgctgcatgcaagcttgtantgctcatatacgtagagataggcagttatctattattacatggccagtctgttgagttggtagagtcacctctccgcgttgtgatctaattctgttgagagtgacaaagagttcacgagcgctctgcatcatgtgagagtccaagagcacattgggtcgagcgtggcgtgatcacaggcgagtcgccgtggtggtggataggccggacacttgattcttgtaagagtctattaataggagaatattaacaagataagctgcctagttctgaagcgacaaaacaattgtctgttcttcacgtgaccttgagcggactgttca

SEQ ID NO: 19991 - DNA, 404 bp, Zea mays
aaatgtcaaacaatgttgctaggttccttatattccatagtatctaataaaagtatttttataatgtgtagaaccaataagaaattttggagcatttaaattagcctaaaacatttgttctcgatttttagaaaatagataataattccaaaaatgcccaaacttgtttatgagctcaaaacattatgtagaagccttgggtagaatatggtatgatttggaacttgttggatacttatagcccaaatacctaccccctgccctttgaattgctttactgactccggatacactatgttctcggagaaccgtgaacgataattatactcaagacttatgaaatatactttactatcattgcatactatgagcttacatggcattcattctatatatatatatga

SEQ ID NO: 19992 - DNA, 260 bp, Zea mays
tatttattactagtagattatccaattgttagcaataaccgcaagttatttacccaataaatattccctccgaaatggaataccagagtccatatctattatcatcatcatttaaaccatcatcctcatcatcatctgtggccatagtatctctaatcaaagcagctcctaaagtcgctcataaccgtgagcacgactcatatatcaggtgttaaccctctgtagaaatcgcacactttaaccacaaactgtgattcctc

SEQ ID NO: 19993 - DNA, 470 bp, Zea mays
  unsure (1)..(470): unsure at all n locations
aaaatatancttattgtgtctcaacctattattgttaggtagttcaaggggctatataacgtaacttctgtgttggttgtaaaacccttaaacagtagtcaggaccgaccaagaaaagacagactacatgttcttggacgatgttgactatcttgtagaagctcgcgtgttatagatcaaatttgacatacgtgtacattacatgcatccatacgcatcatacatctctcgcatgaaacatcatgtatcctcggactacatccatacatcatacatgatcgcacgaggaagcaccagtggggattgtcaaggagctgtcatgaattctcgtggaagatggtgaaccagattgcgaatctgatgatttgtctgatcaccgccctagttccttcgagataggcgagccccgacatctaacttcctatatgtacaatattttatattatgcactgcctacctatatgttgcat

SEQ ID NO: 19994 - DNA, 198 bp, Zea mays
tgacaccttagtccatatatgtttgagtcgccggtgtaaacctttatgagggacataattggtattcctcacatgctgtgtgccgctcctatatatagtgaacattatttcctctactgttcacgcatttctgttattgcgatcgcgtcaatcgtgaattatatcttgtcaatgcagaggtattaatgtatttaatat

SEQ ID NO: 19995 - DNA, 391 bp, Zea mays
gcttgtgaaaaatcttcatcccaacgtgtgctattctgcgatgccagaaccaacccatgttagtcttatcaattaagcaagtgtcgagttcagctctattaaaatcaactaagtatagctgaccctctaatactcccttaaatgctactgaatcatcacttcttctaaagacagtaacacctatatccgtataaagacagttgtaacccatcttacattattgagaaacagatagcaaattgttatctaaagaatctacaagaaaaacattgaaaataggatggtcatgtgatatagcacatttaccaagtcctttgaccaaaccttgatttccatccacgaatgtgatagctccttggggatcttcattgttctcataagaagagaacat

SEQ ID NO: 19996 - DNA, 365 bp, Zea mays
cactttatactaagcttcgcgtaccacgtaccacatgtcagaggatgtatgtttttatgctgaccattcagatcggcatgcgtgcttgttcgtcggagtcttacaagagccacgtctgcatcgtgccgcttctcgttgctcgcatgctacctgctggctgtgtctcgcctgtcgcttgcgtacgtccctgtcccggttacgtcgggccacatggcggcctggatccgctgtcttcaccgcttagaatactcttagtttctggtaatccaattctatgtatactgaagtgtattataatataatacgataaatgttaacttgctataaatgttaatcgacttaatatcatataactcaatatcata

SEQ ID NO: 19997 - DNA, 279 bp, Zea mays
ccattccaataggagccatcgttttccgatctaagggccacgatttaaagatactcattcttcccagtgaaacatggcaaagaacccctgtaccttttctgccttaacacgctgtccacaccaatgggagaaggatcgcatatgggtcctatatatacaaattgaaccctgagcgtctaactaatagtggccgcagaccatccgtatatggatattgataaattaagacaatgatgtttaatgcaaaatttatgcagatatcttaggatatgcataact

SEQ ID NO: 19998 - DNA, 468 bp, Zea mays
  unsure (1)..(468): unsure at all n locations
cttcttctcatgcaaagtaagctctttaaaaaaacatctttccctcttacatcaaacaccanaacacaatacatcactattgaacaacatgttaatgatgtcaaaggaccactataacattgaacacggatatgcaattaaaaaattctcacttactcccccttacaccttatgataagcaattcacactctatatgggatctatgtacaaggataaatgacacatatgatatacctacctttgtaccttttcactgataccataataagactcatctttaatgacaataattgagagtgttctcaaatgagattcccattgtgcttgatcctccatcttgatctacacttgttacttaaccgaccggcttaaaacaagttattgaattaatgacacaagagaatattcccaaatctagtgatcacactaatataccaattgaaacacatactaatcgatactcaata

SEQ ID NO: 19999 - DNA, 450 bp, Zea mays
  unsure (1)..(450): unsure at all n locations
agncttgcattgatgtntaaatntcttgtattgcatctatggctctgctaacctanntgagataaccgccaacaaagcgagtgataaagcttaactcgggtcaaacttgacaagtcttatttttaagcctttagcacttaaattcttacttgttatgcaattgttggttcttgaaatatgcatgaaggactgcacttatggggagtattcaacactcaaatcactcatgataatccctactgcaagccaaaattgcaatttcaccatttgcctattttctctaaatattatctagcctatggcaaaatattttgaaaagtatatgagggtgccaatacctgtcccaacaagtgttattttgtgtgattataagctgggatttgcgttggttggaattagatagatnaattcannaatttcaatcttccctctgtctggctcaccggacag

SEQ ID NO: 20000 - DNA, 248 bp, Zea mays
actgctgttgaaataaatgtaagattatgtaattcgctttcgcatttcttcatctccgatgttctgtaatgtctgcaaacaggtgatacattcctggtaatgtaatgaaagataccgaacattgtcaagtagttcatgggcacctacagggttgtctgatgtctgtgatacaaggacaaatgttagtgggcctaattacttgtgaagttccgtcacacttctccccccctgatggcgcagacctcacc

SEQ ID NO: 20001 - DNA, 330 bp, Zea mays
cacacctcttgctttggactgcacaatgtaggatagagattggcttcacagcctaagacctttcttgagaaagcaaatgataaggctaacacacactctgtgtattgttttgacttacaatcatggacatatgatgttaccttcagccggtactacttctgacagcgaatacaagatcgaagaacctgtggttgtccttaatgacttgtcatgtacttgtggcgcacccaagccataccattttccatgttcttatcttattgcagcttgctcaactcgtaactttgacttatagaggaagatacctcaagaagttactattgattaact

SEQ ID NO: 20002 - DNA, 502 bp, Zea mays
  unsure (1)..(502): unsure at all n locations
tgacgcgtgtgntgattacgattggggttatgattggttttctgtatggtatgaactcagtctgcatatgatggtacagattacgtgtgttttagctgtccgcctgtataatttgagacgcgaggcatctccgtttctaccggaacatgctggtacagaccatgtggaggcgggatcggcaaccaatgaatccaattaaattactttggtgccatttttctgaatcctcgtgttcgcataaaatgacagtatctgtccagcctgatgcgcgtgagctaaagtgtgtgactaaaggggtatttggtttataagagtaatctttacatcttctatgttattacattgtagtcgttgaattaacaaatacggatactaaaataatatttatgtgttatatttaacaatctataaactaaaatgaaatgactataaattagtctctatatacaaactttccataaatcgaattgacggtctagcaccacttgacgtatctgtggct

SEQ ID NO: 20003 - DNA, 494 bp, Zea mays
atactatacttctaaaggagacacgtgattcgcataccaatgtacatgtgtttattatttatcctgtgcagctcgccaagcatgttatacaggcgggaggagctcatcacaccaagaatgggacgaccacttcaatacctctggagctgatgcatatggacctcttcggacccgtcgactatctgagcatatgaagaagtattatggctattatcgtgatgacctttaccgcttcacttgggtgtttcttttgcatgataagcctgaacccaatggaccctctagcgcatcctcaggagagctcaaaatgagttcgagctctacgtgaataatataatgagcgacaacgggtccaaactcaataatcttaagtataagagttacttgaggatgatgggatcaagcacgaattctacgctgcctacacacctcatcaaattggtgtggttagatgaataacatgacgcctattgatattgcgaagactatgcttg

SEQ ID NO: 20004 - DNA, 205 bp, Zea mays
tgtctatgtccattgtctgaagcaatgttatcatttgtccgactactcgtgatttatgatgactactttccctaatcagtagtccgaacttgactatttggtacgactgcgattttgtgactaatgttattggttgtgtgaattatatgactgactaatatagtgaatcgagtgcttgatgaccccaaactgatttgaattacta

SEQ ID NO: 20005 - DNA, 370 bp, Zea mays
  unsure (1)..(370): unsure at all n locations
gcaaccgaagacgccttggcttatctcgatccttagccgagaaaggacctacacccgcttgacctatcttagatttatatgatgtctgtcacgcttcatcctctgttggccacacacacacttatttataaggagaacacctctctaaccgcctggatgttgtgggaggcgatttactccaacatgttttcatcccacacaccttattgtaaggcgacaacaatctattctacctatacacacgaaatgatgttcctaacgtcacataaatgttgcacaaagatatatagaaactcactangtggctactagactgcgtgaaagtcatactctatgctgggtcagaagtatgcgctctcaaagttggaca

SEQ ID NO: 20006 - DNA, 386 bp, Zea mays
tcaccaggatactccgcatcgaatccactgtccacaaatagagatacaatattgtggaggtgatgccttggcgaaggtgaccctctcctgactgaatggcttccactgtccaccaacgcgacacactattaattcttcgatgagcgtaacaatcgcgagctcgacatcttctccgactgtaattccataccttccacgaaactaccggtccttgtgactgccgctctgtattccaatatacgataccataccttcctgtcggagcccatatgccgcaccgaaaccccggctgggttcgaataaggcgtcggtattccatacttacacaatgcttatataatgatgagttagatctattatcaacaaaaataacatacccttcatgt

SEQ ID NO: 20007 - DNA, 392 bp, Zea mays
  unsure (1)..(392): unsure at all n locations
tgagtcgattcttctgcnaagaattattgatgttcaataaaatgattatggtatgaaacatattcatgagataatagaagccggcatagcatattatttcacaaaggatgatcatagtacattatggcttaataaccgcatatttgtgcctaaatatgatgaagtccaccatcatattctggatgaagctcatcttaatcgctgttgcattcatcccanaagcactaagatgtatcaagatttatagcaacattacttggtggacaaataatgaaagattgtatattgcacgcctatgtgacgaagatgtgacacttgtatacatgtcatagccatacatatgaagactgtcggtccactacaatctttgtccatcccaacttggaaatggg

SEQ ID NO: 20008 - DNA, 439 bp, Zea mays
  unsure (1)..(439): unsure at all n locations
acatgtgctaagcggcgatgcctcttccagcccatgctattcttagctattaagcatgcatctataccggcctcttcttttgcaaaatcaactaaatatagtttgccgtctaatacaccctttaaagctagtgaaccatcacttcttctaaagacagacacatctacatttgtgaataaacagttataccccatgttgcataattgactaacagatagcaaattatatcccaaggactcaactaataacacattatagattgagtgctcatttgagattgcaattttacctaacccttntaccttgccttgattgccatcaccgaatatgattgaatcttgggaatccttattcttgatgtaagaggtgaacatcttcttctcccacgtcatatggtttgtgcatccgctatcaataatccagctttgacccccggatg

SEQ ID NO: 20009 - DNA, 397 bp, Zea mays
  unsure (1)..(397): unsure at all n locations
cgggatcctcttagtcacctgctgcatgcaagcttngtgtgtttctctctttataagaaagggtttctctaaaaacatagatcacatattagagctaatcctcaccctatgcttccattctcatcttaacccatctcaagagaaaagcaccttgcccaagaagataccggaaagcttactcttgaagcctagaacatgctacagaagaaaccagtccaggcgctcattcaaaaggaccgaccgtgggaatcaaagcactgcccctgagtcaaagttaacaggaaaagaggacagaaggagttattaccatacagagaggcaaagattcgtggaaccacagaccacaaacatcatggtcattgaccccaccactcacccgtgccccctgcacgcgtgc

SEQ ID NO: 20010 - DNA, 430 bp, Zea mays
  unsure (1)..(430): unsure at all n locations
tctaagcttgacagtattctgcgatggttcgtgtggaaccttctgngcatgatcagccgctgtgttatgttgaccctccatagtcaaaacttgctacgcagcatgacttgattttatctgcacaaataacattgctgagtatgaagctttgcttttgggtcttcggaaagtaaaggcaatgggaattataagggcagttcttataactgattcccaggttatttctggtcatattgacaagagttgtaaagcaagagacccgaagcttgaataatatttagacatggtccgaaagattgaagcttcctttgaatggttttctgtcaaaaatattcctcgaggagaatatgaacatgctgatttgctagccaagtcagcagcacatgagctggccttaccttcggaagtatttttcgaaacaataaaagca

SEQ ID NO: 20011 - DNA, 332 bp, Zea mays
tgggtccttatacccacttcatttgccctgcagtttttgcttcaggctcagctgatttcgacagggatgctcaaaccatttagggggaaagaaatgttccctctacgtcataaaatgattccaagatcaccatattcgggatgggacccagcatgggaaggctacgcacattgaatatcattgtcactcttcttaatgggtgttagtgagtctttgatatattactatctggcagcatatgtatatggaatattgctatacaatgagagtgtcgcttaaataggtggtactacattaaggtgactaacacaacttttattgatttgaaaaga

SEQ ID NO: 20012 - DNA, 473 bp, Zea mays
  unsure (1)..(473): unsure at all n locations
tgtgaagattcttcataccaacatgtgctattctgctatgcctttaccaactcatatcagacgtaacaattaaacatgtatagtgtttagccatattataatcnactaagtatagctgaccctcttatactcccttaaatgctattgaatcatcacttcttctaaagacagtaacacctatattcagtaaaagacagttgttacccatattgcataattgagaaacataaagcaaattgtaatctaaagaatctacaagatagacattggtaatagaatggtcaggtgatatagcaattttaacaagtgctttgaccaaaccttgatttccatcctagatgtgaatactctttgaggatcttggttgttctcgtaagatgagaacactattctcttccagtcatgttgtttgtgcacaacgtatcattgatccaacttgatgccctggatgcatatacctacaaaacaatgtt

SEQ ID NO: 20013 - DNA, 53 bp, Zea mays
aaacactgagcatgcaactaaataatatattaaataccgtccgcttcttcccc

SEQ ID NO: 20014 - DNA, 398 bp, Zea mays
gagctctgccaagttggataatcgtatggtacttgcgacatcatatgtgttgctcatatggactaatggttccgccgcgatgaattatcgggcttccatagagtaatagaatgtcacgtggtatatggtgccttaaagattgccttaatatagtggcctagtttaaattggtattagcttgaattggcatcttatgataaaatgcggtaggtgatattcctggtggcgttaaccctgataaacgcatttgtgtgtatagcatcatggttcaatcttgcacattgctcctaaaagtcttaagggagaacgtctcaattgctatttaggcatatggcgttgagcatattaggtcttgattagccatattaggggaccattaatacaaattgtgctcaatc

SEQ ID NO: 20015 - DNA, 251 bp, Zea mays
  unsure (1)..(251): unsure at all n locations
acacgtgataagttgacttacgtgcgattctataatttataccttgngcagcttgtcaagcatgtgtacaagtgggaggaacacatcacagcatgaatgtgatgactacttcaagacctctggagctgctgcatatggacctcttccgacccgtcgcctatctaagcataggaggaaataagtatggtctaattattgttgatgacttttcccgcttcacttgagtggtgttttgcaagataaatctgaaa

SEQ ID NO: 20016 - DNA, 472 bp, Zea mays
  unsure (1)..(472): unsure at all n locations
agcttgtggaggttcttcatacccacatgtgctattctgtgatgccacagccagcccatgcatgtgttaaccattaagcatgcatctagaccggcctcttcntttgcaaaatcaactatgtaaagcttgccgtctattacacccttaaaagctagtgaaccatcacatcttttagagacagacacatctatatttgtaaacaaacagatatatcccatattgcataattgactaacagatagcaaattatatccaatagactctactaaaaacacattatagatagagtgctcatttgagaatgcaatattacctaaccctcttaccttgccttgatgtccatcaccgaatattattgaatcttgagaatctttgttcttgacgtaagaggagaacatcttcttctcccccgtcatatgggttgggcatccgctgtcgataatccagcttgaacccgcggatgcataaacct

SEQ ID NO: 20017 - DNA, 413 bp, Zea mays
  unsure (1)..(413): unsure at all n locations
taaatatcagctgtcactctgccacgtgagtcattcctttctttgttggttctcaatggataagncaattgcaagcattagtattgcagaaacttgcatatgctgaatgaacatgtataaaaaggcttttttcgacccctttaaaaagtccattctttcacacctgaacactgatgtaaatagaaattcaacaacatactttgaataatggacttggttcataatttgccacacttactgatacaaaatattagatttatgatcatatattatacaacaccactccaaattgatttatacaatacaaaacctgatgaatcagatcttgaacaacaactacttttccaaatgacaagttgtctaactgtaaatatattgtactcatttgtttgaaatacctggaaagttatact

SEQ ID NO: 20018 - DNA, 421 bp, Zea mays
gtgatgaatgggttaaatgatcgatgaaacgagctgggcactccacgatgagagttgatccgtggtccgaattgatgacatcagtatgtctcttataaccaccatttgataggtgactcactgtgactcaaacaatgacactatagactgaaggtgcacccttacagaatcaatattgacagcacgagggttctttagaacataaacattgcaaatgaaacatcaattcaacaatacttattatatgtatgcacgatgaatcgatgaatgaatctcaatatgctgcaagtgcacagctactgtgtgatctcaccttggacatatcatggttcattttcacagaacttcggctttgacaggtatgcgtttgtgtcatatgtaaacctgcatacctcatacagatatcattgcttgtgatgac

SEQ ID NO: 20019 - DNA, 240 bp, Zea mays
ctgacagctctgacagatttcataccagataaactatcgttatttgtactgtggaccgttcggccatttggcgcggtaccatcgcgtgtgcgcacaaaatgtgtttgttgcacataacggtctgatttgagtgggcgactataaatataaagacagctcgtgtgtgagggctcttttggcattccttgctacaatgggctctttgtgatcgtgcgactactctctcacactaattgttga

SEQ ID NO: 20020 - DNA, 442 bp, Zea mays
  unsure (1)..(442): unsure at all n locations
tgataacgaatccgctaacattatatttatattacattcttacgcaggtcgataattcccgaacctctgtccacccatatacagcggctccgtatcccacgtgagatacgactgcgtccgatctttatacctgtgctttggcgtgggagcccacgtgagaatcgactgcgaccgaactntatacggttagacctgtgtcttggcgtgggacagacaaggggatttttttaaccacagtctaatattggcggctcccacgagagtagaacctatgatctgatgagcgctactcagaccacataaccaactcggcaatatgtcatttcgcatatcccctgttcatccgtgagtaggatgaccagaagagataataagatcactgtttcggtttgagaaacatactcagctcactgtcggcggtctgaactatcccaaaatgata

SEQ ID NO: 20021 - DNA, 150 bp, Zea mays
catttttcaagacggatcatataaccatggatcacccacttacctacctgtagaatgctggttaacaacgtcccacaacttcccctccttgcggtccaattgctttctttggggctttgtgcacagtactactaaatacatagctaacac

SEQ ID NO: 20022 - DNA, 381 bp, Zea mays
  unsure (1)..(381): unsure at all n locations
ggaccttatatactcagcttgaattggcctcttccgtcatgtcaaaaatgacctcgctgatatccttgcatacaatttgtctgaangtacgaaagtgatgaatttaaaaatagattatcttgtcccgnanncnncggctgatcctatctttntgcagggcttaattcttagcaacgctttgagggcgcaaaagaatgctgaagataaaagctgcgtgatagccctcggcaaccttcggtcagaagttattaagctgagaaatgaagccgtggaaaaagataaaattctgctttcattggtggataaagtgaaaaaagacgaagcaaaatttaacactcaatccgaagcttattaagccgaaattgaagaccttcggaaaaa

SEQ ID NO: 20023 - DNA, 430 bp, Zea mays
  unsure (1)..(430): unsure at all n locations
gagcttatgtgtggtctaaccactagtatggtacccatccctatccttggtattcactcggatntgcgtagcactagcagggattacggatggggcactagaatcctagatcactgtgcgctggggatacctcactgcgccgctctgctcgactgaaacgagggagacgcccctcagccattgattgcctgatgggtgtctgggattagagataaggaaaacaattcatgcccaattgattatgaccatcggatccagagcgggcgagggagatagatcatggcatgggtagttctgggccattgatccatcgatgtgcgcccaggaataaatgagtacataccccttcgcgacttcagatccgggccggatatctttgatcctacggctgctagtgcataccaattcgtntaaacaaaaacctaatcct

SEQ ID NO: 20024 - DNA, 444 bp, Zea mays
  unsure (1)..(444): unsure at all n locations
acgtgaagagtgccttcctcaatggtccaatcaacgaagaggtctatgttgagcaacctctcggctttgaagatagtgagtaccctaatcatgtgtataaactctctaaggcgctttatgggctcaagccagccccaagagcatggtatgaatgcctaagagattctcttatcactaatggcttcaatgttggaaaggacgatcctactttatttactataactcttaacaatgatttgtttggatgccaaatntatgttgatgatattatatttgggtctactaacgaatctacatgtgaagaatttagtaggatcatgacacanaaattcgagatgtctatgatgggggacgtgaagtacttattgggatttcaagtgaagcaactccaagagggcaccttcattagccaaacgaagtatattcaagacattctaaacaagt

SEQ ID NO: 20025 - DNA, 427 bp, Zea mays
gtcacctgcggcatgcaagcttcccattcgccttgtggacgatgactgggttggccaaccacactgggtgatgaacctcttcgatgaagccggtgtctatcagcttctggaccttctttcggatgaagtcctgccgctcgacggactgtctgcgaggcttctgactcaccggcttggcgtcagggttgatcttcagatggtgctcgatcaccttcctatggatcccaggcaattgggacggctcccatgcgaacacgtcgacatttgtctggaggaaggcgacaagcgtgagttcctatttctcctccagatcacccgcaatgcgagtggtctgggaggaacccgcgcagagctagatggccttgatagtgacgtcgtccgttcccgatggccgcacctacggcaccttggtagtcgccttggtcct

SEQ ID NO: 20026 - DNA, 440 bp, Zea mays
atggacggcgtggtgccctggacccctggtggtcgcgttatgacgttagggtcttatggttagcaaatagcgagagcaaattcattttatatgagacatataaatccggacccacgtgtcatatattagcggattccccatcgagtagcgggtatggggaaacatagaacatacccacgcccaccatacccgatgggcatatcaaatgacccaataaaatacccatgggtatcaaaatccgccatacccgtgccctaatatggtttttgcccatcgggtttcgggttttgggtacccattgccatccctatacccatactcatacccactacccatcatgggtacaaaattatgccatacccatacccaccatgggtagcgagtacccatctggtacccatacccattaacattacgatagacatgaatcattgaatctc

SEQ ID NO: 20027 - DNA, 496 bp, Zea mays
agctcttactaagctcttaaatgactcatataaaatgcttaactgaagtctaaaaaaccacaacagaaatctaaatcaatcattttaaaagcacaatatttatgtactaaattacctttccaagcctcccaaagaggattcgatgaagaaaaaactgcagtaatgtaaagctggtatgagctgggtctcaagaggaaagaaaggtgactcaagcagcatgagagaaaatggaaacactgaaaatgaaaaaaaatacttacttggaagtacttgggaagagctttggaattccatgccccttgaagttgttaaaattcaggtgccttatatttaggtacctgagcacaaacatattacttttcatacaccgtgtctaaaagtgactacttatcctctattcattggtgctacatattccaaaatcaatctaatgtcttctaaaagcacaactatcgatcaagataagtccaggaattatgggttaaaaattactaca

SEQ ID NO: 20028 - DNA, 294 bp, Zea mays
  unsure (1)..(294): unsure at all n locations
ctgatacacggacttaatattgtcgtgtcactnggaatcagaagattgatggtatacggagattctattgtcatcatcagccaagtaaataaagattggaactactccacgaaatcaacgagcaattactatgctgtggtcaggaaagttgaggataaatttgaagagatggagttccaccatatagagagagactgttacatggcacctgctgctttatccaatctatgatcatgccgagcgcatgctccatatggtgtcttcatccaagaagtacaacaaccaagtgtcaca

SEQ ID NO: 20029 - DNA, 405 bp, Zea mays
  unsure (1)..(405): unsure at all n locations
gtttattattaataggtcaagcttcgattgctaaaatattctttttagtatgctcttttggtgtcttttgtttatttctggcatttaatcttatactaaattggctcgtttgattttcaaggcatgttatggtgttctctggtttgtcatcgagaatagctctttctcttctgtcaagggttttaccaatggcttgtaacaactggatgtagaatgattnnttgtttttaactgatgtaatgtgttnttgcattacaatccattgtggctaanggggcagcacatgtagtgtgtagtcatcgngaatttaatagtaactatctctacagttgtgatttggttattaaatgtgttggtggacctatcaattggatgttggtggtacatacatatctcttaagttac

SEQ ID NO: 20030 - DNA, 405 bp, Zea mays
  unsure (1)..(405): unsure at all n locations
ctaatcttatccttctacaacagatccatcggcaccagccaagccgcgacgcttgatctcatcccggccgttggctgggtaatctacgaccacagagttgcctcccaaccttcccttccaccaccgccatcagagcggcggagcacatggcccccgcgttgcgagttcaccggagatgcgagaaccggcgaagcaaggtaccaatctatcatctaacgtttgctacgcgatgcggagtggttataggagcttctgaggatattcttacccgtagtgaggagatggcgaggtcggcccacggcgcgcggtggttcatcggcgcccaacgaagtccggcgaagcaatggctangctccggtcatctcactggtctaatgacagcgcggaacctaccatgtgcccccc

SEQ ID NO: 20031 - DNA, 417 bp, Zea mays
  unsure (1)..(417): unsure at all n locations
actcaagatgctgtcatcactactaccttcgtgccgtttttttaaacaaagttctatattctcttcattccaatttttagataatagaactagatctgccttatctcttgtcacctaaagaatcatagcatttattacaaaaatgtcacccacacaaatatcttactcaaaaaataattntaagaatatgaggctgtccaaagaagcaaaaagattcattgccacctcctctggcacctaaagaatccattgtatctccctgatgatgtgtgcaaagaaaaacgaanaataatggttgtaactacataatgtatatcatctaanaataacgaagatagtacaaaccttttgttacgtttgacgaggatgatgaccgccatcggtgccatcgatgcgggtgtccacgtcgctagtcac

SEQ ID NO: 20032 - DNA, 267 bp, Zea mays
gttggtgttcatcatccacacaagaacatcatgacgactgacatgccgcttgagctactccacatggacctattcggcccgattgcttacataagcatcggcgggagtaagtactgtctagttatggtggatgattattctcgcttcacttgggtattctttttgcaggaaaaatctcaaacccaagagaacctgaaaggattcttcagacgagctcaaaatgagttcggattaaggatcaagaaaataagaagcgacaacggaacg

SEQ ID NO: 20033 - DNA, 253 bp, Zea mays
attctcgaagcagcgcaccgagcgtgccaacatcaccgactcggatgtcatctgcgcggtcctcgctggcaccacctggcgcgaactggagagccagctgggtcgcaagacccccaccagcgcgagcgagctgatggacatcggcaccaagtttcgctccggccatgaggcggtcgatgctatcttcagaaaggacaagcagccccagggccgcccatcggaagatgctcctgaagcgttgatagtcggctag

SEQ ID NO: 20034 - DNA, 373 bp, Zea mays
  unsure (1)..(373): unsure at all n locations
agctnttcatctcaactggtatatgtcatttatatttatttgtttgagtcctgtttatgccatctgtctcctcaaagcagataagaatctcttggctgctcacctgtcgcatcttccccgattcaaaatcgtcctggtcgcatcttccccgattcaaaatcgcccagatgagttttccaatcctatatttttttctcgaaagttttccaatcctatattcagtttgcagtaacacgatgtttgcatttagccatcttttattttggtggatactttcgtactgcttcgtagacagcaagcaatgattattgaaactaatagtaagaagaatgccccatctattgactccaagcccacgttcttttgtattcta

SEQ ID NO: 20035 - DNA, 476 bp, Zea mays
  unsure (1)..(476): unsure at all n locations
tgccctctgagtggaatttcttgtatacccagctgactgattgccgcattgaaattgagcattctaatanggtcaccaccctgcttgttacgattttcatgaaacctaatcatgttgaaatcaccaaggaaaatcaaaagtttgtcgtcatcaatttcaaggttagaaaaccaggcaagaaaagcttctccaccatgatgagagcaaggggcataaatgttatatagccaccagacttgcccatttagattggattggaaacgaatagtgtgcccaaacgggttttgatcaactacctcaattttaaagagggagcttttccagatagtgatgaatcctncagaggctccaatagaatggccgagagcgaatttatcaaaatggcgattgcagaagagatgaatataagcatcatcgaaggattcctttttttgttcctgaatacagacaatgtcacatttggattccaaaatatt

SEQ ID NO: 20036 - DNA, 423 bp, Zea mays
  unsure (1)..(423): unsure at all n locations
agcttaagatgatgagagaaagtagccattcaacatcttaacaaagctaatatttagccagctaacatatttttagatgggttgagccaactaatgaactaattgtaacatgtgagttagctaacaattagttaaagtattattggggtatttagaacctctacaactaattttaacggctaactattaactatagaggttgcaaataaggccttttgaatcatcatactagttttatttccaactttntatctatataaataattttttgattgaatcaatatgtatgcaaactatacacaagatactttctaacatgttggttttgggtagactagtcgggcatgacgacaagactaaggccctgtttgaatacactaaagctaatagttagctgctaaaattatgtactgacatccaaac

SEQ ID NO: 20037 - DNA, 410 bp, Zea mays
  unsure (1)..(410): unsure at all n locations
tcttctcgtcgtcgatgagcgaagccaacgctagcgcctcctgctagtggtgtttgttcgggctttctgagtaagaaatatggattcattcttggcgttggtttatgaaaatgactgacaagtaagatccatgaaaaaatattacgaataataaatgccacgcatgcaaaaaagaatttatgcaaaaagaatttaagttgaaaacattattcaaacaaaaaaataacatgcaatgctcttttttaaatactactccttccatccaaaaatataattcaagaatctcagtgatacttatatactactgcgcattatgcaagggtagcangtgggcttgagagagatgtagtagatattntttctgtcataaatgtagacctaaacacacatgtggtgtagcggtagctact

SEQ ID NO: 20038 - DNA, 326 bp, Zea mays
gctttggctaatgaaaattggaagatattatggatactcaaattgatgcaccaataaaaatgatatttggcatctagtttcttccgatagtgccaagaatgttatcgattgaaagtaggcctattgaatcaaacaaaagacagattaaagcttagatagatataaagtcaagctggtggcaaaaggttttaagtagcggtatggcatatattgaggaaaccttcactcatgtggtttaggtaactaccatcaggatcattctatcattggcagtttctagaggatgaacattgaagcaacttgatgttcggaatgtgtttcttcgt

SEQ ID NO: 20039 - DNA, 314 bp, Zea mays
  unsure (1)..(314): unsure at all n locations
atatgtgataattggaacatggagtgaccacctacgataacagtgcaaccacgagtgtcatcatggctctggctctggaaaactaactaatatgcttaatgcttaataaccttacctaaaatattagaaaatggnggagcggtctatggtggtagctcacattaacatggtgatgtagccttgtctaagctacctcgccctgagggcctacacaccgactcggaatccttgcggatagctttgtactaattatgttttgntaaagcctcatagtggatccctatccattcaacttggaagtgaatatgagacac

SEQ ID NO: 20040 - DNA, 443 bp, Zea mays
  unsure (1)..(443): unsure at all n locations
agctcgtagtttgaaggccctatattgcatatgaccagtgactctctcaatcaaggactttgcaacccaaatttgtctaggtctactcttgtttggtggacctatgaatgtaactttgacctttccatttgcaacttttcttataacataatgagcattgaaagcaaatggtcttgagtgcttatgcaagggagttggtggtttggctttgcagttgtgggcaaagtgaccttcttttccacactcaaagcatttgataggcttgtgagtctgctttggcttgtattgagtagtagctntcttttgcacaaaagcattgtatccaataccactcttgttgtttttcatgacagtgttcataagcaactcattntggaggtattgngcccttgttgaacttttgcacacttgtgcaagatgttcattntcactcttaagtttct

SEQ ID NO: 20041 - DNA, 351 bp, Zea mays
  unsure (1)..(351): unsure at all n locations
tcagttacctagctacgtgactgatagtagantaattaattgcagttgcacccttantaatagcactgtctcattactacatttcgcatctctatcttgtatacgtaccgtcgtcgatcaatccgacgatctcaatctcaattcttctcaatctataacaaggaaacgatatatcagagtcacgaactcacgatcgactcgcaatggctgctctgaagattgccgccgtgtgcgtgctgctcctgtttgtcggctcatacctggcgcgctgcgttgcgtcgtcagcatcccccggtgacgatgaccatgccgcgggcggcgcgctcctgctgcgggagttcctggagctcg

SEQ ID NO: 20042 - DNA, 396 bp, Zea mays
  unsure (1)..(396): unsure at all n locations
ggacaaccgtagcatgcacaataccccttcataagaataccaagctttccaagaagcgcatgagcaaaattcaaggtgagaaaattaatgctcatactatntgctctaacaatgtacctatgtgcttcaacaaagaaagatcaaagagaagcgatagaatgtgctatggatgctaggagaaggatcatgaaattgattcatgcccccacatgaagaatcaagaccttgcacgatcaagaaagatgaccatcaaaaaggatgaaagcaaaagacaaatgcattgcaaggacaagcaccacattngttacaattgccgtgaaaagggtcatctattcaaggtttgtccaaagggtaaaactcctaagcctaacttggcaatacattcaaatatgatta

SEQ ID NO: 20043 - DNA, 285 bp, Zea mays
gaagcttatatctacctactataccaagtaaaaatgttgaacccctctgtccactccatttaaaataatcttaccctttattctaaaatatgcttaacgataacgaaaatagaaaatgcaacttaattaatgaaccatagagtacttctatttttggtaagctacttattcaatatagctcactggaaaaatatatcataccctattttagtacaaattaagtaggatatcttttattttaataaaacacggataacttataaaaaccctacaaaaatgacccca

SEQ ID NO: 20044 - DNA, 463 bp, Zea mays
  unsure (1)..(463): unsure at all n locations
gcttatgaagatntttcatcccaacgtgggctagtcggctgtgccagagccaacccatgttagtcttagcaattaagcaagtgtcgaattcagctctattaaaatcaactaagtatagctgaccctctaacattcccttaaatgctactgaatcatcacttcttctaaagacagtaacacctatatccgtaaaaagacagttgtaacccattntacatagttgagaaattgaaagcaagttataatctaaagaatctacaagaaaaacattggaaatagaatggtcaggtgatatnggcaatttaccaagtcctttgaccaaaccttgatttacatccccgaatgtgattgctctttgaggatctttgattttcttggaggaggagaacatncttttctnccctgtcatgtggtttgtgcacccgctatcgatgatccaacttgagccctcggatgcataaac

SEQ ID NO: 20045 - DNA, 413 bp, Zea mays
  unsure (1)..(413): unsure at all n locations
gactaacgtgcaattcttataagatagaccttgtgcagctcgtcaagcaggttaacaagtgggaggagcgcatcacagcaagaatgtgatgaccacttcaagacccctggagctgctgcatatggacctcttcggacctgtcgcctatctgagcataagagggagtaagtatggcctatttattgttgatgacttttcccgcttcaatcgggtgtcctttttgcaggataagtctgaaacccaatggaccctcaagcgcttcctcaggagagctcataatgagcctgagctcatcgtgaagaagataaggagcgacaacgggtccgagttcaagaaccttcaagtggaggagttccttgaggangaanggatcaagcacgagttctccgcgtcctacacaccacagcaaaatg

SEQ ID NO: 20046 - DNA, 429 bp, Zea mays
gtcacctgctgcatgcaagcttctaaagggagaacacgtgataggctcaactaatgtgcaattcgaaaaaaatacaccttgtgcagcttgtcaagcaggcaaacaggtggcaagctctcatcacaccaaaaatgtgatgaccacatcaagacctgtggagatgcttcacatggacctcttcggacccgacgcctatctaagtatacgaggaagtaagtatggtcttgttatagatgatgacttttgccgcttcacttgggtattctctttgcaggataaatatgaaacccacaggaccctcaagcgcttcctaaggagagctcagaacaagtttgagctcaaggtgaaatagataacgagcgacaatgggtgcgagttcaagaaccttcaagtggaggagtaccttgaggaggaatggatcaagcacca

SEQ ID NO: 20047 - DNA, 316 bp, Zea mays
tcttcacagctgtcaagaagatgctctcatgaaaaaaggcagatggaccgatttgttaccggatgcagtctgggcgctaaacacaactgagtgcatggcgactgggttcactccttttcgccttctatacaggtcggaggccatgaccccgcaagaaataaagcatgggtccccgcgtacagctccgtcagccgtccacgacgtggacgagccaacttcaaaagatctcattgacggagaccgggtcttcgccctacatgccctaaacaaataccaagcccagaccatatcatggcgcaaccacgcagtcatcccg

SEQ ID NO: 20048 - DNA, 486 bp, Zea mays
  unsure (1)..(486): unsure at all n locations
tactaagcttctaagggagatgcacatttgggactaacaaatgttcattntgagaaaggcagttnttgtatcgcatgtcaagcaggaaagcaagttggtgttcatcatccacacaagaacatcatgacgaccgacatgccgcttgagctactccacatggacctattcggctcgatagcttacataatcatcggcgggagtaagtattgtcttgtaattggggatgattattctcacttcacttggttgttctttntgcaggaaaaatcacaaacccaagagaccttaaagggattcttgagacaggctcaaaatgagtttggatggagaatcaaaaatataagaagcgacaacgggacggagttcaagaactcacaaatagaaggctttcttgaggatganggcatcaagcatgagttctcttctccctacacgccataataaaatggtgtagtagagaggaagaatagaactctacttgacatg

SEQ ID NO: 20049 - DNA, 412 bp, Zea mays
  unsure (1)..(412): unsure at all n locations
tgcaagcttatgaagattcttcattccaacgtgggctattcggcgatgccagagccaacccatattagtcttagaaattaagcaagtatcgagttcagctctattgaaatcaactaagtatagctgaccctcgagtactcccttaaatgctattgaatcatcacttcttctaaagacagaacacctatatccgtaaaaagacaattgtagcctatttttcataattgagaaactgaaagcaagttgtaatctaaagaatctacaagaaaaacattggaaatagaatggtcaggagatatagcaattntaccaagtccttcgaccaaaccttgatttccatccccgaatgtgatagctcttttggagcattggttttctcataggaggagaacatctttttttccccagtcat

SEQ ID NO: 20050 - DNA, 418 bp, Zea mays
  unsure (1)..(418): unsure at all n locations
gctatccaatgtatatggtggctggtctgccaatattgagtagcgggtgctaatcgaagaccctcgatcatggtctcaatgaccatctcggtgagcactatatgcgcttgagctctcaattgcaataaccttcggacatacgcttgcaagtactcctcatggtcctgtgtgcattggaacatggcttgggcagtgattggcttcatctggaagccttggaaactggtgactagcatgtccttcagcttctaccacgatgtgattgtacctggccgaaacaggaataccatgtctgagccacacttctaactgccatgacgaatgacttcggtatgacagcactatttgccccatacgaggatattngtgcctcgtatatcatcaggaactgctttggatttgaatgcccatcatacat

SEQ ID NO: 20051 - DNA, 434 bp, Zea mays
  unsure (1)..(434): unsure at all n locations
agcttttagaaccatagatccacgattagaacatattatagacaagagtatcttcacctctagttataatacagaaattatttccgaggaggatcaaagatgttttcgcttaaactacctagcttttgacatcttaagcaattctcttagcaaagaagattatcgtgccttcatatcaaattatgacgaatccatccatgatgcacatgatatttggactagaactaanagcaaatttgatgagtccaaacatgatagttcattntgtgcttctacttcctttggtctttgtgacactaacccttgcaaggaagaagaagattatgaccgatggaaaccatacgatgaatccacctctccaaaaggttggtcttcccatttcgattcccacatatggtgtgtggctaatgaanatgatagcggaaggacaaatg

SEQ ID NO: 20052 - DNA, 251 bp, Zea mays
  unsure (1)..(251): unsure at all n locations
tgaatattccttggccacaagtcgggctttgttccttgtcaccacaccattctcatcttgcttgttgcgaaatacccatttggtacctacaacattntggttaggacgtggaactaaatgccatacctcattccttgtgaagttgttgagttcctcttgcattgccaacacccaatcctaatctcttattgcatcctctaccctgtatggctcaatagaggagacaaacgagtaatgttcacaaaaatgag

SEQ ID NO: 20053 - DNA, 332 bp, Zea mays
actaaataacatcgggtctaccttttctcgcctcaccaagagggtcctcgaaagtcatgtagttcgcaccattttcacctatgtaaacgacaatcttgtcgcgaactaaagctaacatgatcacctgtgcgacctggcagaaacattcgcttatatgtgcgacgcatgacttcggctcaaccctgataagtgtgtcttcagagttcgccactggaagatacttgagtacctggtgtcacaccgagggatcgacgccgacccatccaagatccaagcaatcatcaacatgacacccatcttgttcatggactctctcagatggatgtcaaaaa

SEQ ID NO: 20054 - DNA, 447 bp, Zea mays
  unsure (1)..(447): unsure at all n locations
tcganaggtgaacgaaaatcgagatttggagaatggagttagggttcaagtgagtcaggttgatatgataaaaatcaaggatgccacggaaaaaaggagatatgggaaggccgatgccgcgaagaaggaaaggagtgtaaaccactgactcgtgggtatcttcggttgggacagtagtcccgtggcaagaacgccaagaacagagttcccgtggagggagaaccccgatggaaacaatgcggagaagctcaacttcagaaatcacagacatatggttacctgcgaagggtaactgactgttggggtcgatggcggtgatcactgcggcagacgagttcgcggtcttcctcttgggcgccatctatcttctcgctggcgaaacatagcatgaggcgagtggcagagaagattcagatgcggaaatgcaagaactatggcacggaaagc

SEQ ID NO: 20055 - DNA, 445 bp, Zea mays
  unsure (1)..(445): unsure at all n locations
agcttcaacttcgtcattctacanataacatagagttttattagagaggtgcgcatttcaaggagaaggtgcaagtgacaaatataagcttcttaccggcttaatatgacttcgagcttcgtcacccgccattttacgcccgccatttacccaaatctagggcataaatctattcccgatacttcgggctaggcttggaatatctatcagatctgatgacgataagctgaatttgggcctattaacaatctttccatgcgtgcagccaggcttcaaaaaagcggtagctgtgccccgagaagctaccagtgcgcataagtcatcatggccaccaataacttcatcaagagcatcaacctcgccttcaatatattctaatgtgatgggcaagttttcagctgaagggtgtaaattttcagagctggatccaatagaatgaaacaca

SEQ ID NO: 20056 - DNA, 357 bp, Zea mays
  unsure (1)..(357): unsure at all n locations
ntaggggaatagtcataaatgcttccaagaatgaatttgaatcacatttatacacctgagataccataaaccctaattgtaaccctgattaaccctaaatccaaaccctatgggtctatgtgcaaagttagtccacttttggactaaagtgcaaaaaccaggttaaataagtatcctaagtcatttggttcacaaatatgtggatttgtaagctaaaccctaagtttttgggtttatttgcaaaaagtacaaagtgaactctgtattaactaagtctgaaattagagttntggcttaactttggagctctgtagttttcaaatttttgagaattngccctatgtcaccacatcaaaa

SEQ ID NO: 20057 - DNA, 479 bp, Zea mays
  unsure (1)..(479): unsure at all n locations
agcttcgcccttcgtccgaatcggtgtggggcctctgatcatgatccgacgatcgcgggcggtataccacttcataaaggctgtgacctaatcagagtcgtccgatttagatcggaccactacgatcaccgcataccccttcgcgctgacagttttacataaaagaccctagctttctaggaaacaaacccgcagtcctggtaggagtattcggagtcttatgaattcttctgttttggcccctgaactttctgaaaaatgaggcccagtccagagatgtttaaaaacaaagaaatatttatagaaattcatttttaatacaaaaacaaatctagaaacttggaaaattcatagaaattccattntttggccaaattgaaccattccaatttctaaaattntggaataatattctctatcatttagtgcctctggtttgacatgaaagcagtaagaanaataatttatcatttaatctt

SEQ ID NO: 20058 - DNA, 488 bp, Zea mays
  unsure (1)..(488): unsure at all n locations
tatttagtcgcatatgaattagaggggattgatgggcatataatctctctcgctagtaaaaaatgactatgggtgtngcacatgttacaaagctatgccaaattctataaacttgcacatgcagttcatggatcagcatgtgattacttcagttttgacaatcaaatccggtgcaagttattttgaaacatagaccttgccaaactaagaccacgtttggttcctttagttcagagactaaagtttagtctctaccctgtttggttctatgggctaaaactattcaaaacacattaaataaatcataagagcactaaaatattgtcacacccgggtttcggagcaccaagacccggacacgaacataatcaccatgtgtgctgggaccaagtctcacacatatgatgcatagtggcacaggatcgaatgtcacatctttactatatacaacanggagtctgtacgaaatanataaatatctctactac

SEQ ID NO: 20059 - DNA, 384 bp, Zea mays
  unsure (1)..(384): unsure at all n locations
agcttgagaagaccacataacgcgaagcctaatggctgaacaatcagtgataacgaanaaagagttattaagttgggggccaaaggagacaagataaagaacagaaagtgtcaaaggtgtggaattgctgatggtcacaatagtcgcacttgtctatctgtcgaggagaataagcttcggttggccacccttactggtcgaaagagatggcggcccataagttctaagaacaagggttcatctagcgctccaaactataatgaggcatgcacttcaaaaaaacatcaaggaggtgtcacagacaatgattcatctagtggggagtagatgatttcatattttatgacaaatgtaatgtagtgccatacttgntattacaactat

SEQ ID NO: 20060 - DNA, 373 bp, Zea mays
  unsure (1)..(373): unsure at all n locations
tctaaagggagaacacattntatgattaacaaatgttcattntgagaaagacagggtttgtagcgcatgccatgcgggaaagcaagttggaacccatcatccacacaataacatcatgacgaccgacatgccacttgagctactccacatggatctattctgcccgattgcttacataagcatcggcgggagtaagtattgtcttgttattgtggatgattattctcgcttcacttgggtgttctttntacagganaaatctcaaacccaagagaccttatagggattcttgagacgagctcaaaatgagttcggcttaaggatcaagaaaataagaagcgacaacgggacggagttcaagaactctcaaatc

SEQ ID NO: 20061 - DNA, 419 bp, Zea mays
  unsure (1)..(419): unsure at all n locations
aatgccatgaaaatattcataacatgctttcataagtgcataaactgtcatgaacatcacacctatactatgacacaatgcacttcacattctatgtgatgtagatatgttctcattaacctaattatgtgcaattaagcatttaaggccaaaattatgtattcatccccatgcacatatttatggggagcaatctatgctatataaaactatgattatgctaaattgatatatcttatgatcatatctcttttatgtctatgactaatgtgttttcaagtatactctcatacttagtcatagaattgaaagggaaatggagtatttggcgaagacgacgcttncactcaactgcatcggtattatccactctntgccggtattccagcatctctccattntggtataatcttcactca

SEQ ID NO: 20062 - DNA, 406 bp, Zea mays
  unsure (1)..(406): unsure at all n locations
tggtttgaagtgcagcgacaccctcatccatatcatgtacaatggttgaatgaatcaggagatatcaagattggttataaagtgaaagttccgttcaagattggagagtattgtgacatagtggagtgtgatgttgcacccatgtctgtgtgtcacatgctgctaggaagaccttggcaatatgatcgatattctcaacattgtggaagaacaaatcaatacacgctagatctgaaagggagaaagtttgtactcaagcctatgacccctcaacaaatcatggctgaatacttacaaaagaaaactgaaattagtacagcaagtagaggaggagaagagcanaataaattgagtgccatccacaattcggtgagtgagtgctacaagccaaattcaagagataaag

SEQ ID NO: 20063 - DNA, 493 bp, Zea mays
  unsure (1)..(493): unsure at all n locations
gcttagaagaaacaaagggcattgctctctcacaatgcctcgagccaactactctcaaaagttggcttgagccttgggggcttgtggaggatagatatccccttggtcctcatggacactaaaacatatcatggtcctcttgatggtcttcctactaggtcgacccacaggatgggctggcaggatgtagccaggttgggcgagcccgatccaagatgacgaagaccttcgaccgagttaggcgccactgaagcacttatatctcgggtgatgttgttgcaagcacccgaagagctatgcatttggtgataactcgggcgactaggcgatgaagactccagatatacaggactgcaatctacgacaaagaaggggataagcgaagtagatagtgatcacaacttgtaaagggataactctctggtcatgtatataaggcgaggnggaacccctacnaaatcatcgcatctcataccatttcaccccaatctca

SEQ ID NO: 20064 - DNA, 388 bp, Zea mays
  unsure (1)..(388): unsure at all n locations
cgagtnttctggtgccgttcttgctgctgatcccggatgacttggaatttcctcttgagatggcctttttcttcctcttttgccctttccacttgcatggctttgttggagaggtgagagaaacagatgaagtcttggctggccaggatggtcttgagttctggcctgagtcccttcatgaagcgggccatcttcttgacttcggtactgacgtcatctggcgcgtaccgggctaattccgtgaacttgtgcacatattcgctgacagatcttccatcttgagtcagttcccggaattcgtcttccttgaactgaacgagcccttggggcacatggtgctcctggaaagctgttcaaactctgcgcatgagcatctctgatggtgaca

SEQ ID NO: 20065 - DNA, 220 bp, Zea mays
cttatacgagctgcactggcgatatggacacatgggcttttcagcctcaggttattacctcattaaaactgttgcacaactgattcaggacaacacttgcgaaataacaatgttttggcttctaagttaactatggataaaaggcgacttaatctactctccgaatataagcatgcgcaaagagcaggcggagacctcactggaaagatttgatcacctg

SEQ ID NO: 20066 - DNA, 451 bp, Zea mays
  unsure (1)..(451): unsure at all n locations
taacttctgccacacttcgctgtgcaccatacttctggagctttgtatcatccctttcttcgtctggttcaggcttcgtcctgaccgcacttcatgttcgtaattctgagtccgaaggtacctgttcacataatccacttggaaaacattgtcaaatcatgnttttgatgaccttctgaggacgaatgcccccaacacaattaaaccaaagtgtgcctattcaactgggaagccacattgtcaaaaccactcttcttgtgttgggattggaaaatgtggacattattctaggagcaaattggatgacctcgcaccaagttgtgcttgatgtagccagccgtaccgtggaagttaattctccattctgcgggagtgtcactataattctgcctaatcacgtgtcttctcagtcatgtgctttctctatgactgagctacctctgaataaatc

SEQ ID NO: 20067 - DNA, 422 bp, Zea mays
  unsure (1)..(422): unsure at all n locations
atccttaagtcacctgcggcatgcaagcttgggttcacgtcgtaagtgatgctgctgtatgcgcccgtggcaaagccagagttgatcaccacgccttcctcgtgcttatatgccttgaactgatggctgtgcccggtcaccatgatgtccacgtccagctgccgctggagcatcgccagggagtccaggtcgccccatggaacaacctgatgttcggntgatgcagagatttagtgaaaaaaatacttaacagaaaatggggcacagctagtctactggaattcaagagccacanagtgcacaaacaatgcactcacaataagctatcgcacattaatcatgtntactgaagtcgttaccaatgaagtacagaatgacaaaaacaaatggagagcagttntcataaattgtgtgaatgaacg

SEQ ID NO: 20068 - DNA, 292 bp, Zea mays
ctcatagaaccttcaccctctcagattataaaatcacccaccttatcctatcgcccttgtgagatatggtgtgattgaggagcttgttagagatcctccttataaacaagtgtggattgcaaaaccttaccatctcatgaacacacttgacaccgttccctaaatctctagtgatctcctctctatagcccctcatccacccaaatataccaatactcacaaacagactcacctaagagagaggtgagattccattgtgactattgtgagaaggatgagacattggctattt

SEQ ID NO: 20069 - DNA, 208 bp, Zea mays
gatccggtccggctcaatccccttttggtcgtttcaatcacggcgcgtttacaactgtgacgggaaaaccggcgttcccaattaatcgcttgcaccatccccttcgcgctgcgtatagcaagatgccgaccgatcgccttccaacagtgccactgaatgggatggccctgagcggattttctctaccatctggcggattcacaccgat

SEQ ID NO: 20070 - DNA, 416 bp, Zea mays
  unsure (1)..(416): unsure at all n locations
cactaccacctcattcttttccagcttctgagtaacttcctctccgccaaaacgaaccagctccttttttgcttcactaaaattgcccagcttcaccattttgggaagatcagcttcagagatggtggactttccaaagtccaaatgactaggtttacttggcatcccgcagctgtactcatcctcggaaccagcttcttcaacatcagctcatgttgcttcngcagcatgtgtgtcctctgatgaaaccagcctataacgcctcattgcttcggaaatcggaacagtttcagcggcttcggtctcatctccatcacattcaaccctatcagtggagcgtactctggccatttgattntaaatttcttgaaaattccttggaaattaataacctttntctgaagctcttctcgtga

SEQ ID NO: 20071 - DNA, 162 bp, Zea mays
ctcgtccatatgtcatgatataaggagagttgttcaagcatggagtttgttgctccgctactcaagtgttatccagaaccgaacgtatatagttgatgaaagaaatacatgcaggcctgtgtggatctcacattggatctatgccgttacttggaaaaattt

SEQ ID NO: 20072 - DNA, 288 bp, Zea mays
atttgccattactaagctttagccgatacaactcaattatgttattgatcgacactaaagaaccataaagtcatcccacaatgcaatgcatggcgggataaatttaactccatatattactcatgcgagggcccgagtcactctcgactgtgagcaccaatgatatatcacgtttacgctgtgtagaggctgcacatctttagccacaagtcgtgctcccttgtcgccctgagctgtacgaacccttaggcacttctaaagtgagtcggagagggtacactacgagtc

SEQ ID NO: 20073 - DNA, 390 bp, Zea mays
tcttatactatgcacctgtccaacacttaacacttatgtcagtccctctatcgggtagtcatgcgcaccatcttaacccatatgagagctttcaaatatatcactcccatactctgcaacaacatgtatgcgtgattctaatgagaccctggcatcattctgagttgttcttgacattctatgagagcattctgttgtgatcttacctcgagtgtcatgttgctgcgatttctcttgtgtgtgtactcagcctatcttgtgttgtgcttctgacttgttaactccattaaactatgttcgggtgctagatactctaattgtgggagatgcgaagtgattcatattgatataatgtagaacatgggactcaacttgtcataggatctcttg

SEQ ID NO: 20074 - DNA, 497 bp, Zea mays
  unsure (1)..(497): unsure at all n locations
agcttgaagccatggtaagtagcataggctagtaatataccaaatgactcaagcctagctacaggtgcataagtttcatcgaaatccaaaccttcgacttgtgaataacctttggccataagtcgggctttgttccttgtcaccacaccatgctcatcttgtttgttgcggaatacccatttggtacctacaacattttgattaggacgtggaactaaatgccatacctcattcctcgtgaagttgctgagctcctcttgcattgccaccacccaatccggatctcttagtgcatcctccaccctttatggctcaatagaagacacaaaagagtaatgttcacagaaatgtggaactcgagatctagtggttacccncttatgaatgtcaccaagtacgaagttgtcacacccggatttaagggacaaagccgggtgcatctcatacatgcgccaaagaagacaacatatataataatagagtgtatagagataaat

SEQ ID NO: 20075 - DNA, 378 bp, Zea mays
ctgctctaatggggcaatcctaaactgcagtataaacgctctccatgcaagttaatatccttctctccaaccttgtagctcctatgcagaaccactaataaacgataagaaaatgattccaaatatgactcttcaagataaaaccatatcaaactaacttttaagttatggtccattgcaatatgtgagagcccctaactaactcttaaaggaaatcaaggtaagtcagaggagcagtaacaaaataaatacatccatcttcattgagaagatcattagcagtatccaggagttcatgtgcatgtaaatatgatccacctagtttatgtgaacataaatcaatcataggctccacttcttcgatgcactgatagcata

SEQ ID NO: 20076 - DNA, 428 bp, Zea mays
tgcggcatgcaagcttgtaaatatggtcaagaaataaatgagctatattatcagcagtgtatgggtgatgcaatggtaagaaatggccgtattttgagaacttgtcgacgaccacaagaacacagtcggcgtggccagatttatgcaggcctgtgacgaaatccatattgatggtgtgccaagctgctggtagaatttcaaggggctgcaacaggcctgggtagcgagagcggtctggcttgacttgttgaaaagtggtacacgtgttgacaaaagaagcaacactggatttcataccaggccagaagaataactgtcggatacggcgaagagttactggtataccactatggcccccaacagccgtgtcatggaaagctgacacaatctgcgtatgaagggagggaacttgcccatcatagatctta

SEQ ID NO: 20077 - DNA, 301 bp, Zea mays
ccacctggaagtctctgggccatacccctcaggcgtggtatcgtcgcatatactgctgataccgcgccgtgtgtagttatgccatgttccgagcctcttccagctggtccagcgagtcttctcggctggtctggttgctttggtcgtcgaacaccctcgtcctcggggaaccgtattctatgtctgtgggaaagatagcctcggccccatatactataaagaacggcgagaaactcgtggctcggcttggcgtcgtcctcagactccagaccaccgatggtagctctttcatacatcgctt

SEQ ID NO: 20078 - DNA, 406 bp, Zea mays
agcttggtgccgatggagaaacaaaaattcttgttatcttggctgtcgaactgcttgccgttgtcaactgttagctcggacggtactccgaagcggcaaacgatgttctgccagaagaatttttgggcagtctttgatgtgattgtggaaacagccctcgcttcaatccatttggtgaagtattcgacggctacgaaggcgaacttaaggttcccctgagcggtgggcaggggcccgacgatgtccatgccccagcgctggagaggccatgtatgggcaatcagctttgtatattgcgaggggctgcctgaccgaggagagaacttctggcaggcttcgcatgacctcgtgacccgatttgcggcgcagatcattgcgggccagtaaaacccttgtcggatcacct

SEQ ID NO: 20079 - DNA, 411 bp, Zea mays
  unsure (1)..(411): unsure at all n locations
ggaacaaataggagaagaagaagcactacataaaggccaatggcgatgcgcatatatgcaaggagtgggattcggattgctcctcctccgactccgacaatgatggactcgccgccaccgccttcaacaaatcggccctctttcccaacgagcgtcacacgtgtctcatggctaatgagaagaaagtaagtactcgaaactctacttatgcttcttctaatggtgatgattctagtgacgttgatgaaatagactattctagtttatntaaaggtctagatagaattacgattggacaattaatgaattaattgatgcattgaatgagaatgataaactcttagagaaacaagacgatttattgtatgaagagcatgatnaatntntagaagctcaaatatctcatgctct

SEQ ID NO: 20080 - DNA, 397 bp, Zea mays
  unsure (1)..(397): unsure at all n locations
atcttcgatccatacccgacacgcgtattctttcctatgtcngccagtgatgtagttacctgtccgcgattgatggcgccaatgtatctgtccacgcgacgcggtggatcaccaacatcggcgataaatctccacgacaccgtgaacccctccctttcaattgcgccctcgttcaacttctacgtaagcaacccaagctttgaggtaccagataggtgcctgagtcgcgctgccggcggctatctacggtggctgcggcgcggcttcctctctcttcctttctctgctcagcgaagggctcgggtttacgaaattagcgcaaatgaatcagtagggcgagtctaccctgtctcttattgtctgatgccgtcctctgtcacccctacagcgcggactt

SEQ ID NO: 20081 - DNA, 316 bp, Zea mays
  unsure (1)..(316): unsure at all n locations
tactcaagctttgatctctctntgtgaagcatggatatctttctttacgaatcatggatctttttctttatgaagcatgaaaagaaaggaanggtgtttttcgccgaatgctcaaaaacagtatgtatgtaagtttcatgcatcacacagaaattaattacaattatttacatattcgattcaaagttacatacatcagatattacagtcttgttacaataaaagcacaatgtccattctagtgtctcatacattatccatttcaaaatgtatctacaataagtgttattactctttaatgactttctctgcaact

SEQ ID NO: 20082 - DNA, 393 bp, Zea mays
gcttcgctaaatgaacgaaaatagaaatttgctgaatggaattgggattcaggtgggtcaaattcaggcgatagaaatcaaggagaccgcagaattaaggggaaataggaagagcaagaccgcggagaagaaaaagaacataaacaacggattcgtgggtgtcctctgttggaacagtgaccccgtggcaaatccgccaagaacagagctccttcggaggaaaaaccccgatggatacgagatgaaggaggtcggactcggataaacagacatatggttacctgcgaaaggcaactggctgttgggatcgatggggggaatggcagcgacggacaaactcgatgctttccgcttgggcgccatctcaacctcgccggcgagcggagcgaaagc

SEQ ID NO: 20083 - DNA, 444 bp, Zea mays
  unsure (1)..(444): unsure at all n locations
ctcctatccagtgtcctatttgcaaaacattaaaacaatacaacttgtgtgaatattntgcctagtgaatgcactctatgtgtgtcaaacatatgcaatgcaaatgcttatgatgccatactcaagttttagttacagtaacaccattggtgttacagtacgctaatgcggtgagcccctttctgttgctagggaatcgatggggacggttgatatgtgtggngacgaagtgcctcgccatgtcgtgtgtttaggtttaccttgcaaggataaaaactcgattcaaatcgtctgcttctcgcagctaatgagactgcttgatccactgtactgcattgagtaataagtggaaatgaagtgactggcaaaatatgttgattgacaaaatgtttgataccatgtatgactagctaggtactcatctagtntataagcatcatacta

SEQ ID NO: 20084 - DNA, 429 bp, Zea mays
  unsure (1)..(429): unsure at all n locations
atatacttcttgtcattttatgttatctcaagatgcacaaaataaaatncccacatgatgcatgtcttactnttaagcgtttttttgtcattcaantatttgntatatgtgatgngctcatgaaatgataatctcggatgacacacatatgtataaaggaatatcattctctttatactcttattacaaagtggatattaccaatcctaccccccttaataataatctcgtctcgagattaggaggaacgaggaanaaggcggggaaaatctatgcgaagctcttcttctcttttccaagttgcttcatcttcaccgtggtggctccattgaactttgcacatctttataaccttatttctcgtaactcgagtcanagtgtccaaaatcttgatggggtactcagcataagttagatcatcttgaacac

SEQ ID NO: 20085 - DNA, 382 bp, Zea mays
  unsure (1)..(382): unsure at all n locations
actgacttgtgtcttatacttgtgaaatggcttgttgtccaagatacgaaacctgttcttcaatgcacctatagccctctccacagttactctaagtgatgagtgtctcaggttgaacagttctcttgcattggtaggtcgatttctgctcccaaactcactcaaatggtacctaaccccctgaatgggggtagaaagccagtgcggcatacataccccgcatctaccaagtagaatttacctacaatgtgaaatctactgtgagctngtgtgacattgtagatattacctacaatgtgaacttggttgtgcaattaccttgtgggacagtgaactcatcatncctctcaatggcatcaactatgataagtgcatcatgggc

SEQ ID NO: 20086 - DNA, 292 bp, Zea mays
accatttgagcttcggagcatttgtcaagcttcgactcatttttcctcggcttcgtcatcctatacatgttaaaacggtatgagacaactgcaaggttcaaagagaaggcaaggtaatataagttatttttaccggcttaagatgacttcgagcttcgtcgccagctatttttcgaccgccttttatccaaacctgagttataaatctgcttcctatgcttcgagctaagctaggaatatcaagtaaatctgccagtgacaagctaaaatttggtctgttgacaattttcct

SEQ ID NO: 20087 - DNA, 324 bp, Zea mays
  unsure (1)..(324): unsure at all n locations
gttgtggttacttcacatctacccgtctgtttatatagtgctgcaggtgggaaggtgaatcggcatggtctccagcaccgaacaaacagtcacccgcactcactgaacggtgggccgtatagttcgagaaggtgaatcgctggcgagcgcgtaattggtgcaagatgggtcgcgcgcgacaattattttaatcgtttctcgccaacgagctcanggaaggtgttttttggatcttcggcattccgaagcctataagattttcacggatcaagctcgttacgaaaaacgatcaagcaccgcgaaggggctactgttggggatatg

SEQ ID NO: 20088 - DNA, 474 bp, Zea mays
gcttgtgtctacaagaaggaaaatgggagcgctgctgatttctgatcttgtatgtggatgacatattattgattgggaatgacattcctatgctagagtccgtcaaggcttcactgaataagagtttttctatgaaggacttatgggaagcagcatatattttgggcataaggatctatagagatacgtcgaacaggcttataggattaagtcaagatacgtacattgacaaggttttgaaatggttcaacatggaacagtccaagaaagggttcatacctatgtcacatggtaaacaccttatccagatgcaatgtcctgcaacggctaatgagcgggagcgcatgagtaaggtaccatacgcctcagcgattggatcaatcatgtatgccatgataagtacacgcccagatgtttcatacgctataagtgctacgagtagataccatgctgatccaggtgaggatcactgga

SEQ ID NO: 20089 - DNA, 479 bp, Zea mays
  unsure (1)..(479): unsure at all n locations
agcttaagaatgagctaaacatacttgattctctgttctttgattgaagcaatgcacacatagctaatttatgtaccttcgatcatatctctttcattatgtacaagcgcatatttcttattcttcttatgccaaggctaagactaatgcgctttcaagtgtatttctatacttagtcttatatttgaagggaaatggagtattcggtaaagacaaggcttccactccaactctgactatatcacttaccctttgtncgtactcatgacactctcaatggtatgactcttcactcgtatctatgttaccatttgggagaaggtattaagccccaaagggggaaaatgaccttatggctctcaagttctccgttnttggcgaataatgccaatggngagaaaatattaagtccagagcaaaaggaccgcaccaccatttcanataatattcgaaatgaatgtttcattagnggatttttc

SEQ ID NO: 20090 - DNA, 290 bp, Zea mays
atctggaatccgtcctgtcatgtaattatcggtggcactaagcattgtgagtcctgtcaggttgagcactgaagaaagaatgcttcctacgatgtcattgtcgcggaaattcagaatttcgagttcggaaagaccgccgatggactgatgaacgttcccggacacgtggttaacacttatgttgagaaaatggagagcacacaagttaccgatactggaaggatctcgccttctatgtggtgttcgaagatcccaggtttggaggtggtaacattcccaagcgactggga

SEQ ID NO: 20091 - DNA, 418 bp, Zea mays
  unsure (1)..(418): unsure at all n locations
atatgtgtgtctatacatgtatgttttgtaattggattttatattgggcttacacatgtacatgtacaattntacatttattaaaaaacatgtaacgtgttaaatgtgtaatgattaatcatgaatacataccggttattttacaggagcaaatatttagaaatgggaaaggcgaacacaaagtatcatgggcttaggggtccaattaggacaaactaaaatatgatcaagaataagtaggaacattttttctacacttttaagttgagaaaaaaacatgatcatatgactctaatcataccgtcataccctacagttcatgtggagaaagttgcataattaanattgcaagggaataaataatcaatatatgacananagtaaggggacaataataaaacaccaaattcttactaaa

SEQ ID NO: 20092 - DNA, 457 bp, Zea mays
  unsure (1)..(457): unsure at all n locations
tatgtggatgatgtggtaatcaagacagagaactcggaaaatntcattgaagattacagctgatcttcaacagtctacaacgatatcgatggaaacttaatccagaaaaatgcgtctttggagtaccagcaggaaaattgctagggtttattataagccattgnggaattgaggccaatccagaaaagatcgaggctatcatgagaatggaagcaccacgatcacagaaaaaagtacaatgacttaccggatgcatggcagctctaagcagattcatatcaaggctgggagaaaaaaagcttatcgttctataagttgctcaagaaggtagaaaaagtccagtggacttcagaagctctagacgcactgaagaaattcctgacaactccgccagtgctaaagccaccgcaccgagccacgccgagtcaaccggctgaagatcttgctgtatacatct

SEQ ID NO: 20093 - DNA, 473 bp, Zea mays
  unsure (1)..(473): unsure at all n locations
agcttaaccttgtatcgaggataagctgcctttattttaaaggtggatggtccttaagcctctttgaaatcctttaaggtaaaagcttgcgatatttacaacatgctttcacaagtgcataaactgtcatgagcatcacacttatactatgacacaatgcactttacattctctatgatatagacataatctcattaacctaattatgtgcacttggcatttaaggccaaaatgtgtgttcctctccatacacatagttagggggagcaatctatattatatagaactttgattatgcttaattgacatatccttttaatcatgtctctttcctttggtacatttgcatatttcctatctctattgtgccaaggctaagactaatatgtctccatgagcatcttgtgtattaagtcttagaatgaaagggaaatggagtattcggcaaagacatncgcttcactctacatctt

SEQ ID NO: 20094 - DNA, 221 bp, Zea mays
  unsure (1)..(221): unsure at all n locations
tgagaaagacagggattgtagcgcatgccatgcatgaaagcaagttggcactcatcatccacacaagaacatcatgacgaccgacaggccactggaactcctacacatggatctattcggcccgatcgcttacataagcatcggcgggagtaagtactggctaagtattgtggatgattattctcgcttcacttgggtattctttttacaggaanaatctc

SEQ ID NO: 20095 - DNA, 439 bp, Zea mays
  unsure (1)..(439): unsure at all n locations
acttataccacggataagtgttgaagtgcttatatattatcgagtaatggctgagagtcaggatacaatacagaacagagcacacagacgcaaggatttatcccgaggttcggccaagcctaaaatgcttgcctagtcctcgttggagttagccacacctgggcttggagtctatttcaactccttcctccgtttgctcagatctgtcagtatgacagatagagcctttcactattgagttgggttacaacaacaccgaggctgcttacaaacttctcggcagcacctctgtagagtaacgatacgctcaagaccttgctctagctcttagcagcacttctcctctctctaaaggcttatggctgtgccttctacacaaactatagagttacacancagagggagagtgagaattgattcgagtgatgtctacactttg

SEQ ID NO: 20096 - DNA, 369 bp, Zea mays
  unsure (1)..(369): unsure at all n locations
tgtgcaaagtccactggaactaatcttctgttagacccgaccncattgccacatgttaccagagggttcgactcanatagcaatgtgtgaattcaatataattgcagagaatatcactacaagggacctggtccaggagttcttggctttcaaagtttttcctattgtaatagagtgggaaatgccgtaactgaagggggagaagaataaaggtgaacttgtacgtttaccttattacttcaaatttaataaatactttaaaactccttgccaagagtggctggatacgattgaagtgatgtgcaatgagatacttggcaattattccaagaaagaatatcaattgatgaccgcatgcttcgtcacccg

SEQ ID NO: 20097 - DNA, 350 bp, Zea mays
  unsure (1)..(350): unsure at all n locations
tgtcattggctggacaacaagagttgataaccctattataggatggtactatcaatatanggaagttaatatgtgtcgagaatgttctttgtcaccttaccaactaagaaaaaatgggttgagtagttattggttgggcaaatccactttgactcattgtatagtttacatacctccatactacctttgtttactgcgtatttatgttgatgcactttccaatgatacataagaaaagtatttcaagtccttatagggaaggcatcggttcattcactgtattgaatacaaatataagatttgtttccctaanaattagaggtctctttcaacctttgggctcctctttg

SEQ ID NO: 20098 - DNA, 332 bp, Zea mays
cctgttggtactggccgtaaccgggattattgtcctgatcgcgctataactcaaacgtgtaaggtgattgctaggctagaacttcctcttaattctgccgaggcacctgcctttgaggagtacattaagttatctcatagtcctcgctttaataaaggttctagacaaacacactaggacggactttgttaagttcttcaatgatcgacgtcagatagttgtcgaatgcttacaatctggttcttctattcgaaagggaaaagtgcccctgggaaacttcctataagatgttggagagtagatgcccaacacattaatggagtacttatgtg

SEQ ID NO: 20099 - DNA, 346 bp, Zea mays
  unsure (1)..(346): unsure at all n locations
ntctcgactaagtcggtgacagggcctcatggacgggtgaaagtacgcgtaagcggcaaggccgaccgagccgatggattcccacgcctctgggatacggatacctcactcgtcccttccgcgagaagtaactctcgctcacacaaacatccctgttaccgacagagtccagatgctcgaaacaaggggaaaaaagacgcagcttcgcaagcacgacgagggtgtgttttctggcctcggcggccgcagaatgcacacgctacaagacgatctgatcctgcatgctcgggtcttcacgctgaatggagccgtagcaccctcggcatcgacgacgtcttcagctatg

SEQ ID NO: 20100 - DNA, 410 bp, Zea mays
  unsure (1)..(410): unsure at all n locations
tttgacacacttgcacatataggaagggtatggnttcaagtatctttgatatatattagtgactttgaagtgcagatgacaataatttcacccctcccgattcctttatggtgatgtggtaagttgtttatggcttaatgcttgatataatttatttctgaaattttgaatatcgtttattaatgcggtagatatcgctggtcatttgtgagaatgaagttgttattatgcttgtgatatacaagtatgcctatagttgtttcactatgtttttcatggtcgagttntattacaataatattgttatatatgcttgactgaagatgtttctaagaggagtgtgaatcgtgtggttttgggcacaaggtaatcatcaatttgaatttaagtgttgagcgggtggggatagc

SEQ ID NO: 20101 - DNA, 308 bp, Zea mays
  unsure (1)..(308): unsure at all n locations
taattgagataaccgccaacaaagcgagtgaaaaagcttatctcgggtcatacctgacaagtcttagttntaagcattntagcacttaaattcttacttttcatgcaattattggttcttgaaatatgcatgaggtactgcacttanggggagtattcaaaactcaaatcacccttgaaaacccctagtgcaagccaaaatgcaaatttcaccatttgcctattttctctaaaaattatctagcctatggcaaaatattttgaaaagtatatgagggtgccaatacctgtcccaacaagtgttatttt

SEQ ID NO: 20102 - DNA, 449 bp, Zea mays
  unsure (1)..(449): unsure at all n locations
agcttacacgtggtgaagaagaagatatattctattggtgaggtaaggaaaacaccgctctcacattgagatatgagattggagattntagagaatgaacaaagtgcaatcaccaaagtaagatcgtgggatgagaaaggtaaaggtaatacccaaccgaagcacaacaaaggatggagttaaaaactcataagcgacaaggaagagaatacaaccaatggagaataggttaaatacaactataaaattgagatggaagagagaagtttttaaagaacaggtataacataagcatcaaggtaagatatagaggtgacaagggttaagatgataatcatgaaaagcataatcaaggatagagttaggcaagactcacaaagtggcgaagtggagaaaacanacaaggatttagatagtganggtctgacagaagagttgaagtaaaaatc

SEQ ID NO: 20103 - DNA, 420 bp, Zea mays
  unsure (1)..(420): unsure at all n locations
ctttagtgacctattatactcagcttgtatggtgaacctatgttnggattggatctttgtaatgactgtcaccaaaatgtggtgttccctacagtttggtttagttaataatgttaataaaggtagttatttagttgggaaacctttcacttctactttcatcttaatctgagaagatgtgtttagcggtgttaagaatcattgaagatgcttgttcattcggtgtcgtggagatccctgtatgctttttcttatgctgaaagcttgcaagatcaattctgatgtgtgaatgccttccatagatgtctgacaacaggcatcaaggatggaggcatacttatcatgagcagcttgccccgcatgatgaggcaccccatcagttgcatcaaccactacccgcaatgactgtggagcaaatgt

SEQ ID NO: 20104 - DNA, 356 bp, Zea mays
agctgaaagggatatcagctggtacaggcgccatcatatcatatggagcctattttattccaactttatagtaagtactttcttttaagttacccctgatgtgtctgcattaccttaaatattctaagtgtgggcctacttttacagagattactactgagcaaagctttgaagatgctacaagacgaccaagacagataaaacaaagtcattgtcaagggcttatacgataaattcaaagagcttgaagactctttgaaggagaatgaaaaaatgctatgtttaatcgaagggtctcttgccgaagcacaaactcagaacaagaagttaagcaaagacctgtcaagcgctcaagc

SEQ ID NO: 20105 - DNA, 433 bp, Zea mays
  unsure (1)..(433): unsure at all n locations
tctaaagggagaacacgtgatatgtttgactaacgtgcaagtcgttatagatagaccttgtgcagcttgtcaagcatgtaaacaagtgggaggagcacatcacagcangaatgtgatgaccacctcaagacctctagagctgctgcatatggacctcttcggacccgtcgcctatctgagcatacgaggaagtaagtatggtttagctattgttgatgactcttaccgcttcacttgggtgttctttttgcaggataagtctgatacccaatggaccctgaagcgcttactcaggagagctcataatgagtntgagctcaacgtgaacaagataacgagcgacaacgggtccagagtcaagaaccttcaagtggatgagttccgtgacgaggaagggatcaagcacgagtatctcgctcactacacaccacaa

SEQ ID NO: 20106 - DNA, 395 bp, Zea mays
agcttgccgaatgtggtcaagtgagttctctggatgtgggcgccaatgttggtcacttgttctcaaaagctatgaatcaagaacaagacaacacaaattttaatgggtaaagaccttcaccctctcaagcattatctcccttatgatataatgatcttttgacgaaggtcatgaaggacataccttcatcatttcgatatgtaagtataaatagaaacatatgaagcacagaaagagttaaagtgaacatattgaatcatcaaattattcatattaacattatataataatgaacaaacattgataatatcaagttacatttgtaccttcggcttggcagaaggaaaaattcgagaatgacatgcgagtgattacaagtcaacgtgaacagtacg

SEQ ID NO: 20107 - DNA, 345 bp, Zea mays
  unsure (1)..(345): unsure at all n locations
tcggctatggtcataattttggcagcanaacagtgcaatagcattgtttgctgtggtaacttcacacctacctgtctgtttatatagtgccgcaggtgggaaggtgaatcgtcaagtcttccgcaccagttaaacagtcgcccgcacccactgaatggtgggccacagatcccgataatgtgaatcgccatgacgcgtgtacccgccgcatggaatattttaatcgtttctcggcaacgaactcagggaaggtgttttttggaccttcggcattccgaagcctatgagactttntaacggatcaagctcgttacgataaacgatctatcaccgcgaatgggctac

SEQ ID NO: 20108 - DNA, 388 bp, Zea mays
  unsure (1)..(388): unsure at all n locations
tttgtgctaccgctcaacttaatgattntaatgtcactcattaattgggattaatgttccaaaattgaaattggcaattatgacattaaccctatggttaacgcaacattatttcaaattaattggaacatggagtgaccacccaggataacagtgcaaccacgagtgctatcatggctctggcttttggaattagctttatatgcttagtgcctggcaaccttacctgaaatatgggaaagatggggagcggtatgtgttggcagcccacgttaacatggngacgtattcttggctaaggtacctcacccagggggccaccaccatcgtctttagaaaccttagcgggttgcttcgtattaagtggtatttgtgaaagcctcataat

SEQ ID NO: 20109 - DNA, 379 bp, Zea mays
  unsure (1)..(379): unsure at all n locations
gcgacaagctatggataagccattcgcgctggacggatcttgatgatgaggcccggcgtcgtggtgcctgacgatatnttgtgtgatgtcaatgccgcgcccgatgctgcaagttgtccttcttcttccattgcacctgtgaaggacattgccagcaaagatgtttcgatgcagtgatgtcctgcaaagcactattttttatcgagttagcatctttnttagagcatgtaatatgaattctatatgcatgtgatagttgtgttaaaactcgaatattttgtgaacagagtgccagaacatgcccctggtgccaacaaagtaaacgttctttttttcctgaagagcaattatttcgctgttatggtatagtagtcaccct

SEQ ID NO: 20110 - DNA, 444 bp, Zea mays
  unsure (1)..(444): unsure at all n locations
gcttataagcgcttttgttcttattccccccgacatgatcttttcctcacatggttaagtgttaaaatgaggattaggctctgataccaattgaaagttgcctcgagggggtgaataggcaagcgaaaaaattttcaacaaaaactagaaatgaactatgttaagccagttcaattggtttgcacgagtacaacttaagaataagatataaaatcgaattgatctcaaaattcacctagttaactttgcaaatgaggtcttctagatgatccatanggttcaaagtagtagatctgagaatggaacttctcaaaatccacacaccaaaaagatatgaacaattcttccataatatggtgagagaacaaagaacacgaacgacacaatgagcaattacgcaagagacataagatttatcccgatgttcgatcacaccacaaatgt

SEQ ID NO: 20111 - DNA, 389 bp, Zea mays
atcatccgaagcccacgctcttatgtgaatatatagcagagcagaaggtgtgctgggatctcaattatctgaggaacaggagaaaaacctaacaaggtttttgttcaacaacaaagatgtctttgcatggtccgacaacaatctctgtcgtgtaaacagggatgtcattgaacactcgctcaatgtcgatccatccttcagacctataaagcagaggctctggaaaatgtctgatgacaaaagccgaaggtgctcggaacgaagtgaaaagacttcttagtgctagagtcatcagagaagtaaaatacccagaatggctagctaacacagttatggtgaagaaggccaatggcaaatggagaatgtgcattgattgtactgatctcaac

SEQ ID NO: 20112 - DNA, 483 bp, Zea mays
  unsure (1)..(483): unsure at all n locations
actctatgattgattatgccttgaccatactgtttacttncttgtactcattattctcccctttttggttttgagtcatccttgactcatagtagttggtgcatgcaaaaggtgttgatgtaatgcttgatgtcgtccaaccttgcaccccttcttgaagttgaccctattggtgtaaaacatacaaagaaagacaagtggaactggacgtgatatnggtagcattgacaaaaccctctaattgatcatattgttttatgacaaaaggatatttcatattttaacaaatatatacttgatgactatatattctcctttccaattatanttttccaaatacatgatatgtatgtttagataaccatggtaaatcagcactaaaaagaacttcctnctctatattatttagattgcatagaacttcaaattcaatatagcccanagtatttaaaggagatacgatattcaatccatcatgcacac

SEQ ID NO: 20113 - DNA, 271 bp, Zea mays
cactacaaaatatggactatatgaggttttggttatgtcatttggattaaccgatgcaccgacttactttatgaacctgatgaataaagtattcatggaatactaaaagggaaatgggcccttgggccatttctatattgttttggtgattagatgcacaacacaccacatgagaactaacaaatgttgagcaaaggtatatctagatggatcaagtatgaagggtagttcaagacgcttagtcaattgtttaatgtgctaaacatacatt

SEQ ID NO: 20114 - DNA, 479 bp, Zea mays
  unsure (1)..(479): unsure at all n locations
gcttctaaagggagaacacgtgatagggttaacttatgtgcatttcgaaaaagatagaccttgtgcagcctgtcaagcaggtaaacaagtgggaggagcacatcacagcaagaatgtgatgaccacttcaagacccctggagctgctgcatatggacctcttcggacccgccgcatatctgagcataggagggagtaagtatgggctagttattggtgatgacttttcccgcttcacttgggtgttctttntgcaggataagtctgaaacccaagggaccctcaagcgcttcctcaagagagctcacaatgagtttgagctcaaggtgaagaagataaggagcgacaacgggtccgagttcaagaaaccttcagtggaggagttccttgaggaggaanggatcaagcatgagttctctgctccctacacaatacagcaaaatggtgtggtagagaggaagaacagggacgctatcgaca

SEQ ID NO: 20115 - DNA, 388 bp, Zea mays
  unsure (1)..(388): unsure at all n locations
acccctttaatccctctttatggttatgtgccctatccagggttctatttgcaaaatacaacttgtttgaaattnttacctagtaaatgcactctatgtgtgtcaaacatatgcaatgccaatgtttatgatgccatgctcaagttttagttgcagtaacaccagaggtgttacaattaaccctctcagtttgcccactagtttgaggatgataggccgaactgtggagcaatttggtacccatggacttatgaagttcttcccagaatttggatacgaattgaggttgtgacactataaaaatcgtcaaataaaaataatacatttagtttattagtggtatttattttaataatttttcattgaagtgtttgttatttatttcatt

SEQ ID NO: 20116 - DNA, 504 bp, Zea mays
  unsure (1)..(504): unsure at all n locations
atccttaagtcacctgcggcatgcaagcttatcaggatgacttccaaagttctgagcactcagatcggcaagaatgttttgacatatgttgatgatatcatagtcaagagcatgaagcaagaaaaccacattgctgatttgcaagaaacatttgccaacttcaggaaggctggcctcaagataaatccagaaaaatgtgttttcgaggtgaagaaaggaaaatttcttgggtgcctagtatcaacaaaagggattgaagctaacccaagcaaaatagaagctatacctcggatggagccaccgaatttaagaaaaggtgtcagagattaacaggaaggctggcatcattaaatagattcatctcaagatcagtagaaaggaatttaccattcttcgaagtactaaagtcagtcaaagtctttcaatggngaccggatcaacagaatgccttcgaagatctgaaacaatatcttatacaactaacaaccttgacttcaccttcat

SEQ ID NO: 20117 - DNA, 407 bp, Zea mays
  unsure (1)..(407): unsure at all n locations
agtgacccaagtctttgtggaaagatcagcacaagtactacatatcttgtataatcaccaagaagtggttctatgttgaactgaatcatacaattcagttttcgaaatctgttctgtcagtggacagaacacagcaaccacgttggtaaattcataactcttaaactatcaggcctatggttatgaaatttttacacaagctagattataatagcacctacaactttcttattatgaccatgaacagattgtaacattaacttaagcaaacagtgcagtttctgaaatctgtacagaaagtggacagattcagttactgaatttgaaaaagcataactcctaaactgtcagacctatggctggtcaattntaacacaagtaagataatagagttatctacaactttc

SEQ ID NO: 20118 - DNA, 325 bp, Zea mays
gagttataccaacgccgggtctggtccccattgctcaagtgcttatccagatcccaacggtttagaattattgagggacatacttgcaggcctgtgtggatctcacattgaatctaggcccttgcttgggaaagtttttggccatggattttattggccaaaggcaccttcggatgcaccggattaatttcaaaagtgcgatggttgtcaaaattgtgcaagagatcaaaaacaaccttcgtctttaactcaattaatacaacccacgttgccgttgcaaaggtgggtgctggatttgctaggtccattaccaccagcacagggg

SEQ ID NO: 20119 - DNA, 488 bp, Zea mays
  unsure (1)..(488): unsure at all n locations
gtaagctctttgacaataaaatcacttcacctagttgtaacaaatatgcataaatgcaggaatgaaatttttgagaggttaaactaggtatgaagcanggataatgcatagacatgctttctcttcctcttatacaagatatgcaaggaatgtatagaagaggaagatttangtacatgtgtaaatgagaggaagtagttttacccttttgtaccttcacatatagacgctctcttcattgtgctttgtccttagtcttagatgcttaagacctatattcaaggcaatgtatggaaatatttttcacaagagagggttctacaactagtgatccttttctaagtcattgttattttatatcaagtagatcacaaattgcataaatttatcatgaattctccttttaacttagtgcataccaagaaagatattgattgaaattatatgaggcactaagaaacataagttttaatttgaagtattcaatg

SEQ ID NO: 20120 - DNA, 305 bp, Zea mays
  unsure (1)..(305): unsure at all n locations
ttttaatcctcgatagattgtgctattggcaatagttaacatgaagggcatgaatataattntgcacaagctgcgccctatgcctattaatagatgaacagtacccccgtactattcacgctgacttggattcatttgtgcgtcacacttgtacttttgtcttccatcaagccgaaggtacatttgtaatgcaatatttgttctgtctttctgtaataatataatgagaatgaattaataatggtaaatgattgcttatggtatcttctatattctggatggttcttcttctattatcatatact

SEQ ID NO: 20121 - DNA, 429 bp, Zea mays
  unsure (1)..(429): unsure at all n locations
tctttagtgaccttaaatctcagcttaacaacagatgcctcagcagacacttcagaagtttcagcagtcttctttggagtcatgcttgaagatttaattgtctccaaaacgtctaacacattaaccattctttttcttttcggggtcactgttggcccctttttaattnttgctacttcaatttctcctgaaggacttaaaatttctgatatttttactccctcagctgatgtttttgcttcttcagtcgttggtttttccatcttttctgttactggcacttcggccaactctctgatttctggcagcacggctggttttttaacttcggtggccgaagaggtctcaccagcgaactcatgcactgtggctggttcaatatagcgtgaccggtgtgtgagaacctttaccctttttctcttcggcgct

SEQ ID NO: 20122 - DNA, 452 bp, Zea mays
  unsure (1)..(452): unsure at all n locations
agctntctggtgatgatcaatggccacacaacctctcatttgtcgaaagtagccatgaacaacaattttcaataataccgaaggttaacacggacggatctttgtccaagaaatggtctccaccagaaatccaagaatgtgttctatggaaaggaaacatatgtggggtgaggtgtacgagcctttggtcgatgataaatggctacacaacccccattnttgtcgaaaatagtcatgaacgaccattttcaataataccgaaggctcacacctatggattntttaccaagaaatggtctccacaaaaaatccaagaatgtgacctatggcaaggaaacatatgtggggtgaggtgtacgagcctctggtagatgatcactgtgcacacaacccccatttatgcngaaatagccatgaacgaccattttcaataataccgaaggctaacacct

SEQ ID NO: 20123 - DNA, 375 bp, Zea mays
  unsure (1)..(375): unsure at all n locations
tcggaaaaaagggaaaaagaatgcaatttatgcttcgctgtgtacgccaaagaaggaaggtgtttttcgccttcggctcataaatattaattntgtccacaccatagcactttatacattgacggaaaggtaagattatattacaaggtatggataaagttcacaaagtgagatttaattacatcatactttatacaagttatcataagagttttttgagctatttctacagactactcgagcttcgtcagcatttatggagcttcgtctttctacttcgtagctntagcttcgtcttggtcatcctatatgtaagtattataagataaattctaaattcaaaagaaaaggtaagcataatgtatgaattttgta

SEQ ID NO: 20124 - DNA, 383 bp, Zea mays
  unsure (1)..(383): unsure at all n locations
agcttggtcatttcattgctaactgtcccgacaatgatattgatcaggatcaagggaacaagagggagaagaagaagaactataagaaggcaaagggtgatgcgcatctaagcaaggagtgggattcggattgctcctcttccgactccgacaatgaatgactcgccgccactgccttcaacaagtcatccctcttccccaacgagcgtcacacatgccttatggcaagggagaagaaagtatgtactcgaaactctacttatgcttcttcaagtgaggacgaatctagtgatgaggatgaaatagattattcatgtttatttaagggcctagatagaaccaaggtagataaaattaatgaatngatngatgtcttgaatgat

SEQ ID NO: 20125 - DNA, 389 bp, Zea mays
tgaagccatggtaagtagcatatgcaagtaatatgcgaattgactcaagcctagctatgggtgcatatgtttcaccgaaatccaaaccttcgacttgtgaatatcccttggccacaagtcggcctttgttccttgtcacaaaccatgctcatcttgcttgttgcggaagacccacttggttcctacaacatttttgttaggatgtggaactaaatgtcatacctcattcctcgtgaagttgttgagttcctcttgcattgccaacacccaatccgaatcccttaatgcgtcttccaccctgtatggctcaatagaagacacaaaaagagtaatgttcgcaaaaatgagcaacacgagatcgagtggttacccacttttgaatatcactg

SEQ ID NO: 20126 - DNA, 358 bp, Zea mays
  unsure (1)..(358): unsure at all n locations
agctcgatgcacaaagcgaatgccaagtcatcgtgaacagtacggngatactgttcacctatttatatgcacgggacgcaccccatgtaaaattacacccatgccctttacatttgctaataactctatagtaattcttcaaagactaatttgccttttcatctttaaatcggttccccttttctgctgccatgccgaagcttttctgcgcacaacttcgtgatttccttgtncttcgtcataatcgcctttcgtctcgctcaagcttcgtcctaaccatgctctgtatgctcatgatccgaatccgaagatacctgttcacatatttcacttggaaaacattgtcaaattatgtttt

SEQ ID NO: 20127 - DNA, 461 bp, Zea mays
  unsure (1)..(461): unsure at all n locations
tattcaagaggtgaaagaacaagtccgtataatccgggagaacttgatagtagctcagaccatgctaaagagctacgctgattatagaagaagaccacttgagtttgaggaaggtgatcatgtgtatctcaaggtgtcaccacttcgtggaatgaggcgattcatagttaatggcaaattgtcccctcgctttattggaccattcagaatcttcangcaagttggggagatggcatatcaactcgagctacctgataatctgtctgatgtgcaaaatgttttccatgtgtctcaacttaagaagtgtctctgtgtgccagaagaacagttaccaatggaggagctcaatgttcanggtgattngacttacacggagtatactatcaagattcttgacacattgactngagttacaagaaataaggtgataaagatgtgcaaagtacaatggagtcaccatg

SEQ ID NO: 20128 - DNA, 440 bp, Zea mays
  unsure (1)..(440): unsure at all n locations
agcctgtcaccccaagcaagaatccccttgtctttcatcctttatagnggaaacaaaggactccgagtattgatgattttgacacttagagttctaatgctgacaagtttttaatccaccttcacattgaggatcaacacctctctgctgaatacaaatgaagagaaagcgtcgattaattntatcacatgtctcttcaaagtccaatcaacactaaaccatactggattgatcttctactctctatcatgcatgatctcatgagggccatgaccccgtccatgggtagtatgtaattttaataaaaacagatagacactcgctaattatcttgcccataaacgtttctagtcgtatcatgcgaactctagtaaagattttaacactacattcaatanataatgtggtctatattagtggatcttggtagcatatttgac

SEQ ID NO: 20129 - DNA, 239 bp, Zea mays
ccttgtcctgaaagtgtgcatacaagtgttgaatacttgtacgagacatgcactctgattttgatatcaagagggggtaaactatctataatccgagctcttgcacatataatgtaaatgataccaattgaaacacaattgaagcgttatttcactcgtatatatcaatattaggatatgtcatatgagaataccaataggtgtatcattttcttacgaatgtaaatgagctatgtgcc

SEQ ID NO: 20130 - DNA, 419 bp, Zea mays
agcttatcagattcatcgctggatttcttctccacagggatgccaggccatgaagatactatgtgctggatatcttcttcattgaccataaggcctgtctctccagactcttcctctgctttgctcaattccttgctcttgtcaatgaaggctgttatctgggccttcaattccatttcaccgtctctcaattccccaccctaatggcataataattttaaaggaaattagctatgaaagaacatctgtatcaagaaaaaggtgcaaaaaaatttttaaagttaagggagaagacagagcaagggtgtgcacatatccaattgaagcaagtgcaaattgcttaattaaccaaaagaacaggaagaaagaaagtgcctggtcgaatgaacattaaggggcatgttactatcactgataac

SEQ ID NO: 20131 - DNA, 288 bp, Zea mays
  unsure (1)..(288): unsure at all n locations
actgaaatttcttgctgtcagatttcactngattcgtgagcttctgcatttgcacaatagctcaccaaatggctgaagagaagaaggttgttgatcctgctctagctagtttttacgatgctatggagaagacaaacatagagaagattacaaatgaaatgctagctggtttgtctaaagattctagcgatagcgaaggctttgatgtggaaagtgaagacgaagatgccaaaaagcgtgcctggcggccgagtcacaccatcttcggaaaatcatncatcaagcatg

SEQ ID NO: 20132 - DNA, 366 bp, Zea mays
  unsure (1)..(366): unsure at all n locations
tgtctagcttgaagaatagcgtgggcgaattgatacgctggaagcgtctaacagtgcttctaactgcaaggaagttttcatggatgctccttttttgaatgaaggcactttggcaaggtgaaactaactcattcattctcggtgccagacgaagaagccaggttttggtgataatcttaatgaaagaatggatgaggcttatangtctgaagtccccagctaccttcgcgcctttctttttggggattagaatgatgtttgctgaattgattaaatggaggttgaggcatcgattattgtagaaagcattcactgcagccatgagatcatgccttataatggtccaacaagatttaatgaaaacac

SEQ ID NO: 20133 - DNA, 470 bp, Zea mays
  unsure (1)..(470): unsure at all n locations
tactcagcttaccaatggacgtgaatagtgccttcctcaatggaccaatcatgatagaggtctatattgagcaacctcccggctntgaagatagtgagtaccctaaccatgtctataaactctcaaaggcgctttatgggctcaagcatgccccaagagcatggtatgaatgcctaagagattttcttatcactaatggattcaaagtcagcaaagccgatcctactctctttactaaaactattgcaaatgatttgtttgtatgccaaatctatgttgatgatatcatatttgggtctactaacaaatctacttgtgaagagtttagtaggataatgattcanaaattcgagatgtctatgatgggggagttgaagtattttctatgatttcatgtcaagcaactccaagagggcaccttcatcagctaaacaaagtacattcaagacattcttaccaagtttgggatg

SEQ ID NO: 20134 - DNA, 440 bp, Zea mays
  unsure (1)..(440): unsure at all n locations
tctagcctagctacgggtgcataagtttcaccgaaatccaaaccttcgacttgtgaatatcctttggccacaagtcgggctttgttccttgtcaccacaccatgctcgtcttgtttggtgcggaagacccacttagttcctacaacattntggttaggacgtggaactaaatgccatacctcattccttgtgaagttgntgagctcctctttcattgccaccacccaatccgaatcttgaagtgcttcctctaccttatgtgactcaatagaggaaacaaaagagtaatgttcacagaaatgagcaacacgagatctagtagttacccncttttgaatatcgccgaggatggtgttcccggggtgatctcgttggatagcttggtggactcttgggtgtggcggccttggacnntgtcatcttccttatcttgatcatgg

SEQ ID NO: 20135 - DNA, 375 bp, Zea mays
  unsure (1)..(375): unsure at all n locations
ttaccaaatggatgtgaaaagtgtcttcctcaatggacccatcaatgaagatgtctatgttgatcaacctcccggctttgaagatagtgagtaccctaaccatgtatataaactctctaatgcgctntatgggctcaagcaagccccaagagcatggtatgaatgcctaaagattttcttatcgctaatggcttcaaagtcggaaaagccgatcctacactatttactaagactattgcaaatgatttgtttgtatgtcaaaattatgttgatgatatcatatttgggtctactaacaaatctacttgtgaagagtttagtaggatcatggtacaaaaattcgagatgtctatgtgggggagttaaagtattttc

SEQ ID NO: 20136 - DNA, 429 bp, Zea mays
  unsure (1)..(429): unsure at all n locations
agcttgtacttcctgtggactntgatgggagatattcttgttgtgatctcctaacatcgnattgatggttcagagctagattttccaaactaaacggaggaattcgatcatatatgtgtggttgagcctgtacttgtatctggagaatgaactactactagcttgtatatgggttcagtacggtgcacacatgggaacagttcgtgcatggcgtggtctgtggttagctggtgcgaatttgctattcctattcaggacgtttgtatatacgtgatatcacctctgacaagtgacaagcaaagcatcggacattcggacccacaaccccagtacaagagagcacggcccatggtgatggagtgcanggcgcgcgggtcctacctttgagtgtcttgagtgtcctggagagagagagagatacagagatgc

SEQ ID NO: 20137 - DNA, 416 bp, Zea mays
atacataatgaaatgcttatgcctattatgtcatgccaatggtttaattgggtggtacaagcagaccaagtacggtgccctttcacgtcaactaatcattgatgttaactttctctactacacaccagatgtctggtgtgcctacagtgtacaccaaaatggtccagtgcctaccattgtaattgcttgttggagctagcaatttccgaccattggagctttggcgtccgatgcaccggaccgggtctgacgtgtcatgtgctttattctttatcctagtcttcatcctattcataggtctaatgtgccaatattgtacactatactggtctggtgctcctctgtgcaagctgaaattcttggttcttggagtcactttattgggacttttgtttttgcctgaaccatgtatgatg

SEQ ID NO: 20138 - DNA, 495 bp, Zea mays
  unsure (1)..(495): unsure at all n locations
agcttcattatattcttttgggtagcttcgtcctcaatatttttcttgttcctcaagtccttgctcaggaccaaaccttgttagacataagaaaagaaagatatagtaattattccatcaagttagcccaaagcttaaaagcaaaaatcaacaaaaattgccttgagatgtgtgtaagctaagcaatcaaagaagtccttggaggacatggntgagagcatgggctctgttgggggtcttcttctccgccgaaggtcctcaaggcaaagatatcgtttgtaagtgatgttgggggtcttctcctccaccgaaagccctcgagatgaagacattgtctgaaagcaacagcgtcgaatgccgaagctacagccgaagaacgacagcttcggcttaatgtggcgatgaaggtcatacatgatgccaagtcgcagaggaaaatactatgtaatccctgatggttatngtacgatatgtgtacatgtaaggcataatata

SEQ ID NO: 20139 - DNA, 401 bp, Zea mays
actcagcttatgattcctgacggaatatggtgagcatggaagttctcttggaattcctgccatgttatggcatcagcattatcatgtgccgcggtgaaagcatcccaccaatcgaacgcgacaccttcaagtcttcccgaagcatacaataccttctctcggtcattgcactgggtgatgtctaatttctttccaatgaccttaagccaatcatcgacatccaaggggtcaactacatgagagaaagcaggcgggtgatggctcatgaaatcccgatgcttatctctatcttgcggtgcttattggtgttgatgctggtgttgctggttatgttgattatgttgtatctgctgcaccgaagcagtgagtccttgcagaagctgcatctgcgctgctatgaa

SEQ ID NO: 20140 - DNA, 338 bp, Zea mays
  unsure (1)..(338): unsure at all n locations
agctntccccacctnccagacagacgcgatggtgcctatgcttgcacagtggagtctcgccagagcaccaaaacccgatgattaagaaccccaatcccctatcctgatggatcaaagcatagagaaccacagagcaaagtggtgggggtttcattacccgcctccacgcggagtatttctctgtttgcgatgagagacggccacatggtgatgaagcgctctggtgcggaattggccaagcttctatcgatcaccgaccacagataatgcatctgcgtggtgcgtcgacactgactgccatggcactggcactatcaactccatctgtgcggtggtgc

SEQ ID NO: 20141 - DNA, 251 bp, Zea mays
cttcttttaaaaaggagagatatatacctcatatttttttttcttttttcacttaagatgattcccgaactccttctcatccgaggaatatgcatatgcatccacttagctacaggccacgcacctcgcggtcatgatatcttttagatatggtcgccgtcccgtcatatgggtgaccatatgttctacgtgtgaattggcacatggcgttctaccgggatgatttatgtgggatttgattctggagggag

SEQ ID NO: 20142 - DNA, 486 bp, Zea mays
  unsure (1)..(486): unsure at all n locations
tgtataaacattgcagtactactggttaaacatgattaaatntgaagtgattgcagttgcagttaccatggaacctatggttgttgatcaatggtcatgcttaatacttaagtaaatatgatttgacatgcattgcacatctagtgttaagctctgctcaagttagctctcaatgtctgtcttccctattattccttcacaattgagcactgcaatccttttttcagtggtgactgtaaatgattatttggcacagcgtgatgctgaatggatgggtcgtgttcatcgctttctcggtcttactgttggtctgattcangtatatacattattataaactatgttcgaataacaagtgttcacattacagatcacattctgccagttcggaaacacctgatgttgctacagtagattattgaattagcagaacatgcaaccatataacccatctttgctcttcttttggatatatggcatatgcat

SEQ ID NO: 20143 - DNA, 402 bp, Zea mays
  unsure (1)..(402): unsure at all n locations
gaaagtcaactcaagattttctttatccactgatgatctaatctcattttcttgctagcctcttcttgaatctcgagggcgagattcctattaaggggggttagatttacaacacccggaatttgggggtataaaaattcttttctaatatccaccaaattcaggtgttaccctcattcttcccttcttctctgctctttgtttgaaacagtggagagttatnttgctttacataactgtgagcctaataaaatgaaaccctaaaagagtccttgatcgttacatagcatgccgaggcattntttatgttgaattgttgtaggtgtgcatcctttaaactcatgaagtatattngaatcttggattcagaaactatatttaaatctgaataggaatagataa

SEQ ID NO: 20144 - DNA, 374 bp, Zea mays
  unsure (1)..(374): unsure at all n locations
ctaagcttctaagggagatcatgtgttaggactaatctatgtctgttntgagaaagacagatcctgtgcagcatgtcatgcaggataacatgtgggaagcacacatcacggcaagaatgtgatgacaacatcaagaccactggagctccttcacatggatcttttcggacccattgcctatctaagcatcgagggaagtaagtatggtcttgtaattgttgatgatttttctcgcttcacttgggtgctctttctacaggataagtcagaaacccaagtgaccctaaagcgcttcttaaagagagctcaaaatgagtttgagcttaaagtgaaaaatataaggagcgacaatgggtctgagttcaagaatctac

SEQ ID NO: 20145 - DNA, 349 bp, Zea mays
  unsure (1)..(349): unsure at all n locations
nagcttgggcttctaccatgcaaccagagctcggttatttctcttgtcggcgtttcgagaccggggggtccctatgccgacgagtgaatgtcgccgcgtgccccagtccatatgggtcggcgcgaggccaatcgcgaaagggggaagtgaggtggccggagatgggcgtgagagatgtggaaaacccgcagccttcgtgttcgtcccgcgcctatgtcgggtgcgcttgcagtatggggttacaagcgtccacgtgggagagggatcgagcggcctcacgcgagcgcctgtctcgttctcgccccggcgcggccaaccccctgtaagagggccctagtcctttctttta

SEQ ID NO: 20146 - DNA, 390 bp, Zea mays
  unsure (1)..(390): unsure at all n locations
tgtggacaaattggcacgaagaattcatttgcttctttcagacatccgaagtcaaatggacttgttgaaagagctaatggcattataatgacgggaataatgaagttaatcttcaatcagcccagaggaaagtggccagatgaattgatcaaactggtgtggagccacaacacaacaatatcaaggtcaacaggctttacaccattcaaattattgtttggtgacgaagcaataaccccagatgaagcttaagcatgatcaataagaacagtggcttcgacaaaggacgaagcttattattctatggcaaaagatgctatagaaggaatcangcttcatgctgtggagaacataaataaatatcaagccgaaacaatataatggcatgac

SEQ ID NO: 20147 - DNA, 363 bp, Zea mays
tacttgtaaaatgtgtcacgaacatcaagaatacctttccagaagtgagaatcactctgcttttttttaactgaaataataggtcttcctttaacatatttgtgtctgataatggtctgtcacaacccattcgagttttccaaattccaaacccatttatcaagaagtgcttcattcatcttatgcaaatccagaacaccaagaccaccttgatctttatgggagcagactaacttccaatcggccaagtgatatttttcttgactatggccaccttgccataaaagtctttttctaaaaatgtcaatttttctcaacacacttttaggagctttataaatcgagagcatgtacaggggaaca

SEQ ID NO: 20148 - DNA, 377 bp, Zea mays
atcctcttagtcacctgcggcatgcaagcttgaccctaatttgctaagtataccacaagaatcttttgtagcaagattaaactctacctgatttaagtagattagtcaccatcaaaggtaattgctaaatttcatatcatatcatgcatgtatcttactcattgcattcattagactgcaatctatctgacggagagtacgtgctcatccccgagcaaggagatgtccacgatgaagaccaggagcaagctcccgagactgccatcgaggatctccccgtagccccagctattgaatgcaagccccggttttatgcataaccgtatttatatatgctactttactacacttaatgtttgtaagcttgtaatgtgcac

SEQ ID NO: 20149 - DNA, 465 bp, Zea mays
cgtgactggcagccgacttgatgtatactcctccttctcttccgtcgctctgaatgtgacgggttgcacctcgggtgtggatgtggcgccttgctccaagatgacaatgtgtttggagtctttgatcataagctcaaagctcacaaacttgccaatcacttcctcaggagacattagtttatatgtatgatccccacgaattaattgtacttgagtaggattgcgaaaaacaagggatcttagaataaccttgaccatttcatggtcatcccacttggtgctcccgaggttgcgcacttggttgaccatcgtcttgagccggttgtacatggcttgcggctcttcccctttattgatgacgaatcgatcgagttctccctcgatcgtttcgcgcttggtgatcttggtcacttcgtccacttcgtgtgcggtcttgatgacatcccatatttctttggcgctctt

SEQ ID NO: 20150 - DNA, 364 bp, Zea mays
tgcaagcttgagagtgacttgctgaagcatcagaagttgtatgctgttgatttcctacgtattccgggatatatggagagtaacatgaagtagtacccaggacctgcttcggctgattctgccatgcctcggcttcagcaattccctttagcttttggatcgtgacttggcacagtcctcgtgtatgtcccttgtcctcgccacagaaaaggcgggacaattttctaagctgattaccgtaccttcctccgacaaagcttctccccctctgactctcgaagctagtggtctgtaagagtctggtgcatgcccgaagactgtgagttgtgttgactgctctgagcattattggctctgtcatcgc

SEQ ID NO: 20151 - DNA, 256 bp, Zea mays
ctgttacaatctcactttgttgtaaaggtattgagtcgctttgtgtttaatgactgtgatcctgctctaacaccttatgaccctatcatgctattgagaaagaatcggagaatatcaaaggatcaattgacatactctcagatcattggctcgctcatgtacctttgcagtgcaacaaggccagacatctcgtatgctgtgagtaatctgagtcggtttgtgtcgaaaccacgagatgatcactggcgtgctcttg

SEQ ID NO: 20152 - DNA, 353 bp, Zea mays
  unsure (1)..(353): unsure at all n locations
agcttgtacaaatcccgctggaatttatcttctgtgaatcccgacctcgctgcgacatgacacccgaatgtccaacacaacaagcaatgagtgaattcagaattattgcagagcatatcagcacaagggacctggttcaagagtttttatcattcaaaggttttcccagtttgaaagaatgggaaatgccgaagctacagggggaaaagaaagaaggtgaactcgtacgtttaccttactatttcaagtttaaaaagtactttaaagcaccttgccaagagtggctagatacgattgaagcaatgtgtaatgaaatacttggcaattattccaaanaagaagatcaattgatg

SEQ ID NO: 20153 - DNA, 223 bp, Zea mays
tgctcggtgtatcacctattgcctcatgaatcaccaaatgatgcatatgcactatgaaccctcaatctctcactataatgcaatctcaagcaaagagtgtgagagagtgagttggaggatcacaaatgagctcaatgtatgcaaggaatagccaagagaggtctcacacacgatctacccttctatttatagtcccccatctaataccaaccgttatgatcaa

SEQ ID NO: 20154 - DNA, 309 bp, Zea mays
  unsure (1)..(309): unsure at all n locations
actccgtgactatcaagaacaagtctcctttgactcgtcttgatgctcatttcgatcaattagtcagagccaaagcggcttccaagatagagcattgctccgagctttatgagatcaagattcgagcaagtgatcttccggagactggcttgtcaaccagatatgggctgtatgaatatctgctaatggcatcttggctgactaatgagcancataccttatgtatctgatgaactctgtgtcatgcctgaattggacatgtacatggtgagtctcatcgatgatatcatggtgtactcaaagaacgta

SEQ ID NO: 20155 - DNA, 276 bp, Zea mays
  unsure (1)..(276): unsure at all n locations
ctaatcaccgcagctgcagctttgacaaacaaaactnattctactatttttattatttctcaagtggtagctgatccatttatcactttggcctctattttctccccctttggcatcaagcaccaaaacgggatcaattttggccctttaaccccattgtctcacaaaaatcttcaatttagatcaaatggcaataagagttcatgagatgaacttggaaatagttaccctctcatcggagtgcagtggaagtctttcatggtccaaagccacctt

SEQ ID NO: 20156 - DNA, 393 bp, Zea mays
  unsure (1)..(393): unsure at all n locations
tactaagcttatgagtggtagcttctgtcatcatgtataagcagctntagccgttgctgtttctttctgcatgaccttcggcgacgaagcatggtcccaacagtagccccttcgcggtgctagatcgtttttcgtaacgagcttgatccgtgaaaaagtctcttatgcttcgggaagccgaatgtccgaaaacaccttccgtgagctcgttgccgagaaacgatacagtttccgagcgcggagctgtcccaccatgcatgttcaccttcttggtgtttgctgcccaccgtgcattgggtgcgagcgactgtttgccggtgataaatattgacgattcaccttcttacctgagcactatataacagaaggtatgtggaagttacacaacattca

SEQ ID NO: 20157 - DNA, 422 bp, Zea mays
  unsure (1)..(422): unsure at all n locations
gcttctccatgtaggtccatgtagtgtacccttttattaaaccatcacatatcaagngttctcgcacttcaccggcctctcttcataacgagttaacacacttgttgcaatggcataagatcttggttcctattgctaaatgtctaaatgcaaaagctagaaaaccattcaccccttgtttataaacctgtgtatccctacatacaaggtcctatgttacatatcaatataactattaaaaacataagaattgctatgaaaagttgctttgtacctagcctcacttgtgatccatgatttatccatactctgtatgtaggatattaaacaactgtcaactcgaatctaatatcatataagcacaaagaacacagntgcatactatagtcatgtccatacattaacatactatgatattaaca

SEQ ID NO: 20158 - DNA, 413 bp, Zea mays
agcttatgaaggttcttcatcccaacatgtgctagacagcgatgtcacaaccagcccatattagtcttagctattaagcatgcatctagaccggcattctctttcgaaaagtcagctaaatagagcttgtcgtctaatacacccttaaacgctaatgaaccatcactccttctaaagacagatacatcaacatttgtaaacagacaattgtaacccatgtggcacaattgacttacagatagaagattgtacccgagcgactctactaaaaatacatttgatattgagtgctcgttagtgatggctatctttcccaagcctttcaccttgccttggttcccatctccaaagatgatcgtatcctatgaatccttgttcttgacgtaggaggtgaacatcttctcccccgtcat

SEQ ID NO: 20159 - DNA, 333 bp, Zea mays
  unsure (1)..(333): unsure at all n locations
ctatcccatgccacattctgaactgggtgaagacacagccccccctcaatcaagcatagcagaaaagaagtcttcagctgctgaaaaacataaataaatctggctgaatacactaagtattccgcaagcccacccggctcccgtaaagagaaagagacctatatcatacatgcttcatatggtggagttgaagtcactcttctttntcttagagaaaagcaatacttgtttttatggttttcccgaagaaatagaataacacttgcttaaccaccactgagctttccgctcccgtggcaccattttctttttcatagacacactcacacacac

SEQ ID NO: 20160 - DNA, 363 bp, Zea mays
  unsure (1)..(363): unsure at all n locations
atatcgaatgtcgtacttgatgcatattcactttattcgntcccttgtatgatgtactgtctggttcccaatttgaatggatgaatgtatgtatgcttgcgatcgcatatagaaccatacgggtgcagatccccaagaaactcgcaggagaagcccctgagcagcagtcggcttggggaggcaagtgtcccttgacctatctatgtcctattcattatttaattcacctcccgccttacacatttatgcctaaagattgactagcttttggtatccatgtgcttggttacctatctgggttggatattactgttaactntatgctattgttaactctatcaatgacatgtgagatatctatat

SEQ ID NO: 20161 - DNA, 201 bp, Zea mays
  unsure (1)..(201): unsure at all n locations
cataatgacgaccgacaggccactggagctcctacatatggatctattcggcccgatcgcttacataatcatcggtgggagtaagtacatgctagttattgcggatgattattctcgcttcacttgggtattctttntacaggaaaaatctcaaacccaagacaccttatagggattcttgagacgggctcaaaatgagtt

SEQ ID NO: 20162 - DNA, 83 bp, Zea mays
ccaggcgtagtcaatccaggatcccacccagagttgagcttgcacccacggagctccgccaaattaatccctttgcggtcagc

SEQ ID NO: 20163 - DNA, 493 bp, Zea mays
ctttacggacactttatactcagcttgacttgtctccctgttggaagccaatgccatccttaatgccatggcgtctcccactataaagcatgctacgagcacaattaaatttcttattttctagttcatgctcggcaattttagcatctaattgtgctatatgatcattttgttgtttaatcatagcaatgtgatcatgaatagcatcaatgttaacatctctacatctagtgcaaatagtaacatgctcaacggtagatgtaaagggtttgcaagtatttagtttaacaatcttatcatgtaaaatgtcattctcatctctaagattggaaatcgaaacatttcaaacatctaattccttagccttagcaattaattcttcatctcatttctaatgctaacaagagaggcattcaatttttcaatcttagcaatcgaactagcattatcatctctaagaatgataatttgatcatcacagatatttgacttc

SEQ ID NO: 20164 - DNA, 394 bp, Zea mays
  unsure (1)..(394): unsure at all n locations
attgaaacaatgaaaattggaactcttcagtgttattatcttcttcaaccttctgaaaaaggaccaatgcttctgagggtatatgcaacactccccctgttctattntgacttgtgatgtagtgaatgtcatgtttcaccgattgtagtagtggcctaaaaccatgctggattggattcctaacgctgaataactatctttgctgtaaagcttctactttagatgcttacatttcagaagaatagaaagtattttgtggtctgttattggcttgcactaatgaccggaacaaatcatgctgcagagactcgctgcatctgaagagatattgcctctcccagacatgactcgagatngcagctctaagattaccatgganatcangaattcaatc

SEQ ID NO: 20165 - DNA, 350 bp, Zea mays
atgatataaacttgagtcgctagactataaatgcagtttatagactactatagatatttaaaataccttatattaaataggattaaatagaatgtatatgccctcgtctctgtctcttatgcttcgaaataagccttttgttccagcttacgaagcaacagcatacttattaatatgtacgacttgcagctagacaccacgcacacgaacgggaatattctttcgcaaattaagggcaataataaactcgatgctttcacatgcacgtaacgcatgtcccacaagcaaatggcaagtacgtacgtagtacgtgctaaattattcacattacgtttgcggaatcattgatg

SEQ ID NO: 20166 - DNA, 390 bp, Zea mays
  unsure (1)..(390): unsure at all n locations
gtgtgccttatgcagtttgacacatttcagcattngcctaatgaggactctatggagaagcctcgtagtgagaccctggccattcacctcggaagtgaataccggtctagctatacccggctactaaggaatcgcgactcatgggtaaagatgcgccacctctgcagagtgtaaaactgctatatcacncgtgctcacggttatgagcagcctgtacttctcacatgataattgaacttgaagatggaaactaatcgagattcgacgatctgccatttggttgcttaagtggtttcacttaagtgtttctttatatatactcttataccttttgttaatgggaatatttgggattcacacttatttataagacaggtggtgttataaaat

SEQ ID NO: 20167 - DNA, 421 bp, Zea mays
tgtgaactatatgagtcattaaacttgagtcctaatctaggtttgaagcacggtaccttcttaaatccctaagtgtctcgtcctgtggtcgagcttttttttttaaagtcatgacaagcaacaataattgcactaaaaattggacagttgcaagcagtgaatacttactttcctatcttcttgaaataagcatcacatgacattactttcctgtcttcttatcaaatgttcttcttgacataagcatctcatgacattactttcccatcttcttatcaaatgttctgaagacctctgccacagtcaaacaaccctaatgcagtcacagatcaaatattatcaatacggaaatagaaaaatggttgccatgtgataaaaatatgaatattatcaataccggaatagaaaatgttctgaatat

SEQ ID NO: 20168 - DNA, 377 bp, Zea mays
  unsure (1)..(377): unsure at all n locations
agcttctatagggagagcacactttgggactcacatatgttcattntgagaaagacaggatttgtagcgcatgtcaagcacggaagcaagttggtgttcatcatccacacaagaacatcatgacgactgacaggccactcgagttactccacatggacctattcggcccgatcgcttacataagcatcggcgggagaaagtactgtctaattattgtggatgattattctcgcttcacttgggtgttctttttgcaggaaaaatcacaaacccaagagaccttaaagggattcttgagacaagctcaaaatgagttcggcttaaggataaaaaagattagaagcgacaacgggacggagttcaagaactcacaaata

SEQ ID NO: 20169 - DNA, 344 bp, Zea mays
  unsure (1)..(344): unsure at all n locations
ctggacctcattgttttcgtgggcagtatnttatgtccggtttctgttactccgtccgtcgtcagcctaacatgcctattccaggacttccggttcagacgccaggggagcactgaccattggacttctctgtagacacaagatagacacgtgcagatgaactggcatagcatgcaaggaaaacgagctgggtttttttttcagcttcgacgtatcaatatcaataatatcatacggttcgtatacggcgttagatgtgcgacagccaccaaatttctgctggagcatcagttgcatttggatctaacaatggctagttacattacagctcatccaagaaagcg

SEQ ID NO: 20170 - DNA, 236 bp, Zea mays
cacttaatatcaacttgacacgttgtatttaatttttatctaaaactttttttccctataaagagtaaacatatcgcattaacaaagctgccctgtgcatatttatgcatctgaacgattcatagttttgggtcatcatcttttcgactcacgaccagatgtcttcactgattcccaccgcataactctgtattaattctttttctgctacaaaatctggacagattactcaacta

SEQ ID NO: 20171 - DNA, 346 bp, Zea mays
  unsure (1)..(346): unsure at all n locations
catcatcaccaagattntgaagcccgggacatacaagctggccaacaatcaaggcgaggtctacatcaacgcttggaacatccaacagctacgtcgcttatacccttaagatgtttcaagttgttcatatacctcgtttctctttacatacataaataaagtctaaccgtcaaggaagggtcagccttgcatcagcaaagcccgaccctccctcgtgggctagaaggggggaacccccctctgcgtcaaaattttcctcggaaaaagtctttctgccagaacgtctttcgcgcttttcgactgctttgatagcgggatcctgaaaacgacgagagtacacgtaagc

SEQ ID NO: 20172 - DNA, 311 bp, Zea mays
tcggccggagaagcgcgtcatctaccccatggcatccagcaccgcatcgccgacgatgtcatggcaaggccgccactggcttccagtggggtcggccagaacctggctgcagcagcaatacttctccgcgcgatgccggagccatcaaccaccgatgggcggcatatccagggagagctcaagaatctcctataggatgccgcggtccgactggccgaaagctctgcctcccgaatgcagggatacccctcggagcatcgcgccgcgacttcccgattcatgcgggaagcctcggtccacaccgggcgcac

SEQ ID NO: 20173 - DNA, 417 bp, Zea mays
  unsure (1)..(417): unsure at all n locations
actatttaaaactgagttgattaaaggtatcctttttccgattgatagatttttttcctttctagctactaagaattntttgaatctttcctcaacctccctacaatcggtatttttcaacttcctataatgaataggaatacccaaataccttagaggaatctctattttttacacccaaagatatctctatacaattgctcatgatcttgtgctgcatcatagcacaatatttcactcttatggaagttgatctttagtcctgtgatttgttcaaagacaaaaagcaacaatttcaagaagggaattatcgtttggattatatatttccctttccctatctttntccgctggtcttaatggttcanatacctcttcaaccnctagcctatttgcacctantttaatccctatctt

SEQ ID NO: 20174 - DNA, 389 bp, Zea mays
tcagcatcaaccattcgaagaattgaatgactatctgataaagcttacaacactatctccaccttcgacaggggctcccctgttactctatgtgtcatcgtcgtagacaactataagcactgcattggtctatgagacactaaccaaatgtataaaaagtcagatgcatgtttacttcatctccgaagtattgagtccatccaagagaaattacagatatatggaaaaggtccttcatgaagtcctgatggcttctagaaagcttccgcactatttccagtcccacaacactattataccatcatcacagccactgaatgatgttataagaaacagagaagctccggaccgaattggaaaatgggcaccataactcaacgagttcatca

SEQ ID NO: 20175 - DNA, 294 bp, Zea mays
cagcttcatcagtctccgtcaagcttctgattattgaccttcggcatcgtcatcctgtacacaacaaagcagtataaggtaaaaagtaatctcaagagaaggtaagcaacatgtacaagtttaataccggcttaagatgacttcgagcttcgtcaccagctaagtcccgcccacccttcgtccaaatttgtgttatgaatctattcccaatacttcgggctaggttggggatatcagctaagtccgctggtgatagactgaagttcagtctgtttacaatctttccgtgcgtgc

SEQ ID NO: 20176 - DNA, 345 bp, Zea mays
  unsure (1)..(345): unsure at all n locations
tacgtagtgatgccctgctatgtcaccttggtagtgatcaatggagagtcatgatctccgggcagaaagggaatcacggcttgtgggtaaagtgtgcaacctctgcacagtgtatganaactgatatatcatccgtgctcgcggttatgagtggacaatggagctccagtgattattggtactcgatcangggtgttcggattgcangtggcaatgagattgatgggtcttggtattgactctggtaatgataagtggtactcattctgtttggaaaggagtacatttgggttaataacttgtgttaattctaaaactcggctttctctactagtaataataatc

SEQ ID NO: 20177 - DNA, 410 bp, Zea mays
  unsure (1)..(410): unsure at all n locations
ctaagctgtgagatcttattccacatgtgctagtcggcgatgccagagccagcccatgttagtcttagcaattaagcaagtgtcaagttcagctctatcaaaatctactaagtatagctgaccctctaacactcccttaaatgctattgaatcatcacttcttctaaagacagtaacacctatatccgtaaaaagacagttgtagcccgttttacataattgcgaaactgaaagcaagttataatctaaagaatctactagaaaaacattggaaatggagtggtcaggagatatagcaattntacccaatcctttgaccaaaccttgatttccatccccgaatgtgatagctcgttgggaatcttggtttttctcgtaggaggagaacatcttcttctcccctgtcatat

SEQ ID NO: 20178 - DNA, 496 bp, Zea mays
  unsure (1)..(496): unsure at all n locations
agcttcagtctgattcaagatgcattctgatttgctatctatatcaagatgctgaagagaactatggttcgcacacaaggaagatgcagccaagaactggagtttacacggaactcgattcacgtacctctacatctccgtccgccgcggagtgatttcctgtcgtcggcgaccttgttccatccgttagagacgcgctgtttctgggattcatgtcgcagtggatgatagcgtatcggcaagcagcagaggtcgccggctctccgccgcaacacgcgcaccaaatcgaccgatagatgtgccaaggcangatgagggcgcgggaaaaagaaaaatcgtggcgattgggagcaacggcgtcggcgcaaatattcgcagcaacgagttgggttctcatatgcgacccgattgggagctgacagagagccattggagctttgtttcctttattcccctanatatagntaggcattcaatataagatattctaatctct

SEQ ID NO: 20179 - DNA, 436 bp, Zea mays
  unsure (1)..(436): unsure at all n locations
gcttctaagggagaacacgtgatatgtctaactaatgttcaattcgtataagatagaccttgtgcagcttgtcaagcaaggaaacaggtgggatgctctcatcacaccaaatatgtgatgacgacatcaagacccttggagatgctgcatatggacctttttggacccgtcgcctatctaagcatatgaggaagtaagtatggtctagttattgttgatgatttttccagcttcacttgggtgttctttttgcaggataagtctgaaacccaatggaccctcaagcgcttcctcaggagagctcaaaatgagtttgagctcaaggtgaagaagataaggagcgacaacgggtccgaattcaagaaccttcaagtggaggaattccttgaggangaanggatcaaacacgagttcttcgctccctacacaccacagc

SEQ ID NO: 20180 - DNA, 298 bp, Zea mays
tgaatggactagcgcaagactacacaagaatgtagatgagcttctggaatcgatggaaagatactacgaaaaatccttggattgtgctaacaagctgacagatagttctgcaaggaggggtgcttactcatctgagcgaaaatttattagagacgatcccacaagaatcatcgagtggatcagcgaagatactgaagcctttgatgatatacttatcgaccgcggtgatttttgcgccttctccggtgtcacaagggttgcagcaattttatataaatctatgtgtgaacatattaaa

SEQ ID NO: 20181 - DNA, 368 bp, Zea mays
  unsure (1)..(368): unsure at all n locations
ngctcaanaatatgctaatggaatataccagcataatgatcctgttctttatcctctgcgatagacagttntgtgtttttgacaaaagagaataattctggaaattgttgtcttggaatgttctggttccactgatcatcccagaaagaaattgatctgccattgccaatgactgggtgcgccagacccttaaagttagaaaggagtttgatcatgcttttccaccagaatgaaccaatgtttcaatgacctatgagtccacgtgacaaataataattattccagatgagatttacctagagtaagtcatagctattaaagaacttatgcaaaaattttatcagaagagcatcgttttgggtttcaag

SEQ ID NO: 20182 - DNA, 314 bp, Zea mays
  unsure (1)..(314): unsure at all n locations
tgaacctatgagagatcctcatcagaaacaagtgtggcttccaaaacctaaccatcttatgaacacacttgacacctttcccggcatctctagctatcccgttcctagagccccttcagcatccgaaaagaaaatcctcttccacaaacaaaatccacccaagagagaggtgaggtaccatngtgaatatngtgagagggatgggcatctagcttctttttgctttaggaggaagagagatgagtgacaagtttctgaatcgagcaggaaggacatgaaccgcccctctcatggtgttcatgctcagcttggtc

SEQ ID NO: 20183 - DNA, 480 bp, Zea mays
  unsure (1)..(480): unsure at all n locations
tgtcatgttcctcatataagatatcctcttgctcttctagtagtctatccttctcattaagagcatcgagtaattcattattttttctactttagttctatctagtcctttaaacaaattagtgtaatctactgtatcattggaagattcctcatcgctagaagaagagtacttggggtctctcgaatacgtaccttcttctccttatccataagacatgtatggcattcgttggggaagagcgaagatttgtccaaggctaaggcagctagtccttcattatcagagtcggaggaggagcagtcggagtcccattccttcccgatgtgtgcctcgcccttggccttcctgtagttcttcttctccctcttcccgtgtttttcttggtcctggtcattatcattatncgggcattgagctatgaaatgactagtcttaccgcatttgaaacaagagtgttttccattgacttgtttttgt

SEQ ID NO: 20184 - DNA, 426 bp, Zea mays
  unsure (1)..(426): unsure at all n locations
tggacgtgaagagtgccttcctatatggaccaatcaaggaagaggtctatgttgagcaacctcccgactttgaagatagtgagtatcctaaccatgtctataggctctctaaggcgctntatgggctcaagcaagccccaagagcatggtatgaatgcctaagagatttccttatagctaatggcttcaaagtcggaaaggccgatcctactttatttactanaactcttgacaatgatttgtttgtatgcccaaattatgttgatgatatcatatttgggtctactaacgaatctacatgtgaagaattagtaggatcatgacatagaaattcgagatgtcaatgatggnggagttaaagtattntctatgattccaagtcaagcaactccaagagggcaccttcatatccaaacgaagatactc

SEQ ID NO: 20185 - DNA, 435 bp, Zea mays
  unsure (1)..(435): unsure at all n locations
cacatgtgcaaatggtactccggtctttttggccagttccacgactctgtaaaaactgcataaaacagatggcggccagagttgtatgtggatggccgcccttctctgtcgcctgaaaagggtgaaactctgggcatagtgcttcggcattcccctgttatttctgtctggcccttgatccatcagacgttgacatcgattatcacgacacatgctgggaaacggtaacatcgacagctcataggaaataatccggtgttcttcgcgtcacatctggctcacctctcctatgggctggttcaaactatgataataagtagacaaaattggtaaatcatatgcaatangcgtgtactaagaagtctgttgtggggaccgaaaaaaacatctggatgtctttgtaagaaaaaaacatatagatagtanantcatatc

SEQ ID NO: 20186 - DNA, 441 bp, Zea mays
  unsure (1)..(441): unsure at all n locations
gttgcagtgacacccttattcttatatgtccaatggttgaatgaatcgggagatatcaagattggttataaagtgaaagtttcgttcaagattggagagtatgttgacacagtggagtgcgatgttgcacccatgtctgtatgtcacatgctgctaggaagaccttggcaatatgaccgatattctcagcattgtggaagagcaaatcaatacacgctagatctgaaatggagaaagttggtactcaagcctatgacccctatcatggctgaacatttacaaaagaaaactgaaattagtacagcaagtagaggaggagaagagcataagatattgagtgccatccacaattcggtgagcgagtgctacgagccatattcatgagataaaaggaatgaagagggagaacatctagntatgcttaccacataatctgagctg

SEQ ID NO: 20187 - DNA, 269 bp, Zea mays
gctagtgtaccatcacatctttcttaagacagacacatctatatttgtaaacaaacagttatatcccatattgcataattgactaacagatagcaaattatatccaagagactctactaaaaacacattaaagatagagtgctcatttgagattgcaattttacctaacccttttaccttgccttgattcccatcaccgaatattattgaatcttgggaatacttattcttgacgtaggaggtgaacatcttcttctcccccgtcatat

SEQ ID NO: 20188 - DNA, 384 bp, Zea mays
atctaagatcaagcgttggcgacctagtgatatagctctttgagttctaccagattgaagaccctgagcatctggttggtgaaggcaagtgtcctctgacccattatgtcctatctacttataattcagtgtcccgcattacttatatgaaacctaaggattgactagctttgcatgtaccttatgcttgtttaccttttgggttatcatggttagcatttcgctattgtcttaattttaatcaatgaacatgatgtgaacatttatgatacgatactgttatcctgattatgttgatgatattgtgatattctagggggctcagaccttgttcctgagtacctctccgtaaggaccttgtcgtgaccacccgggataacaatg

SEQ ID NO: 20189 - DNA, 423 bp, Zea mays
  unsure (1)..(423): unsure at all n locations
tggatcaggatgctggtccttctgctcctgctgctgatgaagtgcccgtgcacagttttgctatagctgaccccaatgggtgtgacccgactgatgctgaacccaatgggtgtgacctatatgatgctgaacccaatgggtgtgccgtccgcgttattgatgaagatgatgaagaggaggatgaaatccctctagttcagaagaacagccgacgctacatagtcagcggggaaagtagtggtgttccttctccagccttgtctgctctcattggtctgcaagaattgtctctggcaaactttgatcagacttgttgggaccatgcttcgtcgctgaatgtcctgcatgaagaaacaccttcggcaaaacctgtttatacgtaacaccgaagctaccgctcatgaagcttcnatattttatcat

SEQ ID NO: 20190 - DNA, 453 bp, Zea mays
  unsure (1)..(453): unsure at all n locations
agctcgtaggttctcatcttgctcttgagtgtactataacagggcatgggctattaaaggattagtctagaaaccctacaagctggtgaggcgcacgtctctgagcttctgccaagaggatatatttgccacccgaagcgaagaataccatgtctaatccacatttctaatgaccatgataaatgactttgccatcactgttaagatagcttcgtaactcatgaggaactgtctcgggtccgacaatccaccgcacattggtagctaaagtggcatgtacagttgtggccatggcgtaacttgcaaattcgatcgtcagaggggaagttccatcatatggataatcattgtattcgaggtcctaatgatgaaggttgtgctgatgatgtggctcttctatgggctcaacttgntgcgntatgttacgcaattgctctgatgcttcatcaattt

SEQ ID NO: 20191 - DNA, 333 bp, Zea mays
tacggacacttaaaactaagcttgagattggttcacctgatccataatgttgactatggttgctatagcaagaatgtagctggatcatatggctacaactttgatacaaagagatggtcgagtcactacatgaatttgggaacaaatctccctgcaaattgctctgtcaggctgactgaataagaatctgatggtacagtaaaaaagatcttctgttcagctaccctcaccgccgctgacctttgcgctcggattcgtgccgaccgtcgcgattcgtgtctcgggcgagtggattacactcgacggtaaaaagatctcatcgcggatgaacac

SEQ ID NO: 20192 - DNA, 398 bp, Zea mays
  unsure (1)..(398): unsure at all n locations
gcttatttttggcagccagcggctgtgtcagtggccttcgaaaataatatatgccacatgtcggcgtttcgaccccgggaggtccctggacagacgagtaaatttatcgctgcgtgtcccagcccagatgggttggcgcgagacggaacacaagggggaaaacgcggctcgtgttgccccgcaccacgggggtgtgcttgcagtaagggttacaagcgttcgcgagaagagagagtggcatgttcgtcagccgttctctcgctcgaccctctcgcatgaaggacctggnacctccttttatatatgcaaggagagggtctaggtgtacaatggngggtgtagctatgcgctaacgtgtccggcagagaggttcctgagccctgtgtacatgccaacgt

SEQ ID NO: 20193 - DNA, 307 bp, Zea mays
actgtggcgccctacggcgtcttgccgcatccgaagcaccaagtctcccacttggaggtctcggggccaaacccctcggacgtggtaacatcacagagactgctgatatcgcgccgagtgtatcaaggccacgtcccgagcttcttccagctggtccagcgagtcttctcggctggtctggttgctttggttgtcgtacgcccttgtcctcggggaactgtattctaagtctgtgggcaagacagcctcgtgcccatagactataaagaacagtgagaaacccgtggctcggcttggcgtcgtcctc

SEQ ID NO: 20194 - DNA, 243 bp, Zea mays
  unsure (1)..(243): unsure at all n locations
agcttatccaaaataactcaattattacccccaatctagcttctcatgtggggacctaacgggaattctgaatttcacaattctgaaattcaaaccttgagccaaagatcacggatgttcaccttgatccccaactcgaatccttatgggcccattgacaaaattgtgtcttactaacccctctgtcgtgtgccanaagatggcattgggacgcgagccctanacaccacaaaaccttggatt

SEQ ID NO: 20195 - DNA, 377 bp, Zea mays
  unsure (1)..(377): unsure at all n locations
acttatcaaacggatgtgaagagtgccttcctcaatggaccaatcatggaagaggtctatgttgagcaacctcccagctttgaagatagtgagtaccctaatcacgtttataaactctcaaaggcgctttatgggctcaagcaagccccaagagcatggtatgaatgcctacgagatttccttatcactaatggcttcaaagtcggaaaagctgatcctacactctttactaaaaccattgaaaatgatttgtttgtatgccaaatttatgttgacgatatcatatttgggtctactaacaaatctacatgtgaagagttagtaggaatatgattcanaaattcgagatgtctatgatgggggagttgaagtatttc

SEQ ID NO: 20196 - DNA, 399 bp, Zea mays
  unsure (1)..(399): unsure at all n locations
agctngccaatacttgtcaaagcaacaacatctgtcatcacagcaactgcagaccataccagaaacttggcctttcgcatgctggggactggatatgattggacctttcaagaaagctcaagggggatacactcatgtattggtagcaatcgacaaattcactaaatggatagagttcaagcccatttcttctttaacctctgctaaggccgaggaattcatacaagacataatattcagattcgggatatcaaacagcatcataactgacttatgatccaacttcacaagttcagagttcttcgacttctgcgagcaaaagagcattcagatcaagtatgcatctgtagcacatccaagagccaacgggcatgttgagcgagccaactggatgatact

SEQ ID NO: 20197 - DNA, 458 bp, Zea mays
  unsure (1)..(458): unsure at all n locations
tgcccacaaggccatgaagaagaagggcgagcggtacgtgtgggtgctcatcgaggtcgcctgcgcgtcgacgccggaccacctcgtcgccgtcaggaaggcctaccgcgagtcgtaccccgcctccctcgaggaggacgtcgccgcgtgcccgctctacaaagacccccgcgtcaagcaggcgaggccgccgccggctcctgcctgccggctgtcatcgtgtgcagtgcagtgcagtgcaggcaaatcctgacgtttcttggccgggtgtctgtcttgcagttcttggtgcgcctggtgagctcgtaccggtactccggcgatctcgtctacgactagctggcgagggcggaggccgcggagctgcacgacgctgtggtggccangaagcagctgctgcacgccaagtcgtgcgcatcgcactccagagcatgcacactgcagcccgttcacggtca

SEQ ID NO: 20198 - DNA, 398 bp, Zea mays
  unsure (1)..(398): unsure at all n locations
agctngtcaacaatataagcacaaaagagagaagcctacttctgcagatcagccgaagcctatgcttctatgtgaagatatagcagatcaaagagtactgctgggatctcagctatctgatgagaaagaaaaaaactttaataagtttttgttcaataacaaagatgtctttgcttggacagccaatgatctttgtggtgtaacagagatgtcaatgaacattcacttaatgtggatccatctttcaggccaaggaagcaaagacttccgaagatgtccgatgataaagctgaaggtgctcngaacaaagtaaagagacttctcagtgttggtgtatcagaaaagtacatatccgaatggctactacactgtatgggaagaagctatggcaatgagat

SEQ ID NO: 20199 - DNA, 417 bp, Zea mays
  unsure (1)..(417): unsure at all n locations
ttctagaatcaagaatattgagctcatgcctatttctggtaaaagaatgttcatcaagtggcttggtaaagatatcggctaattgatctttagtattaatgtaagaaatctcgatatcccccttttgttggtgatccctaagaaaatgataccgaatggctatgtgcttagtgcggctatgctcgacgggattgtcggccattntaattgcactctcattatcacatagcaaagggactttggttaatttgtaaccgtagtcccgcagggtttgcctcatccaaagcaattgcgcgcaacaatgtcctgcggcaatgtactcggcttcggcggtggaaagagcgaccgaattttgcttctttgaagcccaagacaccaaagatcttcccaagaactggcaagtccccgatgtgctct

SEQ ID NO: 20200 - DNA, 317 bp, Zea mays
cttcgtgaagctgaccaagtctaaagaatgaacgctatcagtggtgctggtgcaacgaccagaacacagctgtatccaaaatacctacctaaactatatacctcattcactaaaaggttgtgatgctttgagttcgactgtttgtttatttttatgtgctgtgagaggctgaatgtttctgaaacatattatgtagttcaacctaaaccctttaatctattcgtcattgactatctaacccggcctcatctataaaaccaaagaatatatatgctcctactcctgcccctacctttcttcgagaagaaatgggcggc

SEQ ID NO: 20201 - DNA, 445 bp, Zea mays
  unsure (1)..(445): unsure at all n locations
ttatcanatggacgtgaaaagtgccttcctcaatggaccaatcaatgatgatgtctatgttgagcaacctcccggctttgaagatagtgagtaccctaaccatgtctataaactctcaaaggcgctttatgggctccagcaagccccaagagcatggtatgaatgcctaagagatttccttatcactaatggcctcaaagtcggcaaagccgatcctactctctntactaaaaccattgcaaatgatttgtttgtatgccaaatttatgttgatgatatcatatttgggtctactaacaaatctacttgtgaagagtttagtatgattatgattcaacaattcgagatgtctatgatgggggagttgaagtatttcttaagatttcaagtcaagcaactccaagaaggcaccttcatcagcaaacgaagtacatcaagacatact

SEQ ID NO: 20202 - DNA, 264 bp, Zea mays
aaattatcttaccgcccaaaataaatcgatgttgcagcatagtaatacaagtgaaaaactgtggtaataataatcatattattgttacgccacacttaccactatcaaataatctgtcttttctatctacggagtacccataatacaacaactgcatagaacaacaagcgccattatcctcatatctcctcaaccagtgcaccatattgctaattgtactatctatttcatatacatggatctacatgtgtagagtaatcctta

SEQ ID NO: 20203 - DNA, 405 bp, Zea mays
  unsure (1)..(405): unsure at all n locations
tggtgccaatggagaagcaganatccttgaagtcttggctgtcattttgtttgccattgtcaactgtgagttcggatgggacttcgaagcggcaaacaatgttttgccagaagaatttcttggcagtcttcgatgttattgtggatacagccctcgcctcgatccatttggtaaaatactcaatagcgacgaaagtgaacttgatgttcccctgagccgtgggcagggacccgacaatgtccaggccccaacgctgaagaggctatgtgtgggcgattagcttcgtgaattgcgaagggctttctgagcgtggagaaaatttctggcatgcttcgcaggaccttgtgacccgatttgcggcacagaacatggcgggccagtataaaccctgacggattacctttg

SEQ ID NO: 20204 - DNA, 354 bp, Zea mays
  unsure (1)..(354): unsure at all n locations
atctatattatggatagcttgagagtcagtctatttgctttcagacattgttgcagctggctgacgtccatggatagcaatgggtcctcgatccgaaggtatcttcatgcaaagataggcacgatgaaagaatgcttctaaggcattgagggtaccgcgaccaataattgcatttgcaaggggatgccatgtcaacaatgtcaaacacaacttgctcagttctagtgttgttgatgaacccgaaggtcactgacatggcgatcttgcctagcgctacaatctngtttcctccgaagccacaaagaaggtgtgtaccatcatgaatcttatcctctggctctagcattagtctga

SEQ ID NO: 20205 - DNA, 163 bp, Zea mays
gccgcagctagaaccactaacttttctttcctacttttctaccatgccacctaagcaaaggcaaatgacaccacatgcccatcataagccaaatgggatgagttcaatgttcgctcacaacttacacggccggatactaacataattctgaagaaagtccact

SEQ ID NO: 20206 - DNA, 448 bp, Zea mays
  unsure (1)..(448): unsure at all n locations
taacaacagggttaatagcctcatgtgttntgcaagataaaagttcattttcaacaagaagattgtcatgatcaaatttaatttgagtatagtcttccttgatctttactagtctactttgcaactccctattagcttcatttaatttgacatatttttccttagcatcttttaaggagtttgtgagctcatttacagttgatgacatagttntattttcttcttttatttcatcactagcctttataactatgtcatacttggcatttaaagattcattttcatttttcaacctatcacatttagcttttgactntctaatgatttgagtatattctttaagtaagtcagctaactcatcatatgaaggtgaagcaaattcttcatcactatcactatcactatcatcatcaatattaatatcattntgtacctttcgttcacccct

SEQ ID NO: 20207 - DNA, 290 bp, Zea mays
gatagctgatgacagggacctctgtggtttttcgataagcaaaaatataacaaccgaagttatcatgtaatccatcttttctagccttcgtctgataatgcagctcatgaactcgacaaaagctattcgcaaacggctccaccgcctggcttcggagggcccaaatataaacactaagcctaacgatagcgttaggagtcaactgatgaaagtagataccgaacctcttcaatacctctacaataatcccatgtagggggaatctcaacccagcctttagaaagctcttg

SEQ ID NO: 20208 - DNA, 448 bp, Zea mays
  unsure (1)..(448): unsure at all n locations
agacattcctaactgatacactgtatatagctgttcatagctatctacatgtagacaagtccatttgttcatatttcaaaattcaatttgctaataaaaaggagaattaaacttgaaaatatactggattactagtgctcagccgaggtcttgtcaatgggatcgcatttattcaccaagcatgaactaaaaattaattttcttataccatctattaaaaggttctcattccttcttcaatgcccgtaaactggttgtgatccaagtacatcagaacccaatccattcaagaagacatgaaactctaccagtgaagacactgaatgttcacggttgaacaacaatatgaggtttatattctttaacaacctttttatgtcccanaagaaatatgcatgaatatttcaacacaagtctagtaagctgtgggtcatggacaatgatatca

SEQ ID NO: 20209 - DNA, 391 bp, Zea mays
aaatatgagatataaatctgctccctatgcttcaggcctcgctgggaatgtcaaccaaatccgttgaatatagactgaaagttagtctattgacaatcttctcgtgcgtacagccagctttcaaaaacactgcaactgtgccgcgagaagctagaagggcatagaagtcaccgtgccccgctattacttcgtcaagcgcttcgacttctccttcaatatgttcgaaggtgcttgatatgctttctgccgaaggggtaaactcttcagcgctggcttcaactgatgtgaaaaccttcttcaatcgctgtacgcagcggatgccaaaacacaaacacgtgttccgaagctctttcaaagattgcttcagcttcgtatattctacagcttcagc

SEQ ID NO: 20210 - DNA, 451 bp, Zea mays
tgagtcagtcatcctgcaacaaataattgacacacaaagaattgttgttggaatgaagcacattcatgagaaaatagaagccggtaaagccgactgcttcagaagagacgatcaaggtgttgtatggtttaacaatcgcatagttgtgcctaaaaatgatgagatccgccagcaaattttggatgaagcacatcttagtcgctattctattcatcccggaagcactaagatgtatcatgatctgaaacaacattattggtggacaaagatgaagattgaaatcgcacgctatgtggcaagatgcgacacttgtatatgtgtcaaggctatacacatgaaggctactggtctattacaatctctacctatccctacatagaaatgggaggatattagtatggactctattgtgggaattgccaggacagcaaaagattcactctattgggta

SEQ ID NO: 20211 - DNA, 386 bp, Zea mays
  unsure (1)..(386): unsure at all n locations
tctnagggagaacatgtgataagtctaaccaatgttcatttcgaataagatagaccttgtgcagcttgtcaagcagggaaacaggtgggaggagcgcatcacagcaagaatgtgatgaccacttcaagacccctggagctgctgcatatggatctcttcggacccgtcgcctatctaagcatagggggaagtaagtatggtctagttattggtgatgacttttcccgcttcacttgggtgttctttntgcaggataagtctgaaacccaagggaccctcaagcgcttcctcaagagggctcaaaatgagtttgagctcaaagtgaaaaagataaagagcgacaacgggtccgagttcaagaaccttcaagtggaggagtttcttga

SEQ ID NO: 20212 - DNA, 398 bp, Zea mays
  unsure (1)..(398): unsure at all n locations
ntcatccttcttctttacaacaaagctggacatcctcaaagtgaagtacttaagcgataaaacctttgtccagcaattcttgcaattgcttcttcaattctgccaactcagcgggtggcatctggcaaggcctcatggaaataggtgtcgttcccggttgcaactcgatggcgaattcgatatcccggtctggtggcattcctggtaattcatccggaaaaacgtctgcatactcagagaccactggaatcatcttcaggggtaactccgtcatagcaaaagcacatgactgagtagaatcttgactgggcagaaacaaggtgaaactcccacagaatgnggaattgatttcaacgatgcggctagctacatcaagcactacttggtgtctggtcatg

SEQ ID NO: 20213 - DNA, 293 bp, Zea mays
gagaacacatgatatgtctgacttacgtgccattcgaaaaagatagaccttgtgcagcttgtccagccggttaacaagtgggaggagtgcatcacaacatgaatgtgatgaccacatcaagacccctggagctgctacatatggacctcttcggaaccgtcgcctatctaagcataggaggaagtaaagatggactatatattgttgatgaactttcccgcttcacttgagtattctttttgcaggataagcctgaacccaaggaccctcagcgcttctaaagagagctaaaa

SEQ ID NO: 20214 - DNA, 429 bp, Zea mays
  unsure (1)..(429): unsure at all n locations
tctatagggagaacacatgataggtctaactaatgttactttcgaaaaagatagaccttgtgcagcttgtcaagcaggtaaacaagtaggaggagcgcatcacagcaagaatgtgatgaccacatcaagacctctggagctgctacatatggacctcttcggacccgtcgcctatctaagcataggaggaagtaagtatggactagttattgtagatgacttttcccgcttcacttgggtattcttnttgcaggataaatctgaaacccaaaggaccctcaagcgctttctaaggagagctcaaaacaagtgtgaactcaaggtgaagaagataaggagcgacaatgggtccgagttcaagaaccttcaagtggatgagtaccttgaggaggaaaggatcaagcacgagttctccgttcctacacacac

SEQ ID NO: 20215 - DNA, 287 bp, Zea mays
  unsure (1)..(287): unsure at all n locations
tgagtttattaccggtttgaggtgacttcgagcttcgtcaccagccaagcttcgtccacccttcgcccaaatttgagttacgaatctgttcccaatgctttgggccaagccggggatgtcattcaagtccgctagtgataagctgaagttcggtctgtntacaatattgccgtgtgtgcaaccagccttcataaaagcaacagtcgtgccacgagaagctagcagagcgcagaagtcaccatgcccagctatgacttcatcaagagcatcgacttcgcctttatatg

SEQ ID NO: 20216 - DNA, 449 bp, Zea mays
tcgtcttaatagggtcatggatgccattaggtttgagtatccatattatgaatatcctgctatcaatactgaaactagggagaagagaaaaagggttaccaagactgttgggaagagtttggagaaaactgctgaagctgatacagaaaatgatgagtcagagggcgacgaagaaccatctttgggcccgaaaaagaagaaagtgaaaacttcaaaaaaatctgctgctagggaagaccaatggaaagggagagctacaacaacttcttctttgggttgtacacagattttcgaggtaatgacacaactatttctattctcccctataagtcccttaggactgatactaacttggtttatgccaactacgaaggaaaccgacgaaggagaccatccctcgaatcacagatatttcatctgaggaagtagagagcccacagattttgggt

SEQ ID NO: 20217 - DNA, 332 bp, Zea mays
cttccttttaatatcgttcagttgcaaaaatctgtttaatattggctaccacttaggacctctatttagcaatgaaacatgaattaaaattattcatcggaattaatctattccaatgtctgaaatactcttaaaatttcataactcaataaccgaaacctccgtttgatccattctagtggcattagtcctaccataatatttatatcattgggacttgtttatcatgaatattggtaaatgttcacttatctatctaatttaaccacgggatttatgataccatactccataccgtacctcgattatgggtctcgtccactatcttgaca

SEQ ID NO: 20218 - DNA, 361 bp, Zea mays
gacacaatactcaagcttcggattcccaacgttagaagatggcctctcagtactgtcgaaatatgaatcggccgacatttggcatataatagtataaaggtgcgaaaatcaatctttgtttttaaaaacgaattatttcacttgtttatacttaatactatactctttttgcagggcttgatccttaacaatgccctccgggcacagaaaaataccaaagacaaaggatgcacaatagctctgaacaaccttcgctcagaagtaattgaactaaggaacgaaggccttgaaaaggataaaatattaatttcattggtgagcaaaataaaagaagacgaagctagttccaaagctcaagctg

SEQ ID NO: 20219 - DNA, 357 bp, Zea mays
ttaaccgtgcttttgtatacccccaatctaactttgaaggtacctgtatacatatttctcttggaaaatattggctaatcatgttttttaagaccttcggaagccgaacgcccccaacaatgtctaagttgaaatgcaaatttttgggtgaaaagcgccttgatattgattatttgacaaaatgcgttgttaattgagtagggtactttcagtatttacaatgacatgaattaatactagtgagtctacttgggagttctcacttcgctattttaactctaataattgtaacagtgtaagaataactcaaggctctagaatgcgcgcacttttgaattggataagagctaaaattta

SEQ ID NO: 20220 - DNA, 425 bp, Zea mays
  unsure (1)..(425): unsure at all n locations
tattgatgcaacanagagaacattngagaatgaaagatcatttgatattgccaccttcccaagcccttgaacttttgcttttgaattgttcccaaaagcgaatttatcttgttcatcaacatcttcatctagcgaggtcaacattcgtgggttgccagtcatatgttgagtgcatccactgtcaattacccaatggctcccatcggtcttgtagttcacctacatgaacaaataaatcaagcttcaatcttgggggccctattttgcatagggtcagtaactttctcaatcaaggctttgcaacccanatttgtctaggtctaccctagcttggtggacctaggaatgttactttaacttttccatttgcaacttttcttagtacataatgagcattgaatgcaaatggtcttgagtgctttggt

SEQ ID NO: 20221 - DNA, 449 bp, Zea mays
ttaccttggccaaagatatgaaaatagatgcatcttttcggaaaggagatacgaaccttctcctcttgtacaacaaacaggccttcccaaaaggcaaaagcatctccgcttggttataagctgccttcaaggaaatacgtgatacccgttcccttggctagactagagccgctaaagatccatttgatgggttgcctctgaggagctgtgccgtccgttgacaccttcctcaagtgtctgaatcaagtaatgggtttgttttttctcgtacctgcatggtttcctacttattggcttgaagccgacccatagctttgttgtggtgaggatgactctattcctctatttctgatttcgatttgattcacgactgatccacagttcgatgtctttagccagggcagaatctccaatccggaacggaagtccgtattcacttgtgagaatat

SEQ ID NO: 20222 - DNA, 480 bp, Zea mays
  unsure (1)..(480): unsure at all n locations
tagcgacctataaatctcagcttgatgggtcctctgttcagtggagtgggaagacatatttccaaatgtccttcttcaaagcgctgcctctgatggctccgaccattgccccctgctgcttggcattagagataataagatgggtaaaagacgtttctgttttgaagctttttggtctaaattggaaggattccaggatgtcatccaggaggtttgggattctgtggcagctgtaaactgccctttcatgactctgaatttgaaactaaaagccacagctaggaagctgcaatcttggagtgggaagcatgtgggacatgtgaggactcagttggctttggcaaaggaaattatgcatagactagaaatagcgcaggactgcagatctttatccttggctganatctggttaagtaatttgctgaanaagcattccctgtttttatcttcactacaacggaccattgctagatcgagatc

SEQ ID NO: 20223 - DNA, 342 bp, Zea mays
  unsure (1)..(342): unsure at all n locations
agcttgtggtagtggtatgctatgtaatgtaatggcttgatgtaatgaataaaataactagttaaaanaatggcatgtgcataatagtgactctcttcccatggcagatgacttcggatagaaccacgcctaccgccttcgggattggagcaagactttctctatgagctgaaggaaaggctggcggagaacggggtgagacccacctncccgcaccttcagaactaccactagacctagcccaaattctgtccaatcaaaccagactcattgaagtcctcactcgaagtctggagaaccagcgcccaggcggtggaagggcccaggacaggatgggagaat

SEQ ID NO: 20224 - DNA, 375 bp, Zea mays
  unsure (1)..(375): unsure at all n locations
tatgaagattcttcatcccaacgtgggctagtcggtgatgccagagccaacccatgttagtcttagcaattaagcaagtgtcgagttcaactctattaaaatcaactaagtatagctgaccctctaacactcccttaaatgctactgaatcatcacttcttctaaagacagtaacacctacatcagtaaatagacaagtgtagcccatattgcataattgagaaacagaaagcaaattgaaatctaaagaatctacaagaaaaacattggaaatagaatggtcaggtgatatagcaattttaccaagtcctttgaccaaaccttgatttccatccccgaatgaaatagctctttggggatcatggttnttctcat

SEQ ID NO: 20225 - DNA, 381 bp, Zea mays
cagctttgtcctcaaagccgaagcatctgtttgtactttatgttatgatgatgatgattctacgaatgtcttaatgaatgtgtatgaatgcaatgaatgatgtgatgtaatgtgcaaatgaatgtccaaacacacgcacacgaagccacacccagactctgcatccccttaggaacgtcttttgagtcttaagctctgcatccccttaggaacgtattttgagcttcttcaccttctatttcggtggtataagttctgcattcccttatggaacgtctttgaacttcttcgccttctatttcggcggtataagttctgcatccccataggaatgtcttttgaacttcttcgccttatatttcagcggtatttggcacaaca

SEQ ID NO: 20226 - DNA, 455 bp, Zea mays
  unsure (1)..(455): unsure at all n locations
ctcagctttccaaaccttgaggtaaactgcgaacctcgatcagacacgatcttctttggtactccatgcaaacacacaatccgagccatgtataactctgctagctgagaacctttataagtagtcttcacaggaataaagtgagccactttagtcaatctatccacaatcacccatattgcatcatatcctttctgggtgcgaggcaatccagtaataaaatccataccaatctcttcccatttccactcgggtatcttcagtggatgcagtagtccagctggcctctggtgttcagccttaactctttgacatacatcgcacatagctacatgtgcagctacatctcttttcaatccataccaccaatactttcgcttcaaatcctggtacatcttggtactaccaggatgaatagaataatctgaatcatgggcctncttcaatatagtctc

SEQ ID NO: 20227 - DNA, 406 bp, Zea mays
tatggcgacagggttcatcaaagaggtattccatcctgaatggcttgccaaccctgtgcttgtgagaaagaaaggagggaaatggcggatgtgtgtagactacactggtctaaacaaagcatgtctgaaggttccctaccctctgcctcgcatcgatcaaatcgtggattccactgctgggtgcgaaaccctgtctttccttgatgcctactccgggtatcaccaaatcaggatgaaggagtccgaccagctcgcgacttctttcatcacgcccgtcggcatgtactgctatgtcaccatgccgttcggcttgaggaatgcgggcgcgacgtaccagcggtgcatgaaccatgtgttcggccaacacattggccggacggtcgaagcctacgtcgatgacatcgta

SEQ ID NO: 20228 - DNA, 359 bp, Zea mays
  unsure (1)..(359): unsure at all n locations
tctanaggagaacacgtgataagtctaaccaaagttcaattcgtattagatagaccttgtgcagcttgtcaagcaggtaaacaggtgggaggaacacatcacagcaagaatgtgatgaccacttcaagacctctggagttgctgcatatggacctcttcggacccgtcgcctatctgagcataggaggaagtaagtatgggttagttattgttgatgacttttcccgcttcacttgggtgttctttttgcaagataagtctgaaacccaaaggaccctcaagcgctttctcaagagagctcaaaatgagtttgagctcaaggtgaagaagataaggagcgacaacgggtccgagttcaa

SEQ ID NO: 20229 - DNA, 344 bp, Zea mays
agcttgtcaacagtttaagcacataagagaaaatgctgcttctgcagatcagccgaagtctatgttgctatgcgaagacataatagaccaaagggtgctgttgggatctcagctatctgatgagcaagagaagactttgataagatttttattcaacaacaaagatgtctttgcttggtcagccaatgatctctgtggtgtcaacagagaagttatcgaacattcactcaatgtggatccatccttcaggccaagaaaacaaaggcttcgaaacatgtctgaagacaaagctgaaggtgctcggaacgaagtaaagagacttcttagtgctggtgtcattagag

SEQ ID NO: 20230 - DNA, 437 bp, Zea mays
  unsure (1)..(437): unsure at all n locations
tagccaaaataactcanataaatctccaaatcagcccttatactatgaacccttggagaaattcagatttctgaatttctgaatttcagacctcttcccaaagatcatctgcgttctctgtttttcgaaactcaaagccaggagatccaaatatcaaagttgtgccaaattcccttgaacacatcctagaaaagtttgaactcaaaccaaattcatttgacacggttttggcgcagtttgacctcgggaccaggcattctgacactggcaccttggtgacgctacaactccctgtccctagcctaaaaccgcgcgacgtccatacacaaaagacaaagcttggtcaggtgaacaaatccttcacagcgatcttgcccaaattcacgaagaattgctccaatcggcgcttgaacaggggcagaggcaacgggaacacg

SEQ ID NO: 20231 - DNA, 213 bp, Zea mays
acttgacggcttacacgcgctcactcagtacaggcaggtgcacgagattgggccccgtaaaaagctgtttgaatatgctatatctgtgacaggagtaatttggcttcaggaagcaggatggcctgcaaaaaattaaatagtatcaagagtgggtaaatactaggatgactggattatgattaatagtaatttaattgttgataggagtctgca

SEQ ID NO: 20232 - DNA, 365 bp, Zea mays
  unsure (1)..(365): unsure at all n locations
tcgttgactcacaaaanaaactaagattatctacaaaaccgaataaagtatgtacagatctccaaaacttttaccttacttctctacttgttataaaaaaccctaatattgtaccaccattaagattgaataacagtctgcattctcaaaattattttttgccaatgaacaaatgatgcacaagtttaagcaattttatnggaatatcgggaatcacacttcaacagcacaacccanacagtaagacaacaacatgatcagacagctaagcaaaacatgataatacgatatgggtttctgaaattaaaaaacacatccagcaacctatcaacactaatatgcagaagtatattttattatgacta

SEQ ID NO: 20233 - DNA, 410 bp, Zea mays
  unsure (1)..(410): unsure at all n locations
attctaccaccacccaagggccagaacaagcagcccttgattcccttaattcttggaggaaaagaattttatctgaatccccctaagggacatacacacaggttagccaccaagggtgacattcatctttgcaaaactgaacagatacacaatggttgtccactctctgtagtcttgtgtgcccaatatgtctcttccaagcaataaaaatgccaccactagtccccacaatagacaaataaacccattcagtaaaattagttcgttgtggtcggttggagaggcanggtggtcctccaaggatggaacaatcatgctcttactaccaggatcatggttcattgagggaacagagagcatctctgatccttatanatcatgaactctgtcaagcctctccacatcgtcat

SEQ ID NO: 20234 - DNA, 426 bp, Zea mays
tattccactaacaatcaagccgaatataaagctctcttgttcaccttagaacttttaaagtacgtgggagtaacacatctaaaagtatttggtgattctcagctgggtgtccaacagattttaagggactatcaatttttagatggtattttgaatgattaccttaaaagatgttgggacatagtgcgttcttttaacgaatttgacattcggcatatatctagagctgagaatttcagggctaataacttagcgtaagaagattcaggttatcgggtaacacgaggataatttcatatttctaaaaattcgataatcaaaggcgcaccaagttcccaggtcgcggaccgtctaagtggagcagtcaaaccatccacgctagcgtcagaccgtccgaccctatgtcgcagaccatccttcacttac

SEQ ID NO: 20235 - DNA, 454 bp, Zea mays
  unsure (1)..(454): unsure at all n locations
agcttctgatgaacaaaaaactatatgctagaaatgctatgcaggcaaagacaaggcatcaaatatataggcatataaacaaattaaaccatattttcgtacactaaaaatgttcatctgaattgttgtaccatttccagattaataatcatacaagcatatccaaacatgaaaccaactacagcattcatacaaaccaataacaaaaacaaaataactgaaagtacactactgtatgaacaagttggggcgtcttcagagtgaacactttctgcattggcctgcgcctgcaagaaatcagtattgttagcatctatccatcctcaactggacaatatttggatgtctcagctttattagcaaagtgacttcatacttaaaatattggctgaggaaaggaaaaaacattacataaaaatgcatacacaaacatgtatcntgtaaccactatact

SEQ ID NO: 20236 - DNA, 466 bp, Zea mays
  unsure (1)..(466): unsure at all n locations
tgaccttcaactcagctntatttccaaggcgttcagactcttaattgacaattgacttcgattgtgcttgacttgaaatcagcatgacttgacttaaggtgatcactatgccctactaacgaagcaatcagcttaagtcggaaatgatttaagtcggtgtgacatgctcacgcttacttgacttanggtgatcactatgccctactaacggagcaatcgactcaagtcggaaacaatttaagtcggtgtgacatgctcacgcttacttgacttanggtgatcactattccctactaacagagcaatcggcttaagtcagaaacgccttaagtcggtgtgacatgcttacgcttacttgacttanggtgaccactatgccctactaacggagcaatcggattaagtcagagacgccttaagttggtacgacatgctcacgcttacttaacttangggtgtcactatg

SEQ ID NO: 20237 - DNA, 459 bp, Zea mays
  unsure (1)..(459): unsure at all n locations
agctntaacccccccacgagatctcttaccgtttctttctaaccataatgaatgcgatatcgaatgtcatacttgatgcatatttactttatttgtccccttgtgtggtgtactgtttgtttcctaatttgaatggatgtatgtatgtatgcttgcaatcgcatagagaacgatccggtcgaagagcccgaggaacccgcatgagaagcccctgagcagcagtcggttggtggaggcaagtgtcctttgacctatctctgtcctattcattatttaattcacctcccgctntacacatttatgcctaaggattgactagctnttgttatccatgtccttgtttacctatttgggttggattattattgtttagctntatgctattgcttaactctaatcaatgaacatgatgagaatatctatgatacgctgtttcccctttcttatgatgaatgtata

SEQ ID NO: 20238 - DNA, 435 bp, Zea mays
ctatcaaatggacgtgaagagtgccttcctcaatggaccaatcattgaataggtctatgttgagcaacctcccggctgtgaagatagtgagtaccctaaccatgtttataaactctctaaggcgctttatgggctaaagcaagccccaagagcatgatatgaatgccttagagattttcttatcactaatggattcaaagtcggaaaggccgatcctacactcttcactaaaactcttgaaagtgacttgtttgtatgccaaatttatgttgatgatattatatttgggtctactaacgagtctacatgtgaagaatttagtaagatcatgacacaaaagttcgagatgtctatgatgggggagttgaagtatttcttaggaattcaagtaaagcaacttcaagagggcaccctcctaagccaaacaaagtatac

SEQ ID NO: 20239 - DNA, 416 bp, Zea mays
  unsure (1)..(416): unsure at all n locations
cccccccccccgagacctttcccgtttctttcttaccattatgaatgcgaaatcgaatgtcatacttgatgcatatttactttatttgttcccttggatgatgtactggttggttcccaatttgaatggatgaatggatgtatgcttgcaatcgcatagagaacgaatcggccgaaaagcccgaggaactcgcaagagaagcccctgagcaacagtcggttggtggaggcangtgtcccttgacctatctcttgcctattcattatttaattcacctnccgctttacacatttatgcctaaggatngactagnctttgttatccatgtccttgttacctatttgggtggattattattgttaactttatgctattgctcaactataatcaatgaacatgatgagaatatatatgat

SEQ ID NO: 20240 - DNA, 460 bp, Zea mays
  unsure (1)..(460): unsure at all n locations
tcgacgaccaagagatcaaactcttctagttctacgaggctgaatgtcctgagcatctgtttggtgaaggcaagtgtcctctgacctacttatgtcctattcacatgataattcatttctccgcattatataattaaaaccttaggattgactagctntctatttaccttgtccttgattacctttgggttattatggttagctttatgatagtgctctactttaatcaatgaacatgatgagatataattatgatatgatgatcttattcttgatatgttgatagatttgtgacactaaagggggctcgggctatttcctgagtacctctccgtaaggacctattcgttgagagaccacccagganaaacagtgcaaccatgagggtggtattggacgcccttggccaagtaattaagaaagtcttgtgttgggtgctgggtttggtcattatggactg

SEQ ID NO: 20241 - DNA, 439 bp, Zea mays
  unsure (1)..(439): unsure at all n locations
tgaagatgagaaagaaccacccaaaaagaagaatattccgaagaagaggaaagtattatctccgaagcaaaaagtatccgacgaagaggagacttccgcatcacgctctggtactgacgtggaagagattttgaaggtaatgactgaatccctgcctgcgaagctaagtccattggggcctcaactgacaaagttttttcagaaggaaaaggagcccgaaaaaacgaagaaaacaacttaaacaaggagacaaagaatcatcgcagtgacagaagtcattgacaagacaccaccgagagcttcagctcanaagataccagcggctgaggaaataacaaatattgaagtcgcaccttctgagatcgcggctaccgaagctacctcaaccgaagattgaacttggaaacacaatcgacacatctaaaaatggctgtaacat

SEQ ID NO: 20242 - DNA, 457 bp, Zea mays
  unsure (1)..(457): unsure at all n locations
cttggctccatctatattatggattgctnttgaatctgtccagttttcttcatcctttctggtagcttcctgacttccgtgaatagcaataggcccttgatctgaaagtatcttcatgcatagatatgctggatgaaaaattgcttcaaaagcattgagtgtcccatgaccaatgattgcattgtaaggatactccatgtcgacaatatcaaacacaatttgctcagtccttgtattgttgacaaatccgaaagtcactgacatcgtgatcttgccaagtgctacgatctaccttccttcgaagccacaaagagggtgtgtagcatcatggatcgtatcctctggctcttgcatctgtctgaaggccttggcaaatataatatacgttgcactgcctgtatcaaccaaaacattgtggaccagaaatcccttgatgacacaagaaatgaccatagca

SEQ ID NO: 20243 - DNA, 398 bp, Zea mays
agcttgagttttattttaaactaatgtatatatatagtttatactaaacaactaaattctgaatctgatggaaaacataaagtgcattggaacggtaagattgagtgttgatagacacagaagaagacagatcttaaaagcactcgcgccaccatagtatgtatgttcagatcacaagacttcattaatcaagacaagaactaaccaaatctaggtacccacacaaaagagactcccagcaatcattttaatatttgctgatttttggacagcaggacaacaactacttgtttagctcataactcacaagatatgcctccaaaaatagtatactagtactttctataaagcttataaagtcctctataacggttgtattatcttcataacaagattcg

SEQ ID NO: 20244 - DNA, 445 bp, Zea mays
ctctcttcttcatgtgaagtgaagtcttcgctgatggtgactgtttgcttggtcgtggcctgatcgaaggggacagtcttggtcccgtcttggctctgcaactgtgccttgtcgagctgcttatcggttgggctggcgggcgcaaggacctcgcgctgggtcgtgagacagtgcacgttcctctgaccaggcacgaagtcccgctctatgttgcgcgccgtctgctggttgccatagatcgtaatagcgcctagcggacctggtatcttcatacataggtacagtccgtggatggcagcttcgaacttatagatggagccccggcccatgatggcgttgtatggatataccatgtcgacaatatcgaaggttacttgctcacttcgggcattgggtgctacaccgaaagagaggggcaactctattctgccaactggaaaggtgc

SEQ ID NO: 20245 - DNA, 339 bp, Zea mays
  unsure (1)..(339): unsure at all n locations
tatattatttactttggtcttagaaccgtacatagagatgcatgcatggcgatcagtttgatctttccaacgtgtcaatatcggaggcatagaaaatataagcgcatcatggtagtatgaataataaatatagtcctcgatgaagacatataactataatctaattaggggtcccgttgatttggcatttggtcgtggcttttgtctctttctcctttaaagcgagaagccaaactaaatggttcaattcagtctataactttntccaaaaagatatatttctcacggtgaaaaattgaaagaacctatgaactttgttttaacggctttcagatagat

SEQ ID NO: 20246 - DNA, 415 bp, Zea mays
  unsure (1)..(415): unsure at all n locations
tgtgaaggttcttcatccncacatgtgctaaacggcgatgcttcagtcagcccatgctagtcttagcaattaagcatgcatatagatcgacctcctttntttgcaaaatcaactaaataaagtttgtcgtctagtacacctttaaaaactaatgaaccatcacttcttctaaagacagacacatctacatttgtgaataaacagttatatcccatattacaaagttgactcacatacaacaagttatatccaagcgactcaactaagaacacattagaaatagagtgctcggatgaaatagcaattgttcctaaccctttcaccttgccttggttcccatcaccgaatgtaattgaatcttggggatccttgttcttgacgtaagaagagaacattctcttttcccccgtcatgt

SEQ ID NO: 20247 - DNA, 310 bp, Zea mays
gccgttcgtgtctgaccgatgttggggggaaggctctcggccggtggatgaacgatcagcaatctggattataatggcgataccatttcaccttgttttgatccgagccattcgcgcagaatcgtgcggccgaaaacattccactcctgtccgaccgagcgcttttgcaaaaaaacccttgggctgttagtgaatcaacctgcggtccaccgcgtggttagcttgtgtcttaagaccttttacgccagggcccttgtccttaccagaaattgagcccagtccagagtagattaacaatagtgaaataaca

SEQ ID NO: 20248 - DNA, 444 bp, Zea mays
  unsure (1)..(444): unsure at all n locations
tctanagggagaacacgtgataggtttaactaatgtgcaattcgaataagatagaccttgtgcagcttgtcaagcaggcaaacaggtgggaagctctcatcacaccaaaaatgtgatgaccacatcaagacctttggagatgcttcacatggacctcttcggacccgtcgcctatctaagtataggaggaagtaagtatggtcttgttatagttaatgacttttcccgcttcacttgggtattctttntgcaggataaatctgaaactcaagggaccctcaagcgcttcctaaggagagctcanaacaagtttgagctcaaggtgaaaaagataaagagcgacaatgggtccgagttcaagaaccttcaagtggaggaataccttgaggaggaagggatcaagcacgagttcttcgctctctacacattacagccaaatggtgt

SEQ ID NO: 20249 - DNA, 348 bp, Zea mays
  unsure (1)..(348): unsure at all n locations
cattatccgatgtgatattctatgcatatttaccttatattgtccttccgtaaggtggaccggttggttcctaatttgaatggattgatgtatgtatgcttgcaatcgcatagagaacgatccggtcgaagaagcccaagaactcgtaagagagcccctgacaacaatcgttggtggaagcagtgtctttgactatcttgtctattattcttattcactccgcataccattatcctaagatgacagatttgtatcatgtctgttacctattgggcgattatatgttacttatctatngtcactctataatgacatatagacatatatgaacgctgttcctttttatat

SEQ ID NO: 20250 - DNA, 412 bp, Zea mays
  unsure (1)..(412): unsure at all n locations
taatgcctcttaaagatagacntaatttgttaaagacaatgctcccatggattaagataacgagggctatattttatatcctgcaggttatcctgagcataaaattcggagaattcatgctaggaaatctcattatgtttcccatcatgcttttatgtataagaatgaggcgtttagctctaggcaatcaacccatgttaaatagcctaaaaagaaaactcctactacatcaaatgagcctaatatttcatttaatacttttgatgcttcttatgtgcttactaacaaatcaagcaaagtaattgccaaatatgttgggggcaaacacaaaggctccaagacttatgtttgggtacccaaagtgcttgtttctaatgtgaaaagacccaagaccgtttgggtacctaagaac

SEQ ID NO: 20251 - DNA, 438 bp, Zea mays
  unsure (1)..(438): unsure at all n locations
agcttctaaagggagaacacattntatgactaacttatgttcattttgagaaagacaggatttggagcgcatgccaagcaggggaaccagctggagctcattatccacaccagaacatcatgaggaccgataggctgcttgagctactccacatggatctattccgtccgatttgttacataagcatcggcgggagtaagcattggcttggtattgtggatgattattctcgcttcacttgggtattcttcttacaggaaaaatctcaaacccaagagaccttaaagagattcttgagaatgggctcaaatgagttacgattgatgatcaagaagattagaagcgacaatggaacgaagttcaagaactctcatattgaatgaattcttgaggaggaaggcatcaaacatgagttctcttctccctacacacctcaac

SEQ ID NO: 20252 - DNA, 428 bp, Zea mays
  unsure (1)..(428): unsure at all n locations
taatgccccttaaanatagtctaactntgttaagggcaaagctcccatggttcaagataacgagggttacaatttataccctgtgggtatcccgaacacaagattaggagaattcactctaggaagtctcactctggctctcatcatgcttttatgtataagagtgaggcatctagctctaggcaatcaacccatgttaaattgcctaaaaagaaatctcctattgcatcaaatgaacataacatttcatttaagacttttgatgcatcctatgttttaactaacaaatcatgcaaaatagttgccaaatatgttgggggcaaacataaggagtcaaagacttgtgtttgggtacccaaggtgctngtttctaatgtcaaaggagccaagaccgtttgggtacctaagaacaaagcctaaatttgttt

SEQ ID NO: 20253 - DNA, 433 bp, Zea mays
  unsure (1)..(433): unsure at all n locations
agcttaatagactcgttttattatttagtccatatatgtgtaattagttttgcatatagactatatttaataattctaaatagtatttaaacattcaatgtgacatgactaaagtttaatctctataatccaaaagggccttagttgtaccagcttgttcctacgtgtagctagtgacccaatcaatgatatgtggtaggagtacctgtacttgtccaagtactatccactacaacaactagctagcacatttttctgactaggggcgtgttcttcccatctagcattgtcttcgaanaattgaaaactcggtccattacttagacttgtgatagtagcacttttgacattgtgcccttcgtanaggcgtccttatgctntaatgtgtcatatttggtggttgccatttacttcttgacactcaattgacgtc

SEQ ID NO: 20254 - DNA, 462 bp, Zea mays
  unsure (1)..(462): unsure at all n locations
tcatgganaggaaccttcggccatctcatgcaaacagcttcatccgtaagccgcttctcccttgaagaccttcggcgacgaagcatagacacaacagcaaactcaactttccgctctggtggcatacctggtaagtcttttggaaacacatctgggaattcggacacgaccttgatactctcgattgggtctgcttcactgctatcgacagccatatgataacaacttcctttcttcggctcaagcgggactaactcggtcgccacttcctctcctagtggggacaccaacttgattgtcctcttatcacaagtgataactgcctgatacttatctagccaattcatccctaagatgacatctattccctgagtacccattactatgaggttagcgggaaacgctatcctccttatnttcacacttacattcaaacaaatgctattggctcgaattctacca

SEQ ID NO: 20255 - DNA, 443 bp, Zea mays
  unsure (1)..(443): unsure at all n locations
tccttctttggcggaagtcgttggttgctcggatgtactcatccatcccctgaagcagcttctctagagtttgcaggtgcttcctagcgaagtactgagccgtaggtcctggccgaaggcccttaatcatggcctcaatgacaatctcattgggcactgtaggcgcttgtgcccttagtcgcaagaaccttcgtacgtatgcttgaaggtattcttcgtggtcttgcgtacattggaacagagcctgagctgtgaccatattcgtttgaaagccttggaagctggtaaccaacatgtccttaagcttctaccacgacgtgatggtccttgtccgaagagaagaatatcatgtntgggctacattccggactgccatgacgaaggacttcgccttgactgcagtgttgcccccatacgaaaatatagntgcttcatagctcatc

SEQ ID NO: 20256 - DNA, 449 bp, Zea mays
tcaataggtttaaagttccatgctgaatcaatcccaggtttaatttctccatttcttggcataatgtggtgtcagaagtctttactctaaggcaatggcaggaagccttgtgacttagtgcatctaccaccacgttggccttgcccgggtgatagtgaatttctaattcataatccttaatcagctcaagccatctcctctacctcatgtttagttctgactgggtaaaaatgtacttcaaacttttatgatctgtatatatatggtagatatttcccagcagataatgatgccatattttaagggcatgaaccacagcagctaattctaagtcatgaagtggataatggtcctcatgccgatgcaactgtctttgagcatatgctataactcggccctcttgcattaagacacaccctagatcacttgctgatgcatcacagtataca

SEQ ID NO: 20257 - DNA, 145 bp, Zea mays
atctattctaattttaaaggaaactcttctttggcttttcattgttttaaccaccaaagtgttctctgaccaaaggtgtgtttgcacaaaatatgctattaaataatgctttgaagatgctacacgaccttgaacataaaaaata

SEQ ID NO: 20258 - DNA, 440 bp, Zea mays
  unsure (1)..(440): unsure at all n locations
aggatattcttcatcagaacactctggatatggttgtgatatatgaaaattcttcttcacgaagcatgaaaagaaaggaaagtgttttttcgtcaaagactcaaaaacggtatgtatgtaaatttcatgcatcataaagaattgaaccataaaaaacaagtatacaagatattacacatattacatttcagatgtttttacaatagcacctagtcttccctaagtactacttccgcagcttcgttcagaagttgattgacaacttgatccatgatagcttcagccatctttttaatttcatcgtcatctttcggctgaaggcctggaggcgctntagtangatctgagggaggacaagatacggctacattgctatttacaaatgcgaacgaaaggttaaatcaaaattattacacaataaaaaccatcagttaatacct

SEQ ID NO: 20259 - DNA, 471 bp, Zea mays
  unsure (1)..(471): unsure at all n locations
agcnttcgggcaacaacaaagctctttccggccgtcagctccaatatgcagaggcgccaggggcttcggaggaaggtttggggatcagcctangaaaatttattgcttattctgtggtgaggacaagggccatactacaaggatgtgacatgtcaccattcaaaaacagaaggaaatagcagaagctgcagctcaacaaaaccagccgaagcaggtcatgcacactgcttcgtatcactcaccctacataccagagtatgtgggtaaccatcttgcagcttctgttgcttcggctagccaactacaggcatcttggcaacaaccttcaccttcaccaccactacaacctgcatattcccgaggccagcagccagaagggagccagcatactcaccagcaacgagacttcatggangagtccgaatctcacacagtcaacagtactgtgccagaatcgaagcatatctacta

SEQ ID NO: 20260 - DNA, 424 bp, Zea mays
  unsure (1)..(424): unsure at all n locations
agacattgtctccctataggaagccaatgccatccttaataccatggcgtctcccattatagagcatgctcctagcaaatttaaatttttcattttctatctcatgctcgttgattttactagttagttgtgctatgtgatcattttgttctttaattaaagctgatcatgaataacatcaacattaatatctctacatctcatgcaaatagaaacatgatcaacagtggatgtagagggtttgcaagattntaaatcatcaatcttagcatgtaaaatagcattctcatctctaagaatggaaatagaaacattgcaaacatttaaatctttagcctttgaaattaaactagcattntcaattttaaagctagaaatngattcattcaatttatcaatcttcgtaatcaaactagcattataa

SEQ ID NO: 20261 - DNA, 461 bp, Zea mays
  unsure (1)..(461): unsure at all n locations
gcttatgaagattcttcatcccacatgagctattctgcggtgccagagccaacccatgttagtcttaacaattaggcaagtatcgaggtcagctctatcaaaatctaccaagtatagctgaccctctaatactcccttaaatgctattgaatcatcatttcttctaaagacagtgacacctacatcagtgaatagaacagtgtagcccatttgacataattgagatacagaaagcaaatggtaatctaaagaatcaacaagaaaaacattggaaatggaatggtcaggagatatatgcaatttacccaaacctttgaccaaaccttgatttccatccccgaatgtgatcgctctttgnggatcttggtttttctcacatgaggagaacatncttttctcccctgtcatgtgngttgtgcacccgctgtcgagtatccaacttgatcccncggatgcataaa

SEQ ID NO: 20262 - DNA, 339 bp, Zea mays
  unsure (1)..(339): unsure at all n locations
nttagctctgaagcttcagctttgacaacagtcttttagtgtttccgaagatgtctgaagctgctaagaaggccgctgctgagatgaagctaagtcttgatgaagagaagaacttaaggtttcttatagcgatgtcgaagaccaacacagaaaagatcaccaaggagattctggaagggctgtctgaagatactggtgacagtgaaagttatgatgtggacagcggtggcgaagactccgaagatcgcccctggcgaccaagccattcagtttatggtaaatcaactatcatagagaatcatcttgttaatatgagaggaaggtatttccgggatctgt

SEQ ID NO: 20263 - DNA, 413 bp, Zea mays
  unsure (1)..(413): unsure at all n locations
gatcttgtactctcttgatggaaggcctctttaaacttctaatcttgtctagttcatggcttaaacaggaaacaaaatccaaacatgcttaagtaaaacacaggtgtgtctatgagggtaattaattatctaataataaaatcaatataaccaggcagaatcctttaacataccagatcccctaacttggacgaggctaatctcactgcaatcagcaccatatatgcacattttccattcctgagaaacatatatacaactgagtatcagtacaaagaatcccaacaatacttgtatagagaaccgacatatagatagtccataaaatatattcgaaatcaaagatcanaactaaacattcatcaagacaatcaaacattcattgtactgaagacgaataataccatgataat

SEQ ID NO: 20264 - DNA, 425 bp, Zea mays
ctccatgtgcaacgacaagcgtccaaagcaaactggtcatgtagtcatgcatgtagccaacaatttcctaggcaaggaagcggttgactatatatcataacacgctgtgaattaagtcagaacgttttcttaattatgatgatagccagcaacagccagctgaggttaaaaaattgagtacgcgtggccgtagcacggcgcgcggtttgaatataatccaacgcgtcctgtaaaagctagcctgcggtgttcctactgcatgcgtctttagatcccaccaaaacggcgtacagtatattcaagcgtgaatcacaagccacaaacataagagacaaacagtcaaaagttcatggtatggtaaggtcaaattaagacgctcctccgatccttagagtcagggcatatatatgcatgcagtagtggat

SEQ ID NO: 20265 - DNA, 331 bp, Zea mays
agcttctgacttgtgggcccgcctgggtgtccggtgcacaccggacatctactgttccttgtccggtgtgccggaatgggcgcgcctgacatctgcgcgcgcagagcgcgcattaaatgcgcggcagagagccgttggcgcggagacgaccgttgcttcggagtcgcaccggacagtccggtgtacaccggacagtccggtgaattatagcggactagccgttggagtttcccgaagctggcgagttcctgaggccgacctctcttggcgcaccggacactgtccggtgtacaccggacagtccggtgaattatagcggagtcgcctctgg

SEQ ID NO: 20266 - DNA, 190 bp, Zea mays
  unsure (1)..(190): unsure at all n locations
gttgcttttgagaaattatnttgtgcatgtttcattttgtgactatgagacaggtttagtatgaataatgtgggaagatgaataccatttgattaggggatgattctatattgttgttgattgacaaggttagaactatgtttagttatgatgtagctgtatatcatatctctttattgtgatgaacttt

SEQ ID NO: 20267 - DNA, 429 bp, Zea mays
  unsure (1)..(429): unsure at all n locations
agaacacttttatgactaactaatgttcattttgagaaagaacagggttgtagcgcatgccaagcangaaagcaagttggtgcccatcatccacacaagaacatcatgacgaccaacaggccgcttgagctactccacatggatctattcggcccgattgcttacataagcatcggtgggagtaagtattgtcttgtaatagtggatgattattctcgcttcacttgggtgttctttttgcaggaaaaatctcaaacccaagagaccttatagggattcttgagacgggctcaaaatgagttcggcttaaggatcaagaaaataagaagcgacaacgggatggagttcaagaactctcanatcgaaggctttcttgaggagganggcatcaagcatgagttctcttcttcctacacgccacaacaaaat

SEQ ID NO: 20268 - DNA, 407 bp, Zea mays
  unsure (1)..(407): unsure at all n locations
tgtanagattcttcattccaacatgtgctagtcggcgatgtcatagccaacccatgttagtcttagcaattaagcaagtgtcgagttcagctctatcaaaatctactaaatatagctgaccctctaacactcctttaaatgctattgaatcatcacttcttctaaagacagtaacacctatatccgtaaaaagacagttgtagcccatcttacataattgcgaaactgagagcaagttataatctaaagaatctacaagaaaaacattggaaatggagtggtcaggtgatatagctattctacccaatcttttgaccaaaccttgattcccatccccgaatgtgatagctcgttggggattctggtttttctcgtaggaagagaacatcttcttctcccctattatg

SEQ ID NO: 20269 - DNA, 380 bp, Zea mays
  unsure (1)..(380): unsure at all n locations
agcttgctatatgcactaccggaatcgacagctttatcgaatgactacagcactcggcaaaaacctataagatactcggcacgggttttaccgagtgtcacactcgacaaataggactcggcacacagtacatcgactaagtcttctttgccgagtacttattctcgggcactcggcacagactttgccgagtgccagtcagtactcgtgaaagaataagctgcgtcacgacgccggggtgatggagacggcaactttaccgagtgttctatgtgacactcggnaaaggagttacctttgccgagtgtctcctaatacattcggcaaagaacgcctaattagtattaatatactatactcgtgttaatttggactatcag

SEQ ID NO: 20270 - DNA, 463 bp, Zea mays
  unsure (1)..(463): unsure at all n locations
agtgacctatgaaactcagctttctagttttttatttaggttttctttctttntctaatatttatttatttttatttttttcaactcaaattcaattttaagtataagttttacgactgtaaaattatatgcacaagcaataaaacttcagcatgatgcatagcttattgatgtgtttttatctaatttgtttttactttaaacatgactattcttatgatataatgagtagatggccaaacaagtaacgagatcaactcctttcttatgttctacaatttgggtattacaaatcctaccccccttaaaacaaatctcgtcctcgagatttatgaagaactatggaaaagatggtggaaatctatgtgaagctctntttctctctctcaagtagcttcatcttcttcataatgactccattngtacttgcacacctttatcancttattcttgtactcgagtc

SEQ ID NO: 20271 - DNA, 354 bp, Zea mays
catgttagtcttaacaattaagcaagtgtcgagttcagctctatcaaaatctaccaaagattgctgaccctctaacacacccttaaatggtattgaatcatcacttcttctaaagacagtgacacctacatctagtaagaaacaggtgtagcccatttgacataattgggataccgaaagcaaattgtaatctaaagaatctacaagaaaaacattggaaatggaatggtcaggagatatagcaattttaacaagacctttgaccaaaccttgttttccatccccgaatgtgatagctcgttggggaatctgtgttttctcgaaggaggagaacatcttcttcttccctggcat

SEQ ID NO: 20272 - DNA, 422 bp, Zea mays
  unsure (1)..(422): unsure at all n locations
agcttacttggtaagatgaccaaagcgcccatcacgggtttacctgagaggacgttagatttattggaactcatacatactgatgtgtgcggaccaatgagtacgacagctaggggaggattccaatacttcataaccttcactgatgattttagtagatatgggtatgtctacttaatgaaacacaagtctgaatccttagaanagttcaaagagtttcagaatgaagtagaaaaccagcgtggcaagaaaattaaagcactacgatcagatcgtggtggtgaatatttgagtcatgagtttagcaatcatctaaagagttgtggaattgttccacagcttacgccgcctggaacgcctcagaagaatggcgtgtctgagcgacgtaatcagactttattggatatggttcgatccatgat

SEQ ID NO: 20273 - DNA, 424 bp, Zea mays
  unsure (1)..(424): unsure at all n locations
agctngtggcggcggacggcagctgcaactatatccgggcagcgggcgacgccgcgacgcatgctgccatcctcgtcccgccaagtatcacctgattcccaactgccaacttcttgccttcttggcttcttcttcctcatccggcccggcactccacgatttcgtgcccgctaccatcaaatccagctaagcactcgctgtcagcccgccaccagctccgcactgggcactccgcctccacggttttgcctggtgcgcgctgcangtcaataacggccccactccttggctctggcacaagcacaactacgcgacctcgcacgtgagtngtgtcatgctaaggcgctctgtgcacggcgcacagttgtcgccggccgccgcgtgtggcttgtggcaccacacctnctcacccaagctcgtacat

SEQ ID NO: 20274 - DNA, 464 bp, Zea mays
  unsure (1)..(464): unsure at all n locations
gcttatcaggaggtccatcgtgaccataatgttctggctcccttaaaggactgtagtggtccgctatcatcttccataatctgttggtgatcgtctcatgccatggcatgcacgcgcccaccactttgccctggtttcgtcatccaccgttgtggcatatcttacccaccccttggatagcattggtcgcctcgagcatggttctattcagcttgtggcagcctttcttgtgctcgggcgagacacgatggggcggacgccgccacaagtaccgatatgattgtcggagtcccttctaggctacttgtgctcggagtggggctttangggtgttggtcatgaagcattcctacatggagtcatagctagccctactagatggggtgttgaggctacaaccagattctgacaagaacaggtcgttgaaacgaatcatgatagggtcaaccattcctaggaacttg

SEQ ID NO: 20275 - DNA, 434 bp, Zea mays
  unsure (1)..(434): unsure at all n locations
agcttgacattgtcttcctgttgaaagccaatgccatccttaatgccagggcgtctcccactatagagcatgcttctagcaaatttaaaattttcactttctaagtcacgctcattaattttagcactaagttgagctatgtgatcattttggtgtttaattagcgctaggtgattatggatagcatcaacattatctctacatctagtgcaaatagagacatgattaacagtagatgtagagggtttgcaagcatttaattcatcaatcttagtatgtaaaatagcattctcatctctaagaatggaaatagaaatattgcaaacatttaagcatttagccttagcaattaatttttcattctcaattttaaggctagagagagatgcattcaacttgtcaatcttagtaatcnactagcattatcatttcta

SEQ ID NO: 20276 - DNA, 380 bp, Zea mays
tcggaataccacgacttcattttcttcggagtctgggcaagtcttctccccttcgtcggccctcacaacggacagatcccggaaataccttcctctcatattaacaagatgattctctttgatagttgatttaccataaactgaatggcttggtcgccaggggcgatcttcggagtcttcgccaccgctgtccacatcataactttcactgtcaccagtatcttcagacagtccttccagaatttccctggtgatcttttctgtgttggtcttcgacattgctataagaaaccctaagttcttctcttcatcaagactcagcttcatctcagcagcagccttcttagcagcttcagacatcttcggaaacactaaaaaac

SEQ ID NO: 20277 - DNA, 342 bp, Zea mays
  unsure (1)..(342): unsure at all n locations
tgctagtcttaacaattgagcatgcatctaaaccgaccttctcttttgcaaaaacaactacataaagagtggcggttaatacacccttaaaagctagtgaaccatcacttcttctaaagaagacactttacattggtaataaacattatatcccatattgcataattgactaacagataacagaatatatccaagagactcaactaataacacattagagatagagtgctcattagatattgcaaatntacctaaccctttaccttgccttgattcccatcaccgaatattattgaatcttgggaatccttattcttgacgtatgaggtgaacatcttcttc

SEQ ID NO: 20278 - DNA, 449 bp, Zea mays
tgtgaaggttcttcatcctcacatgtgctaagcggcgatgttatagtcagcccatgctagtcttagcaattaagcatgcatctagaccggccctcctctttgcaaaattaactaaataaagtttgccatctaatacacccttaaaagctagtgaaccatcacttcttctaaagacagacacatccacatttgtaaatagaaaattatatcccatattgcataattgactaacagatagcaagttatatccaagagactcaactaataacacattagagatagagtgctcatttcgaaatagcaatttacctaatccttttaccttgccttgattcccatcactgaatattatagaatcttgggaatccttggttttgacgtatgaggtgaacatcctcttctcccctgtcatatggtttgtgcatccgctgtcgataattcaacttgaa

SEQ ID NO: 20279 - DNA, 398 bp, Zea mays
agcttgtattacattttattaatgttgtggcggtgttgacagaatgctttgattggttcagtttgtattatgtgaatttgaccccttgttttggggaacatgaactgatcagatcaacacttcttttttgtctaccgtgtcctgacatctcaagaacaaaaaacaaaaacgcttaattgagcagcaactgaacactggtcatgacgggccattctgatcacgtgtgagtccaaaccagtttcagtttagaatattggttcagtaaaacaattgtcttcaaagattcagaacctaagaaaggaggataattttgaagacgtgaatgaatagctaaagagacaagaatgtgtgtaagtgggcttcagaagttctgatgatttgggagctgcccaactcgc

SEQ ID NO: 20280 - DNA, 455 bp, Zea mays
tacacagtaacacggaggccaatctttccaagtctgcaacatcggtccgagataactcttttgcacaaagctgacggaagaaatagctcaactctgaaagcgctagccagacatgctcagggacatagcctcgaaccatcgcaggaagaatccgttcaatccatatgtggaagtcatgactcttcatccctaagactcgcatagtagataagttcacccccctactcaggttagatgcatatccatcagggaacatcaacatcttgatccactgaagtacttccttcctctgggccctgcttaagacgaaataggccttaggccttctccacgtctttccaccacttagcggcttcatctctaggtttggtctatcacataacgctgccagatccactcttggctttacattatcccttgacttattaagaatgtccataatggtgccacagtgc

SEQ ID NO: 20281 - DNA, 439 bp, Zea mays
  unsure (1)..(439): unsure at all n locations
cactctttcaggatacctcggatattgtaattcttcttcacgaagcatgaaaagaagggaaggtgttttttcgccaaagactcgggaacggtacgtgtgtaaagtttcatgcatcgtaaagaattgagtaacaaaaatagatatattacattcggcgttacaaaatgttacaccatattacattccagaagtttttcacaaaaatgtttactcctctctcaaaacgacttctgcagcctcattcagtagtcgattgacgacttcgtccataatatcttcggccatctttttaatttcgtcgtcccccttcggctgagggtccgaaggcgctntaatcggatctgaagcaagacacggctacattgctattacaaatcgcanacagatcttaannagccttagattacaacacgataaanactattatttagtacctaat

SEQ ID NO: 20282 - DNA, 439 bp, Zea mays
  unsure (1)..(439): unsure at all n locations
tggtgacnaagcaataactccgtatgagctaaaactggatcaataagagtaggagcttctgcataatcagattctgaagctgatcattctgtggaaaaagatgctatagaagggatcaggcttcaagctgtggagaccatcaataaatatcaagccgaaacaatcaaattgcgtgatagaaaggttcggctaaagaatattgaaccaggacatttggtgcttcggagagtggctaacccagatacagtgggcaagttgcagttgaaatgggagggaacctttttggtagtatcttcgtcaagacccgtgtcatacagattgaaggatatggacgacaatgacattcctagatcttggaatgcggatgagcttctgcgatattatgtataactcgatgaaatttgtatatttttaattttcttcatggcacccttttctt

SEQ ID NO: 20283 - DNA, 418 bp, Zea mays
  unsure (1)..(418): unsure at all n locations
attaaacactaatgtgcatatattgattntactgagaagcgtccatttagagccaagttccaataaggagcatctcgtttctatgatgaaacaaatccttggatgcgagatcacaatgcattccaagcaattagttgcggaccagtgagatgtctacgctaagaaagatttggagatgaggagtaggacttttgaaactgttaagaatattggtctagcaatattgtatagagaatgacattgatattntaaagttgttcctccaatacatgagtcttccgagaaatagactnttgtgtatacgtcaagcaagcatcgggttttaagatcaacttttataaaagtgagcttttctgctttgggaaagcccattaacacatagaacaatacatggatatttttggttaatcctggtaat

SEQ ID NO: 20284 - DNA, 359 bp, Zea mays
  unsure (1)..(359): unsure at all n locations
ctccttggttacgatacgaggttacatttagccctgctcggttatcccaaacacacaattacgagaattcattctaggaagtctcactctggctctcatcatgcttttatgtataagagtgaggcatctagctctagggaatcaacacatgctatattgcccaagaataaaactcctattgcatcanatgagcctaacatttaatttaagacttttgatgcttcttatgtgctcactaacaaatcaagcaaagtagttgccaaatatgttgggggcaaacacaaggggtcaaagactcgtgttttggtacccaaagtgcttgttctaatgtaaaaagacccaagaccatttgtgtccta

SEQ ID NO: 20285 - DNA, 362 bp, Zea mays
atccacccacttcttctactgaggggcagaagaagaagaagagacatcttcctccagtgtctaacttggatcaagatgctggtccttctattcctggtgctgaggaagaaccagtgcctgaatttgctgaagctgaccccaatgggtgtactgtccgtgttgttgatgaagatgatgaagaagaggacgaaatccctctgatttggaagaacaactggcgttacataactagtggggaaagtagtggtgtccttctcctgcttgtctgcctcattggctgcaagaatatctctgcgaacttgatcaactttgaaacatggttcagaagactgtgtcgacccgcaatggggccgatgatgttg

SEQ ID NO: 20286 - DNA, 431 bp, Zea mays
tgagcaacgtcgtccctctatggataagccaaaatcggcgcatgctgtatccttgccgcgcgtattgtgcgaagcaggggagatgcgtggtggccgtcgccgggagggggcatcttcgccatcgtttaggaccctctaccggattggatcggtccgccttgtccgtgggggatttcgtcgccgccgagccctagttcaagctcttcttcgccgtctgcatctccgggctcggcgtgcgcagtggggagaattgagtccgccaggggcgaatcctgccctgagtataaatcgaagtttggcgcaccctcctcgccataagttccgcggccaggaacagcttcggttgagctccgcgtgattcattatgctacggtaaaatcccgccgccgccgagctcgagagccccagctcgagctcttttctccatgccg

SEQ ID NO: 20287 - DNA, 330 bp, Zea mays
  unsure (1)..(330): unsure at all n locations
agctngttttgggctcatattctttcttcatccatatttgatggtagcctaaatagcagtccaatagactcatgagctccgaggtagctgctgcatccacaagggagtctattcttggctaagggaactcatcattcagacatgccttattgagatattgtaaatcaatgcacatgctccactgtccattagccttcttcaccatcatagtattggctagccactctggatatgttacctgttggtggccttcttcttcgacgaatgtcctctttataaaacaccttggacaggatgacatgcattcagacacatcacaaaggtgcacac

SEQ ID NO: 20288 - DNA, 452 bp, Zea mays
ctcaagctttgcgaactatgcccgtatccaatctgcctgagccggaactatattatcttgccatatgcccgcgctccggtcgaccacgaccaacacccaacataatacttccctagttatttagccaagaccagagccatgatagctctcatggtagcactgttttcccaggtggccactccatgttccaattaatatgcaataatcttgtgtaaccatcgggttaacaacaataatgtaaacttaccatttggaacattaatatcataacaggagtgactgcataaagttaagttgtagcaataacatagctacttgattaaatcataatcccaggttaaacaaggagtaatggtggaaaggttatctaaatacgtaacccgtcaagttatgcatatatatccaaaagagtaaactctattacatgtattgtttggatcaaacagagtatg

SEQ ID NO: 20289 - DNA, 405 bp, Zea mays
  unsure (1)..(405): unsure at all n locations
gttgggaatgccattgtaaacaaatgtggtggggtgccactaacaattaaagtaattgcaggtgtccttcatgacaagaaacggataccagagtggcaggccattatagacagtaatctattcgatgctgagggcaaagagcgtagagtatctgcatgtttgaggttgagctatctgaactttgcctctcatctgaagcagtgcttcacgatttgttcactgtttcctaaaggtcacaagaaatgacaaggaacgttgattgaccaatggattgctcacgacatgttcgctagtgcggatgctgttgattacttggagtacactggatatgagtgntttagttctcttgtgcannatgtctttttgtaggatgtggaagaaaaatattatgggagagtgacatgc

SEQ ID NO: 20290 - DNA, 421 bp, Zea mays
  unsure (1)..(421): unsure at all n locations
tgtcttatgcggttagcatatctagatctagttcctatatttatctaggtcaaaaagtctaagtgccatgtgtgtgttgaatcaaaacaatcccgcaagactcacaaggctgctgaggtgaggaatttggcacctctagaacttgttcattctgatttgtgcgagatgaatggtaatttgacaaaaggtggtaaaagatactatctcacttttatagatgactccactagatnttgctatgtgtatctcttaaaaacaaaagatgaagcgtttaattanttttaagacctataaagctgaagttgataaccaacttgagaggaaaataaaacggttaaagtctgatcgaagtggagaatatttctctaatggattccatgagttctgcgtggaacatggtattattcatgagatgacaccg

SEQ ID NO: 20291 - DNA, 420 bp, Zea mays
  unsure (1)..(420): unsure at all n locations
tgtcgtctaatacacctctaaaagctaatgaaccactacttcttctaaatacatatacatcaatatttgtaaataagcaattataacccatatggcatatatgacttacagaaagcatattataaccaagcgattctactaggaatacattagaaattgaatgctcaatagtgaaggctatttcacccaaacctttgaccttgccatgatttccatctccaaagataatcgtatcttgggaatccttgttcttgatgtaggagtgtcacacccggttttggaaggtaaactgaatgcgaaccatgtacgtgaaaggatcagaaattcacgtacacaacgattacataaatgactcatcatagcacaatgcttcgaataacaataaagagtaggtaataatatanagactagagtcattta

SEQ ID NO: 20292 - DNA, 408 bp, Zea mays
  unsure (1)..(408): unsure at all n locations
agcttggatgaaatatcaagccgataagaatctgtctgaacgagtattncaagtgggtgataaagagtatttgaagctctagccgtatgttcagtcatctctcgcaactcgatccaatcagaaattggcgttcaaattntttggaccttacacagctacaacgcattggtgatgtcgcatacaaattacagttacctgacaagttcaacatgcatctagactttcatgtatctcaattgaagactgtggtgagcagagatcataaactaattcctcagctgccagatgatgctaatgtcttttagattccagttcaaattcttcagagtcgtatggtgcagcgttggatgctcttttgtggcacaagtgctggttctctggtcaggtttggatgcttcattacaacat

SEQ ID NO: 20293 - DNA, 454 bp, Zea mays
  unsure (1)..(454): unsure at all n locations
ntatcacatggatgtgaaaagtgccttcctcaatggccctatcaaagaagaggtctatgttgagcaacctcccggctttgaagatagtgagtatcctaaccatgtctataaactctcaaaggcgctttatgggctcaagcaagccccaagagcatggtatgaatgcctaagagacttccttatcactaatggcttcaaagtcagaaaagccgatcctactatcttcaccaaaactattgccaaagacttgtttatatgtcaaatttatgttgatgatatcatatttgggtctactaacatgtctacttgtgaagagtttagtaggatcatgattcaaaaattcgagatgtctatgatgggggagttgaaatatttcttaagatttcaagtcaaacaactccaagacggcaccttcatcagccaaaccaagtacattcaagacatacttaacaag

SEQ ID NO: 20294 - DNA, 241 bp, Zea mays
  unsure (1)..(241): unsure at all n locations
atgaagcttcagaattacaaaccgacttaaaagtagaatgaccctctagtccataaatgcttangtcgcttgtgtaatcccttatgaggggcataattgtnattcctcacaggctgtgtcccgtgcctataaatagtgaacagtattcccttactgttcacgcatccctgtatttgcaatcgcattattcgggaaccaacctttgccaaggcagagcatttgagaacaagtccccaacacc

SEQ ID NO: 20295 - DNA, 435 bp, Zea mays
  unsure (1)..(435): unsure at all n locations
tgaagccatggcaagtagcataagccaataatatacaaattgactcaagcctagctacaggtgcataggtttcaccgaaatccaaaccttcgacttgggagtatcccttggccacaagtcgagctttgttccttgtcaccacaccatgctcatcttgcttgttgcggaaaacccacttggttcctacaacattttggttaggacgtggaactaaatgccatacctcatttctagtgaagttgttgagctcctcttgcattgccaccacccaatccgaatcttgaagtgcttcctctaccctgtgtggctcaatagaggaaacaaaagagtaatgctcacaaaaatgtgcaacacgagaatctagtggtacccncttatgaatgtcgccgaagatggtgtcgacggggtgaatctcgtggatggcttggtggactc

SEQ ID NO: 20296 - DNA, 463 bp, Zea mays
  unsure (1)..(463): unsure at all n locations
gcttctaaagggagaacacatnttgggactaacatatgttcattttgagaaagacagggtctgtagcgcatgtcaagcagggaaacaagttggtacccaccatccacacaagaacatcatgacgaccaacaaatcgcttgagctactccacatggatctattcggcccaatagcttatataagcatcggcgggagtaagtattgtcttgtaattgtggatgattattctcgcttcacttgggtgttctttttgcaggaaaaatcacaaacccaagagaccttataaggattcttgagatgggctcaaaatgagttcgggttgaggatcaagaaaataagaagcgataacgggacggagttcaagaactctcaaatcgaaggctntcttgaggaagagggcatcaagcataagttctcttctccctacacacctcaacanaatggtgtagtggacaggaataat

SEQ ID NO: 20297 - DNA, 439 bp, Zea mays
  unsure (1)..(439): unsure at all n locations
agtgaaagttcttcatcctcacatgtgctaagcggcgatgccacatccagcccatgctagtcttagcaaataagcatgcatctagaccggcctcctcttttgcaaaatcaactaaataaagtttgtcgtctaatacacccttaaaagctagtgaaccatcacttcttctaaagacagacacatctacatttgtaaatagacaattatatcccatattgcataattgactaacagataacaaattatatccaagagactcaactaaaaacacattagagatagagtgctcattagatattggcaatttacctaacccttntaccttgccttgattcccatcaccgaatattattgaatcttgggaatccttattcttgacgtatgaagtgaacatcntcttctcccccgtcatatgggttgtgcatncgctgtcaataat

SEQ ID NO: 20298 - DNA, 332 bp, Zea mays
  unsure (1)..(332): unsure at all n locations
catcaaaatccttcctcacttggacgaagttgttagtattcgaggagagctcactattcaatctagcaatcccagtctgggcttctgccatcgaattctccattgtttgaagcacgaaatccttcctctctagagcagcttcgagatctttgatattgccctctaagctctcaactataatctcattattcttgtcctccacgtcttattgcatcctcaaggctttacttaatagtagactctgaaaaaatcaccttcatctctgaagcagtaaagagatagagatagaactntaccttacagttctaataccacaagctaccagtgatatg

SEQ ID NO: 20299 - DNA, 355 bp, Zea mays
tactcaagctagcggagaagctcgatctgaacatgggctagcaggcgatccttattcatcccgactgacacagcgttgacaagtatggagtacagctatagcgacatcaactacgtatacctgaccctctaagacccgcttaaaagctactgaatcatcacgtgcttccaaagatagtgacacctgtattcgtactaagacagctgtagtccattttgctacctgggaaacagaaagcaaggtgtaatctaatgagtctacatgaaaaacattggagatggaatggtcaagtgatataacaatgttacccgatcctttgaccaaacctgtgatcccatgcccgaatgtgatatct

SEQ ID NO: 20300 - DNA, 363 bp, Zea mays
tgcactttaaggaagccattgggacaactatgtcttttttaaaacagggtggaccatgtaagcatgaaccagtgtgttatcatccacttaaacatatacaccgacagcgcttgactcttcacatgattattcgccgattcttcataagcataacggagtaagattgtcttgtaatgggatatattttccttacttggtggtcttttgaaaaaaatataacccagagacatgagagattttgagaaggctcaaatgagtcgctaagatcaaaaattaaagcgacacggacgagtctagactaccatagaagcttcttgagagaggcataacttagtctttttcctaccacacacaaatgggttt

SEQ ID NO: 20301 - DNA, 464 bp, Zea mays
  unsure (1)..(464): unsure at all n locations
ctctttaggaccttaaatctaagctntataataatagcttctgcgcttgcttctgagaagaccttttttggtgttctcttctaagatcttcggctacgaagcatacccccaacaccctctacatccaatgttgagcatgtttccatttgtactagatgtagagatattaatgttgatgctattcatgatcacctagccttaattaagaaacaaaatgattacatagctcaacttaatgctaagataaacgagcatgacttagaaaatgaaaaatttaaatttgctagaagcatgctctatagtgggagacgccctggcatcaaagatgacattggcttccaaaagggggacaatgtcaaacttaatgcccctcccaaaagattgtctaactttgttaagggcaaagctcccatgcctcaagataacgaaaggtacattctataccctgccggatatcccgagag

SEQ ID NO: 20302 - DNA, 411 bp, Zea mays
agcttccaatcttcggactgcatccaaatacttttctagcttcttatctcttgccttgatgctttgatccacatggcccataataactcgcgaatcagttttaaggattgcccttcttattcccattgcctttagttttcgaaaccctataagaagatcttcatactcaccaatgttatttgtatatctgaaatccaactttattgcataacatgttcaggacttagagggtgcgactaggacagcagctactccttgcccgaatgccccccaagatccatcccaaaataccatccaagctttcgtgtcttttagtgcttcttcatactgaaccccttgggtccgatcagcaatgaagtctgctacacttggaattgaatgaggatctgtgcatgtatcatggtaatttgt

SEQ ID NO: 20303 - DNA, 472 bp, Zea mays
  unsure (1)..(472): unsure at all n locations
ggacacatctatacacaagctagcgaaggcactacatccacacaagagctaagcagcgacgctacatcttgtccatgctgagacaaagctaataagcaggcatctagaccggccacttcttttgcaaaatcaactaaataaagttggccgtctaatacacccttaaaagctagtgaaccatcacttcctctaaagacagacacatgtacattagtgaatagacagctatatcccacgttgcataattgactcacagatagcaggatatatccaagagactcaactaaaaacacattagatatggagcgctcattagaaattgctattttacctaaaccttttaccttgcctcgattcccatcaccgaatataattgaatcttgggaatctntattcttgacgtaagaggcgaacatcttcttctcacccgtcatatgggttgtgcatccgctgtcgataatccaacttgaac

SEQ ID NO: 20304 - DNA, 351 bp, Zea mays
  unsure (1)..(351): unsure at all n locations
tacattttatatcatgctggttatcctgaggataagattaagagaattcatgccaagaaaactcattctcaccatgcttttatttataaaaatgaggcttttagctctaggcgttctacacatgttaaaatgcctaaaaagaaatctcctactacatcaaatgatncataatgttcatttcaaacctttgatgcttcttatgtgctaactaacanatcattgcaggtagttgccaaatattgttggggcaaacacaanggatccaagacttgtgttgggtacccaaagtgcttgttctaatgtcaaggacccaagaccgtttggtacctaaaacaaggcctaaattatttg

SEQ ID NO: 20305 - DNA, 426 bp, Zea mays
  unsure (1)..(426): unsure at all n locations
tacgtggacgatgtggtgatcaaaacggagaatccagataacttcatctaagacttacagctggttttcaacagcttgagaagatatagatggaagctcaatcctgagaaatgcgtcttcggggtaccagcaggaaagttactcggatttattgtcagccaccggggaattgaagctaatccagataagattgaagctatcatgaagatggaagctcctcgatcgcagaagaaggttcagcgactcactggatgtatggcagccctgagcagattcatatccaggctgggagaaaaaggtctgccattntataaactgctgaagaaggtggataagtttcaatggacttcagaggcacaagaagctctagacgcactgaagaaattcctgacaacacctgcagtattgaaaccgcccggcgagcta

SEQ ID NO: 20306 - DNA, 325 bp, Zea mays
gaagatgatgtgtccgtccctcgtgggtgcgtgctggagcgatctgttgcgcttgacagagaggagttcatgttgtagcgttgtgccttgtttgtagtggtcaccaaatcgcggcctcaggtgactttggaagttttcgcaacagaagttgtggctgggtttggtttgcctgaagactccttcttagtcaccgtccttccccagaagattttgttttggtcctgaactccgagcacgcagcgaatgaggtgtacaacaatggttcggtgttcaattctccctctggttcgttcaagttcattcgatggtctatgatggctcatgc

SEQ ID NO: 20307 - DNA, 455 bp, Zea mays
  unsure (1)..(455): unsure at all n locations
aggttgcccttgtcggagcaagaaatgtgctgcggctacgactacttggccggcccactgccggagacgcggtccgtccgtccgcagcttctgcttctgccgcctcccgcgggccattttgcgagttccccacgggtctcgtctcgggcctgtcaacgcacgcgacctgctggaaaacgagctgcctcggctcgcttgggcctctttcttttagcgccactttcttttagcgggctggaccgggagggcccaaaggctggcttcgccttgtggtgttctggattgcggtcgtcgtctacgtgaggtccagatttatttatctatgcacccatcgggggacgatggtgactctggtagccggcagtgtaacagtacacacagacgcagctgtcgcagcagtaattgcgatcctgatgtgcgtctgattnccagtcacacaccacctgccactggca

SEQ ID NO: 20308 - DNA, 193 bp, Zea mays
agcttggtgccgatggagaaacaaaaatccttgatatcttggctgtcgaactgcttgccgttgtcgactgttagctcggacggtactccgaagcggcaaacgatgttcttgccagaagaattttgggcagtctttgatgtgattgtggaaacagccctcgcttcaatccatttggtgaagtattcgacagcta

SEQ ID NO: 20309 - DNA, 461 bp, Zea mays
  unsure (1)..(461): unsure at all n locations
tctaaagggagagcacattntaagactaacaaatgttcattttgagaaagacagggtttgtagcgcatgtcaagcagggaagcacgttggtgttcatcatccacacaacaacatcatgatgactgacaggccgcttgagctactccacatggatttattcggcccgatcgcttacataagcatcggcgggagtaagtactgtctagttattgtggatgattattctcgcttcacttgggtgttctttttgcaggaaaaatcacaaacccaagagactttaaaaggattcttgagacgggctcaaaatgagttcggattgagaatcaaaaagataagaagtgataatggaacagagttcaagaacgctcaaattgaaggctntcttgaggacgagggcatcaagcatgagttctcttctccctacactccacaacanaatggtgtagtagagaggaagaata

SEQ ID NO: 20310 - DNA, 282 bp, Zea mays
gcttatacaaagaaatttcgagaatctaaaatattgagctcatgcctaagtctggtaaaagattggtcatcaagtggcttggtcaaaatatcggctaattgatctttagtattaatgtaagaaatctcgatatcccccttttgttggtgatccctaaaaaaatgataccgaatggctatgtgcttagtgcggctatgctcgacaggatagtcggccattttaattgcactctcattatcacatagcaaagggactttggttaatttgtaaccgtagtcccgc

SEQ ID NO: 20311 - DNA, 391 bp, Zea mays
  unsure (1)..(391): unsure at all n locations
tgaagctgacattagcagttaccggcgacaacatatcgttgtgttgcttattctattccaattttaaggtaaagctttttccctcatctttntaattnttgtgatgaagcaaaaaatttctgatgaaggctattttgtacagagtatgctactaagcaaagcactgaggatgcaacaagatcttgaggataaaaagaatgagattataatcgagggcctagaaaagaaaatgtatgatcatgaagcttctctggagaaaaaggacttccttcttcagacaatggagggttcattggcagaagcccaaaccaaagttgctagattaaatgatgaactccttcgtaaatcagaaagcttcgaacaagaaaagaagaattntgatgtgaggtgt

SEQ ID NO: 20312 - DNA, 428 bp, Zea mays
  unsure (1)..(428): unsure at all n locations
gagagcgcatgcgtgcgtgcacggctggtaattatatctcatgcgtgctgcatgcctaacttaattatctatactatacccgtactttgatttgcaactgctcattatctgccctgccgctgtctgtctagtagtactagtactgtgcccaaggattattagtagctggtgagctagctatatatgcatgcttagtagcagccgtagtagtgactagtgagcaaattcttgtactttgatgtaagcttgcactgtgtggtcatcgtctctgctctgctttgtttgcgatcggtgtttggctgttaatccaagctagctagctggatgtgtgtgagagggttttgcaaataatggtgggagatggatggatggatggatgggcagacanagcatcagaggttcaatatattatctgaaagatactacta

SEQ ID NO: 20313 - DNA, 420 bp, Zea mays
  unsure (1)..(420): unsure at all n locations
cacattttaagagtaacaaatgttcattttgagaaagacatggtttgtagcgcatgccaggcaggaaagcaagttggagttcatcatccacacaagaacatcatgacgaccgacatgccgcttgagctactccacatggatctattcggcccgattgcttacataagcatcggcgggagtaagtattgtcttgtaatagtggatgattattctcgcttcacttgggtattcttnttacaggaaaaatctcaaacccaagagaccttaaagggattcttgagacgggctcaaaatgagttcggcttaaggatcaagacaataagaagcgacaacgggacggagttcaagaactctcanatcgaaagcttcctcgaggaggatggcattaagcatgagttttcttctccctacacgccttaa

SEQ ID NO: 20314 - DNA, 139 bp, Zea mays
cttaaatatttaaaattcagttacctattgaatttctcactgtgaactgtttatcacataatgattggaccaagatcataaaaggtcctcaatagactttataacaccttatgtggttcttatcagcttaactcaattc

SEQ ID NO: 20315 - DNA, 438 bp, Zea mays
  unsure (1)..(438): unsure at all n locations
tcctcatctacactggtgcatccctcaactcaagatggtgaacatgtacctcaagaagaaaggaaggatcaaggaggagcacatgaagaatatgataaggaggaagaagcgtcacaaattcctccaactcaagttcgatccacaatccaaaggaatcatctagtggatcaaattctaagtgatctcagcaagggagtaacaactcgctcatgcttagccaatttttgtgagcattactcgtttgtttcttctattgagcctttcagggtagaagaagccttgcaagatccggactatgtgttggccatgcatgaagagctcaacaacttcaagataaatgaagtttggagcctggtgccatgtccaaagcataacgttgcgtgaactaaatgggngttccgcaacaagcaatacgaacaccgagtggtgactaaaaac

SEQ ID NO: 20316 - DNA, 316 bp, Zea mays
  unsure (1)..(316): unsure at all n locations
gcctagctacgggtgcataagtttcaccgaaatccaaaccttcgacttgtgaatatccattggccacaagtcgggctttgtttcttgtcaacacaccatgctcattttgtttgttgcggaagacccactnggttcctacaacattttggttaggacgaggaactaaatgccatacctcatttctcgtgaagttgttgagttcctcttgcatcgccagcacccaatctgaatcccttaatgcatcttctaccctgtatggctcaatagaagacacaaaggagtgatgttcacaataatgagcaacacgagatcaagt

SEQ ID NO: 20317 - DNA, 371 bp, Zea mays
tctctataggcgaacacattgtacgactaaccaatgacatgtttattttacatgattagtggcgcatgtcaagcatggaagcatgttggaactcatcatccacacaagaacatcatgacgactgataggccacttgagctactccacatggatctattcggctcgattgcttacataagcatcggggagagtaagtattgtcttgtaattgtggatgattattctcgcttcacttgggtgttctttttgcaagacaaatcacaaactcaagagaccttatagaaattcttgagatgggctcaaaatgagtttgcattaagaatcatgaagattacaagcgactatggaacggagttcaagaactctcaaat

SEQ ID NO: 20318 - DNA, 359 bp, Zea mays
tctcctcgctccacccgctggctatatcttggctactcttctgaccacaaagggtaccggtgtatggacctcacctcccaccgcatcatcatctctcgtcatgtcggctttgacgaagatgtgttttccctttgtggatacaccccacccaccgaacttgactccctccttgagttcgatgcgattccatccccaccttggggtcaccgtcttgcgccgttacctgcttctcgtgcgggccccacgaccttttatgttctcgctcgggcccgtgatccgactggccacgcgcggcccgtagacccgctgcccgacgcggcccgtgatacggcttatcatcacccctccttgtacatttt

SEQ ID NO: 20319 - DNA, 428 bp, Zea mays
tggatgctttgttttgctttcgagaaacacttgaagcatcaggacttctgtgaatgattttgtacagtgttcgcaaatatgcgcatagcataataacatgtgtaggttttgtgaacgattttgttgaggtgctcgttgacggtttatttgatgtggatctatcattgtgcaatactaattaaatatgaatatctatgtgattatatataacaattgttgaatgctaattaatgcgatattatcattattaacaactataactaggggcaactttctgttggttgctaaatgtatagtataacgactctgaaagctctcttgtgagttttggagtttggatgacaactcaattaaaggactaacaggtgtactaagtgttgaacatgtgcttaaagtaaagcctacatggttcaacacaagtgaacaaa

SEQ ID NO: 20320 - DNA, 409 bp, Zea mays
  unsure (1)..(409): unsure at all n locations
tctccaaattntcctaaccctagtcaaatagcacaaccatttttctttctactattgagctnttggccaaaactaacattaaatcagagctttaaaatcttccttaataccaaggggttttatatttctcttaaataggttacattaattagagtttggcaaaattggtttgaccaaatttggatgaactaaacataagttatgaatttttaaagtctctgttcaatttaaaaaatagattttaaaaagagtttcctggaaaaacggtttacaccggggtccctgagtttaaaccaaatcaaatctcgcagatctgcccccgcgccactgttcctctgtgtctctgacatttcacaaaaacccctgaccttctcttcctctcacccgcagtgctttccctaactgaaac

SEQ ID NO: 20321 - DNA, 337 bp, Zea mays
  unsure (1)..(337): unsure at all n locations
gcaagggattagtggattagtttatcaagtggccaaatcttgattctaatattaaccaaagtttaagttcacaccaaaacctattaaatgcagaggggaaacattacaaaaaggcccctcaaagaccccaaatccactccttaagtagagagcacactagagctcactaatcttctctacgtcaaagtttaaccctaatctaaagatcagacgtgttcacttagtaaatggcgccaaaaccacttggtttgaataccataaaggtgccaaactaccgaaggataccactggaaaaatttgaacccgagccanaaccatttgacatgnattgacatca

SEQ ID NO: 20322 - DNA, 398 bp, Zea mays
  unsure (1)..(398): unsure at all n locations
tgccttcgcctcagtgtaccacccgcaatccaacggagttgtgcaacacgcaaatggcaaaatttttacagccgtcaagaagatgctcctcgacgacaaaaagggtaagtgggccgacctgttacctgaagcggtctgggcactgaacacgattgagtgcaaggcgactgggttcacccctttccgccttctatatggatcggaggccatgaccccgcaagaaataaaacatgggtcaccacggacagtcccgtcagccgtccctgacgtggacgagcccacttcgaaagacctcatcgacggagaccgcatcttcgccctacaggctctatgtgtgttatatcttcatcttcaaataattctgcacacacttanggagagtctntcttacatactga

SEQ ID NO: 20323 - DNA, 390 bp, Zea mays
ctgcagcttatatagaaatatgggtgacccctctattgtaaaatagaagggagttcaccagcatgtggaatgtctccactacttaaaatgttattcagagctgaaaggttaaactgatgaaagaaatacatgcatgcctgtgtggatctcacatcagatctaggcctttgttggggaaaagttttcgtcaaggattttaatggccgaacgcagcctttgatgcagcggaaatagttcaaaaatgcgaatggtgtcaaaaatgtgcaagagattaaaaacattctttgtctctgactcaattaatacagcccacttgggcattgtaaaggtggtgccttgatttgctaagcccactttcaccaacacaaaggaatttaagatatgttgtgg

SEQ ID NO: 20324 - DNA, 434 bp, Zea mays
gggtcattgtattgctaactgtcccgacaatgatattgactattatcacgggagcacgagggaagagaagatgcattacaagaaggccaatggcgaagcacatatcggaaaagagtgggattcggattgctcctcctccgactccgacaatgaagaactcgccgccactgccttcaacaagtcatccctcttccccaatgagcgtcacacatgccttatggcaagggagaagaaggtaagtaatcaaaacaatgtcacttatgattcttccagtgatgatgagtctagtgatgatgaaatagattactctaatttgttcaaaggattggatagaactaaactagataaaattaatgaatcgattgatgccttgaatgaaaaagatagactcttataacaacaaaaggaccttttgtatgaagagcattgacaat

SEQ ID NO: 20325 - DNA, 352 bp, Zea mays
  unsure (1)..(352): unsure at all n locations
ctccctaattgtctgtgtttcttggttccaagcaattttctttttgaccctacaacttgttgctcattcaaacattcgcttccttttgagcgacaggggttagcacatggtgatatattatccaaatgtgcacttgtgcaagaatgaggttcacatgaatttaagtttgtaattacaacctcatgagcaacatcaagcatgatatggtcatcaactagtttactatgagaatacgacaacatatcatacttttcacctagagcaagttttcttnatttaatcattctacttgactcctaagcatagaaatttcacgtttaagtngagcaacattagataatacatcatgaat

SEQ ID NO: 20326 - DNA, 432 bp, Zea mays
ttaccgacctataaaactcagcttacatagagagattcacttgaagaccgcataaagaattctaatatatttgaagtatacccccaatattggtctatggtatcccaaaggtgctcaatttgaattaattggatattcggattcggattatgcgggttgcaaagttgataggaagagcacctccgattgttgtcaatttcttgggaggtctcttgtttcatggtcttctaaaaagcaaattttcgttgctctctctaccgtcgaggcggaatatatatcggccggtaattgttgtgctcaattattatggatgaaacaaactctattagattatgggaatcattttaagaatgtgcctctcatgtgtgataatgagagtgcgataaaattggctacaaatctggtccaacactcaagaacgaagcatattga

SEQ ID NO: 20327 - DNA, 440 bp, Zea mays
  unsure (1)..(440): unsure at all n locations
tttaaaacaagcaccatctcttaacatagattttctatggataaactcaacacaagagatgacattagtagcacaagcactagtttcttatttagcaaccctttatatgtggaaggcaagcgagttgctaaaatataaaaacctcataatatggactaaatttcccttgaaccctcatgcacaatatattttgaatgacatggataatatgcatggttgttcaatgaagtctaaagggctgacttaatccatattatggtgagtgtctaataaagaagaatcaaatccaaattaactagatagagaatacgtcacantaatttggattgttcaccatatgataatattcattcatcttccaattagacctttatttcataatcaacaactaatatatatcctcaagtgcttctttntccttagtggctacacaagtcaca

SEQ ID NO: 20328 - DNA, 449 bp, Zea mays
  unsure (1)..(449): unsure at all n locations
ttagaagaaaactccatatgaatagctcattggtagaaagccttatatctcatattttaaggtattcggttgcaaatgttatattttaagaaagggaagtcggctttctaaatttcagaagaaatgtgatgagggttttcttcttggatattcatcaaatagtaaagcttatagagtcttcaacaaaactcatggtattattgaagaagcatatgatgttgaattcgatgaaacaaatgggtctcaagatgaaagtgataatctcgatgatgttgggggaactcaattgataaatgcaatgaaaacaatggacattggtgaaataaaaccaaaggaagatgatgatgaaaatagtgtggttgtcattccttcatcctcaactcaaaatgaggaagatcaccanagccaactacatgatgaaactatggatactcatgatcagttacttc

SEQ ID NO: 20329 - DNA, 441 bp, Zea mays
  unsure (1)..(441): unsure at all n locations
atataagtgttaatgttggttcactccgaaacaacataccccgcgtgcatgcagccaacataaaatcaaagaaattgaatggggaaatttgttaggggatttaactatgtgagttgattagggaatttgattttttgcagtaacgaacaccataaatcaagggattgcatacgcgagattntatggaatcgtaacaaatgattttatttctgagagttgtttccttttttgggaatttctattctcttgcataaatgtgtgtcgtaaatatcttacacatatggtgtaaatggtatgaacacaatatgcatacttgggtaggtaacgagataatgcataaatataataaacccttgaataaaatgtgcaataaaatatcataaatagacaatagatgggaaggaagctataaactgatattatgtcataaaatctattgat

SEQ ID NO: 20330 - DNA, 457 bp, Zea mays
  unsure (1)..(457): unsure at all n locations
taggctntagattctaggctaattgaagataaatctgacatacttgtctcatatatgaacggtatgggttcaagtatctttgatatatattagtgactttgaagtgcagatgacaataatttcacccctctcgattcctttacggtgacgtggtaagttgtttatggcttaatgcttgatataatttatttctgaaaatgtgatattgttttattaatgcggtaaatatcgctgatcatttgtgagaatgaagttgttattatgcttgtgatatacaagtatgcctatgatgctttcactatggttttcatggttgagttttattacaataatattgttatatatgcttgactgacgatgtttctaatacgaatgtgaattgcatgttctgggtacaacgtaatcattaatttgaatttaagttgttgagtggctggtggatagcttcaactatctt

SEQ ID NO: 20331 - DNA, 379 bp, Zea mays
agtactttgcctaacatggcctgatcggtgataggcgcgctgttttagcacgtctgctgacgcgcccactgtcaatccaccttcagtcacatcaactgccatatctgtccccgcggctgactgatccatggcccccacgcctggaggtttcatcgggccacacgcggggcgcctcgttgtcgctgcatttgtttaaaataaccttttatcttctgcagcagccccaaagaggcacgctatcgcgtgcggcggttcgcatcccgctctttctgcacccgaaatctggcacacgaactgtatgactcatggacccgggcccccatgtcagacactgtgttgcctgggtcctaagtgcttgtcgaacgggatttcttgtagc

SEQ ID NO: 20332 - DNA, 320 bp, Zea mays
  unsure (1)..(320): unsure at all n locations
agcttcttncacgttgtactaaaacatttttttttccttgtatgaataagttttcgcctttcggattctccttcgcctttatttcgtcatcggtttcctgtgctaagaaatggtctactgagctgtattgcacacaagggcatgcatagtggtttccatcttttggcagcttaatggtactttnttttttattatttgggctctgtctttaacgggtatttattagtagcatgtaattgaacatctcatgaagcaacatgaatgaaattaataaagtaggaagaacacgtaagaaatatttactaataagctaataattg

SEQ ID NO: 20333 - DNA, 434 bp, Zea mays
agaggctgcttcgttcttccaacttggtgactcggtgagacagctctcaacactgcaccatgtctgatctggattactattttatcactggtttgttccttatctttgtgctgttacagtactatgccatacaattcaaatccaacagctcagagcagaccttgtgctccccaatgttaacttctcttccctactgactgcttcaggttgttgggcgagattgggctaagctctcatgatttgatttgctccccatctttgtgccgttacaacatcatgtcataccatttaaacccaacaggtcatctgaaacctggtcctccctatgccttcttctctcttcccttccctgctggctgctccctggttgtgggccagaattggatgggctcccattcaaagcagaggagtagcagtgtagcaccaccaaatac

SEQ ID NO: 20334 - DNA, 247 bp, Zea mays
  unsure (1)..(247): unsure at all n locations
gagaacaccattcactgtagacttgcttgatgaaataaagaaagctcatgcacatattttcaacattcttctcccagtatttgaagatggacacctgacatactcacaagtacttcctgacatccgccattatatnttttgtgcaaatcctttcagaacttagagggttatactagcccaatcatgcacctaaggggttatactaaccactcccacagagggtgatatacttttactggtttctacc

SEQ ID NO: 20335 - DNA, 459 bp, Zea mays
  unsure (1)..(459): unsure at all n locations
tcctccacacagcttcggctctgtttcatccttcgttctccttgagtttcttcatatagcgattntgacatgtctgaagggtccatgtccgaaagtacctgttcatgtattacactccagaaacattgtcaaatcacgtttttgaggaccttcggaagccgaaggcccccaacagtagccccttgcaatatntaattgttaggataataaattcagattgcgatatggacgaaggccctaagccgaaggtccgaaaaaacaccttccctttgctagaatagcaacagtcaatgacaagagggaccctcccatttgcatcgccctgtgtgtataaatatgatccgaccgcgaactcatttggtacgctntcttgccatctagcttgcctgctcaaatagctctttgccttacaacacttgtcgagcttctagatttttagcttcggtcgtgcagcacatt

SEQ ID NO: 20336 - DNA, 447 bp, Zea mays
acactgtagaactctcgagcttactgccggaagtgccatcgaggaagctacctcactcttctcatacacccatagtctcatggcaaagggagatgctcatgtaaggatcatcaccgagtttaatgatataagctgatgatgatgatctcgctgatgttgatgatgagggctattcatatgatgatcttgttagaatgttgcgtgatgccgatgactacatgcacagagaagaagattaacttaagtccgtgaaggaattggataaaacctccaagtgtctttggaggagctcaggacctctcacagtgacctctaccagaactgcgagaagctagcggatgctccataatcatctattgtgcatgaacgtgatgtggtcactaaagatgttggagacacttgtgactgacctgatagtctgatcagagaaccactacctactaactc

SEQ ID NO: 20337 - DNA, 277 bp, Zea mays
agcttctggtactcatcagcctcagacttcttcttatttatcctcttcttcttgtcagcgattctagcacgctttctctggagggtcaagggtgtcacaagccgttggatcttatgtgccttgctgacctttttgcctgccaaagaaacatacaagttatcttgttgtgggtcgaaaacttcagaaaactgtggctcattgtcaagaaacccatccagcgtataacaagcagagtaccaagtagaagagtaagtaccaagacaaagcatgcaagcac

SEQ ID NO: 20338 - DNA, 374 bp, Zea mays
  unsure (1)..(374): unsure at all n locations
ntatcanatggacgtgaagagagccttcctcaatggaccaatcaaagaggaggtctatgttgagcaacctcccggctttgaagatagtgagtatcctaatcacgcatataaactctctaaggcgctttatgggctcaagcaagccccaagagcatggtatgaatgcctaagagatttccttatcactaatggcttcaaagtcggaaaagctgatcctactttatttactaaaacacttgcaaatgatttgtttgtatgccaattttttgttgatgatattatttttgggtctactaacaaatctacatgtgaggaatttagtatgatcatgacacagaaatttgagatgtctatgatgggggagttgaagtact

SEQ ID NO: 20339 - DNA, 400 bp, Zea mays
  unsure (1)..(400): unsure at all n locations
tagtgaggtaattagaanatttaatcccacatttgaaccttattagtgctagccagagccacctagagcacacaccgcatgcattaagcttctcttggtcaagtgaaagtctacgacttgttactcttggtgatcggcatcacctatacggcttggtggtgttgggagctcagtgatcaccttggaggacttgttggtgacccagctcgtgattgtacgcggtcgtgagagatccaccacgccggagtggcaaaggatcatctcatagtgagcacttggttcttgcaaggaccaaggggagcgatacccttgcgcgagtgctccaacgatgactatgggagagtgccgactcttctatacctcgagaannaatggaggagtcttctaaatttgtttacat

SEQ ID NO: 20340 - DNA, 452 bp, Zea mays
  unsure (1)..(452): unsure at all n locations
gaacttcaagtgcaacttgaaaattgcaagaacatcaatgcctnctctttagtatttgaatctaagtctagctctaatgatgattcttgcaagcattgtgccaaatatcatgcttcttgttgtctaactaaccatgcaaggaagcatagcccacaggtgaaggtcaaagaaattttgaaaagatgctctagcaatgatgggttaaagaaagttgaacccaagtacaagtcccttaagcccaacaatggaagaagggggcttgggttcaactcatccaaggaaaaccctagcacagtgcataaggggtggagatccnccaagttcatagagggaaccactctatatgatgccttttgggaggatccactctcanatgancagtcatctcangtaaagggttaacttgagttccacannagagtaagatgaaggaagtgggatcctcaagtgga

SEQ ID NO: 20341 - DNA, 315 bp, Zea mays
  unsure (1)..(315): unsure at all n locations
ctctcaaatggcaaaattntcacagctgtcaagaagatgttcctcgacgataaaaagggcaagtgggccgatttgttacctgaagcggtctgggcattaaacacgactgagtgcaaggcgactgcgttcactcctttccgccttctatatggatcggaagccatgaccccgcaagaaatgaaacatgggtccccacggacagtcccgtcagctgtccccgacgtggacgagcccactttgaaggacctcatcgatggagaccgcgtcttcgccctacaggctctaaacaaataccaagcccaaacaaagcatggc

SEQ ID NO: 20342 - DNA, 331 bp, Zea mays
  unsure (1)..(331): unsure at all n locations
acatgtgccaagcggcgatgccacagtttatttatgcaagtcttagcaaataagcatgcatgtagaccagcctcttctcttgcaaaatcaacctaataaagtttgccgtctagtacactcttaaaagctagcgaaccatcacatcttctaaagacagacacatctacatttgtgaatgaacaattgtatcccatattggataattgactaacatataacagagtatatccaagagactcaactaaaaacacgttagatatagagtgctcagatgaaatagcagatttacctaacccgtttaccttggcttggntgccatcaccgaatatta

SEQ ID NO: 20343 - DNA, 417 bp, Zea mays
  unsure (1)..(417): unsure at all n locations
gcttggtattaagatgttagtgcaatagaaccaagttgctatcgagcgagctcttgcgaatcacagtnatcacagagagagacaacacaagagacacagtggtttatcccgtggttcggccaagtataacacttgcctacctccacgttgtggcgtcccaatggacaagggttgtactcaacccctttcaagtgatccaatgatcaacttgaataccacgatattcttccttatagttttcttcccatttgcgaggaatctccatatagtggagcctctcgcccttacaagatngatctcaaagaaagcacggagtaagggtgggaagagcaacgcacactagaattaaatccacactgaaaacacgcacacaagtgagaagatgagcacacaatacacgcgcggcgagtttacaac

SEQ ID NO: 20344 - DNA, 380 bp, Zea mays
  unsure (1)..(380): unsure at all n locations
ctaagcttctaagggagagcacattntaggattaacaaatgttcattttgagaaagacaggatttgtagcgcatgccaagcaagaaagcaagttggtgctcagcatccacataagaacatcatgacgactgacaggccactggagctcctacacatggacctattcggcccgattgcttacataagcattggcgggagtaagtactgcctagttattgtggatgattattcttgcttcacttgnngtattcttntgcaggaaaaatctcatacccaagagactntaaaaggattcctgagacgggctcaaaatgagttcggcttaaagatcaagacnattagaagcgacaacgggacggagttcaagaactcacaaatcg

SEQ ID NO: 20345 - DNA, 518 bp, Zea mays
  unsure (1)..(518): unsure at all n locations
ggatcttaagtcaccgcggctgcagcttgtaatctttttcatatttatgtccatccatcgactagaagaaagagatgagctgtaacggcatatggtgtattacgtacactgggaccttaacctcgtgtgttggttttaaggcatgcttatgttcaacataataccggcctgctcccttgtctctcctaaaactcacattcctagtgtcggttcgcaaccacgttcggaatagagggaccatgtacaaagtataccatctcgaatgaagaaaagttctatataattcaaattgtcatctgccaacataaaccagcagatcctagacgtgttcattattcccaatggaatgtcgtagcagagccatttcagggccgtgacgctggagctcatgattagcgatcggataggaacaaaagcattcgatctggaagcanaacagatcgcgtcgcgtcaaacacgctgttccacgtactactactatagatcttcncgatcttacgctgatataaataccgaca

SEQ ID NO: 20346 - DNA, 267 bp, Zea mays
tctggacgttcttgatacgggccggaggcctcatcgactcaatcgctttattctctccggggttgcttcaatgccccggtgcgaaaccaggaaccccagcaacttttctgtggagacaccaaagacacacttgtccggattcagcttcgtgtgtgttgcccgcagcttgtcgaagaccaaggttaagtcttccactatggtcgaccctctcttattcttgaccatgatgtcatcgacgtataccaccatcttgttcctcatcaggtt

SEQ ID NO: 20347 - DNA, 452 bp, Zea mays
  unsure (1)..(452): unsure at all n locations
ctcagcttcngaaaattctcgaaacatagaaagnttttggtgcctctctaatgaagatacacttcttctcgcatgatcttcgagccataacacgattttctcttttccaaaatattctccgaagatcaatactgtatccccttcttgttccacatgcaatatgatgtatgatgcttatgttatgcaaaatggtgtgatgatgttatgttatgcaaaatgatatttgtgccgcagatacatatccctgcaatagagcacacacactttntatatcagcgttgacttttcgctataagcctcccttaggagcttcttcgtcttttactttcagcggaatcagcgtttatttttcggtgaaagctcccttaagagcttcttcgccttttactttcagcggaatcagcatttatttttcgctgtaaagcctccttaggagcttcttcgccttttac

SEQ ID NO: 20348 - DNA, 405 bp, Zea mays
cttcattcccacatgtgctatattgtgatgccacagccagcccatgctagtcttagcaattaagcatgcatctagaccgacctcctcttttgcaaaatcaactaaataaagtttgtcgtctagtacacccttaaaagctaatgaaccatcacttcttctaaagacagacacatctacatttgtgaataaacagttataccccatattacaaaggtgactcacagacaacaagttatattcaagcgactcaactaagaacacattagaaatagagtgctcggatgaaatagcaatttttcctaaccctttcaccttgccttggttcccatcaccgaatatgattgaatcttgcggatccttgttcttgacgtaggaagagaacatcctcttctccccgtcatgtgg

SEQ ID NO: 20349 - DNA, 432 bp, Zea mays
  unsure (1)..(432): unsure at all n locations
actcaagcttctaaggaagccatttatgataacaaatgttatcttgttaaataaggatttgtgcgcatgcaagcagggaagcaagtgtgctcatatcccacaagacatcatgacgactgacagccactggagctctacacatggacctattcggcccgatagcttacataagcatcggcgggagtaagtactgtctagttattgtggatgattattctcgcttcacttgggtattncttttacaggaaaaatctcatacctaagagaccttaaagggattcttgagacgggctcaaaacaagttcggcttaaggatcaagaaaattataagcgacaacgggacggagttcaagaactctcatattgaaggcttncttgaggaggagggcatcaagcatgagttctctttctcctacaccccacaacataatg

SEQ ID NO: 20350 - DNA, 493 bp, Zea mays
  unsure (1)..(493): unsure at all n locations
tgcaagcttgtgaaggttcttcatcccaacatgggctattctgcggtgccagagccaacccatgttagtcttagcaattaagcaagtgtcttgttcagctctatcaaaatctaccaagtatagctgaccctctaatactcccttaaatgctattgaatcatcacttcttctaaagacagtgacaccaacatcagtgaatagacagttgtagcccatttgacatnaatgagatacagaaagcaagttgtaatctaaagaatcaacaagaaaaacatttgaaatggaatggtcaggtgaaatagcaattttacccaaacctttgaccaaaccttgatttccatccccgaatgtgatcgctctttgnggatcttggtttttctcatatgaggagaacatctttttctcccctgtcatgtggttggtgcacccgctgtcgatgatccaacttgagcccncggatgcataaacctacnnaaacaagttagttcttgac

SEQ ID NO: 20351 - DNA, 373 bp, Zea mays
  unsure (1)..(373): unsure at all n locations
tcaaagggagaacacattctatgactaacaaatgttcattttgagaatgacagggtttgtagcgcatgccaagcaggaaagcaagttggtgcccatcatccacacaagaacatcatgacgactgataggccgcttgagctactccacatggatctattcggcccgattgcttacataagcatcggcgggagtaagtattgtcttgtaatagtggatgattattctcgcttcacttgagtggtgcttcttgcntgaaaaatctcaaacccaagaaaccttagaggggttcttaagacgagctcaaaacgagttctgcttaaggatcaagaaaagtagaagcgacaacgggaccgagttcaagaactctcaaatc

SEQ ID NO: 20352 - DNA, 411 bp, Zea mays
  unsure (1)..(411): unsure at all n locations
agcttatatttaatactcataattgctattcttacattntatgtgacacgaactaaactttagtcagggaaactaaactttattgagggaaactaaacaccccttatatagaagactctacggctatggtgtctcgctctactgtactggttgctaagattctatgctactataattgtgcccccctctcattctttatgttcatgtcattggaaaattgtcttctcctccaaggttgccaccttcatcaaccttcgccaatatctataaactggccgctttgaggtgttgttgtacctgagcaagtactccccacttacccctttcgggtaacaccctagcttccctaattaattagttaagaccagagccataatagtctttaatagtctctgtgggtgcactattttc

SEQ ID NO: 20353 - DNA, 407 bp, Zea mays
  unsure (1)..(407): unsure at all n locations
gtacgtcgttagccggcttctcagagtcaagctaagcactaagagagtgaatcaatgagttggcatcatctaaggaagtagaaacccgagccaggtcgatctgaccttgagaatacttctcttcgagttcagagtaccgccgagtcacatctaacaaaaaatagttgaagaagggcacacagtttaaaatagactagtcaagaagcctagaaagaaacaaaggcactaactagcattngtcantttcaaatcagatatctgcttctgaagtaacagcggattccactgtggcagatacagagcttcttcggtgatagacgcactctgtgatctcaattgaccagccatcctgttgaccaaagcgctgtattgaaaataaatgagtcaaagacgatacttgccaggag

SEQ ID NO: 20354 - DNA, 388 bp, Zea mays
  unsure (1)..(388): unsure at all n locations
gagctngaagccatggtaagtagcatacgctaataatatactaattgactcaagcctagctacgggtgcataggtttcaccgaaatccaaaccttcgacttgggagtatcctttggccacaagtcgagctttgttccttgtcaccacaccatgctcatattgtttggtgcggaagacccatttggttcctacaacattttgattaagacgtggaactaaatgccatacctcattcctagtgaagttggtgagctcctcttgcattgccaccacccaatctgaatcttgaagtgcttcctccaccttgtgtggctcaatagaggaaacaaacgagtaatgttcacaaaaatgtgcaacacgagatctagtggttacccccttatggatg

SEQ ID NO: 20355 - DNA, 495 bp, Zea mays
  unsure (1)..(495): unsure at all n locations
agcttagcanaagaaatttctagaatcaagaatattgagctcatgcctaagtctggtaaaagattgttcatcaagtggcttggtaaagatatcggctaattgatctttagtattaatgtaagaaatctcgatatcccccttttgttggtgatccctaagaaaatgataccgaatggctatgtgcttagtgcggctatgctcgacgggattgtcggccattttgattgcactctcattatcacatagcaaagggactttggttaatttgtaaccgtagtcccgcagggtttgcctcatccaaagcaattgcgcgcaacaatgtcctgcggcaatgtactcggcttcggcggtggaaagagcgaccgaattttgcttctttgaagcccaagacaccaaggatcttcccaagaactggcaagtccctgatgtgctcttcctattaattntgcaccccgcccaatcggcatccgaataaccaattaaatcaaatgtgga

SEQ ID NO: 20356 - DNA, 447 bp, Zea mays
  unsure (1)..(447): unsure at all n locations
tctanagggagaacacattntatgactaaccaatgttcattttgagaaagacaggacttgtagcgcatgccaagcaggaaagcaagttggcactcatcatccgcataagaacataatgacaaccgacaggccacttgagctcctacacatggatctattcggcccgattgcttacataagcatcggcgggagtaagtactgtctagttattgtggatgattattctcgcttcacttgggtattctttttacaggaaaaatctcanacccaagagaccttatagggattcttgagacgggctcaaaatgagttcggcttaaggatcaagaaaataagaagcgacaacgggacggagttcaagaactcacaaatngaaggcttccttgaggaggagggcatcaagcatgagttctcttctccctacacgccacaacanaatggtgtagt

SEQ ID NO: 20357 - DNA, 390 bp, Zea mays
  unsure (1)..(390): unsure at all n locations
tctgtgtgtacattnttcagattggaaaatggatggtctccatctctctctatatgcatttaanagtaagtaccgaggaaatctgctacactatccggatattggtttattatcccaaatcgtgataaaggagaatcgcttttttagatggctgaaatacaataagtaccgaggaaattgtctgatactggagtgtagacttatgctgaaggaatgtttagaacaaacatgatggtgtcaacatgaaagtgagatatatgaattaattatggaggattgagtgtctgtcagtccatgcaacatgcaaatagcgtatatctggtgaggcaacgaatgggggaaataataaataaatactaacaaaaatatattntcctgaaagcttatact

SEQ ID NO: 20358 - DNA, 475 bp, Zea mays
  unsure (1)..(475): unsure at all n locations
aagtcacctgcggcgtgcaagcttctgctntgggtgactccttcgcccctcgctcttctgatgtacctcttcaccctcctnctggagatgtcaatgagtggtaccaccaggcgtatggggtacctttctcttcagccgatgacgtcgacgaagaaacctattttgatgatccggagcagtttgacccaccctcatatcgcggggatccgggccaatcgtccttctaccctccgccctatgacccgtctggcagtgctccttctccggcccagtctggagaggaacattntgcctacgacctggcgcaacacctctttgctcctcatcaacctnctccccactggtgatccttggattgacgcctctctctctctctttttggntcttggtgccaaanagggggagaacgtttattattcagtactttattnntgtaatgaacacttggtctgtaataactactatttgctgcatg

SEQ ID NO: 20359 - DNA, 227 bp, Zea mays
tatttagagtacaatgtcacttcggattacttgttttagcgcacgccaacaggaagcagtattgccatattctctcaaaacatatgacgactgacaagcactggagctctaacaggacctattcgcccatcgcctactagtctggcgggagaagactgtctcgtatgggatgatttctagttgactgggattctttgccacgaaaattatccttctaaactgaatgg

SEQ ID NO: 20360 - DNA, 476 bp, Zea mays
  unsure (1)..(476): unsure at all n locations
catgtgagcatcgtactacaattaatcggacttgttcaaaaattgcgaaaaagtaacatatttttttgttcaatataccaggaattaggaaatgttacaaagcatcaaagcgcttttttttaaacatgcaaacaaatggttttaggattctattcagctggtatatgtctccactctttcatttaatttaatatccatatgtagctaatataatacttatgtctgaaaaaaatacattggtgtgctatagtnctcgtataatttatagttacatgtatattcttaagcgaatccattgacaatatttcttaagcgaatccattaacagctaacacgtccacttgtatcatcacgcataacacgtcttcttgcacaacttcctcggcgtgacgatccaacagcatgggacattggaacatnctttcatcttccttcaaaccaaacggcccgccgcgtctcctggtcttcccacgcac

SEQ ID NO: 20361 - DNA, 314 bp, Zea mays
  unsure (1)..(314): unsure at all n locations
tggagaagcagaaatccttgaagtcttggctgtcaaactatcttgtcgtgtcaactgtgagttcggacggtactccgaagtggcaaacaatgttttgccagaagaatttctgtgcagtctttgatgttattgtggaaacagccctcgcctcgatccatttagtaaaatactcgacagcgacgaaagtgaacttgaggttcccctgagccgtgggcaggggcccgacgatgtccaggccccagcgctggagaggccatgtgtgggcgatcagttntgtgaattgcgaagggctgcctgatcgaggagaaaacttc

SEQ ID NO: 20362 - DNA, 524 bp, Zea mays
  unsure (1)..(524): unsure at all n locations
ccggatcttaagtcacctgcggctgcaagcttccataagggcatgagcaaaattcatgggtagataattaatgctcataccatttgctctaacaatgtacctatgtgcttcaacaaagaaagatcaaagagaagcgatagaaggtgctatggatgcaaggagaagggtcatgaaattgattcatgcccccacatgaagaatcaagaccttgcacgatcaagaaagatgaccatcaagaaagatgaaagcaaaaggcaaatgcattgcaaggacaagcaccacatttgctacaattgccgtgaaaaagatcatatattcaaggtttgtccaaagggtaaaattcctaagcctaacttgtcaatacattcagatatacttagaagacccaaatttgactcttgtgttagaaagatgatgacttcaccacattctangaccaaggctatttgggtgcctaagtccttattgactaaccttgatggacccatcatgagatgggtaccaaaatatacttaaataagttt

SEQ ID NO: 20363 - DNA, 430 bp, Zea mays
  unsure (1)..(430): unsure at all n locations
acaatgtggaccagttgcataccgactccagttacccgaaacattgtctactgtacataatgtgttccacgtgtctcaattgaagaagtgtcttcgggttcccgatcaaacccttgaagtaacggatgttgccttagaaccagacttgacatattctgaacatcctattcgagtcttggatcagaaggacataattacccaaaggaaaactctcaagttntacaagatccagtggaaccaacatacagaagatgaagctacttgggaaactcaagactttttagataagaatttcccaggctttttagcttcgtgtaacttgtaagatgtgtacatttgttgtaatagaggaatgaaacccataccacccctgctttgtccanaaataaggaaataaaaagatgacacgtntccttttccattacttacc

SEQ ID NO: 20364 - DNA, 403 bp, Zea mays
  unsure (1)..(403): unsure at all n locations
cttcatccncacatgtgctaaacggcgatgccacagccagcccatgctagtcttagcaattagagcatgcatctagaccgacctcctcttttgcaaaatcaactaaataaagtttgtcgtctagtacacccttaaaagctaatgaaccatcacttcttctaaagacagacacatctacatttgtgaataaacagttataccccatattacaaagttgactcacagacaacaagttatatccaagcgactcaactaagaacacattagaaatagagtgctcggatgaaatagcaatttttcctaaccctttcaccttgccttggttcccatcaccgaatatgattgaatcttggggatccttgntcttgacgtaggaagagaacatcctcttctcccccgtcat

SEQ ID NO: 20365 - DNA, 363 bp, Zea mays
  unsure (1)..(363): unsure at all n locations
agagcacattntaggantaacanatggttcatttgagaaagactgtanttgtagcgcatgccaagcanggaagcaagttagtgctcatcattcacacaagaacatcatgacgactgacaagccactggagctcctacacatggacctattcggcccgatagcttacataagcatcggcgggagtaagtactgtctagttattgtggatgattattctcgcttcacttgggtattcttttacaggaaaaatctcatacctaagagaccttaaagggattcttgagacgggctcaaaacaagttcggcttaaggatcaagaatattagaagcgacaacgggacggagttcaagaactctcaaatt

SEQ ID NO: 20366 - DNA, 490 bp, Zea mays
  unsure (1)..(490): unsure at all n locations
agcttcgtgtccttcttcatgcgcctaggggtctctnttatagccccaaggcagctatgagccggtggaggccaacttggaaggctaaacttgccttctgtcgggtggtgcatcggacagtccggtgcaccaccggacagtcactgaagctgtccggtgcgtgatctccttccttttctgacgcaaccgaccgttggtcctccgggtcgattggcgcaccggacactgtccggtgcacaccggacagtccggtgaattatagccgtacgtctcttctttttcccaagagcagccaattcaccgccggccagcctggcgcaccggacagtgttcggtgcaccaccggacagtccggtgttgccaggccgagctggtgtggctgcacatagccaactctttcccttttcttctcttcttctttagtcactggttctagcacttggataaccatgttagtacatagaactattcaccaagtctagaaacatac

SEQ ID NO: 20367 - DNA, 322 bp, Zea mays
agctcttaaagggagaacacattttgggactaacaaatgtttatttttgagaaagataagggttgtagcgcatgtcaagcacgaaagcaagttggcgcccaccattcacacaagaacataatgacaaccgacaggccactggaactacttcacatggatctattcagcccgatagcttacataagcatcggcgggaagaagtattgtctagtaattgtggatgactattctcgcttcacttgggtcttctttttacaggaaaaatcacaaacccaagagaccttaaagggattcttgagacgatctccaaatgagttcggat

SEQ ID NO: 20368 - DNA, 458 bp, Zea mays
  unsure (1)..(458): unsure at all n locations
ctctctcctcgccgatgactaccgatgccggccaatcttcttctctgcacgcagagcctgccaccgacccaccgctttgtaggatctaggacaccgactagagggggagtgaatagacggttttgactaaaataaaaaacactatagaaatttgatcaatatgacaagaggtataaattctctagtaacaacaagtaaacaatctatgagaatcaattatggtgattgtatactcgaagaacaatatgcaaaatactaatcacttgcacgacaataagtaatgcaagaaaagaaagacaccgcgatttatcccgtggtatcggtgatttgccgatcacccctaatccacgttgaggtggacttcaagctctcacttgctcctctatcaagacacgacttgatctttgagccaagtggacaagaaatcactcaatatctcgtttncactaatgtcacct

SEQ ID NO: 20369 - DNA, 454 bp, Zea mays
  unsure (1)..(454): unsure at all n locations
aagaagacgaagttgtcgttttcaagagcttctttagagcaggacttcggtttgccttgaatgacaagataggggaggttttgaagaacttcgagttataccttcatcaattgacacccaatgctatcgttaggcttagagtttttatatgggctctgcgaaggcagggtatggatgctaatgccgaagctctttgccgagtacatgaactgaattatcagacgaaggctagggcggatggtcttcataagaacttccgctgctacaactttgcttatagaaaagatacaaaggctccagtgattggctatcgcaccanatggacaaccgagtggatgaatgaatggttntatgtgaaagaagacgagaagagatgggagaagctgatgactatggtaatgaagcctatgagactaagcttcgggatgaccangcccttgtgccatatgcaact

SEQ ID NO: 20370 - DNA, 443 bp, Zea mays
  unsure (1)..(443): unsure at all n locations
ctagtcggcggggccttattctacccatgttagtcttagcaattaagcaagtgtcgagttcagctctatcaaaatctaccaagtatagctgaccctccaacactcccttaaatgctattgaatcatcacttcttctaaagacagtgacacctacatcagtgaaaagacagttgtaacccattntgcatatttgagatacagaaagcaaattgtaatctaatgaatctacaagacaaacatttgaaatagaatggtcaggtgaaatagcaattntacccaaccctttgaccaaaccttgatttccatccncgaatgtgatagctcgttggggatcttggttttctcatatgaggagaacatcttcttctcccctgtcatgtggtttgtgcacccactgtcgataatccaacttgagcctccggatgcataaacctacaaacaag

SEQ ID NO: 20371 - DNA, 460 bp, Zea mays
  unsure (1)..(460): unsure at all n locations
gcttggagaaagaaaggagaanactgtgaacatctctatgctaaaactggcccaatacagcccacgcccaggcgaaatgtgccgcgcgcgcccgcgatggcggttttacacagaagacctcggcggtttgaaaatctagcaaggaacccgcgcactatttgtttgtctcactgacgtttgcacccagaccctcgaagttttattccttcacattccgaggtccacgacgtcgcatggcggagaaccgagctccggcgagcctacaccgactggattactcaactaccggtgctctcgtgtggcagacaccaaattgaacccttaacaaacatttcccctcgcttaattgctggatttaagctctacatcatcctgtccacggtgacagcgagcacaacagacagtatgaaatgttctcggtgatctaaggggtcctagcttaatcggctgggtcgggatg

SEQ ID NO: 20372 - DNA, 365 bp, Zea mays
  unsure (1)..(365): unsure at all n locations
cgatggtgtttgactataagctcgagaccatttgtcaattcttgggatccctggacctggggttaaacccacacatgcttcgctggccgctttatcttgaggttgatgttgatncattgtcttcatcggggttaacggctaacccccttaacaggagcgttgatatgcacttggtgaagatgctgtcgactctgatcttgacagattaagagagggtgcangatgccaaccggacaggttgcaaagggaagagtatagatagaatatgtaaggtagaaaaggtaagcatagatggcttaaagagagagagagaagggagagcacccagctacttaactctacgacactcagctagtaaacggatg

SEQ ID NO: 20373 - DNA, 451 bp, Zea mays
  unsure (1)..(451): unsure at all n locations
agcttctcgcggtcgcttcctaatcacccatagcttcttcatgggaagctggtggctgttgtggtggtggacggatggggcgaggccaacactgaccagtacaactgcatccatgtcgctcagactcatgtcatggactcactaaagaatatgtatatgctatcctttacacctgcccacctgcttgggttgcgtatatgctcttttttggtcgataattttacagcaatagaaatctatatatcttggtcctcattgctcgtaagtatgcattggacgcatggttgtcgggaacctaattcttagctctagctcagtgatgactggtctaattttgaattaatacttgtttgtaatggcttntagattttatacataatcttgattaaggttaagttctacagatatgttatatgctttttccacgccaatactcactattatgcatatg

SEQ ID NO: 20374 - DNA, 387 bp, Zea mays
  unsure (1)..(387): unsure at all n locations
tcccacatgggtagncggcgggccagattttctctgttagtcttagcaattaaacatgtgtcgagctcagctctatcaaaatctactaagtatagctgaccctctaacacacccttaaatgctattgaatcatcacttcttctaaagacagtgacacctatatcagtaaaaagacagttgtagcccatttgacataattgggaaacagaaagcaagttgtaatctaatgaatctacaagaaaaacattggaaatagaatggtcaggagatatcgcaattttacccaaacctttgaacaaaccttgatttccatccccgaatgtgataagctcgtggggatcctggttnttctcatatgaagagaacatctttttctctccgtcatgt

SEQ ID NO: 20375 - DNA, 385 bp, Zea mays
  unsure (1)..(385): unsure at all n locations
gcttagtgcaagcgtgtggaatggaaagacaactattcttaggtgtatgtatggcttgagtgaagggcaaggtggaacggagggaaaaccggaggaggcgcgcggcgaccggcggcanggctgttccgccttgcgtctgggctgaaaacgaggtgttcgccatggcgcacgggccgaaaaccgaggctcgggcacgaactcgaaaataagctaagttcaagcatgtggaaagacaccgaacatacagtgtatgtctttggtgaagggcacagtggaacggagggaaaacgacacggaggcacgcggcgactggcggcatggctgttccgccttgcgtntgggctgaaaacgaggcgttcgccatgtcgcgcgggccgaaaacaac

SEQ ID NO: 20376 - DNA, 245 bp, Zea mays
ccatgccgcccgtcgccttgcgcctacgtgccgttgtccctccgttgcgccatgcccttcacccaagacatacatattaccttcggtgactttgcacacgcttggacttagcttatttccggggccatgcacgaacctcggttttccgtccctgcgccatgggcgaacccctcgttctctgtccatacgcgatgtcgaacagacatgccgccccgtcgccatcctgcccttcacccaaagcatac

SEQ ID NO: 20377 - DNA, 483 bp, Zea mays
  unsure (1)..(483): unsure at all n locations
agcttgcttcggcctaggggtccttcgtatcatcaatagagaaagcagcttcngctttggccaaagttttcacatgttcacaacctgacttctccaaaatagctgcaattcccctcgcaccaaagaaggtgcagacgtcctctcggtcactcaaaatttcctcaaaggcttcggcctcgctgctgatccattcaattgggccttcaggatcaccccgtatgaagttatcttcggttgaatatgcgccaacgttggtgaagctagtttttatcttcttcacacattccacagaattttcataacatctttcttttgatgagcgaagttctgcaactggtttcttcccaataatttttcagtaatcactggcatctcggtcagcttcggcaatagcgcatttcaattcggcttcngccagttgcttttggaggttttcaatctcgttcctttggaatttagatggggtcttnngtgtagcttcat

SEQ ID NO: 20378 - DNA, 420 bp, Zea mays
  unsure (1)..(420): unsure at all n locations
cactcaacttcatgngacagttgtatttctgtccaaacagacttttgtaaaaacccacaatatgggacatcagcttcttctgctattgccaccctaagattttcctcggctttgaaggcatctatttgatcatattggtcaagcacaatacctaaatttttcatgacaagagctaggttttcatttttttcttgattcagaacaataaacgggttcgtgaatgtggtaccttgtggagcgtncttctcttgagctcttctagtagctttcttcagaatagaaatgccatctctaggaactctagaacttgccctcatcacggggtatttccttttggcttttttcttcttcagnttcttacttgcagcaatggttcaccttngctccacatctcccatcgaaaaatcactatcccaatca

SEQ ID NO: 20379 - DNA, 462 bp, Zea mays
  unsure (1)..(462): unsure at all n locations
acgtcttcagactgacctattatctattatnttaggannaatgagcatatggtagactcttgtcccaactacctccatgctttagggcacaagctcttaaaatatcctcaagtacttggttagttctctcagtctggccatcagtttggggtgataggacgagctaaagttcaacttcgtatccatgttctcatgaaggctcttccaaaatcttgaggtgaattgggatcctcgatcagaaacaatcttcttcggtacaccatgtaagcacacaattcgagccatatataactctgccaattgagaacccttgtaagtagtcttgaccgaaatgaagtgagctactttggtcaatctatccacgatcagccatatggaatcataacccttcggggtgcgaggcaacccgataatgaaatccataccaatnntcttccacttnncatttgagcactttaatgg

SEQ ID NO: 20380 - DNA, 443 bp, Zea mays
  unsure (1)..(443): unsure at all n locations
agctggtctgggtcgtctaggtcagtgatgcttgcccattagtttatttgggcagccactaccagtcatggcctgtccgagcaacgaggtggtcgacggcgtgcacatcgtggccagggtctgttctagagaagaaatagaaaattaaggaccttaatgtaaagtgtcagtgagacacgtgaatagtgtcgaggactgttgttctgattnttgaactggtagggacatttcttgtaaaccaacagcgcgggcgcgcgcgagcagggggcatttgcctatcgtgggtcgtctcggactaaattcagcctagtactgttggtctttttcctttatctttttctactaggcttangaaatccataaaanatataggaaaaatgctaaaaatatgagacccaatttgtggacttctaaatttcatagtatttaataaaaataatttt

SEQ ID NO: 20381 - DNA, 439 bp, Zea mays
  unsure (1)..(439): unsure at all n locations
agcttgctctatgtgtattggtagaccatggctatttgattatgacaccgtgcatcatggtaaaacacatcactactctcttatgcataatgagaagaagcttgtattgcaccccatgtcccccgatgctattttgaaggatgaagttgctagagcttgcaaagagaaaaataaatctgttcataataaaaatctatgtgctgcaaaggagttggtacaacataagagtgacaattctaaatctactcaagtgaggaagacagaaatacaactgaaaagtgcttgttttcttgcttccaaatctgatttgcttgaattaaatgatgttgcttcaatctgctatgtatttatttgcaaggatgctntgttctcacttcacaacataccatctactttgccttctactgtcactaatcttttgcaggaatatgctgatgta

SEQ ID NO: 20382 - DNA, 315 bp, Zea mays
  unsure (1)..(315): unsure at all n locations
acgacaaaccgacccgatnctatacattcttgtctcatcaatagggaaggtcaaggaaccaagctggtcgaattaatttgtattggttcatatcgtgatgtgttgactgtgatgttgtgcctatggatgcttgtaatattctgctangnagaccatggcaatttgattcagattgtatgcatcatggtagatcaaatcaatattctctcatataccatgataagaaaattatattgcttcccatgtcccctgaggctattgtgcgtgatgatgttgctaaagctaccaaagcttaaactgagaacaacaagaata

SEQ ID NO: 20383 - DNA, 277 bp, Zea mays
  unsure (1)..(277): unsure at all n locations
tgcaagcttctgcattatgtgcaagcttacaacataattgttgtttcataccacctctgtatgatattatgaggaatcgagaagctactggaatgatcggaaaatgggctgcagagctcaatgaaatttgtattggatatgttcatagatcttggatacatcacaggcgctggcagactatattgctgattggacgccatggactcatgaggatgaaactaattaagacaacgaagcctggacagtgttntgtgatggatcttggggaaccttcgga

SEQ ID NO: 20384 - DNA, 459 bp, Zea mays
  unsure (1)..(459): unsure at all n locations
agcttaaagccatggtaagtagcatatgcaagtaatatgttaattgactcaagcctagctacgggtgcataggtttcaccgaaatccaaaccttcgacttgtgaatatcccttggccacaagtcaggctttgntccttgtcaccacaccatgctcgtcttgcttggtgcggaacacccacttggtccctacaacattntgattaggacgtggaaccaaatgccatacctcattcctgtgaagtgttgangctctctgcatcgcatcaccaatccgaatcttgagtgcttctctacttgtgtggtctatagaggaacaaaagagaatgctcacnaaatgtgcacacgagactagtagtaccccttatgaaattgccaggaggtgtcacgggtgatctcgtgatgcttgtggactctggggtggggcttgatctcatccctctgctgacattgatctccct

SEQ ID NO: 20385 - DNA, 435 bp, Zea mays
  unsure (1)..(435): unsure at all n locations
tgctaatgaactcctcaccggtaacaaacacaaagntgattactttagagtttttgagtgtagatgttntattcttaacaagaaagccaagatctcaaagtttgctcctaaagtgggcgagggtttcttgcttggttatgcatcaaatacacacggataccatgttttcaacaactacatcagtcttattgaaatagcagtagatgtgacatttgatgaatctaatggctcgcaagggcatgtttctggtgatgctgcangaaatgaagagctaccttgtaaagccatcaagaagcttgcaattggtgaagtaaagcctcaagagaaggatcatgatgaaggaatgatttggataaccaatgagatattngatgggagtacaagagtggtgggtgatgaatcctncatccaggtaaacccatcaacctcaagtca

SEQ ID NO: 20386 - DNA, 231 bp, Zea mays
tgtggaactgggagaggatatgatcacttgggtgtgtctataattgaatgctacagctcttgtgagtagttgaagcgggaaaacttggatgacttgaatgtggggtggttgggggtatttataaccccaaccaccaaactatccgtttggtggacgctgctgtctcttggagcaccggaccccaccggacactgttcggtgcgccagccacgttaccatgctgctgggttc

SEQ ID NO: 20387 - DNA, 479 bp, Zea mays
ctaagcttccacctctgaactactcggttgatcgctctcactgttggctttattattctgacctgaagaccttcccaactagtgttctggaggctgcatgtatttcacattgcccagcatggacctcctccagaagttgctttccagtggacgggagaatgcacttcatgaggacgcctgatgcaccccttctgtataatgtcttcccaatgagtgtatagtgagccgactgtctggcaatgcgctctgtcgagttcttgtcggctgggtcttcttcatcctttatatacttaatgatcagccttcttcaatcatcatagtctgactctggttgatctattattttgcactcttctgtttgatccattgagatactctgctgttgaatttattgcatgaagactccgggtgggacctgagtttcacttgttgccaactagtgacagtcatcgggtacagggtccgaatttttctacata

SEQ ID NO: 20388 - DNA, 380 bp, Zea mays
  unsure (1)..(380): unsure at all n locations
cattcctactgggatgcaaatctataataccacctaagtaaaaggtgaagaagctccaaagttgttcctaccgggatgcagagctgaaatgccacctcaagtaaaggtgaagaagatccaaagtcgttcctaaagggatgcagagcttatcacaaaagtcgtttctacggggatgcagagcttaaataccacctatagtaaaggtgaagagacttcaaagtcattcctaaggaaatgcagagccttattttttgtgaagcattcgtgcattaacatcaggtgcatcatatcatcatgtcatactacatagcattgcatcattcatcatcntgcatcattcgaaatagtggaaaagaaacatattgttcttcaaacatact

SEQ ID NO: 20389 - DNA, 242 bp, Zea mays
  unsure (1)..(242): unsure at all n locations
agctaatgatctttcattaagtagataattgatagagccttgtatattatcttctctctcagntgtttagagatctatccatagtgggatgtactataagataagataaattccttgcaatataaaaatgtcgatactgcatgttactctgatgtccaccatctaggatcactaatntgaagtcatttaatctatgatgattgatttccagaatgatgatttatttgcgcctcactcatata
